United States Patent Application Publication US 2007/0214517 A1 - sequence listing, part 23

SEQ ID NO: 28024 - protein, 112 aa, Arabidopsis thaliana
  peptide (1)..(112): Ceres Seq. ID no. 12333589
  misc_feature (31)..(84): Pfam Name: RNA polymerase Rpb6 Pfam Description: RNA polymerase Rpb6
  misc_feature (1)..(103): Homolog of NCBI NO: 13786166 NR Description: polymerase II [Rattus norvegicus]
  misc_feature (1)..(103): Homolog of NCBI NO: 6522686 NR Description: RNA polymerase common subunit RPB6 [Gallus gallus]
  misc_feature (1)..(103): Homolog of NCBI NO: 31214787 NR Description: ENSANGP00000017467 [Anopheles gambiae]
  misc_feature (1)..(105): Homolog of NCBI NO: 39597419 NR Description: Hypothetical protein CBG03063 [Caenorhabditis
  misc_feature (1)..(104): Homolog of NCBI NO: 17864588 NR Description: RNA polymerase II 18kD subunit CG1163-PA
  misc_feature (1)..(105): Homolog of NCBI NO: 17531543 NR Description: Dna-directed RNA polymerase Iib [Caenorhabditis
  misc_feature (1)..(111): Homolog of NCBI NO: 4960150 NR Description: DNA-directed RNA polymerase IIa [Nicotiana
  misc_feature (1)..(111): Homolog of NCBI NO: 22093730 NR Description: putative DNA-directed RNA polymerase Iib
  misc_feature (1)..(112): Homolog of NCBI NO: 15224039 NR Description: putative DNA-directed RNA polymerase II subunit
  misc_feature (1)..(112): Homolog of NCBI NO: 15242235 NR Description: DNA-directed RNA polymerase II subunit-like
MKENDDVNGEPIEAEDKVETEPVQRPRKTSKFMTKYERARILGTRALQISMNAPVMVELEGETDPLEIAMKELRQRKIPFTIRRYLPDGSFEEWGVDELIVEDSWKRQVGGD

SEQ ID NO: 28025 - protein, 80 aa, Arabidopsis thaliana
  peptide (1)..(80): Ceres Seq. ID no. 12333590
  misc_feature (1)..(52): Pfam Name: RNA polymerase Rpb6 Pfam Description: RNA polymerase Rpb6
  misc_feature (1)..(71): Homolog of NCBI NO: 13786166 NR Description: polymerase II [Rattus norvegicus]
  misc_feature (1)..(71): Homolog of NCBI NO: 6522686 NR Description: RNA polymerase common subunit RPB6 [Gallus gallus]
  misc_feature (1)..(71): Homolog of NCBI NO: 31214787 NR Description: ENSANGP00000017467 [Anopheles gambiae]
  misc_feature (1)..(73): Homolog of NCBI NO: 39597419 NR Description: Hypothetical protein CBG03063 [Caenorhabditis
  misc_feature (1)..(72): Homolog of NCBI NO: 17864588 NR Description: RNA polymerase II 18kD subunit CG1163-PA
  misc_feature (1)..(73): Homolog of NCBI NO: 17531543 NR Description: Dna-directed RNA polymerase Iib [Caenorhabditis
  misc_feature (1)..(79): Homolog of NCBI NO: 4960150 NR Description: DNA-directed RNA polymerase IIa [Nicotiana
  misc_feature (1)..(79): Homolog of NCBI NO: 22093730 NR Description: putative DNA-directed RNA polymerase Iib
  misc_feature (1)..(80): Homolog of NCBI NO: 15224039 NR Description: putative DNA-directed RNA polymerase II subunit
  misc_feature (1)..(80): Homolog of NCBI NO: 15242235 NR Description: DNA-directed RNA polymerase II subunit-like
MTKYERARILGTRALQISMNAPVMVELEGETDPLEIAMKELRQRKIPFTIRRYLPDGSFEEWGVDELIVEDSWKRQVGGD

SEQ ID NO: 28026 - DNA, 1153 bp, Arabidopsis thaliana
  misc_feature (1)..(1153): Ceres Seq. ID no. 12324234
  misc_feature: MA Experiment ID: 20000265 Result: Down-regulated in Transcription
  misc_feature: MA Experiment 20000265 PARAMETER Experiment Name: At_Open_Flower_P Parameter: Age (day) Value: 21
  misc_feature: MA Experiment 20000265 PARAMETER Experiment Name: At_Open_Flower_P Parameter: Plant Line Value: WS
  misc_feature: MA Experiment 20000265 PARAMETER Experiment Name: At_Open_Flower_P Parameter: Tissue Value: Closed Flower vs. Whole Plant
  misc_feature: MA Experiment ID: 20000286 Result: Down-regulated in Transcription
  misc_feature: MA Experiment 20000286 PARAMETER Experiment Name: At_Open_Flower_P Parameter: Age (day) Value: 21
  misc_feature: MA Experiment 20000286 PARAMETER Experiment Name: At_Open_Flower_P Parameter: Plant Line Value: WS
  misc_feature: MA Experiment 20000286 PARAMETER Experiment Name: At_Open_Flower_P Parameter: Tissue Value: Half Open vs. Whole Plant
aatcatacgctcctgagatcctcatgacttgttcttaccgtactccgcgagacatgcgattgatgattcttgactgtattcattgagaaaaactgttcgcaaaaaccttgagcttcatcatcgtccattactcacctttcagtttcagatgcccaagcaaaaagctccaaggaagcagctcaagtcctataaactcaaacacatcaacaagagtattcaagagggagatgctgtgttgatgcggtcgtcggagcctggaaaaccgtcgtacgtagcgagggtagaggcgatcgagacggacgcgcgtggatcgcacgcgaaagttcgtgtgaggtggtattatcgccctgaggaatctatcggagggaggagacaattccatggagccaaggaggtttttctctctgaccacttcgattttcaaagcgccgatacgattgaaggaaagtgtaaggttcacagtttcagtagctacaccaaacttgactctgttggaaacgacgacttcttctgtcgtttcgagtacaattccactaccggcgcgtttgatcctgacagagtcaccgtgttctgcaagtgtgagatgccgtataacccagatgacttgatggtgcaatgcgaggagtgttctgagtggtttcatccttcttgtataggaacaacaatagaggaagctaaaaagccagataacttctactgcgaagagtgttccccacaacagcagaatttgcacaactctaattcaacttccaataacagagatgctaaggtgaatggaaagcgcagcctggaggtaactaaatcgaagaacaaacacactaagcgaccaggttaacataaacttgtaaaggctatagatatctggttggtgagtctgagtatcaatcgtgtaatctacaaaggtggttttgttttctttccctctctagttttttctttcttaaaaaatgagggtttaggtttgttggcttgattgttgtataatttatatgtatagcgtatggtggtttctcatctcctttagttgtcacatataaaatttgggtaaaatggtttgtttataataagaaaacaaaacaaacaaacaaacaaagagagtgttggttccttatttgtttgttttcattgtgaactctagaaacccttcattctt

SEQ ID NO: 28027 - protein, 228 aa, Arabidopsis thaliana
  peptide (1)..(228): Ceres Seq. ID no. 12324235
  misc_feature (21)..(137): Pfam Name: BAH domain Pfam Description: BAH domain
  misc_feature (1)..(187): Homolog of NCBI NO: 34904940 NR Description: OSJNBa0077M12.13 [Oryza sativa (japonica
  misc_feature (31)..(208): Homolog of NCBI NO: 15234729 NR Description: receptor like protein (fragment); protein id:
  misc_feature (26)..(208): Homolog of NCBI NO: 11292613 NR Description: receptor like protein - Arabidopsis thaliana
  misc_feature (5)..(222): Homolog of NCBI NO: 629783 NR Description: ES43 protein - barley
  misc_feature (1)..(212): Homolog of NCBI NO: 34897170 NR Description: putative DNA-binding protein
  misc_feature (1)..(212): Homolog of NCBI NO: 37573088 NR Description: receptor like protein [Oryza sativa (japonica
  misc_feature (1)..(212): Homolog of NCBI NO: 33146914 NR Description: putative ES43 protein [Oryza sativa (japonica
  misc_feature (1)..(208): Homolog of NCBI NO: 7484948 NR Description: ES43 protein homolog F19H22.200 - Arabidopsis
  misc_feature (1)..(228): Homolog of NCBI NO: 21595796 NR Description: ES43 like protein [Arabidopsis thaliana]
  misc_feature (1)..(228): Homolog of NCBI NO: 18420377 NR Description: ES43 like protein
MPKQKAPRKQLKSYKLKHINKSIQEGDAVLMRSSEPGKPSYVARVEAIETDARGSHAKVRVRWYYRPEESIGGRRQFHGAKEVFLSDHFDFQSADTIEGKCKVHSFSSYTKLDSVGNDDFFCRFEYNSTTGAFDPDRVTVFCKCEMPYNPDDLMVQCEECSEWFHPSCIGTTIEEAKKPDNFYCEECSPQQQNLHNSNSTSNNRDAKVNGKRSLEVTKSKNKHTKRPG

SEQ ID NO: 28028 - protein, 198 aa, Arabidopsis thaliana
  peptide (1)..(198): Ceres Seq. ID no. 12324236
  misc_feature (1)..(107): Pfam Name: BAH domain Pfam Description: BAH domain
  misc_feature (1)..(157): Homolog of NCBI NO: 34904940 NR Description: OSJNBa0077M12.13 [Oryza sativa (japonica
  misc_feature (1)..(178): Homolog of NCBI NO: 15234729 NR Description: receptor like protein (fragment); protein id:
  misc_feature (1)..(178): Homolog of NCBI NO: 11292613 NR Description: receptor like protein - Arabidopsis thaliana
  misc_feature (1)..(192): Homolog of NCBI NO: 629783 NR Description: ES43 protein - barley
  misc_feature (1)..(182): Homolog of NCBI NO: 34897170 NR Description: putative DNA-binding protein
  misc_feature (1)..(182): Homolog of NCBI NO: 37573088 NR Description: receptor like protein [Oryza sativa (japonica
  misc_feature (1)..(182): Homolog of NCBI NO: 33146914 NR Description: putative ES43 protein [Oryza sativa (japonica
  misc_feature (1)..(178): Homolog of NCBI NO: 7484948 NR Description: ES43 protein homolog F19H22.200 - Arabidopsis
  misc_feature (1)..(198): Homolog of NCBI NO: 21595796 NR Description: ES43 like protein [Arabidopsis thaliana]
  misc_feature (1)..(198): Homolog of NCBI NO: 18420377 NR Description: ES43 like protein
MRSSEPGKPSYVARVEAIETDARGSHAKVRVRWYYRPEESIGGRRQFHGAKEVFLSDHFDFQSADTIEGKCKVHSFSSYTKLDSVGNDDFFCRFEYNSTTGAFDPDRVTVFCKCEMPYNPDDLMVQCEECSEWFHPSCIGTTIEEAKKPDNFYCEECSPQQQNLHNSNSTSNNRDAKVNGKRSLEVTKSKNKHTKRPG

SEQ ID NO: 28029 - DNA, 819 bp, Arabidopsis thaliana
  misc_feature (1)..(819): Ceres Seq. ID no. 13621966
  misc_feature: MA Experiment ID: 108577 Result: Up-regulated in Transcription
  misc_feature: MA Experiment 108577 PARAMETER Experiment Name: At_42deg_Heat_cDNA_P Parameter: Temperature (deg C) Value: 42 vs. 22
  misc_feature: MA Experiment 108577 PARAMETER Experiment Name: At_42deg_Heat_cDNA_P Parameter: Timepoint (hr) Value: 6
  misc_feature: MA Experiment 108577 PARAMETER Experiment Name: At_42deg_Heat_cDNA_P Parameter: Tissue Value: Aerial
  misc_feature: MA Experiment ID: 20000112 Result: Up-regulated in Transcription
  misc_feature: MA Experiment 20000112 PARAMETER Experiment Name: At_42deg_Heat_cDNA_P Parameter: Temperature (deg C) Value: 42 vs. 22
  misc_feature: MA Experiment 20000112 PARAMETER Experiment Name: At_42deg_Heat_cDNA_P Parameter: Timepoint (hr) Value: 2
  misc_feature: MA Experiment 20000112 PARAMETER Experiment Name: At_42deg_Heat_cDNA_P Parameter: Tissue Value: Aerial
  misc_feature: MA Experiment ID: 20000113 Result: Up-regulated in Transcription
  misc_feature: MA Experiment 20000113 PARAMETER Experiment Name: At_42deg_Heat_cDNA_P Parameter: Temperature (deg C) Value: 42 vs. 22
  misc_feature: MA Experiment 20000113 PARAMETER Experiment Name: At_42deg_Heat_cDNA_P Parameter: Timepoint (hr) Value: 8
  misc_feature: MA Experiment 20000113 PARAMETER Experiment Name: At_42deg_Heat_cDNA_P Parameter: Tissue Value: Aerial
  misc_feature: MA Experiment ID: 20000224 Result: Down-regulated in Transcription
  misc_feature: MA Experiment ID: 20001560 Result: Down-regulated in Transcription
  misc_feature: MA Experiment 20001560 PARAMETER Experiment Name: At_Drought_Soil_Dry_P Parameter: Age (day) Value: 28
  misc_feature: MA Experiment 20001560 PARAMETER Experiment Name: At_Drought_Soil_Dry_P Parameter: Organism Value: A. thaliana
  misc_feature: MA Experiment 20001560 PARAMETER Experiment Name: At_Drought_Soil_Dry_P Parameter: Plant Line Value: WS
  misc_feature: MA Experiment 20001560 PARAMETER Experiment Name: At_Drought_Soil_Dry_P Parameter: Post Timepoint (hr) Value: None
  misc_feature: MA Experiment 20001560 PARAMETER Experiment Name: At_Drought_Soil_Dry_P Parameter: Post-Treatment Value: None
  misc_feature: MA Experiment 20001560 PARAMETER Experiment Name: At_Drought_Soil_Dry_P Parameter: Timepoint (day) Value: 14
  misc_feature: MA Experiment 20001560 PARAMETER Experiment Name: At_Drought_Soil_Dry_P Parameter: Treatment Value: Drought vs. No Drought
atcccctcgtcgctgcgtctctctcccgcaaccttcgattttcgtttattcgcatccatcggagagagaaaacaatcaataagcgaccatgttggtgtaccaagatcttctcaccggtgatgagcttctgtctgactctttcccttacaaggagattgagaatggaatcctctgggaagtagaaggaaagtgggttactgtgggagctgtagatgttaacattggtgccaatccatctgctgaagaaggtggtgaggatgaaggtgttgatgactctactcaaaaggttgttgacattgtcgacaccttcagacttcaggagcaaccaacttatgacaagaagggattcatcgcttacattaagaaatacattaagcttttgacacccaagctcagcgaagaagatcaagctgtcttcaagaagggtattgagggagctaccaagtttttgctccccaggctcagtgacttccaattctttgttggggagggtatgcatgatgacagcactttggtctttgcttactacaaggagggttcaactaacccaacatttttgtacttcgctcatggtttgaaggaggtcaagtgctgagagagaagctctcgttgggttactgtggtcggtcgcagcgactctctaagtttatgtttctttatattgtcctgtgtttcgtcgtcgtcccctattaaaattacctgccagtttacttttctctcttcttgttttctgtgttggaagattctcaagttatttattccgcaaaaaacggtttatcatttacaattagttgaattttggtcgttactttttgtgcc

SEQ ID NO: 28030 - protein, 168 aa, Arabidopsis thaliana
  peptide (1)..(168): Ceres Seq. ID no. 13621967
  misc_feature (1)..(165): Pfam Name: Translationally controlled tumour protein Pfam Description: Translationally controlled tumour protein
  misc_feature (1)..(168): Homolog of NCBI NO: 549063 NR Description: Translationally controlled tumor protein homolog
  misc_feature (1)..(168): Homolog of NCBI NO: 2507443 NR Description: Translationally controlled tumor protein homolog
  misc_feature (1)..(168): Homolog of NCBI NO: 9979196 NR Description: Translationally controlled tumor protein homolog
  misc_feature (1)..(168): Homolog of NCBI NO: 1174626 NR Description: TRANSLATIONALLY CONTROLLED TUMOR PROTEIN HOMOLOG
  misc_feature (1)..(168): Homolog of NCBI NO: 20140684 NR Description: Translationally controlled tumor protein homolog
  misc_feature (1)..(168): Homolog of NCBI NO: 21595816 NR Description: translationally controlled tumor protein-like
  misc_feature (1)..(168): Homolog of NCBI NO: 15228276 NR Description: translationally controlled tumor protein -related
MLVYQDLLTGDELLSDSFPYKEIENGILWEVEGKWVTVGAVDVNIGANPSAEEGGEDEGVDDSTQKVVDIVDTFRLQEQPTYDKKGFIAYIKKYIKLLTPKLSEEDQAVFKKGIEGATKFLLPRLSDFQFFVGEGMHDDSTLVFAYYKEGSTNPTFLYFAHGLKEVKC

SEQ ID NO: 28031 - DNA, 1087 bp, Arabidopsis thaliana
  misc_feature (1)..(1087): Ceres Seq. ID no. 13497134
  misc_feature: MA Experiment ID: 108434 Result: Down-regulated in Transcription
  misc_feature: MA Experiment 108434 PARAMETER Experiment Name: At_Root_Tips_cDNA_P Parameter: Tissue Value: Root Tips
  misc_feature: MA Experiment ID: 108435 Result: Down-regulated in Transcription
  misc_feature: MA Experiment 108435 PARAMETER Experiment Name: At_stm_Mutants_cDNA_P Parameter: Plant Line Value: wt Landsburg vs stm
  misc_feature: MA Experiment 108435 PARAMETER Experiment Name: At_stm_Mutants_cDNA_P Parameter: Tissue Value: Shoot Apical Meristem Region
  misc_feature: MA Experiment ID: 108462 Result: Up-regulated in Transcription
  misc_feature: MA Experiment 108462 PARAMETER Experiment Name: At_Germinating_Seeds_cDNA_P Parameter: Age (day) Value: 2 vs. 0
  misc_feature: MA Experiment 108462 PARAMETER Experiment Name: At_Germinating_Seeds_cDNA_P Parameter: Tissue Value: Germinating Seeds
  misc_feature: MA Experiment ID: 108463 Result: Up-regulated in Transcription
  misc_feature: MA Experiment 108463 PARAMETER Experiment Name: At_Germinating_Seeds_cDNA_P Parameter: Age (day) Value: 3 vs. 0
  misc_feature: MA Experiment 108463 PARAMETER Experiment Name: At_Germinating_Seeds_cDNA_P Parameter: Tissue Value: Germinating Seeds
  misc_feature: MA Experiment ID: 108501 Result: Down-regulated in Transcription
  misc_feature: MA Experiment 108501 PARAMETER Experiment Name: At_ap2_floral_buds_cDNA_P Parameter: Plant Line Value: ap2 (Ler.)
  misc_feature: MA Experiment 108501 PARAMETER Experiment Name: At_ap2_floral_buds_cDNA_P Parameter: Tissue Value: Closed Flower
  misc_feature: MA Experiment ID: 108561 Result: Up-regulated in Transcription
  misc_feature: MA Experiment 108561 PARAMETER Experiment Name: At_100uM_ABA_cDNA_P Parameter: Timepoint (hr) Value: 6
  misc_feature: MA Experiment 108561 PARAMETER Experiment Name: At_100uM_ABA_cDNA_P Parameter: Tissue Value: Aerial
  misc_feature: MA Experiment 108561 PARAMETER Experiment Name: At_100uM_ABA_cDNA_P Parameter: Treatment Value: 100uM ABA vs. No Treatment
  misc_feature: MA Experiment ID: 108574 Result: Down-regulated in Transcription
  misc_feature: MA Experiment 108574 PARAMETER Experiment Name: At_Wounding__cDNA_P Parameter: Timepoint (hr) Value: 1
  misc_feature: MA Experiment 108574 PARAMETER Experiment Name: At_Wounding__cDNA_P Parameter: Tissue Value: Aerial
  misc_feature: MA Experiment 108574 PARAMETER Experiment Name: At_Wounding__cDNA_P Parameter: Treatment Value: Wounding vs. No Wounding
  misc_feature: MA Experiment ID: 108594 Result: Up-regulated in Transcription
  misc_feature: MA Experiment 108594 PARAMETER Experiment Name: At_Ler-rhl_Root_cDNA_P Parameter: Plant Line Value: null
  misc_feature: MA Experiment ID: 108595 Result: Down-regulated in Transcription
  misc_feature: MA Experiment 108595 PARAMETER Experiment Name: At_Ler-pi_Ovule_cDNA_P Parameter: Plant Line Value: null
  misc_feature: MA Experiment ID: 108605 Result: Up-regulated in Transcription
  misc_feature: MA Experiment 108605 PARAMETER Experiment Name: At_100uM_ABA_cDNA_P Parameter: Timepoint (hr) Value: 6
  misc_feature: MA Experiment 108605 PARAMETER Experiment Name: At_100uM_ABA_cDNA_P Parameter: Tissue Value: Aerial
  misc_feature: MA Experiment 108605 PARAMETER Experiment Name: At_100uM_ABA_cDNA_P Parameter: Treatment Value: 100uM ABA vs. No Treatment
  misc_feature: MA Experiment ID: 20000069 Result: Up-regulated in Transcription
  misc_feature: MA Experiment 20000069 PARAMETER Experiment Name: At_100uM_ABA_Mutants_cDNA_P Parameter: Plant Line Value: CS23
  misc_feature: MA Experiment 20000069 PARAMETER Experiment Name: At_100uM_ABA_Mutants_cDNA_P Parameter: Timepoint (hr) Value: 6
  misc_feature: MA Experiment 20000069 PARAMETER Experiment Name: At_100uM_ABA_Mutants_cDNA_P Parameter: Tissue Value: Aerial
  misc_feature: MA Experiment 20000069 PARAMETER Experiment Name: At_100uM_ABA_Mutants_cDNA_P Parameter: Treatment Value: 100uM ABA vs. No Treatment
  misc_feature: MA Experiment ID: 20000070 Result: Up-regulated in Transcription
  misc_feature: MA Experiment 20000070 PARAMETER Experiment Name: At_100uM_ABA_Mutants_cDNA_P Parameter: Plant Line Value: CS24
  misc_feature: MA Experiment 20000070 PARAMETER Experiment Name: At_100uM_ABA_Mutants_cDNA_P Parameter: Timepoint (hr) Value: 6
  misc_feature: MA Experiment 20000070 PARAMETER Experiment Name: At_100uM_ABA_Mutants_cDNA_P Parameter: Tissue Value: Aerial
  misc_feature: MA Experiment 20000070 PARAMETER Experiment Name: At_100uM_ABA_Mutants_cDNA_P Parameter: Treatment Value: 100uM ABA vs. No Treatment
  misc_feature: MA Experiment ID: 20000071 Result: Up-regulated in Transcription
  misc_feature: MA Experiment 20000071 PARAMETER Experiment Name: At_100uM_ABA_Mutants_cDNA_P Parameter: Plant Line Value: CS8104
  misc_feature: MA Experiment 20000071 PARAMETER Experiment Name: At_100uM_ABA_Mutants_cDNA_P Parameter: Timepoint (hr) Value: 6
  misc_feature: MA Experiment 20000071 PARAMETER Experiment Name: At_100uM_ABA_Mutants_cDNA_P Parameter: Tissue Value: Aerial
  misc_feature: MA Experiment 20000071 PARAMETER Experiment Name: At_100uM_ABA_Mutants_cDNA_P Parameter: Treatment Value: 100uM ABA vs. No Treatment
  misc_feature: MA Experiment ID: 20000087 Result: Up-regulated in Transcription
  misc_feature: MA Experiment 20000087 PARAMETER Experiment Name: At_100uM_ABA_Mutants_cDNA_P Parameter: Plant Line Value: WS
  misc_feature: MA Experiment 20000087 PARAMETER Experiment Name: At_100uM_ABA_Mutants_cDNA_P Parameter: Timepoint (hr) Value: 6
  misc_feature: MA Experiment 20000087 PARAMETER Experiment Name: At_100uM_ABA_Mutants_cDNA_P Parameter: Tissue Value: Aerial
  misc_feature: MA Experiment 20000087 PARAMETER Experiment Name: At_100uM_ABA_Mutants_cDNA_P Parameter: Treatment Value: 100uM ABA vs. No Treatment
  misc_feature: MA Experiment ID: 20000117 Result: Up-regulated in Transcription
  misc_feature: MA Experiment 20000117 PARAMETER Experiment Name: At_100uM_ABA_Mutants_cDNA_P Parameter: Plant Line Value: Columbia
  misc_feature: MA Experiment 20000117 PARAMETER Experiment Name: At_100uM_ABA_Mutants_cDNA_P Parameter: Timepoint (hr) Value: 6
  misc_feature: MA Experiment 20000117 PARAMETER Experiment Name: At_100uM_ABA_Mutants_cDNA_P Parameter: Tissue Value: Aerial
  misc_feature: MA Experiment 20000117 PARAMETER Experiment Name: At_100uM_ABA_Mutants_cDNA_P Parameter: Treatment Value: 100uM ABA vs. No Treatment
  misc_feature: MA Experiment ID: 20000169 Result: Up-regulated in Transcription
  misc_feature: MA Experiment 20000169 PARAMETER Experiment Name: At_100uM_ABA_P Parameter: Age (day) Value: 14
  misc_feature: MA Experiment 20000169 PARAMETER Experiment Name: At_100uM_ABA_P Parameter: Organism Value: A. thaliana
  misc_feature: MA Experiment 20000169 PARAMETER Experiment Name: At_100uM_ABA_P Parameter: Plant Line Value: WS
  misc_feature: MA Experiment 20000169 PARAMETER Experiment Name: At_100uM_ABA_P Parameter: Timepoint (hr) Value: 6
  misc_feature: MA Experiment 20000169 PARAMETER Experiment Name: At_100uM_ABA_P Parameter: Tissue Value: Aerial
  misc_feature: MA Experiment 20000169 PARAMETER Experiment Name: At_100uM_ABA_P Parameter: Treatment Value: 100uM ABA vs. No Treatment
  misc_feature: MA Experiment ID: 20000173 Result: Down-regulated in Transcription
  misc_feature: MA Experiment 20000173 PARAMETER Experiment Name: At_42deg_Heat_P Parameter: Age (day) Value: 14
  misc_feature: MA Experiment 20000173 PARAMETER Experiment Name: At_42deg_Heat_P Parameter: Organism Value: A. thaliana
  misc_feature: MA Experiment 20000173 PARAMETER Experiment Name: At_42deg_Heat_P Parameter: Plant Line Value: WS
  misc_feature: MA Experiment 20000173 PARAMETER Experiment Name: At_42deg_Heat_P Parameter: Temperature (deg C) Value: 42 vs. 22
  misc_feature: MA Experiment 20000173 PARAMETER Experiment Name: At_42deg_Heat_P Parameter: Timepoint (hr) Value: 6
  misc_feature: MA Experiment 20000173 PARAMETER Experiment Name: At_42deg_Heat_P Parameter: Tissue Value: Aerial
  misc_feature: MA Experiment ID: 20000179 Result: Up-regulated in Transcription
  misc_feature: MA Experiment 20000179 PARAMETER Experiment Name: At_Germinating_Seeds_P Parameter: Age (hr) Value: 6 vs. 0
  misc_feature: MA Experiment 20000179 PARAMETER Experiment Name: At_Germinating_Seeds_P Parameter: Tissue Value: Germinating Seeds
  misc_feature: MA Experiment ID: 20000180 Result: Up-regulated in Transcription
  misc_feature: MA Experiment 20000180 PARAMETER Experiment Name: At_Germinating_Seeds_P Parameter: Age (hr) Value: 24 vs. 0
  misc_feature: MA Experiment 20000180 PARAMETER Experiment Name: At_Germinating_Seeds_P Parameter: Tissue Value: Germinating Seeds
  misc_feature: MA Experiment ID: 20000184 Result: Down-regulated in Transcription
  misc_feature: MA Experiment 20000184 PARAMETER Experiment Name: At_Shoots__P Parameter: Age (day) Value: 7
  misc_feature: MA Experiment 20000184 PARAMETER Experiment Name: At_Shoots__P Parameter: Tissue Value: Shoots vs. Whole Plant
  misc_feature: MA Experiment ID: 20000224 Result: Up-regulated in Transcription
  misc_feature: MA Experiment ID: 20000234 Result: Down-regulated in Transcription
  misc_feature: MA Experiment 20000234 PARAMETER Experiment Name: At_Siliques_P Parameter: Age (day) Value: 21
  misc_feature: MA Experiment 20000234 PARAMETER Experiment Name: At_Siliques_P Parameter: Organism Value: A. thaliana
  misc_feature: MA Experiment 20000234 PARAMETER Experiment Name: At_Siliques_P Parameter: Plant Line Value: WS
  misc_feature: MA Experiment 20000234 PARAMETER Experiment Name: At_Siliques_P Parameter: Tissue Value: Less Than 5mm Siliques vs. Whole Plant
  misc_feature: MA Experiment ID: 20000235 Result: Down-regulated in Transcription
  misc_feature: MA Experiment 20000235 PARAMETER Experiment Name: At_Siliques_P Parameter: Age (day) Value: 21
  misc_feature: MA Experiment 20000235 PARAMETER Experiment Name: At_Siliques_P Parameter: Organism Value: A. thaliana
  misc_feature: MA Experiment 20000235 PARAMETER Experiment Name: At_Siliques_P Parameter: Plant Line Value: WS
  misc_feature: MA Experiment 20000235 PARAMETER Experiment Name: At_Siliques_P Parameter: Tissue Value: 5-10mm Siliques vs. Whole Plant
  misc_feature: MA Experiment ID: 20000265 Result: Down-regulated in Transcription
  misc_feature: MA Experiment 20000265 PARAMETER Experiment Name: At_Open_Flower_P Parameter: Age (day) Value: 21
  misc_feature: MA Experiment 20000265 PARAMETER Experiment Name: At_Open_Flower_P Parameter: Plant Line Value: WS
  misc_feature: MA Experiment 20000265 PARAMETER Experiment Name: At_Open_Flower_P Parameter: Tissue Value: Closed Flower vs. Whole Plant
  misc_feature: MA Experiment ID: 20000437 Result: Up-regulated in Transcription
  misc_feature: MA Experiment 20000437 PARAMETER Experiment Name: At_Drought_P Parameter: Age (day) Value: 8
  misc_feature: MA Experiment 20000437 PARAMETER Experiment Name: At_Drought_P Parameter: Organism Value: A. thaliana
  misc_feature: MA Experiment 20000437 PARAMETER Experiment Name: At_Drought_P Parameter: Plant Line Value: WS
  misc_feature: MA Experiment 20000437 PARAMETER Experiment Name: At_Drought_P Parameter: Timepoint (hr) Value: 24
  misc_feature: MA Experiment 20000437 PARAMETER Experiment Name: At_Drought_P Parameter: Tissue Value: Whole Plant
  misc_feature: MA Experiment 20000437 PARAMETER Experiment Name: At_Drought_P Parameter: Treatment Value: Drought vs. No Drought
  misc_feature: MA Experiment ID: 20000573 Result: Up-regulated in Transcription
  misc_feature: MA Experiment 20000573 PARAMETER Experiment Name: At_100uM_ABA_Mutants__P Parameter: Organism Value: A. thaliana
  misc_feature: MA Experiment 20000573 PARAMETER Experiment Name: At_100uM_ABA_Mutants__P Parameter: Plant Line Value: CS22 vs. Ler wt
  misc_feature: MA Experiment 20000573 PARAMETER Experiment Name: At_100uM_ABA_Mutants__P Parameter: Timepoint (hr) Value: N/A
  misc_feature: MA Experiment 20000573 PARAMETER Experiment Name: At_100uM_ABA_Mutants__P Parameter: Tissue Value: Whole Plant
  misc_feature: MA Experiment 20000573 PARAMETER Experiment Name: At_100uM_ABA_Mutants__P Parameter: Treatment Value: None
  misc_feature: MA Experiment ID: 20000794 Result: Up-regulated in Transcription
  misc_feature: MA Experiment 20000794 PARAMETER Experiment Name: At_Petals_P Parameter: Age (day) Value: 23-25 days
  misc_feature: MA Experiment 20000794 PARAMETER Experiment Name: At_Petals_P Parameter: Plant Line Value: WS
  misc_feature: MA Experiment 20000794 PARAMETER Experiment Name: At_Petals_P Parameter: Tissue Value: Petals vs. Whole plant
  misc_feature: MA Experiment ID: 20001247 Result: Up-regulated in Transcription
  misc_feature: MA Experiment 20001247 PARAMETER Experiment Name: At_Far-red-induction_P Parameter: Age (day) Value: 7
  misc_feature: MA Experiment 20001247 PARAMETER Experiment Name: At_Far-red-induction_P Parameter: Light Value: Far-red vs. White
  misc_feature: MA Experiment 20001247 PARAMETER Experiment Name: At_Far-red-induction_P Parameter: Organism Value: A. thaliana
  misc_feature: MA Experiment 20001247 PARAMETER Experiment Name: At_Far-red-induction_P Parameter: Plant Line Value: Columbia
  misc_feature: MA Experiment 20001247 PARAMETER Experiment Name: At_Far-red-induction_P Parameter: Timepoint (hr) Value: 1
  misc_feature: MA Experiment 20001247 PARAMETER Experiment Name: At_Far-red-induction_P Parameter: Tissue Value: Whole Plant
  misc_feature: MA Experiment ID: 20001248 Result: Up-regulated in Transcription
  misc_feature: MA Experiment 20001248 PARAMETER Experiment Name: At_Far-red-induction_P Parameter: Age (day) Value: 7
  misc_feature: MA Experiment 20001248 PARAMETER Experiment Name: At_Far-red-induction_P Parameter: Light Value: Far-red vs. White
  misc_feature: MA Experiment 20001248 PARAMETER Experiment Name: At_Far-red-induction_P Parameter: Organism Value: A. thaliana
  misc_feature: MA Experiment 20001248 PARAMETER Experiment Name: At_Far-red-induction_P Parameter: Plant Line Value: Columbia
  misc_feature: MA Experiment 20001248 PARAMETER Experiment Name: At_Far-red-induction_P Parameter: Timepoint (hr) Value: 4
  misc_feature: MA Experiment 20001248 PARAMETER Experiment Name: At_Far-red-induction_P Parameter: Tissue Value: Whole Plant
  misc_feature: MA Experiment ID: 20001450 Result: Up-regulated in Transcription
  misc_feature: MA Experiment 20001450 PARAMETER Experiment Name: At_Far-red-induction_P Parameter: Age (day) Value: 7
  misc_feature: MA Experiment 20001450 PARAMETER Experiment Name: At_Far-red-induction_P Parameter: Light Value: Far-red vs. White
  misc_feature: MA Experiment 20001450 PARAMETER Experiment Name: At_Far-red-induction_P Parameter: Organism Value: A. thaliana
  misc_feature: MA Experiment 20001450 PARAMETER Experiment Name: At_Far-red-induction_P Parameter: Plant Line Value: Columbia
  misc_feature: MA Experiment 20001450 PARAMETER Experiment Name: At_Far-red-induction_P Parameter: Timepoint (hr) Value: 8
  misc_feature: MA Experiment 20001450 PARAMETER Experiment Name: At_Far-red-induction_P Parameter: Tissue Value: Whole Plant
  misc_feature: MA Experiment ID: 20001451 Result: Up-regulated in Transcription
  misc_feature: MA Experiment 20001451 PARAMETER Experiment Name: At_Far-red-induction_P Parameter: Age (day) Value: 7
  misc_feature: MA Experiment 20001451 PARAMETER Experiment Name: At_Far-red-induction_P Parameter: Light Value: Far-red vs. White
  misc_feature: MA Experiment 20001451 PARAMETER Experiment Name: At_Far-red-induction_P Parameter: Organism Value: A. thaliana
  misc_feature: MA Experiment 20001451 PARAMETER Experiment Name: At_Far-red-induction_P Parameter: Plant Line Value: Columbia
  misc_feature: MA Experiment 20001451 PARAMETER Experiment Name: At_Far-red-induction_P Parameter: Timepoint (hr) Value: 24
  misc_feature: MA Experiment 20001451 PARAMETER Experiment Name: At_Far-red-induction_P Parameter: Tissue Value: Whole Plant
  misc_feature: MA Experiment ID: 20001557 Result: Down-regulated in Transcription
  misc_feature: MA Experiment 20001557 PARAMETER Experiment Name: At_Drought_Soil_Dry_P Parameter: Age (day) Value: 27
  misc_feature: MA Experiment 20001557 PARAMETER Experiment Name: At_Drought_Soil_Dry_P Parameter: Organism Value: A. thaliana
  misc_feature: MA Experiment 20001557 PARAMETER Experiment Name: At_Drought_Soil_Dry_P Parameter: Plant Line Value: WS
  misc_feature: MA Experiment 20001557 PARAMETER Experiment Name: At_Drought_Soil_Dry_P Parameter: Post Timepoint (hr) Value: 3
  misc_feature: MA Experiment 20001557 PARAMETER Experiment Name: At_Drought_Soil_Dry_P Parameter: Post-Treatment Value: Re-Water vs. No Drought
  misc_feature: MA Experiment 20001557 PARAMETER Experiment Name: At_Drought_Soil_Dry_P Parameter: Timepoint (day) Value: 13
  misc_feature: MA Experiment 20001557 PARAMETER Experiment Name: At_Drought_Soil_Dry_P Parameter: Treatment Value: Drought vs. No Drought
  misc_feature: MA Experiment ID: 20001558 Result: Down-regulated in Transcription
  misc_feature: MA Experiment 20001558 PARAMETER Experiment Name: At_Drought_Soil_Dry_P Parameter: Age (day) Value: 27
  misc_feature: MA Experiment 20001558 PARAMETER Experiment Name: At_Drought_Soil_Dry_P Parameter: Organism Value: A. thaliana
  misc_feature: MA Experiment 20001558 PARAMETER Experiment Name: At_Drought_Soil_Dry_P Parameter: Plant Line Value: WS
  misc_feature: MA Experiment 20001558 PARAMETER Experiment Name: At_Drought_Soil_Dry_P Parameter: Post Timepoint (hr) Value: 6
  misc_feature: MA Experiment 20001558 PARAMETER Experiment Name: At_Drought_Soil_Dry_P Parameter: Post-Treatment Value: Re-Water vs. No Drought
  misc_feature: MA Experiment 20001558 PARAMETER Experiment Name: At_Drought_Soil_Dry_P Parameter: Timepoint (day) Value: 13
  misc_feature: MA Experiment 20001558 PARAMETER Experiment Name: At_Drought_Soil_Dry_P Parameter: Treatment Value: Drought vs. No Drought
aaaagatactataatagtagagatcaaagacctgagcaaaaactgaaaaaaaaaaaaaaaaaaaaagacttctcctcaaaaatggcgtttacactaggtggaagagctcgtcgtctagtctctgcaacatcaattcatcaaaatggttgcttacacaaactgcaacaaattggatcggatcggtttcagcttggtgaagcaaaagcaataagattactacccaggagaacaaacatggttcaagaattaggaatcagggaagaatttatggatccaaacagagaaacagagacaagttatgattttcttgatgaaatgagacacagatttctgaaattcaagagacaaaagtatctaccggagatagaaaagtttaaagctttggccatagctcaatcaccaaaggtaatggtgataggatgtgcagattcaagggtatgtccatcttatgtactaggatttcaacctggtgaagcttttactatccgaaatgtcgccaatctcgttaccccggttcagaatggaccaacagaaaccaactcggctcttgagtttgcggtcaccactcttcaggttgagaacattatagttatgggtcatagcaattgtggaggaattgcagcacttatgagtcatcaaaaccaccaagggcaacactctagtttagtagaaaggtgggttatgaatgggaaagccgctaagttaagaacacaattagcttcatcacatttatcctttgatgaacaatgcagaaactgtgagaaggaatctataaaggattctgtgatgaatttgataacttattcatggataagagatagagtaaagagaggtgaagtcaagattcatggatgttattacaatttgtcagattgtagtcttgagaagtggagattaagttcagacaagactaactatggattctatatttcagacagagagatatggagttgagtaaatattgaacaatcctcatttctaatattcagatgtatctttgtacatatgaaatgatatttacacaattggaaaaaaagaaagaaaaaaaagtaatattgtaataacggaataaaaggtgaattggtcc

SEQ ID NO: 28032 - protein, 317 aa, Arabidopsis thaliana
  peptide (1)..(317): Ceres Seq. ID no. 13497135
  misc_feature (85)..(299): Homolog of NCBI NO: 30685030 NR Description: CARBONIC ANHYDRASE 2 [Arabidopsis thaliana]
  misc_feature (85)..(299): Homolog of NCBI NO: 21903379 NR Description: Carbonic anhydrase 2 (Carbonate dehydratase 2)
  misc_feature (64)..(299): Homolog of NCBI NO: 27652186 NR Description: carbonic anhydrase 3 [Flaveria bidentis]
  misc_feature (94)..(311): Homolog of NCBI NO: 30698715 NR Description: carbonic anhydrase -related [Arabidopsis
  misc_feature (94)..(311): Homolog of NCBI NO: 15223141 NR Description: carbonic anhydrase -related [Arabidopsis
  misc_feature (84)..(317): Homolog of NCBI NO: 18418245 NR Description: carbonate dehydratase - like protein [Arabidopsis
  misc_feature (28)..(277): Homolog of NCBI NO: 21539555 NR Description: putative carbonic anhydrase [Arabidopsis
  misc_feature (28)..(277): Homolog of NCBI NO: 30696219 NR Description: carbonic anhydrase -related [Arabidopsis thaliana]
  misc_feature (28)..(317): Homolog of NCBI NO: 25404198 NR Description: probable carbonic anhydrase T18I24.9
  misc_feature (28)..(317): Homolog of NCBI NO: 30696223 NR Description: carbonic anhydrase -related [Arabidopsis
KRYYNSRDQRPEQKLKKKKKKKDFSSKMAFTLGGRARRLVSATSIHQNGCLHKLQQIGSDRFQLGEAKAIRLLPRRTNMVQELGIREEFMDPNRETETSYDFLDEMRHRFLKFKRQKYLPEIEKFKALAIAQSPKVMVIGCADSRVCPSYVLGFQPGEAFTIRNVANLVTPVQNGPTETNSALEFAVTTLQVENIIVMGHSNCGGIAALMSHQNHQGQHSSLVERWVMNGKAAKLRTQLASSHLSFDEQCRNCEKESIKDSVMNLITYSWIRDRVKRGEVKIHGCYYNLSDCSLEKWRLSSDKTNYGFYISDREIWS

SEQ ID NO: 28033 - protein, 290 aa, Arabidopsis thaliana
  peptide (1)..(290): Ceres Seq. ID no. 13497136
  misc_feature (58)..(272): Homolog of NCBI NO: 30685030 NR Description: CARBONIC ANHYDRASE 2 [Arabidopsis thaliana]
  misc_feature (58)..(272): Homolog of NCBI NO: 21903379 NR Description: Carbonic anhydrase 2 (Carbonate dehydratase 2)
  misc_feature (37)..(272): Homolog of NCBI NO: 27652186 NR Description: carbonic anhydrase 3 [Flaveria bidentis]
  misc_feature (67)..(284): Homolog of NCBI NO: 30698715 NR Description: carbonic anhydrase -related [Arabidopsis
  misc_feature (67)..(284): Homolog of NCBI NO: 15223141 NR Description: carbonic anhydrase -related [Arabidopsis
  misc_feature (57)..(290): Homolog of NCBI NO: 18418245 NR Description: carbonate dehydratase - like protein [Arabidopsis
  misc_feature (1)..(250): Homolog of NCBI NO: 21539555 NR Description: putative carbonic anhydrase [Arabidopsis
  misc_feature (1)..(250): Homolog of NCBI NO: 30696219 NR Description: carbonic anhydrase -related [Arabidopsis thaliana]
  misc_feature (1)..(290): Homolog of NCBI NO: 25404198 NR Description: probable carbonic anhydrase T18I24.9
  misc_feature (1)..(290): Homolog of NCBI NO: 30696223 NR Description: carbonic anhydrase -related [Arabidopsis
MAFTLGGRARRLVSATSIHQNGCLHKLQQIGSDRFQLGEAKAIRLLPRRTNMVQELGIREEFMDPNRETETSYDFLDEMRHRFLKFKRQKYLPEIEKFKALAIAQSPKVMVIGCADSRVCPSYVLGFQPGEAFTIRNVANLVTPVQNGPTETNSALEFAVTTLQVENIIVMGHSNCGGIAALMSHQNHQGQHSSLVERWVMNGKAAKLRTQLASSHLSFDEQCRNCEKESIKDSVMNLITYSWIRDRVKRGEVKIHGCYYNLSDCSLEKWRLSSDKTNYGFYISDREIWS

SEQ ID NO: 28034 - protein, 239 aa, Arabidopsis thaliana
  peptide (1)..(239): Ceres Seq. ID no. 13497137
  misc_feature (7)..(221): Homolog of NCBI NO: 30685030 NR Description: CARBONIC ANHYDRASE 2 [Arabidopsis thaliana]
  misc_feature (7)..(221): Homolog of NCBI NO: 21903379 NR Description: Carbonic anhydrase 2 (Carbonate dehydratase 2)
  misc_feature (1)..(221): Homolog of NCBI NO: 27652186 NR Description: carbonic anhydrase 3 [Flaveria bidentis]
  misc_feature (16)..(233): Homolog of NCBI NO: 30698715 NR Description: carbonic anhydrase -related [Arabidopsis
  misc_feature (16)..(233): Homolog of NCBI NO: 15223141 NR Description: carbonic anhydrase -related [Arabidopsis
  misc_feature (6)..(239): Homolog of NCBI NO: 18418245 NR Description: carbonate dehydratase - like protein [Arabidopsis
  misc_feature (1)..(199): Homolog of NCBI NO: 21539555 NR Description: putative carbonic anhydrase [Arabidopsis
  misc_feature (1)..(199): Homolog of NCBI NO: 30696219 NR Description: carbonic anhydrase -related [Arabidopsis thaliana]
  misc_feature (1)..(239): Homolog of NCBI NO: 25404198 NR Description: probable carbonic anhydrase T18I24.9
  misc_feature (1)..(239): Homolog of NCBI NO: 30696223 NR Description: carbonic anhydrase -related [Arabidopsis
MVQELGIREEFMDPNRETETSYDFLDEMRHRFLKFKRQKYLPEIEKFKALAIAQSPKVMVIGCADSRVCPSYVLGFQPGEAFTIRNVANLVTPVQNGPTETNSALEFAVTTLQVENIIVMGHSNCGGIAALMSHQNHQGQHSSLVERWVMNGKAAKLRTQLASSHLSFDEQCRNCEKESIKDSVMNLITYSWIRDRVKRGEVKIHGCYYNLSDCSLEKWRLSSDKTNYGFYISDREIWS

SEQ ID NO: 28035 - DNA, 1117 bp, Arabidopsis thaliana
  misc_feature (1)..(1117): Ceres Seq. ID no. 12371743
  misc_feature: MA Experiment ID: 108434 Result: Down-regulated in Transcription
  misc_feature: MA Experiment 108434 PARAMETER Experiment Name: At_Root_Tips_cDNA_P Parameter: Tissue Value: Root Tips
  misc_feature: MA Experiment ID: 108488 Result: Down-regulated in Transcription
  misc_feature: MA Experiment ID: 108574 Result: Up-regulated in Transcription
  misc_feature: MA Experiment 108574 PARAMETER Experiment Name: At_Wounding__cDNA_P Parameter: Timepoint (hr) Value: 1
  misc_feature: MA Experiment 108574 PARAMETER Experiment Name: At_Wounding__cDNA_P Parameter: Tissue Value: Aerial
  misc_feature: MA Experiment 108574 PARAMETER Experiment Name: At_Wounding__cDNA_P Parameter: Treatment Value: Wounding vs. No Wounding
  misc_feature: MA Experiment ID: 108595 Result: Up-regulated in Transcription
  misc_feature: MA Experiment 108595 PARAMETER Experiment Name: At_Ler-pi_Ovule_cDNA_P Parameter: Plant Line Value: null
  misc_feature: MA Experiment ID: 20000069 Result: Up-regulated in Transcription
  misc_feature: MA Experiment 20000069 PARAMETER Experiment Name: At_100uM_ABA_Mutants_cDNA_P Parameter: Plant Line Value: CS23
  misc_feature: MA Experiment 20000069 PARAMETER Experiment Name: At_100uM_ABA_Mutants_cDNA_P Parameter: Timepoint (hr) Value: 6
  misc_feature: MA Experiment 20000069 PARAMETER Experiment Name: At_100uM_ABA_Mutants_cDNA_P Parameter: Tissue Value: Aerial
  misc_feature: MA Experiment 20000069 PARAMETER Experiment Name: At_100uM_ABA_Mutants_cDNA_P Parameter: Treatment Value: 100uM ABA vs. No Treatment
  misc_feature: MA Experiment ID: 20000185 Result: Up-regulated in Transcription
  misc_feature: MA Experiment 20000185 PARAMETER Experiment Name: At_Roots__P Parameter: Age (day) Value: 7 vs. 21
  misc_feature: MA Experiment 20000185 PARAMETER Experiment Name: At_Roots__P Parameter: Organism Value: A. thaliana
  misc_feature: MA Experiment 20000185 PARAMETER Experiment Name: At_Roots__P Parameter: Tissue Value: Roots vs. Whole Plant
  misc_feature: MA Experiment ID: 20000265 Result: Up-regulated in Transcription
  misc_feature: MA Experiment 20000265 PARAMETER Experiment Name: At_Open_Flower_P Parameter: Age (day) Value: 21
  misc_feature: MA Experiment 20000265 PARAMETER Experiment Name: At_Open_Flower_P Parameter: Plant Line Value: WS
  misc_feature: MA Experiment 20000265 PARAMETER Experiment Name: At_Open_Flower_P Parameter: Tissue Value: Closed Flower vs. Whole Plant
  misc_feature: MA Experiment ID: 20000286 Result: Up-regulated in Transcription
  misc_feature: MA Experiment 20000286 PARAMETER Experiment Name: At_Open_Flower_P Parameter: Age (day) Value: 21
  misc_feature: MA Experiment 20000286 PARAMETER Experiment Name: At_Open_Flower_P Parameter: Plant Line Value: WS
  misc_feature: MA Experiment 20000286 PARAMETER Experiment Name: At_Open_Flower_P Parameter: Tissue Value: Half Open vs. Whole Plant
  misc_feature: MA Experiment ID: 20000437 Result: Up-regulated in Transcription
  misc_feature: MA Experiment 20000437 PARAMETER Experiment Name: At_Drought_P Parameter: Age (day) Value: 8
  misc_feature: MA Experiment 20000437 PARAMETER Experiment Name: At_Drought_P Parameter: Organism Value: A. thaliana
  misc_feature: MA Experiment 20000437 PARAMETER Experiment Name: At_Drought_P Parameter: Plant Line Value: WS
  misc_feature: MA Experiment 20000437 PARAMETER Experiment Name: At_Drought_P Parameter: Timepoint (hr) Value: 24
  misc_feature: MA Experiment 20000437 PARAMETER Experiment Name: At_Drought_P Parameter: Tissue Value: Whole Plant
  misc_feature: MA Experiment 20000437 PARAMETER Experiment Name: At_Drought_P Parameter: Treatment Value: Drought vs. No Drought
  misc_feature: MA Experiment ID: 20000439 Result: Up-regulated in Transcription
  misc_feature: MA Experiment 20000439 PARAMETER Experiment Name: At_Roots__P Parameter: Age (day) Value: 14 vs. 21
  misc_feature: MA Experiment 20000439 PARAMETER Experiment Name: At_Roots__P Parameter: Organism Value: A. thaliana
  misc_feature: MA Experiment 20000439 PARAMETER Experiment Name: At_Roots__P Parameter: Tissue Value: Roots vs. Whole Plant
  misc_feature: MA Experiment ID: 20001556 Result: Up-regulated in Transcription
  misc_feature: MA Experiment 20001556 PARAMETER Experiment Name: At_Drought_Soil_Dry_P Parameter: Age (day) Value: 26
  misc_feature: MA Experiment 20001556 PARAMETER Experiment Name: At_Drought_Soil_Dry_P Parameter: Organism Value: A. thaliana
  misc_feature: MA Experiment 20001556 PARAMETER Experiment Name: At_Drought_Soil_Dry_P Parameter: Plant Line Value: WS
  misc_feature: MA Experiment 20001556 PARAMETER Experiment Name: At_Drought_Soil_Dry_P Parameter: Post Timepoint (hr) Value: None
  misc_feature: MA Experiment 20001556 PARAMETER Experiment Name: At_Drought_Soil_Dry_P Parameter: Post-Treatment Value: None
  misc_feature: MA Experiment 20001556 PARAMETER Experiment Name: At_Drought_Soil_Dry_P Parameter: Timepoint (day) Value: 12
  misc_feature: MA Experiment 20001556 PARAMETER Experiment Name: At_Drought_Soil_Dry_P Parameter: Treatment Value: Drought vs. No Drought
  misc_feature: MA Experiment ID: 20001757 Result: Down-regulated in Transcription
  misc_feature: MA Experiment 20001757 PARAMETER Experiment Name: At_50mM_NH4NO3_L-to-H_P Parameter: Timepoint (hr) Value: 6
  misc_feature: MA Experiment 20001757 PARAMETER Experiment Name: At_50mM_NH4NO3_L-to-H_P Parameter: Tissue Value: Leaf
  misc_feature: MA Experiment 20001757 PARAMETER Experiment Name: At_50mM_NH4NO3_L-to-H_P Parameter: Treatment Value: 50mM NH4NO3 vs 100mM Mannitol
  misc_feature: MA Experiment ID: 20001904 Result: Up-regulated in Transcription
  misc_feature: MA Experiment 20001904 PARAMETER Experiment Name: At_Drought_Reproduction_P Parameter: Age (day) Value: 37
  misc_feature: MA Experiment 20001904 PARAMETER Experiment Name: At_Drought_Reproduction_P Parameter: Organism Value: A. thaliana
  misc_feature: MA Experiment 20001904 PARAMETER Experiment Name: At_Drought_Reproduction_P Parameter: Plant Line Value: WS
  misc_feature: MA Experiment 20001904 PARAMETER Experiment Name: At_Drought_Reproduction_P Parameter: Timepoint (day) Value: 7
  misc_feature: MA Experiment 20001904 PARAMETER Experiment Name: At_Drought_Reproduction_P Parameter: Tissue Value: Rosettes
  misc_feature: MA Experiment 20001904 PARAMETER Experiment Name: At_Drought_Reproduction_P Parameter: Treatment Value: Drought vs. No Drought
  misc_feature: MA Experiment ID: 20001905 Result: Up-regulated in Transcription
  misc_feature: MA Experiment 20001905 PARAMETER Experiment Name: At_Drought_Reproduction_P Parameter: Age (day) Value: 40
  misc_feature: MA Experiment 20001905 PARAMETER Experiment Name: At_Drought_Reproduction_P Parameter: Organism Value: A. thaliana
  misc_feature: MA Experiment 20001905 PARAMETER Experiment Name: At_Drought_Reproduction_P Parameter: Plant Line Value: WS
  misc_feature: MA Experiment 20001905 PARAMETER Experiment Name: At_Drought_Reproduction_P Parameter: Timepoint (day) Value: 10
  misc_feature: MA Experiment 20001905 PARAMETER Experiment Name: At_Drought_Reproduction_P Parameter: Tissue Value: Rosettes
  misc_feature: MA Experiment 20001905 PARAMETER Experiment Name: At_Drought_Reproduction_P Parameter: Treatment Value: Drought vs. No Drought
ccaatcaaagcgtgacttcttcctcggtctttttcttgaggttccaatctttttgacttcatacaccatttcttttgcttacaacactttcagataaaagctatagattcagtattttgatccaacgtgtcatatattaacccttaagcaagattagtgaagtgacgagcctttaagatttgttattcttacaagcagcttgcagaagagagagagttaccagcaggaccagaggaaggaggatttgggatgtcatatgaccttctctatggaagagcgggtttcctttgggctgctctgttcctaaaccgatatctcggccaaggaactgttcctgaccatctcttatcacccattgttgcagccatcttagccggtgggcgagttggagctgcagatcatgaagcttgtcctctgttatacaggtttcacggaacgcgattttggggtgctgcgaatggattagctggaatcttgtatgtattgctgcattttccactatcggaagaggatgttaaagatgttcaagggacattgaggtatatgatgagtaataggtttccgaacagcggaaactacccgtgcagcgaagggaatccgagggataagctagtccaatgggctcatggagcaaccggcatggccattactttggctaaagcatctcaggtgtttcccaaggaaagggatttccgcgaagcagccattgaagcaggagaagtagtgtggaagagtggcttggtgaagaaggtaggtttagccgatggagttgctggtatgcctacgctttcttatccctttatcgcttaaccggagatgttgtatatgaagagagagcaaaagcgtttgcgagttacttgtgccgtgatgcgatagagctcgtgaatatgacaagccaagaaacagaacatgattattcgcttttccggggactagctggaccagtatgcctctggttcgatcttgtgtcaccggtagattctaagtttcctggttatgagatataatttaaaacaggtaatagataaaccgtaggttctattatgactatctctttgtgaaaggatcttaggttctccggtttattccactttctataatctattgaagtaacttg

SEQ ID NO: 28036 - protein, 186 aa, Arabidopsis thaliana
  peptide (1)..(186): Ceres Seq. ID no. 12371744
  misc_feature (1)..(186): Pfam Name: Lanthionine synthetase C-like protein Pfam Description: Lanthionine synthetase C-like protein
  misc_feature (4)..(186): Homolog of NCBI NO: 21489937 NR Description: LanC (bacterial lantibiotic synthetase component
  misc_feature (1)..(186): Homolog of NCBI NO: 27924406 NR Description: Similar to LanC (bacterial lantibiotic synthetase
  misc_feature (4)..(186): Homolog of NCBI NO: 30681129 NR Description: expressed protein [Arabidopsis thaliana]
  misc_feature (4)..(186): Homolog of NCBI NO: 25411993 NR Description: hypothetical protein At2g20770 [imported] -
  misc_feature (4)..(186): Homolog of NCBI NO: 21742091 NR Description: OSJNBa0074L08.13 [Oryza sativa (japonica
  misc_feature (1)..(176): Homolog of NCBI NO: 15219126 NR Description: putative G protein-coupled receptor; protein id:
  misc_feature (4)..(176): Homolog of NCBI NO: 37535720 NR Description: putative lanthionine synthetase
  misc_feature (1)..(186): Homolog of NCBI NO: 8489877 NR Description: putative 7-transmembrane G-protein-coupled
  misc_feature (1)..(186): Homolog of NCBI NO: 15451140 NR Description: G protein-coupled receptor-like protein
  misc_feature (1)..(186): Homolog of NCBI NO: 15238395 NR Description: G protein-coupled receptor-like protein
MSYDLLYGRAGFLWAALFLNRYLGQGTVPDHLLSPIVAAILAGGRVGAADHEACPLLYRFHGTRFWGAANGLAGILYVLLHFPLSEEDVKDVQGTLRYMMSNRFPNSGNYPCSEGNPRDKLVQWAHGATGMAITLAKASQVFPKERDFREAAIEAGEVVWKSGLVKKVGLADGVAGMPTLSYPFIA

SEQ ID NO: 28037 - DNA, 1202 bp, Arabidopsis thaliana
  misc_feature (1)..(1202): Ceres Seq. ID no. 13504859
  misc_feature: MA Experiment ID: 108668 Result: Up-regulated in Transcription
  misc_feature: MA Experiment 108668 PARAMETER Experiment Name: At_2mM_SA_cDNA_P Parameter: Plant Line Value: WS
  misc_feature: MA Experiment 108668 PARAMETER Experiment Name: At_2mM_SA_cDNA_P Parameter: Timepoint (hr) Value: 6
  misc_feature: MA Experiment 108668 PARAMETER Experiment Name: At_2mM_SA_cDNA_P Parameter: Treatment Value: 2mM SA vs. No Treatment
  misc_feature: MA Experiment ID: 20000182 Result: Up-regulated in Transcription
  misc_feature: MA Experiment 20000182 PARAMETER Experiment Name: At_2mM_SA_P Parameter: Age (day) Value: 14
  misc_feature: MA Experiment 20000182 PARAMETER Experiment Name: At_2mM_SA_P Parameter: Organism Value: A. thaliana
  misc_feature: MA Experiment 20000182 PARAMETER Experiment Name: At_2mM_SA_P Parameter: Plant Line Value: WS
  misc_feature: MA Experiment 20000182 PARAMETER Experiment Name: At_2mM_SA_P Parameter: Timepoint (hr) Value: 6
  misc_feature: MA Experiment 20000182 PARAMETER Experiment Name: At_2mM_SA_P Parameter: Tissue Value: Aerial
  misc_feature: MA Experiment 20000182 PARAMETER Experiment Name: At_2mM_SA_P Parameter: Treatment Value: 2mM SA vs. No Treatment
  misc_feature: MA Experiment ID: 20000438 Result: Down-regulated in Transcription
  misc_feature: MA Experiment 20000438 PARAMETER Experiment Name: At_Shoots__P Parameter: Age (day) Value: 14
  misc_feature: MA Experiment 20000438 PARAMETER Experiment Name: At_Shoots__P Parameter: Tissue Value: Shoots vs. Whole Plant
  misc_feature: MA Experiment ID: 20000573 Result: Down-regulated in Transcription
  misc_feature: MA Experiment 20000573 PARAMETER Experiment Name: At_100uM_ABA_Mutants__P Parameter: Organism Value: A. thaliana
  misc_feature: MA Experiment 20000573 PARAMETER Experiment Name: At_100uM_ABA_Mutants__P Parameter: Plant Line Value: CS22 vs. Ler wt
  misc_feature: MA Experiment 20000573 PARAMETER Experiment Name: At_100uM_ABA_Mutants__P Parameter: Timepoint (hr) Value: N/A
  misc_feature: MA Experiment 20000573 PARAMETER Experiment Name: At_100uM_ABA_Mutants__P Parameter: Tissue Value: Whole Plant
  misc_feature: MA Experiment 20000573 PARAMETER Experiment Name: At_100uM_ABA_Mutants__P Parameter: Treatment Value: None
  misc_feature: MA Experiment ID: 20000574 Result: Down-regulated in Transcription
  misc_feature: MA Experiment 20000574 PARAMETER Experiment Name: At_100uM_ABA_Mutants__P Parameter: Organism Value: A. thaliana
  misc_feature: MA Experiment 20000574 PARAMETER Experiment Name: At_100uM_ABA_Mutants__P Parameter: Plant Line Value: CS23 vs. Ler wt
  misc_feature: MA Experiment 20000574 PARAMETER Experiment Name: At_100uM_ABA_Mutants__P Parameter: Timepoint (hr) Value: N/A
  misc_feature: MA Experiment 20000574 PARAMETER Experiment Name: At_100uM_ABA_Mutants__P Parameter: Tissue Value: Whole Plant
  misc_feature: MA Experiment 20000574 PARAMETER Experiment Name: At_100uM_ABA_Mutants__P Parameter: Treatment Value: None
aacaacaagtctttctcacgaaaatggattctcggatttttctcgcattttccctctgttttctcttcactctccctctaatttcatctgcacctaaccgcttcctcactagatcgagtaacactagagatgggtcagtgataaagatgaaaacaagtgcttcttcttttgggtttgatccaactcgtgtcactcaactctcttggactcctagagtttttttgtatgaagggtttctttctgatgaggaatgtgatcattttatcaaattggcgaaagggaagcttgagaagtcaatggtggctgataatgattctggtgagagtgttgagagtgaagtacgcactagttctggaatgtttctctccaaacgacaggatgatatagtaagtaatgtggaggcaaaacttgctgcgtggacctttcttcccgaagagaatggtgaatccatgcaaatattgcattatgagaatggtcaaaagtatgaaccgcattttgactactttcacgaccaggctaatctagagctcggtggtcatcggattgccacagtattgatgtacttgtccaatgttgaaaagggaggagaaacagtgtttcccatgtggaagggtaaagcaactcagttgaaagacgatagctggaccgaatgtgcaaaacaaggctatgcagtgaaaccgaggaaaggggatgcattactgttcttcaatcttcacccaaatgcaaccacagattcaaatagcttacatggaagctgtccagtggttgagggagagaaatggtcagcaaccagatggattcacgttaagtcattcgaaagagcgtttaataagcaatctggatgtatggacgagaatgtgagctgcgaaaaatgggcaaaggcaggggaatgccagaagaatccaacatacatggttggttcagacaaagaccatggatattgcagaaagagttgcaaagcttgctcatcttaagaacaacaagtaaaatcaaagctcttattaaaggatcaaaatttttgtatagcgaaaaaccgggttttcgccattcgggtagataaacatatcgtcaatagaatgaaaaatttagaactatatactaaaaaaataattctgattctatgttactggtttcatgtgcaagttatgttccttatggttcataactagaccaaaacttaataaaagtcggtttatgttacc

SEQ ID NO: 28038 - protein, 323 aa, Arabidopsis thaliana
  peptide (1)..(323): Ceres Seq. ID no. 13504860
  misc_feature (146)..(268): Pfam Name: 2OG-Fe(II) oxygenase superfamily Pfam Description: 2OG-Fe(II) oxygenase superfamily
  misc_feature (58)..(323): Homolog of NCBI NO: 34393269 NR Description: prolyl 4-hydroxylase alpha-1 subunit
  misc_feature (8)..(197): Homolog of NCBI NO: 24417248 NR Description: unknown [Arabidopsis thaliana]
  misc_feature (58)..(323): Homolog of NCBI NO: 29150365 NR Description: putative oxidoreductase [Oryza sativa (japonica
  misc_feature (58)..(125): Homolog of NCBI NO: 37534316 NR Description: unknown protein [Oryza sativa (japonica
  misc_feature (126)..(322): Homolog of NCBI NO: 37534316 NR Description: unknown protein [Oryza sativa (japonica
  misc_feature (67)..(321): Homolog of NCBI NO: 28393447 NR Description: putative prolyl 4-hydroxylase [Arabidopsis
  misc_feature (46)..(321): Homolog of NCBI NO: 30689216 NR Description: oxidoreductase, 2OG-Fe(II) oxygenase family
  misc_feature (42)..(323): Homolog of NCBI NO: 9294583 NR Description: prolyl 4-hydroxylase alpha subunit-like protein
  misc_feature (8)..(323): Homolog of NCBI NO: 18086437 NR Description: AT3g28480/MFJ20_16 [Arabidopsis thaliana]
  misc_feature (8)..(323): Homolog of NCBI NO: 18405808 NR Description: oxidoreductase, 2OG-Fe(II) oxygenase family
QQVFLTKMDSRIFLAFSLCFLFTLPLISSAPNRFLTRSSNTRDGSVIKMKTSASSFGFDPTRVTQLSWTPRVFLYEGFLSDEECDHFIKLAKGKLEKSMVADNDSGESVESEVRTSSGMFLSKRQDDIVSNVEAKLAAWTFLPEENGESMQILHYENGQKYEPHFDYFHDQANLELGGHRIATVLMYLSNVEKGGETVFPMWKGKATQLKDDSWTECAKQGYAVKPRKGDALLFFNLHPNATTDSNSLHGSCPVVEGEKWSATRWIHVKSFERAFNKQSGCMDENVSCEKWAKAGECQKNPTYMVGSDKDHGYCRKSCKACSS

SEQ ID NO: 28039 - protein, 316 aa, Arabidopsis thaliana
  peptide (1)..(316): Ceres Seq. ID no. 13504861
  misc_feature (139)..(261): Pfam Name: 2OG-Fe(II) oxygenase superfamily Pfam Description: 2OG-Fe(II) oxygenase superfamily
  misc_feature (51)..(316): Homolog of NCBI NO: 34393269 NR Description: prolyl 4-hydroxylase alpha-1 subunit
  misc_feature (1)..(190): Homolog of NCBI NO: 24417248 NR Description: unknown [Arabidopsis thaliana]
  misc_feature (51)..(316): Homolog of NCBI NO: 29150365 NR Description: putative oxidoreductase [Oryza sativa (japonica
  misc_feature (51)..(118): Homolog of NCBI NO: 37534316 NR Description: unknown protein [Oryza sativa (japonica
  misc_feature (119)..(315): Homolog of NCBI NO: 37534316 NR Description: unknown protein [Oryza sativa (japonica
  misc_feature (60)..(314): Homolog of NCBI NO: 28393447 NR Description: putative prolyl 4-hydroxylase [Arabidopsis
  misc_feature (39)..(314): Homolog of NCBI NO: 30689216 NR Description: oxidoreductase, 2OG-Fe(II) oxygenase family
  misc_feature (35)..(316): Homolog of NCBI NO: 9294583 NR Description: prolyl 4-hydroxylase alpha subunit-like protein
  misc_feature (1)..(316): Homolog of NCBI NO: 18086437 NR Description: AT3g28480/MFJ20_16 [Arabidopsis thaliana]
  misc_feature (1)..(316): Homolog of NCBI NO: 18405808 NR Description: oxidoreductase, 2OG-Fe(II) oxygenase family
MDSRIFLAFSLCFLFTLPLISSAPNRFLTRSSNTRDGSVIKMKTSASSFGFDPTRVTQLSWTPRVFLYEGFLSDEECDHFIKLAKGKLEKSMVADNDSGESVESEVRTSSGMFLSKRQDDIVSNVEAKLAAWTFLPEENGESMQILHYENGQKYEPHFDYFHDQANLELGGHRIATVLMYLSNVEKGGETVFPMWKGKATQLKDDSWTECAKQGYAVKPRKGDALLFFNLHPNATTDSNSLHGSCPVVEGEKWSATRWIHVKSFERAFNKQSGCMDENVSCEKWAKAGECQKNPTYMVGSDKDHGYCRKSCKACSS

SEQ ID NO: 28040 - protein, 275 aa, Arabidopsis thaliana
  peptide (1)..(275): Ceres Seq. ID no. 13504862
  misc_feature (98)..(220): Pfam Name: 2OG-Fe(II) oxygenase superfamily Pfam Description: 2OG-Fe(II) oxygenase superfamily
  misc_feature (10)..(275): Homolog of NCBI NO: 34393269 NR Description: prolyl 4-hydroxylase alpha-1 subunit
  misc_feature (1)..(149): Homolog of NCBI NO: 24417248 NR Description: unknown [Arabidopsis thaliana]
  misc_feature (10)..(275): Homolog of NCBI NO: 29150365 NR Description: putative oxidoreductase [Oryza sativa (japonica
  misc_feature (10)..(77): Homolog of NCBI NO: 37534316 NR Description: unknown protein [Oryza sativa (japonica
  misc_feature (78)..(274): Homolog of NCBI NO: 37534316 NR Description: unknown protein [Oryza sativa (japonica
  misc_feature (19)..(273): Homolog of NCBI NO: 28393447 NR Description: putative prolyl 4-hydroxylase [Arabidopsis
  misc_feature (1)..(273): Homolog of NCBI NO: 30689216 NR Description: oxidoreductase, 2OG-Fe(II) oxygenase family
  misc_feature (1)..(275): Homolog of NCBI NO: 9294583 NR Description: prolyl 4-hydroxylase alpha subunit-like protein
  misc_feature (1)..(275): Homolog of NCBI NO: 18086437 NR Description: AT3g28480/MFJ20_16 [Arabidopsis thaliana]
  misc_feature (1)..(275): Homolog of NCBI NO: 18405808 NR Description: oxidoreductase, 2OG-Fe(II) oxygenase family
MKTSASSFGFDPTRVTQLSWTPRVFLYEGFLSDEECDHFIKLAKGKLEKSMVADNDSGESVESEVRTSSGMFLSKRQDDIVSNVEAKLAAWTFLPEENGESMQILHYENGQKYEPHFDYFHDQANLELGGHRIATVLMYLSNVEKGGETVFPMWKGKATQLKDDSWTECAKQGYAVKPRKGDALLFFNLHPNATTDSNSLHGSCPVVEGEKWSATRWIHVKSFERAFNKQSGCMDENVSCEKWAKAGECQKNPTYMVGSDKDHGYCRKSCKACSS

SEQ ID NO: 28041 - DNA, 1684 bp, Arabidopsis thaliana; identical to SEQ ID NO: 27249
  misc_feature (1)..(1684): Ceres Seq. ID no. 12739003
  misc_feature: MA Experiment ID: 108461 Result: Down-regulated in Transcription
  misc_feature: MA Experiment 108461 PARAMETER Experiment Name: At_Germinating_Seeds_cDNA_P Parameter: Age (day) Value: 1 vs. 0
  misc_feature: MA Experiment 108461 PARAMETER Experiment Name: At_Germinating_Seeds_cDNA_P Parameter: Tissue Value: Germinating Seeds
  misc_feature: MA Experiment ID: 108569 Result: Up-regulated in Transcription
  misc_feature: MA Experiment 108569 PARAMETER Experiment Name: At_0.001%_MeJA__cDNA_P Parameter: Timepoint (hr) Value: 6
  misc_feature: MA Experiment 108569 PARAMETER Experiment Name: At_0.001%_MeJA__cDNA_P Parameter: Tissue Value: Aerial
  misc_feature: MA Experiment 108569 PARAMETER Experiment Name: At_0.001%_MeJA__cDNA_P Parameter: Treatment Value: 0.001% MeJA vs. No Treatment
  misc_feature: MA Experiment ID: 108573 Result: Up-regulated in Transcription
  misc_feature: MA Experiment 108573 PARAMETER Experiment Name: At_Drought_cDNA_P Parameter: Timepoint (hr) Value: 6
  misc_feature: MA Experiment 108573 PARAMETER Experiment Name: At_Drought_cDNA_P Parameter: Tissue Value: Aerial
  misc_feature: MA Experiment 108573 PARAMETER Experiment Name: At_Drought_cDNA_P Parameter: Treatment Value: Drought vs. No Drought
  misc_feature: MA Experiment ID: 108579 Result: Down-regulated in Transcription
  misc_feature: MA Experiment 108579 PARAMETER Experiment Name: At_4deg_Cold_cDNA_P Parameter: Temperature (deg C) Value: 4 vs. 22
  misc_feature: MA Experiment 108579 PARAMETER Experiment Name: At_4deg_Cold_cDNA_P Parameter: Timepoint (hr) Value: 6
  misc_feature: MA Experiment 108579 PARAMETER Experiment Name: At_4deg_Cold_cDNA_P Parameter: Tissue Value: Aerial
  misc_feature: MA Experiment ID: 108585 Result: Up-regulated in Transcription
  misc_feature: MA Experiment 108585 PARAMETER Experiment Name: At_5mM_NaNP_cDNA_P Parameter: Timepoint (hr) Value: 6
  misc_feature: MA Experiment 108585 PARAMETER Experiment Name: At_5mM_NaNP_cDNA_P Parameter: Tissue Value: Aerial
  misc_feature: MA Experiment 108585 PARAMETER Experiment Name: At_5mM_NaNP_cDNA_P Parameter: Treatment Value: null
  misc_feature: MA Experiment ID: 20000069 Result: Down-regulated in Transcription
  misc_feature: MA Experiment 20000069 PARAMETER Experiment Name: At_100uM_ABA_Mutants_cDNA_P Parameter: Plant Line Value: CS23
  misc_feature: MA Experiment 20000069 PARAMETER Experiment Name: At_100uM_ABA_Mutants_cDNA_P Parameter: Timepoint (hr) Value: 6
  misc_feature: MA Experiment 20000069 PARAMETER Experiment Name: At_100uM_ABA_Mutants_cDNA_P Parameter: Tissue Value: Aerial
  misc_feature: MA Experiment 20000069 PARAMETER Experiment Name: At_100uM_ABA_Mutants_cDNA_P Parameter: Treatment Value: 100uM ABA vs. No Treatment
  misc_feature: MA Experiment ID: 20000087 Result: Down-regulated in Transcription
  misc_feature: MA Experiment 20000087 PARAMETER Experiment Name: At_100uM_ABA_Mutants_cDNA_P Parameter: Plant Line Value: WS
  misc_feature: MA Experiment 20000087 PARAMETER Experiment Name: At_100uM_ABA_Mutants_cDNA_P Parameter: Timepoint (hr) Value: 6
  misc_feature: MA Experiment 20000087 PARAMETER Experiment Name: At_100uM_ABA_Mutants_cDNA_P Parameter: Tissue Value: Aerial
  misc_feature: MA Experiment 20000087 PARAMETER Experiment Name: At_100uM_ABA_Mutants_cDNA_P Parameter: Treatment Value: 100uM ABA vs. No Treatment
  misc_feature: MA Experiment ID: 20000089 Result: Down-regulated in Transcription
  misc_feature: MA Experiment ID: 20000090 Result: Down-regulated in Transcription
  misc_feature: MA Experiment ID: 20000117 Result: Down-regulated in Transcription
  misc_feature: MA Experiment 20000117 PARAMETER Experiment Name: At_100uM_ABA_Mutants_cDNA_P Parameter: Plant Line Value: Columbia
  misc_feature: MA Experiment 20000117 PARAMETER Experiment Name: At_100uM_ABA_Mutants_cDNA_P Parameter: Timepoint (hr) Value: 6
  misc_feature: MA Experiment 20000117 PARAMETER Experiment Name: At_100uM_ABA_Mutants_cDNA_P Parameter: Tissue Value: Aerial
  misc_feature: MA Experiment 20000117 PARAMETER Experiment Name: At_100uM_ABA_Mutants_cDNA_P Parameter: Treatment Value: 100uM ABA vs. No Treatment
  misc_feature: MA Experiment ID: 20000180 Result: Down-regulated in Transcription
  misc_feature: MA Experiment 20000180 PARAMETER Experiment Name: At_Germinating_Seeds_P Parameter: Age (hr) Value: 24 vs. 0
  misc_feature: MA Experiment 20000180 PARAMETER Experiment Name: At_Germinating_Seeds_P Parameter: Tissue Value: Germinating Seeds
  misc_feature: MA Experiment ID: 20000184 Result: Up-regulated in Transcription
  misc_feature: MA Experiment 20000184 PARAMETER Experiment Name: At_Shoots__P Parameter: Age (day) Value: 7
  misc_feature: MA Experiment 20000184 PARAMETER Experiment Name: At_Shoots__P Parameter: Tissue Value: Shoots vs. Whole Plant
  misc_feature: MA Experiment ID: 20000794 Result: Up-regulated in Transcription
  misc_feature: MA Experiment 20000794 PARAMETER Experiment Name: At_Petals_P Parameter: Age (day) Value: 23-25 days
  misc_feature: MA Experiment 20000794 PARAMETER Experiment Name: At_Petals_P Parameter: Plant Line Value: WS
  misc_feature: MA Experiment 20000794 PARAMETER Experiment Name: At_Petals_P Parameter: Tissue Value: Petals vs. Whole plant
  misc_feature: MA Experiment ID: 20001911 Result: Up-regulated in Transcription
  misc_feature: MA Experiment 20001911 PARAMETER Experiment Name: At_Drought_Reproduction_P Parameter: Age (day) Value: 40
  misc_feature: MA Experiment 20001911 PARAMETER Experiment Name: At_Drought_Reproduction_P Parameter: Organism Value: A. thaliana
  misc_feature: MA Experiment 20001911 PARAMETER Experiment Name: At_Drought_Reproduction_P Parameter: Plant Line Value: WS
  misc_feature: MA Experiment 20001911 PARAMETER Experiment Name: At_Drought_Reproduction_P Parameter: Timepoint (day) Value: 10
  misc_feature: MA Experiment 20001911 PARAMETER Experiment Name: At_Drought_Reproduction_P Parameter: Tissue Value: Flowers
  misc_feature: MA Experiment 20001911 PARAMETER Experiment Name: At_Drought_Reproduction_P Parameter: Treatment Value: Drought vs. No Drought

SEQ ID NO: 28042 - protein, 332 aa, Arabidopsis thaliana; identical to SEQ ID NO: 27250
  peptide (1)..(332): Ceres Seq. ID no. 12739004
  misc_feature (1)..(330): Pfam Name: Sugar (and other) transporter Pfam Description: Sugar (and other) transporter
  misc_feature (1)..(330): Pfam Name: Sugar (and other) transporter Pfam Description: Sugar (and other) transporter
  misc_feature (1)..(327): Homolog of NCBI NO: 30695810 NR Description: sugar transporter, putative [Arabidopsis thaliana]
  misc_feature (1)..(29): Homolog of NCBI NO: 25409087 NR Description: probable sugar transporter [imported] -
  misc_feature (196)..(332): Homolog of NCBI NO: 25409087 NR Description: probable sugar transporter [imported] -
  misc_feature (1)..(330): Homolog of NCBI NO: 30679397 NR Description: sugar transporter family [Arabidopsis thaliana]
  misc_feature (1)..(330): Homolog of NCBI NO: 6729025 NR Description: putative sugar transporter [Arabidopsis thaliana]
  misc_feature (1)..(327): Homolog of NCBI NO: 30695810 NR Description: sugar transporter, putative [Arabidopsis thaliana]
  misc_feature (196)..(332): Homolog of NCBI NO: 25409087 NR Description: probable sugar transporter [imported] -
  misc_feature (1)..(330): Homolog of NCBI NO: 6729025 NR Description: putative sugar transporter [Arabidopsis thaliana]
  misc_feature (1)..(332): Homolog of NCBI NO: 18407508 NR Description: putative sugar transporter
  misc_feature (1)..(332): Homolog of NCBI NO: 21536914 NR Description: putative sugar transporter [Arabidopsis thaliana]
  misc_feature (1)..(331): Homolog of NCBI NO: 23504385 NR Description: putative sugar transporter [Lycopersicon
  misc_feature (1)..(330): Homolog of NCBI NO: 18419741 NR Description: sugar transporter - like protein
  misc_feature (1)..(330): Homolog of NCBI NO: 21592787 NR Description: sugar transporter-like protein [Arabidopsis
  misc_feature (1)..(330): Homolog of NCBI NO: 30679397 NR Description: sugar transporter family [Arabidopsis thaliana]
  misc_feature (1)..(29): Homolog of NCBI NO: 25409087 NR Description: probable sugar transporter [imported] -
  misc_feature (1)..(330): Homolog of NCBI NO: 21592787 NR Description: sugar transporter-like protein [Arabidopsis
  misc_feature (1)..(330): Homolog of NCBI NO: 18419741 NR Description: sugar transporter - like protein
  misc_feature (1)..(331): Homolog of NCBI NO: 23504385 NR Description: putative sugar transporter [Lycopersicon
  misc_feature (1)..(332): Homolog of NCBI NO: 21536914 NR Description: putative sugar transporter [Arabidopsis thaliana]
  misc_feature (1)..(332): Homolog of NCBI NO: 18407508 NR Description: putative sugar transporter

SEQ ID NO: 28043 - protein, 212 aa, Arabidopsis thaliana; identical to SEQ ID NO: 27251
  peptide (1)..(212): Ceres Seq. ID no. 12739005
  misc_feature (1)..(210): Pfam Name: Sugar (and other) transporter Pfam Description: Sugar (and other) transporter
  misc_feature (1)..(210): Pfam Name: Sugar (and other) transporter Pfam Description: Sugar (and other) transporter
  misc_feature (1)..(58): Homolog of NCBI NO: 25405762 NR Description: hypothetical protein T22H22.15 [imported] -
  misc_feature (1)..(207): Homolog of NCBI NO: 30695810 NR Description: sugar transporter, putative [Arabidopsis thaliana]
  misc_feature (76)..(212): Homolog of NCBI NO: 25409087 NR Description: probable sugar transporter [imported] -
  misc_feature (1)..(210): Homolog of NCBI NO: 30679397 NR Description: sugar transporter family [Arabidopsis thaliana]
  misc_feature (1)..(210): Homolog of NCBI NO: 6729025 NR Description: putative sugar transporter [Arabidopsis thaliana]
  misc_feature (1)..(58): Homolog of NCBI NO: 25405762 NR Description: hypothetical protein T22H22.15 [imported] -
  misc_feature (76)..(212): Homolog of NCBI NO: 25409087 NR Description: probable sugar transporter [imported] -
  misc_feature (1)..(210): Homolog of NCBI NO: 6729025 NR Description: putative sugar transporter [Arabidopsis thaliana]
  misc_feature (1)..(212): Homolog of NCBI NO: 18407508 NR Description: putative sugar transporter
  misc_feature (1)..(212): Homolog of NCBI NO: 21536914 NR Description: putative sugar transporter [Arabidopsis thaliana]
  misc_feature (1)..(211): Homolog of NCBI NO: 23504385 NR Description: putative sugar transporter [Lycopersicon
  misc_feature (1)..(210): Homolog of NCBI NO: 18419741 NR Description: sugar transporter - like protein
  misc_feature (1)..(210): Homolog of NCBI NO: 21592787 NR Description: sugar transporter-like protein [Arabidopsis
  misc_feature (1)..(210): Homolog of NCBI NO: 30679397 NR Description: sugar transporter family [Arabidopsis thaliana]
  misc_feature (1)..(207): Homolog of NCBI NO: 30695810 NR Description: sugar transporter, putative [Arabidopsis thaliana]
  misc_feature (1)..(210): Homolog of NCBI NO: 21592787 NR Description: sugar transporter-like protein [Arabidopsis
  misc_feature (1)..(210): Homolog of NCBI NO: 18419741 NR Description: sugar transporter - like protein
  misc_feature (1)..(211): Homolog of NCBI NO: 23504385 NR Description: putative sugar transporter [Lycopersicon
  misc_feature (1)..(212): Homolog of NCBI NO: 21536914 NR Description: putative sugar transporter [Arabidopsis thaliana]
  misc_feature (1)..(212): Homolog of NCBI NO: 18407508 NR Description: putative sugar transporter

SEQ ID NO: 28044 - protein, 193 aa, Arabidopsis thaliana; identical to SEQ ID NO: 27252
  peptide (1)..(193): Ceres Seq. ID no. 12739006
  misc_feature (1)..(191): Pfam Name: Sugar (and other) transporter Pfam Description: Sugar (and other) transporter
  misc_feature (1)..(191): Pfam Name: Sugar (and other) transporter Pfam Description: Sugar (and other) transporter
  misc_feature (1)..(39): Homolog of NCBI NO: 25405762 NR Description: hypothetical protein T22H22.15 [imported] -
  misc_feature (1)..(188): Homolog of NCBI NO: 30695810 NR Description: sugar transporter, putative [Arabidopsis thaliana]
  misc_feature (57)..(193): Homolog of NCBI NO: 25409087 NR Description: probable sugar transporter [imported] -
  misc_feature (1)..(191): Homolog of NCBI NO: 30679397 NR Description: sugar transporter family [Arabidopsis thaliana]
  misc_feature (1)..(191): Homolog of NCBI NO: 6729025 NR Description: putative sugar transporter [Arabidopsis thaliana]
  misc_feature (1)..(39): Homolog of NCBI NO: 25405762 NR Description: hypothetical protein T22H22.15 [imported] -
  misc_feature (57)..(193): Homolog of NCBI NO: 25409087 NR Description: probable sugar transporter [imported] -
  misc_feature (1)..(191): Homolog of NCBI NO: 6729025 NR Description: putative sugar transporter [Arabidopsis thaliana]
  misc_feature (1)..(193): Homolog of NCBI NO: 18407508 NR Description: putative sugar transporter
  misc_feature (1)..(193): Homolog of NCBI NO: 21536914 NR Description: putative sugar transporter [Arabidopsis thaliana]
  misc_feature (1)..(192): Homolog of NCBI NO: 23504385 NR Description: putative sugar transporter [Lycopersicon
  misc_feature (1)..(191): Homolog of NCBI NO: 18419741 NR Description: sugar transporter - like protein
  misc_feature (1)..(191): Homolog of NCBI NO: 21592787 NR Description: sugar transporter-like protein [Arabidopsis
  misc_feature (1)..(191): Homolog of NCBI NO: 30679397 NR Description: sugar transporter family [Arabidopsis thaliana]
  misc_feature (1)..(188): Homolog of NCBI NO: 30695810 NR Description: sugar transporter, putative [Arabidopsis thaliana]
  misc_feature (1)..(191): Homolog of NCBI NO: 21592787 NR Description: sugar transporter-like protein [Arabidopsis
  misc_feature (1)..(191): Homolog of NCBI NO: 18419741 NR Description: sugar transporter - like protein
  misc_feature (1)..(192): Homolog of NCBI NO: 23504385 NR Description: putative sugar transporter [Lycopersicon
  misc_feature (1)..(193): Homolog of NCBI NO: 21536914 NR Description: putative sugar transporter [Arabidopsis thaliana]
  misc_feature (1)..(193): Homolog of NCBI NO: 18407508 NR Description: putative sugar transporter

SEQ ID NO: 28045 - DNA, 1307 bp, Arabidopsis thaliana
  misc_feature (1)..(1307): Ceres Seq. ID no. 13493913
  misc_feature: MA Experiment ID: 20000307 Result: Up-regulated in Transcription
  misc_feature: MA Experiment 20000307 PARAMETER Experiment Name: At_Germinating_Seeds_Sub_P Parameter: Age (hr) Value: 24 vs. 0
  misc_feature: MA Experiment 20000307 PARAMETER Experiment Name: At_Germinating_Seeds_Sub_P Parameter: Organism Value: A. thaliana
  misc_feature: MA Experiment 20000307 PARAMETER Experiment Name: At_Germinating_Seeds_Sub_P Parameter: Plant Line Value: WS
  misc_feature: MA Experiment 20000307 PARAMETER Experiment Name: At_Germinating_Seeds_Sub_P Parameter: Tissue Value: Germinating Seeds
  misc_feature: MA Experiment ID: 20000314 Result: Up-regulated in Transcription
  misc_feature: MA Experiment 20000314 PARAMETER Experiment Name: At_14day_Shoots-Roots_Sub_P Parameter: Age (day) Value: 14
  misc_feature: MA Experiment 20000314 PARAMETER Experiment Name: At_14day_Shoots-Roots_Sub_P Parameter: Organism Value: A. thaliana
  misc_feature: MA Experiment 20000314 PARAMETER Experiment Name: At_14day_Shoots-Roots_Sub_P Parameter: Plant Line Value: WS
  misc_feature: MA Experiment 20000314 PARAMETER Experiment Name: At_14day_Shoots-Roots_Sub_P Parameter: Tissue Value: Roots vs. Whole Plant
  misc_feature: MA Experiment ID: 20000315 Result: Down-regulated in Transcription
  misc_feature: MA Experiment 20000315 PARAMETER Experiment Name: At_14day_Shoots-Roots_Sub_P Parameter: Age (day) Value: 14
  misc_feature: MA Experiment 20000315 PARAMETER Experiment Name: At_14day_Shoots-Roots_Sub_P Parameter: Organism Value: A. thaliana
  misc_feature: MA Experiment 20000315 PARAMETER Experiment Name: At_14day_Shoots-Roots_Sub_P Parameter: Plant Line Value: WS
  misc_feature: MA Experiment 20000315 PARAMETER Experiment Name: At_14day_Shoots-Roots_Sub_P Parameter: Tissue Value: Shoots vs. Whole Plant
  misc_feature: MA Experiment ID: 20000328 Result: Down-regulated in Transcription
  misc_feature: MA Experiment 20000328 PARAMETER Experiment Name: At_42deg_Heat_Sub_P Parameter: Age (day) Value: 14
  misc_feature: MA Experiment 20000328 PARAMETER Experiment Name: At_42deg_Heat_Sub_P Parameter: Organism Value: A. thaliana
  misc_feature: MA Experiment 20000328 PARAMETER Experiment Name: At_42deg_Heat_Sub_P Parameter: Plant Line Value: WS
  misc_feature: MA Experiment 20000328 PARAMETER Experiment Name: At_42deg_Heat_Sub_P Parameter: Temperature (deg C) Value: 42 vs. 22
  misc_feature: MA Experiment 20000328 PARAMETER Experiment Name: At_42deg_Heat_Sub_P Parameter: Timepoint (hr) Value: 6
  misc_feature: MA Experiment 20000328 PARAMETER Experiment Name: At_42deg_Heat_Sub_P Parameter: Tissue Value: Aerial
  misc_feature: MA Experiment ID: 20000355 Result: Down-regulated in Transcription
  misc_feature: MA Experiment 20000355 PARAMETER Experiment Name: At_Siliques_Sub_P Parameter: Age (day) Value: 21
  misc_feature: MA Experiment 20000355 PARAMETER Experiment Name: At_Siliques_Sub_P Parameter: Organism Value: A. thaliana
  misc_feature: MA Experiment 20000355 PARAMETER Experiment Name: At_Siliques_Sub_P Parameter: Plant Line Value: WS
  misc_feature: MA Experiment 20000355 PARAMETER Experiment Name: At_Siliques_Sub_P Parameter: Tissue Value: Less Than 5mm Siliques vs. Whole Plant
  misc_feature: MA Experiment ID: 20000440 Result: Down-regulated in Transcription
  misc_feature: MA Experiment 20000440 PARAMETER Experiment Name: At_Closed-Flower__Sub_P Parameter: Tissue Value: Closed Flower vs. Whole Plant
gaaaagaaactcaactttttttctttatctttaacatcaaaaaactttttcgatatctttacaaccattaaacaaaaaatttggccactacaagttgaaaaagttttgattatatctaatcgctgaaatggattacaaggtatcaagaagtggggagatagtagaaggagaagtagaagattcagaaaagattgatttaccacctggtttcagatttcacccaactgatgaagaacttataacacactatctaagaccaaaggttgtaaactcttttttctctgctatagctattggtgaagttgatctcaacaaagtcgagccttgggacttgccttggaaggctaagcttggggaaaaagagtggtacttcttttgcgtaagagaccgaaaatacccgactggtttaagaacgaatcgtgctactaaagccggttattggaaagctacagggaaagataaagagatcttcaaagggaaatctcttgttggtatgaagaaaacattggttttctacaaaggaagagctcctaaaggagtaaaaacaaattgggtcatgcatgagtatcgattagaaggcaaattcgctatcgataatctctctaaaaccgctaagaacgaatgtgttattagtcgtgtttttcatacacggactgatggtacgaaggagcatatgtccgttggtttacctccgctgatggattcttctccatatctaaagagtagaggacaagactctttagccgggaccacccttggtgggttgttgtctcacgttacctacttctccgaccaaacaaccgatgacaagagtcttgtggccgattttaaaactaccatgtttggttccggatcgactaactttttaccaaacataggttctctactagacttcgatcctctgtttctacaaaacaattcttcagtactgaagatgttgcttgacaatgaagaaacccaatttaagaagaatcttcacaattcaggttcatcagagagtgaactaacagcgagttcttggcaaggtcacaattcttatggttccactggtccagtgaatcttgattgcgtttggaaattctgaatttggaaaatcgaaaatttggatgttaactagggggtatatagggtttttaaaaacagtgtatatatgcgttatgtgttagctttagattctaggatatacaaagatgacactaatagattcttataacattttgtaaaaaaaaatcattgtagtgaatactctcttgccatttgaaatccattgtgtttgcatatttaaggtgttcataaattgtcatgct

SEQ ID NO: 28046 - protein, 318 aa, Arabidopsis thaliana
  peptide (1)..(318): Ceres Seq. ID no. 13493914
  misc_feature (24)..(150): Pfam Name: No apical meristem (NAM) protein Pfam Description: No apical meristem (NAM) protein
  misc_feature (33)..(318): Homolog of NCBI NO: 21105757 NR Description: nam-like protein 14 [Petunia x hybrida]
  misc_feature (22)..(196): Homolog of NCBI NO: 21537315 NR Description: NAM, no apical meristem,-like protein
  misc_feature (14)..(196): Homolog of NCBI NO: 15240252 NR Description: NAM, no apical meristem, - like protein
  misc_feature (22)..(283): Homolog of NCBI NO: 30682054 NR Description: NAM (no apical meristem)-related protein
  misc_feature (17)..(283): Homolog of NCBI NO: 30682048 NR Description: NAM (no apical meristem)-related protein
  misc_feature (16)..(298): Homolog of NCBI NO: 21536866 NR Description: NAM / CUC2-like protein [Arabidopsis thaliana]
  misc_feature (1)..(298): Homolog of NCBI NO: 15241819 NR Description: NAM / CUC2 - like protein [Arabidopsis thaliana]
  misc_feature (1)..(318): Homolog of NCBI NO: 15228570 NR Description: hypothetical protein
MDYKVSRSGEIVEGEVEDSEKIDLPPGFRFHPTDEELITHYLRPKVVNSFFSAIAIGEVDLNKVEPWDLPWKAKLGEKEWYFFCVRDRKYPTGLRTNRATKAGYWKATGKDKEIFKGKSLVGMKKTLVFYKGRAPKGVKTNWVMHEYRLEGKFAIDNLSKTAKNECVISRVFHTRTDGTKEHMSVGLPPLMDSSPYLKSRGQDSLAGTTLGGLLSHVTYFSDQTTDDKSLVADFKTTMFGSGSTNFLPNIGSLLDFDPLFLQNNSSVLKMLLDNEETQFKKNLHNSGSSESELTASSWQGHNSYGSTGPVNLDCVWKF

SEQ ID NO: 28047 - protein, 196 aa, Arabidopsis thaliana
  peptide (1)..(196): Ceres Seq. ID no. 13493915
  misc_feature (1)..(196): Homolog of NCBI NO: 21105757 NR Description: nam-like protein 14 [Petunia x hybrida]
  misc_feature (1)..(74): Homolog of NCBI NO: 21537315 NR Description: NAM, no apical meristem,-like protein
  misc_feature (1)..(74): Homolog of NCBI NO: 15240252 NR Description: NAM, no apical meristem, - like protein
  misc_feature (1)..(161): Homolog of NCBI NO: 30682054 NR Description: NAM (no apical meristem)-related protein
  misc_feature (1)..(161): Homolog of NCBI NO: 30682048 NR Description: NAM (no apical meristem)-related protein
  misc_feature (1)..(176): Homolog of NCBI NO: 21536866 NR Description: NAM / CUC2-like protein [Arabidopsis thaliana]
  misc_feature (1)..(176): Homolog of NCBI NO: 15241819 NR Description: NAM / CUC2 - like protein [Arabidopsis thaliana]
  misc_feature (1)..(196): Homolog of NCBI NO: 15228570 NR Description: hypothetical protein
MKKTLVFYKGRAPKGVKTNWVMHEYRLEGKFAIDNLSKTAKNECVISRVFHTRTDGTKEHMSVGLPPLMDSSPYLKSRGQDSLAGTTLGGLLSHVTYFSDQTTDDKSLVADFKTTMFGSGSTNFLPNIGSLLDFDPLFLQNNSSVLKMLLDNEETQFKKNLHNSGSSESELTASSWQGHNSYGSTGPVNLDCVWKF

SEQ ID NO: 28048 - protein, 175 aa, Arabidopsis thaliana
  peptide (1)..(175): Ceres Seq. ID no. 13493916
  misc_feature (1)..(175): Homolog of NCBI NO: 21105757 NR Description: nam-like protein 14 [Petunia x hybrida]
  misc_feature (1)..(53): Homolog of NCBI NO: 21537315 NR Description: NAM, no apical meristem,-like protein
  misc_feature (1)..(53): Homolog of NCBI NO: 15240252 NR Description: NAM, no apical meristem, - like protein
  misc_feature (1)..(140): Homolog of NCBI NO: 30682054 NR Description: NAM (no apical meristem)-related protein
  misc_feature (1)..(140): Homolog of NCBI NO: 30682048 NR Description: NAM (no apical meristem)-related protein
  misc_feature (1)..(155): Homolog of NCBI NO: 21536866 NR Description: NAM / CUC2-like protein [Arabidopsis thaliana]
  misc_feature (1)..(155): Homolog of NCBI NO: 15241819 NR Description: NAM / CUC2 - like protein [Arabidopsis thaliana]
  misc_feature (1)..(175): Homolog of NCBI NO: 15228570 NR Description: hypothetical protein
MHEYRLEGKFAIDNLSKTAKNECVISRVFHTRTDGTKEHMSVGLPPLMDSSPYLKSRGQDSLAGTTLGGLLSHVTYFSDQTTDDKSLVADFKTTMFGSGSTNFLPNIGSLLDFDPLFLQNNSSVLKMLLDNEETQFKKNLHNSGSSESELTASSWQGHNSYGSTGPVNLDCVWKF

SEQ ID NO: 28049 - DNA, 1023 bp, Arabidopsis thaliana
  misc_feature (1)..(1023): Ceres Seq. ID no. 12334086
  misc_feature: MA Experiment ID: 20000179 Result: Down-regulated in Transcription
  misc_feature: MA Experiment 20000179 PARAMETER Experiment Name: At_Germinating_Seeds_P Parameter: Age (hr) Value: 6 vs. 0
  misc_feature: MA Experiment 20000179 PARAMETER Experiment Name: At_Germinating_Seeds_P Parameter: Tissue Value: Germinating Seeds
  misc_feature: MA Experiment ID: 20000234 Result: Up-regulated in Transcription
  misc_feature: MA Experiment 20000234 PARAMETER Experiment Name: At_Siliques_P Parameter: Age (day) Value: 21
  misc_feature: MA Experiment 20000234 PARAMETER Experiment Name: At_Siliques_P Parameter: Organism Value: A. thaliana
  misc_feature: MA Experiment 20000234 PARAMETER Experiment Name: At_Siliques_P Parameter: Plant Line Value: WS
  misc_feature: MA Experiment 20000234 PARAMETER Experiment Name: At_Siliques_P Parameter: Tissue Value: Less Than 5mm Siliques vs. Whole Plant
  misc_feature: MA Experiment ID: 20001560 Result: Up-regulated in Transcription
  misc_feature: MA Experiment 20001560 PARAMETER Experiment Name: At_Drought_Soil_Dry_P Parameter: Age (day) Value: 28
  misc_feature: MA Experiment 20001560 PARAMETER Experiment Name: At_Drought_Soil_Dry_P Parameter: Organism Value: A. thaliana
  misc_feature: MA Experiment 20001560 PARAMETER Experiment Name: At_Drought_Soil_Dry_P Parameter: Plant Line Value: WS
  misc_feature: MA Experiment 20001560 PARAMETER Experiment Name: At_Drought_Soil_Dry_P Parameter: Post Timepoint (hr) Value: None
  misc_feature: MA Experiment 20001560 PARAMETER Experiment Name: At_Drought_Soil_Dry_P Parameter: Post-Treatment Value: None
  misc_feature: MA Experiment 20001560 PARAMETER Experiment Name: At_Drought_Soil_Dry_P Parameter: Timepoint (day) Value: 14
  misc_feature: MA Experiment 20001560 PARAMETER Experiment Name: At_Drought_Soil_Dry_P Parameter: Treatment Value: Drought vs. No Drought
aaaaaagatttggcttgtctctggcttgagaacaaagaaaacccctttcttcgatctcagcttaaatcactcgacgaagaagaaatcagaaaagagtcagagaaaaaaaaaatcaaggaagatgagtagcattggaactgggtacgatctctccgtcaccactttctctcccgatggccgtgttttccagatcgagtacgccgctaaagctgtcgacaacagtgggactgttgttggaatcaagtgcaaagatgggattgttatgggagttgagaaacttattgcatcaaagatgatgctaccaggttccaacaggagaatccattctgttcatcgtcatgctggcatggctgttgctgggcttgcagctgatgggaggcaaattgttgcgcgtgctaagtctgaagcacgaagctatgagagtgtttatggcgatgctgtacctgtgaaggaactttctgagcgtgttgcaagttatgtacatctgtgtaccctgtattggtggctcaggccttttggctgtggggttattcttggaggttatgatagagatggacctcaattgtacatgattgaaccatcaggcatatcatatagatactttggtgcggccattggcaaaggaaagcaagctgccaaaacggaaattgagaaattaaatttatctgagatgacatgcaaagaaggcgttatcgaggtggcgaaaatcatctacaagctacacgatgaagccaaggacaaggcttttgaattggagatgagctggatatgcgaggagtcaaaacgagagcatcagaaggtccctgatgatcttctggaagaagcaaagacggcagctaaaactgcgctcgaggagatggatgctgactaaaactgaggagtgtgttgaatttagatccgtcttattgcgtcgtttgatgtttcttatgtactctgaattgaattttgtctggagggacagttgttgcagtttcgcatgaaccattggagtcttttatcttattgctatcaacagttgctacg

SEQ ID NO: 28050 - protein, 289 aa, Arabidopsis thaliana
  peptide (1)..(289): Ceres Seq. ID no. 12334087
  misc_feature (71)..(256): Pfam Name: Proteasome A-type and B-type Pfam Description: Proteasome A-type and B-type
  misc_feature (173)..(289): Homolog of NCBI NO: 40743696 NR Description: hypothetical protein AN5793.2 [Aspergillus
  misc_feature (41)..(184): Homolog of NCBI NO: 40743696 NR Description: hypothetical protein AN5793.2 [Aspergillus
  misc_feature (41)..(287): Homolog of NCBI NO: 20810439 NR Description: proteasome (prosome, macropain) subunit, alpha
  misc_feature (41)..(287): Homolog of NCBI NO: 8394066 NR Description: proteasome (prosome, macropain) subunit, alpha
  misc_feature (43)..(285): Homolog of NCBI NO: 3914413 NR Description: Proteasome subunit alpha type 3
  misc_feature (41)..(289): Homolog of NCBI NO: 34909168 NR Description: proteasome subunit alpha type 3
  misc_feature (41)..(289): Homolog of NCBI NO: 14594925 NR Description: putative alpha7 proteasome subunit [Nicotiana
  misc_feature (41)..(289): Homolog of NCBI NO: 3914431 NR Description: Proteasome subunit alpha type 3 (20S proteasome subunit G) (20S proteasome subunit alpha-7) (Proteasome component
  misc_feature (41)..(289): Homolog of NCBI NO: 2511592 NR Description: multicatalytic endopeptidase complex, proteasome
  misc_feature (41)..(289): Homolog of NCBI NO: 15225839 NR Description: 20S proteasome alpha subunit G (PAG1)
KKIWLVSGLRTKKTPFFDLSLNHSTKKKSEKSQRKKKSRKMSSIGTGYDLSVTTFSPDGRVFQIEYAAKAVDNSGTVVGIKCKDGIVMGVEKLIASKMMLPGSNRRIHSVHRHAGMAVAGLAADGRQIVARAKSEARSYESVYGDAVPVKELSERVASYVHLCTLYWWLRPFGCGVILGGYDRDGPQLYMIEPSGISYRYFGAAIGKGKQAAKTEIEKLNLSEMTCKEGVIEVAKIIYKLHDEAKDKAFELEMSWICEESKREHQKVPDDLLEEAKTAAKTALEEMDAD

SEQ ID NO: 28051 - protein, 249 aa, Arabidopsis thaliana
  peptide (1)..(249): Ceres Seq. ID no. 12334088
  misc_feature (31)..(216): Pfam Name: Proteasome A-type and B-type Pfam Description: Proteasome A-type and B-type
  misc_feature (133)..(249): Homolog of NCBI NO: 40743696 NR Description: hypothetical protein AN5793.2 [Aspergillus
  misc_feature (1)..(144): Homolog of NCBI NO: 40743696 NR Description: hypothetical protein AN5793.2 [Aspergillus
  misc_feature (1)..(247): Homolog of NCBI NO: 20810439 NR Description: proteasome (prosome, macropain) subunit, alpha
  misc_feature (1)..(247): Homolog of NCBI NO: 8394066 NR Description: proteasome (prosome, macropain) subunit, alpha
  misc_feature (3)..(245): Homolog of NCBI NO: 3914413 NR Description: Proteasome subunit alpha type 3
  misc_feature (1)..(249): Homolog of NCBI NO: 34909168 NR Description: proteasome subunit alpha type 3
  misc_feature (1)..(249): Homolog of NCBI NO: 14594925 NR Description: putative alpha7 proteasome subunit [Nicotiana
  misc_feature (1)..(249): Homolog of NCBI NO: 3914431 NR Description: Proteasome subunit alpha type 3 (20S proteasome subunit G) (20S proteasome subunit alpha-7) (Proteasome component
  misc_feature (1)..(249): Homolog of NCBI NO: 2511592 NR Description: multicatalytic endopeptidase complex, proteasome
  misc_feature (1)..(249): Homolog of NCBI NO: 15225839 NR Description: 20S proteasome alpha subunit G (PAG1)
MSSIGTGYDLSVTTFSPDGRVFQIEYAAKAVDNSGTVVGIKCKDGIVMGVEKLIASKMMLPGSNRRIHSVHRHAGMAVAGLAADGRQIVARAKSEARSYESVYGDAVPVKELSERVASYVHLCTLYWWLRPFGCGVILGGYDRDGPQLYMIEPSGISYRYFGAAIGKGKQAAKTEIEKLNLSEMTCKEGVIEVAKIIYKLHDEAKDKAFELEMSWICEESKREHQKVPDDLLEEAKTAAKTALEEMDAD

SEQ ID NO: 28052 - protein, 202 aa, Arabidopsis thaliana
  peptide (1)..(202): Ceres Seq. ID no. 12334089
  misc_feature (1)..(169): Pfam Name: Proteasome A-type and B-type Pfam Description: Proteasome A-type and B-type
  misc_feature (86)..(202): Homolog of NCBI NO: 40743696 NR Description: hypothetical protein AN5793.2 [Aspergillus
  misc_feature (1)..(97): Homolog of NCBI NO: 40743696 NR Description: hypothetical protein AN5793.2 [Aspergillus
  misc_feature (1)..(200): Homolog of NCBI NO: 20810439 NR Description: proteasome (prosome, macropain) subunit, alpha
  misc_feature (1)..(200): Homolog of NCBI NO: 8394066 NR Description: proteasome (prosome, macropain) subunit, alpha
  misc_feature (1)..(198): Homolog of NCBI NO: 3914413 NR Description: Proteasome subunit alpha type 3
  misc_feature (1)..(202): Homolog of NCBI NO: 34909168 NR Description: proteasome subunit alpha type 3
  misc_feature (1)..(202): Homolog of NCBI NO: 14594925 NR Description: putative alpha7 proteasome subunit [Nicotiana
  misc_feature (1)..(202): Homolog of NCBI NO: 3914431 NR Description: Proteasome subunit alpha type 3 (20S proteasome subunit G) (20S proteasome subunit alpha-7) (Proteasome component
  misc_feature (1)..(202): Homolog of NCBI NO: 2511592 NR Description: multicatalytic endopeptidase complex, proteasome
  misc_feature (1)..(202): Homolog of NCBI NO: 15225839 NR Description: 20S proteasome alpha subunit G (PAG1)
MGVEKLIASKMMLPGSNRRIHSVHRHAGMAVAGLAADGRQIVARAKSEARSYESVYGDAVPVKELSERVASYVHLCTLYWWLRPFGCGVILGGYDRDGPQLYMIEPSGISYRYFGAAIGKGKQAAKTEIEKLNLSEMTCKEGVIEVAKIIYKLHDEAKDKAFELEMSWICEESKREHQKVPDDLLEEAKTAAKTALEEMDAD

SEQ ID NO: 28053 - DNA, 817 bp, Arabidopsis thaliana
  misc_feature (1)..(817): Ceres Seq. ID no. 12331774
  misc_feature: MA Experiment ID: 108434 Result: Up-regulated in Transcription
  misc_feature: MA Experiment 108434 PARAMETER Experiment Name: At_Root_Tips_cDNA_P Parameter: Tissue Value: Root Tips
  misc_feature: MA Experiment ID: 108463 Result: Down-regulated in Transcription
  misc_feature: MA Experiment 108463 PARAMETER Experiment Name: At_Germinating_Seeds_cDNA_P Parameter: Age (day) Value: 3 vs. 0
  misc_feature: MA Experiment 108463 PARAMETER Experiment Name: At_Germinating_Seeds_cDNA_P Parameter: Tissue Value: Germinating Seeds
  misc_feature: MA Experiment ID: 108464 Result: Down-regulated in Transcription
  misc_feature: MA Experiment 108464 PARAMETER Experiment Name: At_Germinating_Seeds_cDNA_P Parameter: Age (day) Value: 4 vs. 0
  misc_feature: MA Experiment 108464 PARAMETER Experiment Name: At_Germinating_Seeds_cDNA_P Parameter: Tissue Value: Germinating Seeds
  misc_feature: MA Experiment ID: 108573 Result: Down-regulated in Transcription
  misc_feature: MA Experiment 108573 PARAMETER Experiment Name: At_Drought_cDNA_P Parameter: Timepoint (hr) Value: 6
  misc_feature: MA Experiment 108573 PARAMETER Experiment Name: At_Drought_cDNA_P Parameter: Tissue Value: Aerial
  misc_feature: MA Experiment 108573 PARAMETER Experiment Name: At_Drought_cDNA_P Parameter: Treatment Value: Drought vs. No Drought
  misc_feature: MA Experiment ID: 108595 Result: Down-regulated in Transcription
  misc_feature: MA Experiment 108595 PARAMETER Experiment Name: At_Ler-pi_Ovule_cDNA_P Parameter: Plant Line Value: null
  misc_feature: MA Experiment ID: 20000071 Result: Down-regulated in Transcription
  misc_feature: MA Experiment 20000071 PARAMETER Experiment Name: At_100uM_ABA_Mutants_cDNA_P Parameter: Plant Line Value: CS8104
  misc_feature: MA Experiment 20000071 PARAMETER Experiment Name: At_100uM_ABA_Mutants_cDNA_P Parameter: Timepoint (hr) Value: 6
  misc_feature: MA Experiment 20000071 PARAMETER Experiment Name: At_100uM_ABA_Mutants_cDNA_P Parameter: Tissue Value: Aerial
  misc_feature: MA Experiment 20000071 PARAMETER Experiment Name: At_100uM_ABA_Mutants_cDNA_P Parameter: Treatment Value: 100uM ABA vs. No Treatment
  misc_feature: MA Experiment ID: 20001451 Result: Down-regulated in Transcription
  misc_feature: MA Experiment 20001451 PARAMETER Experiment Name: At_Far-red-induction_P Parameter: Age (day) Value: 7
  misc_feature: MA Experiment 20001451 PARAMETER Experiment Name: At_Far-red-induction_P Parameter: Light Value: Far-red vs. White
  misc_feature: MA Experiment 20001451 PARAMETER Experiment Name: At_Far-red-induction_P Parameter: Organism Value: A. thaliana
  misc_feature: MA Experiment 20001451 PARAMETER Experiment Name: At_Far-red-induction_P Parameter: Plant Line Value: Columbia
  misc_feature: MA Experiment 20001451 PARAMETER Experiment Name: At_Far-red-induction_P Parameter: Timepoint (hr) Value: 24
  misc_feature: MA Experiment 20001451 PARAMETER Experiment Name: At_Far-red-induction_P Parameter: Tissue Value: Whole Plant
gacacagacaatggcggcggcggcggcgaaagcagcggtggttttgccacggccggtgacgtttgtgactggaaatgctaagaagctcgaagaagtcaaagctatcatcggaaattccattcctttcaagtctctcaaactcgatttgcctgagctccaaggtgagcctgaggatatttccaaagagaaggctcgtttggctgctcttcaggtggatggaccagtgcttgtggaagatacatgtctctgtttcaatgctttgaaagggcttcctgggccatacataaagtggtttctagagaagcttggtcacgaaggtctgaacaacttactgatggcctatgaagataaatcagcttatgcattgtgcgcattctctttctcgcgtggtccaggtgctgaacctcttacatttttggggaaaactccgggtaagatagttccagccagaggaccaactgatttcggatgggatccagtgtttcaacctgatggatatgaccaaacgtatgcagagatggcaaaggaagaaaagaacaagatatcacataggtacaagtctttagcattggtgaaatctcactttaaggaggctggctatgtgttccagacagatgatggtaccatttaaagagaaccagaactcattcatcattgtcttctgcgtttgaagaatggagcaccaatcactcaccagattcttgttcctattctaagctcctttgggaatattgatattgtaactttttttttcctcaaatacaagtagaaaccatggattgcaagaaataatatatttgtatcgttcgtgttgttc

SEQ ID NO: 28054 - protein, 209 aa, Arabidopsis thaliana
  peptide (1)..(209): Ceres Seq. ID no. 12331775
  misc_feature (19)..(195): Pfam Name: Ham1 family Pfam Description: Ham1 family
  misc_feature (17)..(111): Homolog of NCBI NO: 7510722 NR Description: hypothetical protein ZC395.7 - Caenorhabditis
  misc_feature (17)..(197): Homolog of NCBI NO: 39586542 NR Description: Hypothetical protein CBG21178 [Caenorhabditis
  misc_feature (11)..(195): Homolog of NCBI NO: 15626999 NR Description: inosine triphosphatase; Inosine triphosphatase-A
  misc_feature (11)..(195): Homolog of NCBI NO: 13398328 NR Description: inosine triphosphate pyrophosphatase [Homo
  misc_feature (11)..(195): Homolog of NCBI NO: 27732417 NR Description: similar to inosine triphosphatase; Inosine
  misc_feature (15)..(197): Homolog of NCBI NO: 19920712 NR Description: CG8891-PA [Drosophila melanogaster]
  misc_feature (4)..(205): Homolog of NCBI NO: 37535020 NR Description: putative HAM-1-like protein
  misc_feature (4)..(66): Homolog of NCBI NO: 7485688 NR Description: hypothetical protein F18A5.110 - Arabidopsis
  misc_feature (47)..(209): Homolog of NCBI NO: 7485688 NR Description: hypothetical protein F18A5.110 - Arabidopsis
  misc_feature (4)..(209): Homolog of NCBI NO: 18414065 NR Description: auxin-regulated protein
TQTMAAAAAKAAVVLPRPVTFVTGNAKKLEEVKAIIGNSIPFKSLKLDLPELQGEPEDISKEKARLAALQVDGPVLVEDTCLCFNALKGLPGPYIKWFLEKLGHEGLNNLLMAYEDKSAYALCAFSFSRGPGAEPLTFLGKTPGKIVPARGPTDFGWDPVFQPDGYDQTYAEMAKEEKNKISHRYKSLALVKSHFKEAGYVFQTDDGTI

SEQ ID NO: 28055 - protein, 206 aa, Arabidopsis thaliana
  peptide (1)..(206): Ceres Seq. ID no. 12331776
  misc_feature (16)..(192): Pfam Name: Ham1 family Pfam Description: Ham1 family
  misc_feature (14)..(108): Homolog of NCBI NO: 7510722 NR Description: hypothetical protein ZC395.7 - Caenorhabditis
  misc_feature (14)..(194): Homolog of NCBI NO: 39586542 NR Description: Hypothetical protein CBG21178 [Caenorhabditis
  misc_feature (8)..(192): Homolog of NCBI NO: 15626999 NR Description: inosine triphosphatase; Inosine triphosphatase-A
  misc_feature (8)..(192): Homolog of NCBI NO: 13398328 NR Description: inosine triphosphate pyrophosphatase [Homo
  misc_feature (8)..(192): Homolog of NCBI NO: 27732417 NR Description: similar to inosine triphosphatase; Inosine
  misc_feature (12)..(194): Homolog of NCBI NO: 19920712 NR Description: CG8891-PA [Drosophila melanogaster]
  misc_feature (1)..(202): Homolog of NCBI NO: 37535020 NR Description: putative HAM-1-like protein
  misc_feature (1)..(63): Homolog of NCBI NO: 7485688 NR Description: hypothetical protein F18A5.110 - Arabidopsis
  misc_feature (44)..(206): Homolog of NCBI NO: 7485688 NR Description: hypothetical protein F18A5.110 - Arabidopsis
  misc_feature (1)..(206): Homolog of NCBI NO: 18414065 NR Description: auxin-regulated protein
MAAAAAKAAVVLPRPVTFVTGNAKKLEEVKAIIGNSIPFKSLKLDLPELQGEPEDISKEKARLAALQVDGPVLVEDTCLCFNALKGLPGPYIKWFLEKLGHEGLNNLLMAYEDKSAYALCAFSFSRGPGAEPLTFLGKTPGKIVPARGPTDFGWDPVFQPDGYDQTYAEMAKEEKNKISHRYKSLALVKSHFKEAGYVFQTDDGTI

SEQ ID NO: 28056 - DNA, 719 bp, Arabidopsis thaliana
  misc_feature (1)..(719): Ceres Seq. ID no. 13489970
  misc_feature: MA Experiment ID: 20000179 Result: Up-regulated in Transcription
  misc_feature: MA Experiment 20000179 PARAMETER Experiment Name: At_Germinating_Seeds_P Parameter: Age (hr) Value: 6 vs. 0
  misc_feature: MA Experiment 20000179 PARAMETER Experiment Name: At_Germinating_Seeds_P Parameter: Tissue Value: Germinating Seeds
  misc_feature: MA Experiment ID: 20000234 Result: Up-regulated in Transcription
  misc_feature: MA Experiment 20000234 PARAMETER Experiment Name: At_Siliques_P Parameter: Age (day) Value: 21
  misc_feature: MA Experiment 20000234 PARAMETER Experiment Name: At_Siliques_P Parameter: Organism Value: A. thaliana
  misc_feature: MA Experiment 20000234 PARAMETER Experiment Name: At_Siliques_P Parameter: Plant Line Value: WS
  misc_feature: MA Experiment 20000234 PARAMETER Experiment Name: At_Siliques_P Parameter: Tissue Value: Less Than 5mm Siliques vs. Whole Plant
  misc_feature: MA Experiment ID: 20000235 Result: Up-regulated in Transcription
  misc_feature: MA Experiment 20000235 PARAMETER Experiment Name: At_Siliques_P Parameter: Age (day) Value: 21
  misc_feature: MA Experiment 20000235 PARAMETER Experiment Name: At_Siliques_P Parameter: Organism Value: A. thaliana
  misc_feature: MA Experiment 20000235 PARAMETER Experiment Name: At_Siliques_P Parameter: Plant Line Value: WS
  misc_feature: MA Experiment 20000235 PARAMETER Experiment Name: At_Siliques_P Parameter: Tissue Value: 5-10mm Siliques vs. Whole Plant
  misc_feature: MA Experiment ID: 20000265 Result: Up-regulated in Transcription
  misc_feature: MA Experiment 20000265 PARAMETER Experiment Name: At_Open_Flower_P Parameter: Age (day) Value: 21
  misc_feature: MA Experiment 20000265 PARAMETER Experiment Name: At_Open_Flower_P Parameter: Plant Line Value: WS
  misc_feature: MA Experiment 20000265 PARAMETER Experiment Name: At_Open_Flower_P Parameter: Tissue Value: Closed Flower vs. Whole Plant
  misc_feature: MA Experiment ID: 20000286 Result: Up-regulated in Transcription
  misc_feature: MA Experiment 20000286 PARAMETER Experiment Name: At_Open_Flower_P Parameter: Age (day) Value: 21
  misc_feature: MA Experiment 20000286 PARAMETER Experiment Name: At_Open_Flower_P Parameter: Plant Line Value: WS
  misc_feature: MA Experiment 20000286 PARAMETER Experiment Name: At_Open_Flower_P Parameter: Tissue Value: Half Open vs. Whole Plant
  misc_feature: MA Experiment ID: 20001248 Result: Down-regulated in Transcription
  misc_feature: MA Experiment 20001248 PARAMETER Experiment Name: At_Far-red-induction_P Parameter: Age (day) Value: 7
  misc_feature: MA Experiment 20001248 PARAMETER Experiment Name: At_Far-red-induction_P Parameter: Light Value: Far-red vs. White
  misc_feature: MA Experiment 20001248 PARAMETER Experiment Name: At_Far-red-induction_P Parameter: Organism Value: A. thaliana
  misc_feature: MA Experiment 20001248 PARAMETER Experiment Name: At_Far-red-induction_P Parameter: Plant Line Value: Columbia
  misc_feature: MA Experiment 20001248 PARAMETER Experiment Name: At_Far-red-induction_P Parameter: Timepoint (hr) Value: 4
  misc_feature: MA Experiment 20001248 PARAMETER Experiment Name: At_Far-red-induction_P Parameter: Tissue Value: Whole Plant
  misc_feature: MA Experiment ID: 20001911 Result: Down-regulated in Transcription
  misc_feature: MA Experiment 20001911 PARAMETER Experiment Name: At_Drought_Reproduction_P Parameter: Age (day) Value: 40
  misc_feature: MA Experiment 20001911 PARAMETER Experiment Name: At_Drought_Reproduction_P Parameter: Organism Value: A. thaliana
  misc_feature: MA Experiment 20001911 PARAMETER Experiment Name: At_Drought_Reproduction_P Parameter: Plant Line Value: WS
  misc_feature: MA Experiment 20001911 PARAMETER Experiment Name: At_Drought_Reproduction_P Parameter: Timepoint (day) Value: 10
  misc_feature: MA Experiment 20001911 PARAMETER Experiment Name: At_Drought_Reproduction_P Parameter: Tissue Value: Flowers
  misc_feature: MA Experiment 20001911 PARAMETER Experiment Name: At_Drought_Reproduction_P Parameter: Treatment Value: Drought vs. No Drought
gagccatttaaatctgattcatatcaaaaaattttcgatttaaaaaaaaaaccctcaaaaggtgttgatacggaaaaagaaaagggaaagaagaagagaatggatctagaatcggtgaaaaagtatctggaaggagatgaagacgaaaaggccaaggaaccaatggtggcgaaattaccacacagattcctcgaacgattcgtaaccaatggtcttaaagtggatctcatcgaacctggccgtatcgtctgctccatgaaaatccctcctcatctcctgaacgcagggaaattcttacacggaggagcaacggcgacgctggtggatttgataggatcagcagtgatctacacagccggagcttcacattccggagtttcagtggagatcaatgtttcataccttgatgctgcttttctcgatgaagagatagagatagaatcaaaggcattgcgtgttggtaaagctgtagcagtagtgagtgtggagctgaggaagaagacgactggtaagattattgctcaaggtcgtcataccaagtactttgctcctcgttccaacctttgatcgttcaaccaacctttcttcttttttacattcaataaacaacatcaaggtgtttttagtctttgtcccatttgcttcttattattattgatactaataaaactacattactatatgtttttctaataatacaaacaaccttactttttcac

SEQ ID NO: 28057 - protein, 188 aa, Arabidopsis thaliana
  peptide (1)..(188): Ceres Seq. ID no. 13489971
  misc_feature (22)..(177): Homolog of NCBI NO: 34904288 NR Description: unnamed protein product [Oryza sativa (japonica
  misc_feature (73)..(181): Homolog of NCBI NO: 27685797 NR Description: similar to RIKEN cDNA 0610006O17
  misc_feature (36)..(188): Homolog of NCBI NO: 25408036 NR Description: hypothetical protein At2g29590 [imported] -
  misc_feature (36)..(188): Homolog of NCBI NO: 18402093 NR Description: thioesterase-related [Arabidopsis thaliana]
  misc_feature (73)..(181): Homolog of NCBI NO: 13385260 NR Description: thioesterase superfamily member 2 [Mus musculus]
  misc_feature (49)..(181): Homolog of NCBI NO: 8923812 NR Description: thioesterase superfamily member 2
  misc_feature (99)..(188): Homolog of NCBI NO: 20161439 NR Description: B1065E10.13 [Oryza sativa (japonica
  misc_feature (34)..(188): Homolog of NCBI NO: 21740488 NR Description: OSJNBa0006B20.3 [Oryza sativa (japonica
  misc_feature (34)..(187): Homolog of NCBI NO: 13605902 NR Description: At1g04290/F19P19_27 [Arabidopsis thaliana]
  misc_feature (34)..(188): Homolog of NCBI NO: 18379308 NR Description: thioesterase-related [Arabidopsis thaliana]
EPFKSDSYQKIFDLKKKPSKGVDTEKEKGKKKRMDLESVKKYLEGDEDEKAKEPMVAKLPHRFLERFVTNGLKVDLIEPGRIVCSMKIPPHLLNAGKFLHGGATATLVDLIGSAVIYTAGASHSGVSVEINVSYLDAAFLDEEIEIESKALRVGKAVAVVSVELRKKTTGKIIAQGRHTKYFAPRSNL

SEQ ID NO: 28058 - protein, 155 aa, Arabidopsis thaliana
  peptide (1)..(155): Ceres Seq. ID no. 13489972
  misc_feature (1)..(144): Homolog of NCBI NO: 34904288 NR Description: unnamed protein product [Oryza sativa (japonica
  misc_feature (40)..(148): Homolog of NCBI NO: 27685797 NR Description: similar to RIKEN cDNA 0610006O17
  misc_feature (3)..(155): Homolog of NCBI NO: 25408036 NR Description: hypothetical protein At2g29590 [imported] -
  misc_feature (3)..(155): Homolog of NCBI NO: 18402093 NR Description: thioesterase-related [Arabidopsis thaliana]
  misc_feature (40)..(148): Homolog of NCBI NO: 13385260 NR Description: thioesterase superfamily member 2 [Mus musculus]
  misc_feature (16)..(148): Homolog of NCBI NO: 8923812 NR Description: thioesterase superfamily member 2
  misc_feature (66)..(155): Homolog of NCBI NO: 20161439 NR Description: B1065E10.13 [Oryza sativa (japonica
  misc_feature (1)..(155): Homolog of NCBI NO: 21740488 NR Description: OSJNBa0006B20.3 [Oryza sativa (japonica
  misc_feature (1)..(154): Homolog of NCBI NO: 13605902 NR Description: At1g04290/F19P19_27 [Arabidopsis thaliana]
  misc_feature (1)..(155): Homolog of NCBI NO: 18379308 NR Description: thioesterase-related [Arabidopsis thaliana]
MDLESVKKYLEGDEDEKAKEPMVAKLPHRFLERFVTNGLKVDLIEPGRIVCSMKIPPHLLNAGKFLHGGATATLVDLIGSAVIYTAGASHSGVSVEINVSYLDAAFLDEEIEIESKALRVGKAVAVVSVELRKKTTGKIIAQGRHTKYFAPRSNL

SEQ ID NO: 28059 - protein, 134 aa, Arabidopsis thaliana
  peptide (1)..(134): Ceres Seq. ID no. 13489973
  misc_feature (1)..(123): Homolog of NCBI NO: 34904288 NR Description: unnamed protein product [Oryza sativa (japonica
  misc_feature (19)..(127): Homolog of NCBI NO: 27685797 NR Description: similar to RIKEN cDNA 0610006O17
  misc_feature (1)..(134): Homolog of NCBI NO: 25408036 NR Description: hypothetical protein At2g29590 [imported] -
  misc_feature (1)..(134): Homolog of NCBI NO: 18402093 NR Description: thioesterase-related [Arabidopsis thaliana]
  misc_feature (19)..(127): Homolog of NCBI NO: 13385260 NR Description: thioesterase superfamily member 2 [Mus musculus]
  misc_feature (1)..(127): Homolog of NCBI NO: 8923812 NR Description: thioesterase superfamily member 2
  misc_feature (45)..(134): Homolog of NCBI NO: 20161439 NR Description: B1065E10.13 [Oryza sativa (japonica
  misc_feature (1)..(134): Homolog of NCBI NO: 21740488 NR Description: OSJNBa0006B20.3 [Oryza sativa (japonica
  misc_feature (1)..(133): Homolog of NCBI NO: 13605902 NR Description: At1g04290/F19P19_27 [Arabidopsis thaliana]
  misc_feature (1)..(134): Homolog of NCBI NO: 18379308 NR Description: thioesterase-related [Arabidopsis thaliana]
MVAKLPHRFLERFVTNGLKVDLIEPGRIVCSMKIPPHLLNAGKFLHGGATATLVDLIGSAVIYTAGASHSGVSVEINVSYLDAAFLDEEIEIESKALRVGKAVAVVSVELRKKTTGKIIAQGRHTKYFAPRSNL

SEQ ID NO: 28060 - DNA, 665 bp, Arabidopsis thaliana
  misc_feature (1)..(665): Ceres Seq. ID no. 12420732
  misc_feature: MA Experiment ID: 108434 Result: Up-regulated in Transcription
  misc_feature: MA Experiment 108434 PARAMETER Experiment Name: At_Root_Tips_cDNA_P Parameter: Tissue Value: Root Tips
  misc_feature: MA Experiment ID: 108461 Result: Up-regulated in Transcription
  misc_feature: MA Experiment 108461 PARAMETER Experiment Name: At_Germinating_Seeds_cDNA_P Parameter: Age (day) Value: 1 vs. 0
  misc_feature: MA Experiment 108461 PARAMETER Experiment Name: At_Germinating_Seeds_cDNA_P Parameter: Tissue Value: Germinating Seeds
  misc_feature: MA Experiment ID: 108462 Result: Up-regulated in Transcription
  misc_feature: MA Experiment 108462 PARAMETER Experiment Name: At_Germinating_Seeds_cDNA_P Parameter: Age (day) Value: 2 vs. 0
  misc_feature: MA Experiment 108462 PARAMETER Experiment Name: At_Germinating_Seeds_cDNA_P Parameter: Tissue Value: Germinating Seeds
  misc_feature: MA Experiment ID: 108464 Result: Up-regulated in Transcription
  misc_feature: MA Experiment 108464 PARAMETER Experiment Name: At_Germinating_Seeds_cDNA_P Parameter: Age (day) Value: 4 vs. 0
  misc_feature: MA Experiment 108464 PARAMETER Experiment Name: At_Germinating_Seeds_cDNA_P Parameter: Tissue Value: Germinating Seeds
  misc_feature: MA Experiment ID: 108595 Result: Down-regulated in Transcription
  misc_feature: MA Experiment 108595 PARAMETER Experiment Name: At_Ler-pi_Ovule_cDNA_P Parameter: Plant Line Value: null
  misc_feature: MA Experiment ID: 20000224 Result: Down-regulated in Transcription
  misc_feature: MA Experiment ID: 20000306 Result: Up-regulated in Transcription
  misc_feature: MA Experiment 20000306 PARAMETER Experiment Name: At_Germinating_Seeds_Sub_P Parameter: Age (hr) Value: 6 vs. 0
  misc_feature: MA Experiment 20000306 PARAMETER Experiment Name: At_Germinating_Seeds_Sub_P Parameter: Organism Value: A. thaliana
  misc_feature: MA Experiment 20000306 PARAMETER Experiment Name: At_Germinating_Seeds_Sub_P Parameter: Plant Line Value: WS
  misc_feature: MA Experiment 20000306 PARAMETER Experiment Name: At_Germinating_Seeds_Sub_P Parameter: Tissue Value: Germinating Seeds
  misc_feature: MA Experiment ID: 20000307 Result: Up-regulated in Transcription
  misc_feature: MA Experiment 20000307 PARAMETER Experiment Name: At_Germinating_Seeds_Sub_P Parameter: Age (hr) Value: 24 vs. 0
  misc_feature: MA Experiment 20000307 PARAMETER Experiment Name: At_Germinating_Seeds_Sub_P Parameter: Organism Value: A. thaliana
  misc_feature: MA Experiment 20000307 PARAMETER Experiment Name: At_Germinating_Seeds_Sub_P Parameter: Plant Line Value: WS
  misc_feature: MA Experiment 20000307 PARAMETER Experiment Name: At_Germinating_Seeds_Sub_P Parameter: Tissue Value: Germinating Seeds
atgttactcttctcagatctcttgttcgttttgatgtacaatggcgtccttggtagcagctcctatctctttctcaggtgactctcatgtcaaagcacaccgaaacttcaatgcgattcgcaagagctctacattgactgttcaaacaaaatcaaaccgcagtcacaaactctcggtttctgcaggttaccgtgggggaagtaagggtggtggaagtagtgattttgttaccggttttcttctaggaagtgctgtgttcggaactctggcttatatctttgctccacagatccgaagatcagtgctgagcgagaatgaatatggtttcaagaaaccggagcagccgatgtactatgacgaaggcctagaggagagaagagagatattgaatgagaaaatcggccaactcaattccgccattgacaaggtttcgtcgcgtctgaaaggaggtcggagcggtagcagcaagaacacttcttcgccgtctgtcccagttgaaaccgacgcagaagcagaagctactgcatgattgaatgtaatcctctgctctattttaccaattcaaaactgccttccattggttctgtggttttttttttttttttgttggaaccattaggggcttttctgacttttagatattgaaagaaaaagacaatcgtcgc

SEQ ID NO: 28061 - protein, 162 aa, Arabidopsis thaliana
  peptide (1)..(162): Ceres Seq. ID no. 12420733
  misc_feature (1)..(162): Homolog of NCBI NO: 18400762 NR Description: expressed protein
  misc_feature (24)..(161): Homolog of NCBI NO: 10176975 NR Description: protein; similar to unknown protein [Arabidopsis
  misc_feature (1)..(161): Homolog of NCBI NO: 22326856 NR Description: putative protein
  misc_feature (1)..(161): Homolog of NCBI NO: 17065406 NR Description: Unknown protein [Arabidopsis thaliana]
  misc_feature (1)..(162): Homolog of NCBI NO: 15233017 NR Description: unknown protein; protein id: At3g02900.1
MASLVAAPISFSGDSHVKAHRNFNAIRKSSTLTVQTKSNRSHKLSVSAGYRGGSKGGGSSDFVTGFLLGSAVFGTLAYIFAPQIRRSVLSENEYGFKKPEQPMYYDEGLEERREILNEKIGQLNSAIDKVSSRLKGGRSGSSKNTSSPSVPVETDAEAEATA

SEQ ID NO: 28062 - DNA, 743 bp, Arabidopsis thaliana
  misc_feature (1)..(743): Ceres Seq. ID no. 12384626
  misc_feature: MA Experiment ID: 108434 Result: Down-regulated in Transcription
  misc_feature: MA Experiment 108434 PARAMETER Experiment Name: At_Root_Tips_cDNA_P Parameter: Tissue Value: Root Tips
  misc_feature: MA Experiment ID: 108488 Result: Down-regulated in Transcription
  misc_feature: MA Experiment ID: 108573 Result: Up-regulated in Transcription
  misc_feature: MA Experiment 108573 PARAMETER Experiment Name: At_Drought_cDNA_P Parameter: Timepoint (hr) Value: 6
  misc_feature: MA Experiment 108573 PARAMETER Experiment Name: At_Drought_cDNA_P Parameter: Tissue Value: Aerial
  misc_feature: MA Experiment 108573 PARAMETER Experiment Name: At_Drought_cDNA_P Parameter: Treatment Value: Drought vs. No Drought
  misc_feature: MA Experiment ID: 108668 Result: Up-regulated in Transcription
  misc_feature: MA Experiment 108668 PARAMETER Experiment Name: At_2mM_SA_cDNA_P Parameter: Plant Line Value: WS
  misc_feature: MA Experiment 108668 PARAMETER Experiment Name: At_2mM_SA_cDNA_P Parameter: Timepoint (hr) Value: 6
  misc_feature: MA Experiment 108668 PARAMETER Experiment Name: At_2mM_SA_cDNA_P Parameter: Treatment Value: 2mM SA vs. No Treatment
  misc_feature: MA Experiment ID: 20000113 Result: Up-regulated in Transcription
  misc_feature: MA Experiment 20000113 PARAMETER Experiment Name: At_42deg_Heat_cDNA_P Parameter: Temperature (deg C) Value: 42 vs. 22
  misc_feature: MA Experiment 20000113 PARAMETER Experiment Name: At_42deg_Heat_cDNA_P Parameter: Timepoint (hr) Value: 8
  misc_feature: MA Experiment 20000113 PARAMETER Experiment Name: At_42deg_Heat_cDNA_P Parameter: Tissue Value: Aerial
  misc_feature: MA Experiment ID: 20000173 Result: Up-regulated in Transcription
  misc_feature: MA Experiment 20000173 PARAMETER Experiment Name: At_42deg_Heat_P Parameter: Age (day) Value: 14
  misc_feature: MA Experiment 20000173 PARAMETER Experiment Name: At_42deg_Heat_P Parameter: Organism Value: A. thaliana
  misc_feature: MA Experiment 20000173 PARAMETER Experiment Name: At_42deg_Heat_P Parameter: Plant Line Value: WS
  misc_feature: MA Experiment 20000173 PARAMETER Experiment Name: At_42deg_Heat_P Parameter: Temperature (deg C) Value: 42 vs. 22
  misc_feature: MA Experiment 20000173 PARAMETER Experiment Name: At_42deg_Heat_P Parameter: Timepoint (hr) Value: 6
  misc_feature: MA Experiment 20000173 PARAMETER Experiment Name: At_42deg_Heat_P Parameter: Tissue Value: Aerial
  misc_feature: MA Experiment ID: 20000180 Result: Up-regulated in Transcription
  misc_feature: MA Experiment 20000180 PARAMETER Experiment Name: At_Germinating_Seeds_P Parameter: Age (hr) Value: 24 vs. 0
  misc_feature: MA Experiment 20000180 PARAMETER Experiment Name: At_Germinating_Seeds_P Parameter: Tissue Value: Germinating Seeds
  misc_feature: MA Experiment ID: 20000185 Result: Down-regulated in Transcription
  misc_feature: MA Experiment 20000185 PARAMETER Experiment Name: At_Roots__P Parameter: Age (day) Value: 7 vs. 21
  misc_feature: MA Experiment 20000185 PARAMETER Experiment Name: At_Roots__P Parameter: Organism Value: A. thaliana
  misc_feature: MA Experiment 20000185 PARAMETER Experiment Name: At_Roots__P Parameter: Tissue Value: Roots vs. Whole Plant
  misc_feature: MA Experiment ID: 20000234 Result: Down-regulated in Transcription
  misc_feature: MA Experiment 20000234 PARAMETER Experiment Name: At_Siliques_P Parameter: Age (day) Value: 21
  misc_feature: MA Experiment 20000234 PARAMETER Experiment Name: At_Siliques_P Parameter: Organism Value: A. thaliana
  misc_feature: MA Experiment 20000234 PARAMETER Experiment Name: At_Siliques_P Parameter: Plant Line Value: WS
  misc_feature: MA Experiment 20000234 PARAMETER Experiment Name: At_Siliques_P Parameter: Tissue Value: Less Than 5mm Siliques vs. Whole Plant
  misc_feature: MA Experiment ID: 20000437 Result: Up-regulated in Transcription
  misc_feature: MA Experiment 20000437 PARAMETER Experiment Name: At_Drought_P Parameter: Age (day) Value: 8
  misc_feature: MA Experiment 20000437 PARAMETER Experiment Name: At_Drought_P Parameter: Organism Value: A. thaliana
  misc_feature: MA Experiment 20000437 PARAMETER Experiment Name: At_Drought_P Parameter: Plant Line Value: WS
  misc_feature: MA Experiment 20000437 PARAMETER Experiment Name: At_Drought_P Parameter: Timepoint (hr) Value: 24
  misc_feature: MA Experiment 20000437 PARAMETER Experiment Name: At_Drought_P Parameter: Tissue Value: Whole Plant
  misc_feature: MA Experiment 20000437 PARAMETER Experiment Name: At_Drought_P Parameter: Treatment Value: Drought vs. No Drought
  misc_feature: MA Experiment ID: 20000438 Result: Down-regulated in Transcription
  misc_feature: MA Experiment 20000438 PARAMETER Experiment Name: At_Shoots__P Parameter: Age (day) Value: 14
  misc_feature: MA Experiment 20000438 PARAMETER Experiment Name: At_Shoots__P Parameter: Tissue Value: Shoots vs. Whole Plant
  misc_feature: MA Experiment ID: 20000439 Result: Down-regulated in Transcription
  misc_feature: MA Experiment 20000439 PARAMETER Experiment Name: At_Roots__P Parameter: Age (day) Value: 14 vs. 21
  misc_feature: MA Experiment 20000439 PARAMETER Experiment Name: At_Roots__P Parameter: Organism Value: A. thaliana
  misc_feature: MA Experiment 20000439 PARAMETER Experiment Name: At_Roots__P Parameter: Tissue Value: Roots vs. Whole Plant
  misc_feature: MA Experiment ID: 20000794 Result: Up-regulated in Transcription
  misc_feature: MA Experiment 20000794 PARAMETER Experiment Name: At_Petals_P Parameter: Age (day) Value: 23-25 days
  misc_feature: MA Experiment 20000794 PARAMETER Experiment Name: At_Petals_P Parameter: Plant Line Value: WS
  misc_feature: MA Experiment 20000794 PARAMETER Experiment Name: At_Petals_P Parameter: Tissue Value: Petals vs. Whole plant
  misc_feature: MA Experiment ID: 20001558 Result: Down-regulated in Transcription
  misc_feature: MA Experiment 20001558 PARAMETER Experiment Name: At_Drought_Soil_Dry_P Parameter: Age (day) Value: 27
  misc_feature: MA Experiment 20001558 PARAMETER Experiment Name: At_Drought_Soil_Dry_P Parameter: Organism Value: A. thaliana
  misc_feature: MA Experiment 20001558 PARAMETER Experiment Name: At_Drought_Soil_Dry_P Parameter: Plant Line Value: WS
  misc_feature: MA Experiment 20001558 PARAMETER Experiment Name: At_Drought_Soil_Dry_P Parameter: Post Timepoint (hr) Value: 6
  misc_feature: MA Experiment 20001558 PARAMETER Experiment Name: At_Drought_Soil_Dry_P Parameter: Post-Treatment Value: Re-Water vs. No Drought
  misc_feature: MA Experiment 20001558 PARAMETER Experiment Name: At_Drought_Soil_Dry_P Parameter: Timepoint (day) Value: 13
  misc_feature: MA Experiment 20001558 PARAMETER Experiment Name: At_Drought_Soil_Dry_P Parameter: Treatment Value: Drought vs. No Drought
aaggcttctttctaccacaaacacaagagcgcgttttcttcacgccggcgaacaacgtcagagtcatggccaccggagatgggaaatcggtgatggtcgtcggagttgacgacagcgagcagagcacttacgccttggagtggacgctcgatcgtttcttcgctccttacgctcccaattatccttttaagctcttcatcgtccacgccaaacctaacgccgtctccgccgttggtctcgctggtcccggaactgcggaggttgtaccttatgttgatgctgatctgaagcataccgctgctaaggttgtcgagaaagccaaagcaatttgtcagagcagatcggttcatggtgcggtgatcgaagttttcgaaggtgatgcaaggaatatcctatgtgaagttgtagataagcatcatgcatctattcttgttgtgggaagccatggatatggagctatcaagagggcggttctcgggagtacgagtgactactgcgctcatcatgctcattgctcggtgatgatcgtgaagaagcctaagatcaaggtctgaaacctaagggaaggctactcggtcaaagcaaagtctctgcatagtcttctaattcagaagaataaagtgaaatacatattagcttgatgtgaaacaacgattcaagacaatatacatttgcatctatatgtgtaattgtttactacatacaatgttttggtatccttagacaatcaatattcgtgtgtt

SEQ ID NO: 28063 - protein, 183 aa, Arabidopsis thaliana
  peptide (1)..(183): Ceres Seq. ID no. 12384627
  misc_feature (155)..(180): Homolog of NCBI NO: 30681959 NR Description: ethylene-responsive protein -related [Arabidopsis
  misc_feature (31)..(155): Homolog of NCBI NO: 30681959 NR Description: ethylene-responsive protein -related [Arabidopsis
  misc_feature (31)..(180): Homolog of NCBI NO: 30681955 NR Description: ethylene-responsive protein -related [Arabidopsis
  misc_feature (31)..(180): Homolog of NCBI NO: 18399413 NR Description: ethylene-responsive protein, putative
  misc_feature (22)..(140): Homolog of NCBI NO: 15239780 NR Description: unknown protein; protein id: At5g49050.1
  misc_feature (22)..(182): Homolog of NCBI NO: 20067187 NR Description: putative universal stress protein USP1
  misc_feature (23)..(182): Homolog of NCBI NO: 22831145 NR Description: contains ESTs
  misc_feature (33)..(182): Homolog of NCBI NO: 38016525 NR Description: fiber protein Fb19 [Gossypium barbadense]
  misc_feature (22)..(183): Homolog of NCBI NO: 21555580 NR Description: unknown [Arabidopsis thaliana]
  misc_feature (22)..(183): Homolog of NCBI NO: 18407428 NR Description: expressed protein
GFFLPQTQERVFFTPANNVRVMATGDGKSVMVVGVDDSEQSTYALEWTLDRFFAPYAPNYPFKLFIVHAKPNAVSAVGLAGPGTAEVVPYVDADLKHTAAKVVEKAKAICQSRSVHGAVIEVFEGDARNILCEVVDKHHASILVVGSHGYGAIKRAVLGSTSDYCAHHAHCSVMIVKKPKIKV

SEQ ID NO: 28064 - protein, 162 aa, Arabidopsis thaliana; identical to SEQ ID NO: 26463
  peptide (1)..(162): Ceres Seq. ID no. 12384628
  misc_feature (134)..(159): Homolog of NCBI NO: 30681959 NR Description: ethylene-responsive protein -related [Arabidopsis
  misc_feature (10)..(134): Homolog of NCBI NO: 30681959 NR Description: ethylene-responsive protein -related [Arabidopsis
  misc_feature (10)..(159): Homolog of NCBI NO: 30681955 NR Description: ethylene-responsive protein -related [Arabidopsis
  misc_feature (10)..(159): Homolog of NCBI NO: 18399413 NR Description: ethylene-responsive protein, putative
  misc_feature (1)..(119): Homolog of NCBI NO: 15239780 NR Description: unknown protein; protein id: At5g49050.1
  misc_feature (1)..(161): Homolog of NCBI NO: 20067187 NR Description: putative universal stress protein USP1
  misc_feature (2)..(161): Homolog of NCBI NO: 22831145 NR Description: contains ESTs
  misc_feature (12)..(161): Homolog of NCBI NO: 38016525 NR Description: fiber protein Fb19 [Gossypium barbadense]
  misc_feature (1)..(162): Homolog of NCBI NO: 21555580 NR Description: unknown [Arabidopsis thaliana]
  misc_feature (1)..(162): Homolog of NCBI NO: 18407428 NR Description: expressed protein

SEQ ID NO: 28065 - protein, 153 aa, Arabidopsis thaliana; identical to SEQ ID NO: 26464
  peptide (1)..(153): Ceres Seq. ID no. 12384629
  misc_feature (125)..(150): Homolog of NCBI NO: 30681959 NR Description: ethylene-responsive protein -related [Arabidopsis
  misc_feature (1)..(125): Homolog of NCBI NO: 30681959 NR Description: ethylene-responsive protein -related [Arabidopsis
  misc_feature (1)..(150): Homolog of NCBI NO: 30681955 NR Description: ethylene-responsive protein -related [Arabidopsis
  misc_feature (1)..(150): Homolog of NCBI NO: 18399413 NR Description: ethylene-responsive protein, putative
  misc_feature (1)..(110): Homolog of NCBI NO: 15239780 NR Description: unknown protein; protein id: At5g49050.1
  misc_feature (1)..(152): Homolog of NCBI NO: 20067187 NR Description: putative universal stress protein USP1
  misc_feature (1)..(152): Homolog of NCBI NO: 22831145 NR Description: contains ESTs
  misc_feature (3)..(152): Homolog of NCBI NO: 38016525 NR Description: fiber protein Fb19 [Gossypium barbadense]
  misc_feature (1)..(153): Homolog of NCBI NO: 21555580 NR Description: unknown [Arabidopsis thaliana]
  misc_feature (1)..(153): Homolog of NCBI NO: 18407428 NR Description: expressed protein

SEQ ID NO: 28066 - DNA, 1362 bp, Arabidopsis thaliana
  misc_feature (1)..(1362): Ceres Seq. ID no. 13618728
  misc_feature: MA Experiment ID: 108434 Result: Up-regulated in Transcription
  misc_feature: MA Experiment 108434 PARAMETER Experiment Name: At_Root_Tips_cDNA_P Parameter: Tissue Value: Root Tips
  misc_feature: MA Experiment ID: 108461 Result: Down-regulated in Transcription
  misc_feature: MA Experiment 108461 PARAMETER Experiment Name: At_Germinating_Seeds_cDNA_P Parameter: Age (day) Value: 1 vs. 0
  misc_feature: MA Experiment 108461 PARAMETER Experiment Name: At_Germinating_Seeds_cDNA_P Parameter: Tissue Value: Germinating Seeds
  misc_feature: MA Experiment ID: 108462 Result: Down-regulated in Transcription
  misc_feature: MA Experiment 108462 PARAMETER Experiment Name: At_Germinating_Seeds_cDNA_P Parameter: Age (day) Value: 2 vs. 0
  misc_feature: MA Experiment 108462 PARAMETER Experiment Name: At_Germinating_Seeds_cDNA_P Parameter: Tissue Value: Germinating Seeds
  misc_feature: MA Experiment ID: 108463 Result: Down-regulated in Transcription
  misc_feature: MA Experiment 108463 PARAMETER Experiment Name: At_Germinating_Seeds_cDNA_P Parameter: Age (day) Value: 3 vs. 0
  misc_feature: MA Experiment 108463 PARAMETER Experiment Name: At_Germinating_Seeds_cDNA_P Parameter: Tissue Value: Germinating Seeds
  misc_feature: MA Experiment ID: 108464 Result: Down-regulated in Transcription
  misc_feature: MA Experiment 108464 PARAMETER Experiment Name: At_Germinating_Seeds_cDNA_P Parameter: Age (day) Value: 4 vs. 0
  misc_feature: MA Experiment 108464 PARAMETER Experiment Name: At_Germinating_Seeds_cDNA_P Parameter: Tissue Value: Germinating Seeds
  misc_feature: MA Experiment ID: 20000113 Result: Up-regulated in Transcription
  misc_feature: MA Experiment 20000113 PARAMETER Experiment Name: At_42deg_Heat_cDNA_P Parameter: Temperature (deg C) Value: 42 vs. 22
  misc_feature: MA Experiment 20000113 PARAMETER Experiment Name: At_42deg_Heat_cDNA_P Parameter: Timepoint (hr) Value: 8
  misc_feature: MA Experiment 20000113 PARAMETER Experiment Name: At_42deg_Heat_cDNA_P Parameter: Tissue Value: Aerial
  misc_feature: MA Experiment ID: 20001557 Result: Up-regulated in Transcription
  misc_feature: MA Experiment 20001557 PARAMETER Experiment Name: At_Drought_Soil_Dry_P Parameter: Age (day) Value: 27
  misc_feature: MA Experiment 20001557 PARAMETER Experiment Name: At_Drought_Soil_Dry_P Parameter: Organism Value: A. thaliana
  misc_feature: MA Experiment 20001557 PARAMETER Experiment Name: At_Drought_Soil_Dry_P Parameter: Plant Line Value: WS
  misc_feature: MA Experiment 20001557 PARAMETER Experiment Name: At_Drought_Soil_Dry_P Parameter: Post Timepoint (hr) Value: 3
  misc_feature: MA Experiment 20001557 PARAMETER Experiment Name: At_Drought_Soil_Dry_P Parameter: Post-Treatment Value: Re-Water vs. No Drought
  misc_feature: MA Experiment 20001557 PARAMETER Experiment Name: At_Drought_Soil_Dry_P Parameter: Timepoint (day) Value: 13
  misc_feature: MA Experiment 20001557 PARAMETER Experiment Name: At_Drought_Soil_Dry_P Parameter: Treatment Value: Drought vs. No Drought
  misc_feature: MA Experiment ID: 20001558 Result: Up-regulated in Transcription
  misc_feature: MA Experiment 20001558 PARAMETER Experiment Name: At_Drought_Soil_Dry_P Parameter: Age (day) Value: 27
  misc_feature: MA Experiment 20001558 PARAMETER Experiment Name: At_Drought_Soil_Dry_P Parameter: Organism Value: A. thaliana
  misc_feature: MA Experiment 20001558 PARAMETER Experiment Name: At_Drought_Soil_Dry_P Parameter: Plant Line Value: WS
  misc_feature: MA Experiment 20001558 PARAMETER Experiment Name: At_Drought_Soil_Dry_P Parameter: Post Timepoint (hr) Value: 6
  misc_feature: MA Experiment 20001558 PARAMETER Experiment Name: At_Drought_Soil_Dry_P Parameter: Post-Treatment Value: Re-Water vs. No Drought
  misc_feature: MA Experiment 20001558 PARAMETER Experiment Name: At_Drought_Soil_Dry_P Parameter: Timepoint (day) Value: 13
  misc_feature: MA Experiment 20001558 PARAMETER Experiment Name: At_Drought_Soil_Dry_P Parameter: Treatment Value: Drought vs. No Drought
gtctccaagcaaaaaaaaaaacctaaaacctccatcaacgccggaggaagaaattttgtgtcatctacaacgaattcgttaatcgcgatgaaggaagacgaagtaaatcgatgccagattcagaattggtatccgagattcaaatccttaaccatcaaaaccaaatttcacaaacttccagaatcattcatcaactatctcatcgacgattctggtccgtttcttctccctcattccgtaacaaacgaagacgcaatgcctaacagagtccacaatttcgaagaagaagatgatttccaagtccccgaagaagcttcagatgacgaaccattgaatcgtccttcttttccagaactcgaaatcgagatcagagaatcaatcgaaaccctaggcggcacaattatcccgaagctgaattggagttcaccaaaagacgcagcttggattagtccatcacagaatctaagctgcacttgtttcaatgagattgctctcttgtttcgttcctctgattcgttaacccatgatctcttcaatgcttatgattcatgtagtgacaaagtctcttcaaggccagaaagtttctaccttgcgttgagaaaatggtacccttcgttgaagcctgagatggaatttagatgctttgtgaaatctaacgagcttgttgggatttgtcagcgtgaggtaactacattttaccctgttcttctcaatgagaaggatttgctcaagggtttgatagaagagttctttgatgataagattaggtttgaatttgaatcagagaattacacttttgatgtttatgtgacgaaagagagaagagttaagctaatagatttcaatacttggtgtggttctactttgccattgatgtatacatgggaagaacttgagaagattcatggagaatgtgatgaattggaattgaggattgttgagagccgtctcagtgtgcttcctggtttgaaaacagctgttccttatgattatcttgacgtgagtgctggtagtggttgggctcaggttcttaagatagtggaagaggagtttcagaaagacgatcagagttctgatgaagttgcttgaagacttagattcttggttattggaagactagacaataattttttgaactatcatagttgtgtgcctaccaataagtgtcgtgttccattgttgttctgaaacggtttaatcacgatgttggaactttgatggtgtctttttcttataagattttctcttctagactgcttttgtatttgtcttgttattcttctgcaaagaattgtgttgagtggcaaattgttcctgattggtttctcattaccaaatttgtacatggatgttggattagtt

SEQ ID NO: 28067 - protein, 362 aa, Arabidopsis thaliana
  peptide (1)..(362): Ceres Seq. ID no. 13618729
  misc_feature (28)..(337): Homolog of NCBI NO: 19114319 NR Description: hypothetical protein; similar to S. cerevisiae
  misc_feature (38)..(298): Homolog of NCBI NO: 40738933 NR Description: hypothetical protein AN6594.2 [Aspergillus
  misc_feature (37)..(78): Homolog of NCBI NO: 28829467 NR Description: similar to Homo sapiens (Human). HT-1080 protein
  misc_feature (94)..(321): Homolog of NCBI NO: 28829467 NR Description: similar to Homo sapiens (Human). HT-1080 protein
  misc_feature (30)..(355): Homolog of NCBI NO: 5174423 NR Description: D123 gene product [Homo sapiens]
  misc_feature (30)..(355): Homolog of NCBI NO: 23959082 NR Description: RIKEN cDNA G431001I09 [Mus musculus]
  misc_feature (30)..(355): Homolog of NCBI NO: 3551742 NR Description: HT-1080 protein [Homo sapiens]
  misc_feature (30)..(355): Homolog of NCBI NO: 19527052 NR Description: RIKEN cDNA G431001I09 [Mus musculus]
  misc_feature (30)..(355): Homolog of NCBI NO: 25742671 NR Description: D123 gene product [Rattus norvegicus]
  misc_feature (30)..(362): Homolog of NCBI NO: 15235584 NR Description: D123 -related protein [Arabidopsis thaliana]
VSKQKKKPKTSINAGGRNFVSSTTNSLIAMKEDEVNRCQIQNWYPRFKSLTIKTKFHKLPESFINYLIDDSGPFLLPHSVTNEDAMPNRVHNFEEEDDFQVPEEASDDEPLNRPSFPELEIEIRESIETLGGTIIPKLNWSSPKDAAWISPSQNLSCTCFNEIALLFRSSDSLTHDLFNAYDSCSDKVSSRPESFYLALRKWYPSLKPEMEFRCFVKSNELVGICQREVTTFYPVLLNEKDLLKGLIEEFFDDKIRFEFESENYTFDVYVTKERRVKLIDFNTWCGSTLPLMYTWEELEKIHGECDELELRIVESRLSVLPGLKTAVPYDYLDVSAGSGWAQVLKIVEEEFQKDDQSSDEVA

SEQ ID NO: 28068 - protein, 333 aa, Arabidopsis thaliana
  peptide (1)..(333): Ceres Seq. ID no. 13618730
  misc_feature (1)..(308): Homolog of NCBI NO: 19114319 NR Description: hypothetical protein; similar to S. cerevisiae
  misc_feature (9)..(269): Homolog of NCBI NO: 40738933 NR Description: hypothetical protein AN6594.2 [Aspergillus
  misc_feature (8)..(49): Homolog of NCBI NO: 28829467 NR Description: similar to Homo sapiens (Human). HT-1080 protein
  misc_feature (65)..(292): Homolog of NCBI NO: 28829467 NR Description: similar to Homo sapiens (Human). HT-1080 protein
  misc_feature (1)..(326): Homolog of NCBI NO: 5174423 NR Description: D123 gene product [Homo sapiens]
  misc_feature (1)..(326): Homolog of NCBI NO: 23959082 NR Description: RIKEN cDNA G431001I09 [Mus musculus]
  misc_feature (1)..(326): Homolog of NCBI NO: 3551742 NR Description: HT-1080 protein [Homo sapiens]
  misc_feature (1)..(326): Homolog of NCBI NO: 19527052 NR Description: RIKEN cDNA G431001I09 [Mus musculus]
  misc_feature (1)..(326): Homolog of NCBI NO: 25742671 NR Description: D123 gene product [Rattus norvegicus]
  misc_feature (1)..(333): Homolog of NCBI NO: 15235584 NR Description: D123 -related protein [Arabidopsis thaliana]
MKEDEVNRCQIQNWYPRFKSLTIKTKFHKLPESFINYLIDDSGPFLLPHSVTNEDAMPNRVHNFEEEDDFQVPEEASDDEPLNRPSFPELEIEIRESIETLGGTIIPKLNWSSPKDAAWISPSQNLSCTCFNEIALLFRSSDSLTHDLFNAYDSCSDKVSSRPESFYLALRKWYPSLKPEMEFRCFVKSNELVGICQREVTTFYPVLLNEKDLLKGLIEEFFDDKIRFEFESENYTFDVYVTKERRVKLIDFNTWCGSTLPLMYTWEELEKIHGECDELELRIVESRLSVLPGLKTAVPYDYLDVSAGSGWAQVLKIVEEEFQKDDQSSDEVA

SEQ ID NO: 28069 - protein, 277 aa, Arabidopsis thaliana
  peptide (1)..(277): Ceres Seq. ID no. 13618731
  misc_feature (1)..(250): Homolog of NCBI NO: 6323244 NR Description: Product of gene unknown; Ylr215cp [Saccharomyces
  misc_feature (1)..(252): Homolog of NCBI NO: 19114319 NR Description: hypothetical protein; similar to S. cerevisiae
  misc_feature (1)..(213): Homolog of NCBI NO: 40738933 NR Description: hypothetical protein AN6594.2 [Aspergillus
  misc_feature (9)..(236): Homolog of NCBI NO: 28829467 NR Description: similar to Homo sapiens (Human). HT-1080 protein
  misc_feature (1)..(270): Homolog of NCBI NO: 5174423 NR Description: D123 gene product [Homo sapiens]
  misc_feature (1)..(270): Homolog of NCBI NO: 23959082 NR Description: RIKEN cDNA G431001I09 [Mus musculus]
  misc_feature (1)..(270): Homolog of NCBI NO: 3551742 NR Description: HT-1080 protein [Homo sapiens]
  misc_feature (1)..(270): Homolog of NCBI NO: 19527052 NR Description: RIKEN cDNA G431001I09 [Mus musculus]
  misc_feature (1)..(270): Homolog of NCBI NO: 25742671 NR Description: D123 gene product [Rattus norvegicus]
  misc_feature (1)..(277): Homolog of NCBI NO: 15235584 NR Description: D123 -related protein [Arabidopsis thaliana]
MPNRVHNFEEEDDFQVPEEASDDEPLNRPSFPELEIEIRESIETLGGTIIPKLNWSSPKDAAWISPSQNLSCTCFNEIALLFRSSDSLTHDLFNAYDSCSDKVSSRPESFYLALRKWYPSLKPEMEFRCFVKSNELVGICQREVTTFYPVLLNEKDLLKGLIEEFFDDKIRFEFESENYTFDVYVTKERRVKLIDFNTWCGSTLPLMYTWEELEKIHGECDELELRIVESRLSVLPGLKTAVPYDYLDVSAGSGWAQVLKIVEEEFQKDDQSSDEVA

SEQ ID NO: 28070 - DNA, 839 bp, Arabidopsis thaliana
  misc_feature (1)..(839): Ceres Seq. ID no. 12738877
  misc_feature: MA Experiment ID: 108434 Result: Up-regulated in Transcription
  misc_feature: MA Experiment 108434 PARAMETER Experiment Name: At_Root_Tips_cDNA_P Parameter: Tissue Value: Root Tips
  misc_feature: MA Experiment ID: 108461 Result: Down-regulated in Transcription
  misc_feature: MA Experiment 108461 PARAMETER Experiment Name: At_Germinating_Seeds_cDNA_P Parameter: Age (day) Value: 1 vs. 0
  misc_feature: MA Experiment 108461 PARAMETER Experiment Name: At_Germinating_Seeds_cDNA_P Parameter: Tissue Value: Germinating Seeds
  misc_feature: MA Experiment ID: 108462 Result: Down-regulated in Transcription
  misc_feature: MA Experiment 108462 PARAMETER Experiment Name: At_Germinating_Seeds_cDNA_P Parameter: Age (day) Value: 2 vs. 0
  misc_feature: MA Experiment 108462 PARAMETER Experiment Name: At_Germinating_Seeds_cDNA_P Parameter: Tissue Value: Germinating Seeds
  misc_feature: MA Experiment ID: 108463 Result: Down-regulated in Transcription
  misc_feature: MA Experiment 108463 PARAMETER Experiment Name: At_Germinating_Seeds_cDNA_P Parameter: Age (day) Value: 3 vs. 0
  misc_feature: MA Experiment 108463 PARAMETER Experiment Name: At_Germinating_Seeds_cDNA_P Parameter: Tissue Value: Germinating Seeds
  misc_feature: MA Experiment ID: 108464 Result: Down-regulated in Transcription
  misc_feature: MA Experiment 108464 PARAMETER Experiment Name: At_Germinating_Seeds_cDNA_P Parameter: Age (day) Value: 4 vs. 0
  misc_feature: MA Experiment 108464 PARAMETER Experiment Name: At_Germinating_Seeds_cDNA_P Parameter: Tissue Value: Germinating Seeds
  misc_feature: MA Experiment ID: 108488 Result: Up-regulated in Transcription
  misc_feature: MA Experiment ID: 108489 Result: Up-regulated in Transcription
  misc_feature: MA Experiment ID: 20000173 Result: Up-regulated in Transcription
  misc_feature: MA Experiment 20000173 PARAMETER Experiment Name: At_42deg_Heat_P Parameter: Age (day) Value: 14
  misc_feature: MA Experiment 20000173 PARAMETER Experiment Name: At_42deg_Heat_P Parameter: Organism Value: A. thaliana
  misc_feature: MA Experiment 20000173 PARAMETER Experiment Name: At_42deg_Heat_P Parameter: Plant Line Value: WS
  misc_feature: MA Experiment 20000173 PARAMETER Experiment Name: At_42deg_Heat_P Parameter: Temperature (deg C) Value: 42 vs. 22
  misc_feature: MA Experiment 20000173 PARAMETER Experiment Name: At_42deg_Heat_P Parameter: Timepoint (hr) Value: 6
  misc_feature: MA Experiment 20000173 PARAMETER Experiment Name: At_42deg_Heat_P Parameter: Tissue Value: Aerial
  misc_feature: MA Experiment ID: 20000184 Result: Up-regulated in Transcription
  misc_feature: MA Experiment 20000184 PARAMETER Experiment Name: At_Shoots__P Parameter: Age (day) Value: 7
  misc_feature: MA Experiment 20000184 PARAMETER Experiment Name: At_Shoots__P Parameter: Tissue Value: Shoots vs. Whole Plant
  misc_feature: MA Experiment ID: 20000794 Result: Down-regulated in Transcription
  misc_feature: MA Experiment 20000794 PARAMETER Experiment Name: At_Petals_P Parameter: Age (day) Value: 23-25 days
  misc_feature: MA Experiment 20000794 PARAMETER Experiment Name: At_Petals_P Parameter: Plant Line Value: WS
  misc_feature: MA Experiment 20000794 PARAMETER Experiment Name: At_Petals_P Parameter: Tissue Value: Petals vs. Whole plant
  misc_feature: MA Experiment ID: 20001560 Result: Up-regulated in Transcription
  misc_feature: MA Experiment 20001560 PARAMETER Experiment Name: At_Drought_Soil_Dry_P Parameter: Age (day) Value: 28
  misc_feature: MA Experiment 20001560 PARAMETER Experiment Name: At_Drought_Soil_Dry_P Parameter: Organism Value: A. thaliana
  misc_feature: MA Experiment 20001560 PARAMETER Experiment Name: At_Drought_Soil_Dry_P Parameter: Plant Line Value: WS
  misc_feature: MA Experiment 20001560 PARAMETER Experiment Name: At_Drought_Soil_Dry_P Parameter: Post Timepoint (hr) Value: None
  misc_feature: MA Experiment 20001560 PARAMETER Experiment Name: At_Drought_Soil_Dry_P Parameter: Post-Treatment Value: None
  misc_feature: MA Experiment 20001560 PARAMETER Experiment Name: At_Drought_Soil_Dry_P Parameter: Timepoint (day) Value: 14
  misc_feature: MA Experiment 20001560 PARAMETER Experiment Name: At_Drought_Soil_Dry_P Parameter: Treatment Value: Drought vs. No Drought
  misc_feature: MA Experiment ID: 20001757 Result: Up-regulated in Transcription
  misc_feature: MA Experiment 20001757 PARAMETER Experiment Name: At_50mM_NH4NO3_L-to-H_P Parameter: Timepoint (hr) Value: 6
  misc_feature: MA Experiment 20001757 PARAMETER Experiment Name: At_50mM_NH4NO3_L-to-H_P Parameter: Tissue Value: Leaf
  misc_feature: MA Experiment 20001757 PARAMETER Experiment Name: At_50mM_NH4NO3_L-to-H_P Parameter: Treatment Value: 50mM NH4NO3 vs 100mM Mannitol
tttagggtttattcttcattgcttgagcttccttctcttcttcttcttcaagccgcggctaaagatccctacttctctcgacacttatagagtttcagtcatggccgcctccgcagaaatcgacgctgagattcaacagcagcttaccaatgaggttaagctcttcaaccgttggagctttgatgacgtttcggttacggatattagtcttgtggactacattggtgttcagccatcgaagcacgcaacttttgttccccatactgctggacgatactctgtgaagaggttcagaaaggcgcagtgcccaattgttgagaggctcactaactctctcatgatgcacggaagaaacaatggtaagaagttgatggctgtcaggatcgtcaagcatgccatggagattatccacctcttgtctgacttgaacccgattcaagttatcattgatgccattgttaacagtggtccacgtgaagatgctaccaggattggatctgctggtgtggttaggaggcaggctgttgatatctctcctctaagacgtgtgaaccaagcgatcttcttgcttacaactggtgcaggtgaagctgcctttagaaacatcaagacaatcgctgagtgccttgctgatgaactcatcaatgctgcaaagggatcttccaacagctatgccatcaagaagaaagatgagattgagagagttgctaaggccaatcgttaagggatctccctttcctctaagtttgcattatatcaaagagtttttgtgttgtttccattagctttggatatgtttcagatgatctctctatctttaatgaaattttgacgcttat

SEQ ID NO: 28071 - protein, 240 aa, Arabidopsis thaliana
  peptide (1)..(240): Ceres Seq. ID no. 12738878
  misc_feature (87)..(240): Pfam Name: Ribosomal protein S7p/S5e Pfam Description: Ribosomal protein S7p/S5e
  misc_feature (49)..(240): Homolog of NCBI NO: 15294021 NR Description: 40S ribosomal protein S5 [Ictalurus punctatus]
  misc_feature (49)..(240): Homolog of NCBI NO: 34854534 NR Description: similar to ribosomal protein S5; 40S ribosomal
  misc_feature (49)..(240): Homolog of NCBI NO: 13904870 NR Description: ribosomal protein S5; 40S ribosomal protein S5
  misc_feature (49)..(240): Homolog of NCBI NO: 3717978 NR Description: 5S ribosomal protein [Mus musculus]
  misc_feature (33)..(240): Homolog of NCBI NO: 40748265 NR Description: 40S ribosomal protein S5 [Capsicum annuum]
  misc_feature (42)..(240): Homolog of NCBI NO: 34893994 NR Description: putative 40S ribosomal protein S5
  misc_feature (51)..(240): Homolog of NCBI NO: 6831665 NR Description: 40S RIBOSOMAL PROTEIN S5
  misc_feature (34)..(240): Homolog of NCBI NO: 15229897 NR Description: 40S ribosomal protein S5, putative
  misc_feature (34)..(240): Homolog of NCBI NO: 15228111 NR Description: 40S ribosomal protein S5
  misc_feature (34)..(240): Homolog of NCBI NO: 21617886 NR Description: 40S ribosomal protein S5 [Arabidopsis thaliana]
LGFILHCLSFLLFFFFKPRLKIPTSLDTYRVSVMAASAEIDAEIQQQLTNEVKLFNRWSFDDVSVTDISLVDYIGVQPSKHATFVPHTAGRYSVKRFRKAQCPIVERLTNSLMMHGRNNGKKLMAVRIVKHAMEIIHLLSDLNPIQVIIDAIVNSGPREDATRIGSAGVVRRQAVDISPLRRVNQAIFLLTTGAGEAAFRNIKTIAECLADELINAAKGSSNSYAIKKKDEIERVAKANR

SEQ ID NO: 28072 - protein, 207 aa, Arabidopsis thaliana
  peptide (1)..(207): Ceres Seq. ID no. 12738879
  misc_feature (54)..(207): Pfam Name: Ribosomal protein S7p/S5e Pfam Description: Ribosomal protein S7p/S5e
  misc_feature (16)..(207): Homolog of NCBI NO: 15294021 NR Description: 40S ribosomal protein S5 [Ictalurus punctatus]
  misc_feature (16)..(207): Homolog of NCBI NO: 34854534 NR Description: similar to ribosomal protein S5; 40S ribosomal
  misc_feature (16)..(207): Homolog of NCBI NO: 13904870 NR Description: ribosomal protein S5; 40S ribosomal protein S5
  misc_feature (16)..(207): Homolog of NCBI NO: 3717978 NR Description: 5S ribosomal protein [Mus musculus]
  misc_feature (1)..(207): Homolog of NCBI NO: 40748265 NR Description: 40S ribosomal protein S5 [Capsicum annuum]
  misc_feature (9)..(207): Homolog of NCBI NO: 34893994 NR Description: putative 40S ribosomal protein S5
  misc_feature (18)..(207): Homolog of NCBI NO: 6831665 NR Description: 40S RIBOSOMAL PROTEIN S5
  misc_feature (1)..(207): Homolog of NCBI NO: 15229897 NR Description: 40S ribosomal protein S5, putative
  misc_feature (1)..(207): Homolog of NCBI NO: 15228111 NR Description: 40S ribosomal protein S5
  misc_feature (1)..(207): Homolog of NCBI NO: 21617886 NR Description: 40S ribosomal protein S5 [Arabidopsis thaliana]
MAASAEIDAEIQQQLTNEVKLFNRWSFDDVSVTDISLVDYIGVQPSKHATFVPHTAGRYSVKRFRKAQCPIVERLTNSLMMHGRNNGKKLMAVRIVKHAMEIIHLLSDLNPIQVIIDAIVNSGPREDATRIGSAGVVRRQAVDISPLRRVNQAIFLLTTGAGEAAFRNIKTIAECLADELINAAKGSSNSYAIKKKDEIERVAKANR

SEQ ID NO: 28073 - protein, 128 aa, Arabidopsis thaliana
  peptide (1)..(128): Ceres Seq. ID no. 12738880
  misc_feature (1)..(128): Pfam Name: Ribosomal protein S7p/S5e Pfam Description: Ribosomal protein S7p/S5e
  misc_feature (1)..(128): Homolog of NCBI NO: 15294021 NR Description: 40S ribosomal protein S5 [Ictalurus punctatus]
  misc_feature (1)..(128): Homolog of NCBI NO: 34854534 NR Description: similar to ribosomal protein S5; 40S ribosomal
  misc_feature (1)..(128): Homolog of NCBI NO: 13904870 NR Description: ribosomal protein S5; 40S ribosomal protein S5
  misc_feature (1)..(128): Homolog of NCBI NO: 3717978 NR Description: 5S ribosomal protein [Mus musculus]
  misc_feature (1)..(128): Homolog of NCBI NO: 40748265 NR Description: 40S ribosomal protein S5 [Capsicum annuum]
  misc_feature (1)..(128): Homolog of NCBI NO: 34893994 NR Description: putative 40S ribosomal protein S5
  misc_feature (1)..(128): Homolog of NCBI NO: 6831665 NR Description: 40S RIBOSOMAL PROTEIN S5
  misc_feature (1)..(128): Homolog of NCBI NO: 15229897 NR Description: 40S ribosomal protein S5, putative
  misc_feature (1)..(128): Homolog of NCBI NO: 15228111 NR Description: 40S ribosomal protein S5
  misc_feature (1)..(128): Homolog of NCBI NO: 21617886 NR Description: 40S ribosomal protein S5 [Arabidopsis thaliana]
MMHGRNNGKKLMAVRIVKHAMEIIHLLSDLNPIQVIIDAIVNSGPREDATRIGSAGVVRRQAVDISPLRRVNQAIFLLTTGAGEAAFRNIKTIAECLADELINAAKGSSNSYAIKKKDEIERVAKANR

SEQ ID NO: 28074 - DNA, 750 bp, Arabidopsis thaliana
  misc_feature (1)..(750): Ceres Seq. ID no. 13580820
  misc_feature: MA Experiment ID: 108435 Result: Down-regulated in Transcription
  misc_feature: MA Experiment 108435 PARAMETER Experiment Name: At_stm_Mutants_cDNA_P Parameter: Plant Line Value: wt Landsburg vs stm
  misc_feature: MA Experiment 108435 PARAMETER Experiment Name: At_stm_Mutants_cDNA_P Parameter: Tissue Value: Shoot Apical Meristem Region
  misc_feature: MA Experiment ID: 108461 Result: Up-regulated in Transcription
  misc_feature: MA Experiment 108461 PARAMETER Experiment Name: At_Germinating_Seeds_cDNA_P Parameter: Age (day) Value: 1 vs. 0
  misc_feature: MA Experiment 108461 PARAMETER Experiment Name: At_Germinating_Seeds_cDNA_P Parameter: Tissue Value: Germinating Seeds
  misc_feature: MA Experiment ID: 108462 Result: Up-regulated in Transcription
  misc_feature: MA Experiment 108462 PARAMETER Experiment Name: At_Germinating_Seeds_cDNA_P Parameter: Age (day) Value: 2 vs. 0
  misc_feature: MA Experiment 108462 PARAMETER Experiment Name: At_Germinating_Seeds_cDNA_P Parameter: Tissue Value: Germinating Seeds
  misc_feature: MA Experiment ID: 108463 Result: Up-regulated in Transcription
  misc_feature: MA Experiment 108463 PARAMETER Experiment Name: At_Germinating_Seeds_cDNA_P Parameter: Age (day) Value: 3 vs. 0
  misc_feature: MA Experiment 108463 PARAMETER Experiment Name: At_Germinating_Seeds_cDNA_P Parameter: Tissue Value: Germinating Seeds
  misc_feature: MA Experiment ID: 108464 Result: Up-regulated in Transcription
  misc_feature: MA Experiment 108464 PARAMETER Experiment Name: At_Germinating_Seeds_cDNA_P Parameter: Age (day) Value: 4 vs. 0
  misc_feature: MA Experiment 108464 PARAMETER Experiment Name: At_Germinating_Seeds_cDNA_P Parameter: Tissue Value: Germinating Seeds
  misc_feature: MA Experiment ID: 108594 Result: Down-regulated in Transcription
  misc_feature: MA Experiment 108594 PARAMETER Experiment Name: At_Ler-rhl_Root_cDNA_P Parameter: Plant Line Value: null
  misc_feature: MA Experiment ID: 108595 Result: Down-regulated in Transcription
  misc_feature: MA Experiment 108595 PARAMETER Experiment Name: At_Ler-pi_Ovule_cDNA_P Parameter: Plant Line Value: null
  misc_feature: MA Experiment ID: 20000069 Result: Down-regulated in Transcription
  misc_feature: MA Experiment 20000069 PARAMETER Experiment Name: At_100uM_ABA_Mutants_cDNA_P Parameter: Plant Line Value: CS23
  misc_feature: MA Experiment 20000069 PARAMETER Experiment Name: At_100uM_ABA_Mutants_cDNA_P Parameter: Timepoint (hr) Value: 6
  misc_feature: MA Experiment 20000069 PARAMETER Experiment Name: At_100uM_ABA_Mutants_cDNA_P Parameter: Tissue Value: Aerial
  misc_feature: MA Experiment 20000069 PARAMETER Experiment Name: At_100uM_ABA_Mutants_cDNA_P Parameter: Treatment Value: 100uM ABA vs. No Treatment
  misc_feature: MA Experiment ID: 20000072 Result: Down-regulated in Transcription
  misc_feature: MA Experiment 20000072 PARAMETER Experiment Name: At_100uM_ABA_Mutants_cDNA_P Parameter: Plant Line Value: CS8105
  misc_feature: MA Experiment 20000072 PARAMETER Experiment Name: At_100uM_ABA_Mutants_cDNA_P Parameter: Timepoint (hr) Value: 6
  misc_feature: MA Experiment 20000072 PARAMETER Experiment Name: At_100uM_ABA_Mutants_cDNA_P Parameter: Tissue Value: Aerial
  misc_feature: MA Experiment 20000072 PARAMETER Experiment Name: At_100uM_ABA_Mutants_cDNA_P Parameter: Treatment Value: 100uM ABA vs. No Treatment
  misc_feature: MA Experiment ID: 20000087 Result: Down-regulated in Transcription
  misc_feature: MA Experiment 20000087 PARAMETER Experiment Name: At_100uM_ABA_Mutants_cDNA_P Parameter: Plant Line Value: WS
  misc_feature: MA Experiment 20000087 PARAMETER Experiment Name: At_100uM_ABA_Mutants_cDNA_P Parameter: Timepoint (hr) Value: 6
  misc_feature: MA Experiment 20000087 PARAMETER Experiment Name: At_100uM_ABA_Mutants_cDNA_P Parameter: Tissue Value: Aerial
  misc_feature: MA Experiment 20000087 PARAMETER Experiment Name: At_100uM_ABA_Mutants_cDNA_P Parameter: Treatment Value: 100uM ABA vs. No Treatment
  misc_feature: MA Experiment ID: 20000112 Result: Down-regulated in Transcription
  misc_feature: MA Experiment 20000112 PARAMETER Experiment Name: At_42deg_Heat_cDNA_P Parameter: Temperature (deg C) Value: 42 vs. 22
  misc_feature: MA Experiment 20000112 PARAMETER Experiment Name: At_42deg_Heat_cDNA_P Parameter: Timepoint (hr) Value: 2
  misc_feature: MA Experiment 20000112 PARAMETER Experiment Name: At_42deg_Heat_cDNA_P Parameter: Tissue Value: Aerial
  misc_feature: MA Experiment ID: 20000117 Result: Down-regulated in Transcription
  misc_feature: MA Experiment 20000117 PARAMETER Experiment Name: At_100uM_ABA_Mutants_cDNA_P Parameter: Plant Line Value: Columbia
  misc_feature: MA Experiment 20000117 PARAMETER Experiment Name: At_100uM_ABA_Mutants_cDNA_P Parameter: Timepoint (hr) Value: 6
  misc_feature: MA Experiment 20000117 PARAMETER Experiment Name: At_100uM_ABA_Mutants_cDNA_P Parameter: Tissue Value: Aerial
  misc_feature: MA Experiment 20000117 PARAMETER Experiment Name: At_100uM_ABA_Mutants_cDNA_P Parameter: Treatment Value: 100uM ABA vs. No Treatment
  misc_feature: MA Experiment ID: 20000171 Result: Down-regulated in Transcription
  misc_feature: MA Experiment 20000171 PARAMETER Experiment Name: At_42deg_Heat_P Parameter: Age (day) Value: 14
  misc_feature: MA Experiment 20000171 PARAMETER Experiment Name: At_42deg_Heat_P Parameter: Organism Value: A. thaliana
  misc_feature: MA Experiment 20000171 PARAMETER Experiment Name: At_42deg_Heat_P Parameter: Plant Line Value: WS
  misc_feature: MA Experiment 20000171 PARAMETER Experiment Name: At_42deg_Heat_P Parameter: Temperature (deg C) Value: 42 vs. 22
  misc_feature: MA Experiment 20000171 PARAMETER Experiment Name: At_42deg_Heat_P Parameter: Timepoint (hr) Value: 1
  misc_feature: MA Experiment 20000171 PARAMETER Experiment Name: At_42deg_Heat_P Parameter: Tissue Value: Aerial
  misc_feature: MA Experiment ID: 20000180 Result: Up-regulated in Transcription
  misc_feature: MA Experiment 20000180 PARAMETER Experiment Name: At_Germinating_Seeds_P Parameter: Age (hr) Value: 24 vs. 0
  misc_feature: MA Experiment 20000180 PARAMETER Experiment Name: At_Germinating_Seeds_P Parameter: Tissue Value: Germinating Seeds
  misc_feature: MA Experiment ID: 20000185 Result: Down-regulated in Transcription
  misc_feature: MA Experiment 20000185 PARAMETER Experiment Name: At_Roots__P Parameter: Age (day) Value: 7 vs. 21
  misc_feature: MA Experiment 20000185 PARAMETER Experiment Name: At_Roots__P Parameter: Organism Value: A. thaliana
  misc_feature: MA Experiment 20000185 PARAMETER Experiment Name: At_Roots__P Parameter: Tissue Value: Roots vs. Whole Plant
  misc_feature: MA Experiment ID: 20000234 Result: Down-regulated in Transcription
  misc_feature: MA Experiment 20000234 PARAMETER Experiment Name: At_Siliques_P Parameter: Age (day) Value: 21
  misc_feature: MA Experiment 20000234 PARAMETER Experiment Name: At_Siliques_P Parameter: Organism Value: A. thaliana
  misc_feature: MA Experiment 20000234 PARAMETER Experiment Name: At_Siliques_P Parameter: Plant Line Value: WS
  misc_feature: MA Experiment 20000234 PARAMETER Experiment Name: At_Siliques_P Parameter: Tissue Value: Less Than 5mm Siliques vs. Whole Plant
  misc_feature: MA Experiment ID: 20000264 Result: Down-regulated in Transcription
  misc_feature: MA Experiment 20000264 PARAMETER Experiment Name: At_Open_Flower_P Parameter: Age (day) Value: 21
  misc_feature: MA Experiment 20000264 PARAMETER Experiment Name: At_Open_Flower_P Parameter: Plant Line Value: WS
  misc_feature: MA Experiment 20000264 PARAMETER Experiment Name: At_Open_Flower_P Parameter: Tissue Value: Open Flower vs. Whole Plant
  misc_feature: MA Experiment ID: 20000439 Result: Down-regulated in Transcription
  misc_feature: MA Experiment 20000439 PARAMETER Experiment Name: At_Roots__P Parameter: Age (day) Value: 14 vs. 21
  misc_feature: MA Experiment 20000439 PARAMETER Experiment Name: At_Roots__P Parameter: Organism Value: A. thaliana
  misc_feature: MA Experiment 20000439 PARAMETER Experiment Name: At_Roots__P Parameter: Tissue Value: Roots vs. Whole Plant
  misc_feature: MA Experiment ID: 20000451 Result: Up-regulated in Transcription
  misc_feature: MA Experiment 20000451 PARAMETER Experiment Name: At_CS6879_Shoots-Roots_P Parameter: Age (day) Value: 14
  misc_feature: MA Experiment 20000451 PARAMETER Experiment Name: At_CS6879_Shoots-Roots_P Parameter: Organism Value: A. thaliana
  misc_feature: MA Experiment 20000451 PARAMETER Experiment Name: At_CS6879_Shoots-Roots_P Parameter: Plant Line Value: CS6879 vs. WS
  misc_feature: MA Experiment 20000451 PARAMETER Experiment Name: At_CS6879_Shoots-Roots_P Parameter: Tissue Value: Roots
  misc_feature: MA Experiment ID: 20000794 Result: Down-regulated in Transcription
  misc_feature: MA Experiment 20000794 PARAMETER Experiment Name: At_Petals_P Parameter: Age (day) Value: 23-25 days
  misc_feature: MA Experiment 20000794 PARAMETER Experiment Name: At_Petals_P Parameter: Plant Line Value: WS
  misc_feature: MA Experiment 20000794 PARAMETER Experiment Name: At_Petals_P Parameter: Tissue Value: Petals vs. Whole plant
  misc_feature: MA Experiment ID: 20001248 Result: Up-regulated in Transcription
  misc_feature: MA Experiment 20001248 PARAMETER Experiment Name: At_Far-red-induction_P Parameter: Age (day) Value: 7
  misc_feature: MA Experiment 20001248 PARAMETER Experiment Name: At_Far-red-induction_P Parameter: Light Value: Far-red vs. White
  misc_feature: MA Experiment 20001248 PARAMETER Experiment Name: At_Far-red-induction_P Parameter: Organism Value: A. thaliana
  misc_feature: MA Experiment 20001248 PARAMETER Experiment Name: At_Far-red-induction_P Parameter: Plant Line Value: Columbia
  misc_feature: MA Experiment 20001248 PARAMETER Experiment Name: At_Far-red-induction_P Parameter: Timepoint (hr) Value: 4
  misc_feature: MA Experiment 20001248 PARAMETER Experiment Name: At_Far-red-induction_P Parameter: Tissue Value: Whole Plant
  misc_feature: MA Experiment ID: 20001451 Result: Down-regulated in Transcription
  misc_feature: MA Experiment 20001451 PARAMETER Experiment Name: At_Far-red-induction_P Parameter: Age (day) Value: 7
  misc_feature: MA Experiment 20001451 PARAMETER Experiment Name: At_Far-red-induction_P Parameter: Light Value: Far-red vs. White
  misc_feature: MA Experiment 20001451 PARAMETER Experiment Name: At_Far-red-induction_P Parameter: Organism Value: A. thaliana
  misc_feature: MA Experiment 20001451 PARAMETER Experiment Name: At_Far-red-induction_P Parameter: Plant Line Value: Columbia
  misc_feature: MA Experiment 20001451 PARAMETER Experiment Name: At_Far-red-induction_P Parameter: Timepoint (hr) Value: 24
  misc_feature: MA Experiment 20001451 PARAMETER Experiment Name: At_Far-red-induction_P Parameter: Tissue Value: Whole Plant
  misc_feature: MA Experiment ID: 20001557 Result: Up-regulated in Transcription
  misc_feature: MA Experiment 20001557 PARAMETER Experiment Name: At_Drought_Soil_Dry_P Parameter: Age (day) Value: 27
  misc_feature: MA Experiment 20001557 PARAMETER Experiment Name: At_Drought_Soil_Dry_P Parameter: Organism Value: A. thaliana
  misc_feature: MA Experiment 20001557 PARAMETER Experiment Name: At_Drought_Soil_Dry_P Parameter: Plant Line Value: WS
  misc_feature: MA Experiment 20001557 PARAMETER Experiment Name: At_Drought_Soil_Dry_P Parameter: Post Timepoint (hr) Value: 3
  misc_feature: MA Experiment 20001557 PARAMETER Experiment Name: At_Drought_Soil_Dry_P Parameter: Post-Treatment Value: Re-Water vs. No Drought
  misc_feature: MA Experiment 20001557 PARAMETER Experiment Name: At_Drought_Soil_Dry_P Parameter: Timepoint (day) Value: 13
  misc_feature: MA Experiment 20001557 PARAMETER Experiment Name: At_Drought_Soil_Dry_P Parameter: Treatment Value: Drought vs. No Drought
  misc_feature: MA Experiment ID: 20001558 Result: Up-regulated in Transcription
  misc_feature: MA Experiment 20001558 PARAMETER Experiment Name: At_Drought_Soil_Dry_P Parameter: Age (day) Value: 27
  misc_feature: MA Experiment 20001558 PARAMETER Experiment Name: At_Drought_Soil_Dry_P Parameter: Organism Value: A. thaliana
  misc_feature: MA Experiment 20001558 PARAMETER Experiment Name: At_Drought_Soil_Dry_P Parameter: Plant Line Value: WS
  misc_feature: MA Experiment 20001558 PARAMETER Experiment Name: At_Drought_Soil_Dry_P Parameter: Post Timepoint (hr) Value: 6
  misc_feature: MA Experiment 20001558 PARAMETER Experiment Name: At_Drought_Soil_Dry_P Parameter: Post-Treatment Value: Re-Water vs. No Drought
  misc_feature: MA Experiment 20001558 PARAMETER Experiment Name: At_Drought_Soil_Dry_P Parameter: Timepoint (day) Value: 13
  misc_feature: MA Experiment 20001558 PARAMETER Experiment Name: At_Drought_Soil_Dry_P Parameter: Treatment Value: Drought vs. No Drought
  misc_feature: MA Experiment ID: 20001757 Result: Up-regulated in Transcription
  misc_feature: MA Experiment 20001757 PARAMETER Experiment Name: At_50mM_NH4NO3_L-to-H_P Parameter: Timepoint (hr) Value: 6
  misc_feature: MA Experiment 20001757 PARAMETER Experiment Name: At_50mM_NH4NO3_L-to-H_P Parameter: Tissue Value: Leaf
  misc_feature: MA Experiment 20001757 PARAMETER Experiment Name: At_50mM_NH4NO3_L-to-H_P Parameter: Treatment Value: 50mM NH4NO3 vs 100mM Mannitol
  misc_feature: MA Experiment ID: 20001904 Result: Down-regulated in Transcription
  misc_feature: MA Experiment 20001904 PARAMETER Experiment Name: At_Drought_Reproduction_P Parameter: Age (day) Value: 37
  misc_feature: MA Experiment 20001904 PARAMETER Experiment Name: At_Drought_Reproduction_P Parameter: Organism Value: A. thaliana
  misc_feature: MA Experiment 20001904 PARAMETER Experiment Name: At_Drought_Reproduction_P Parameter: Plant Line Value: WS
  misc_feature: MA Experiment 20001904 PARAMETER Experiment Name: At_Drought_Reproduction_P Parameter: Timepoint (day) Value: 7
  misc_feature: MA Experiment 20001904 PARAMETER Experiment Name: At_Drought_Reproduction_P Parameter: Tissue Value: Rosettes
  misc_feature: MA Experiment 20001904 PARAMETER Experiment Name: At_Drought_Reproduction_P Parameter: Treatment Value: Drought vs. No Drought
  misc_feature: MA Experiment ID: 20001906 Result: Down-regulated in Transcription
  misc_feature: MA Experiment 20001906 PARAMETER Experiment Name: At_Drought_Reproduction_P Parameter: Age (day) Value: 35
  misc_feature: MA Experiment 20001906 PARAMETER Experiment Name: At_Drought_Reproduction_P Parameter: Organism Value: A. thaliana
  misc_feature: MA Experiment 20001906 PARAMETER Experiment Name: At_Drought_Reproduction_P Parameter: Plant Line Value: WS
  misc_feature: MA Experiment 20001906 PARAMETER Experiment Name: At_Drought_Reproduction_P Parameter: Timepoint (day) Value: 5
  misc_feature: MA Experiment 20001906 PARAMETER Experiment Name: At_Drought_Reproduction_P Parameter: Tissue Value: Siliques
  misc_feature: MA Experiment 20001906 PARAMETER Experiment Name: At_Drought_Reproduction_P Parameter: Treatment Value: Drought vs. No Drought
  misc_feature: MA Experiment ID: 20001910 Result: Down-regulated in Transcription
  misc_feature: MA Experiment 20001910 PARAMETER Experiment Name: At_Drought_Reproduction_P Parameter: Age (day) Value: 37
  misc_feature: MA Experiment 20001910 PARAMETER Experiment Name: At_Drought_Reproduction_P Parameter: Organism Value: A. thaliana
  misc_feature: MA Experiment 20001910 PARAMETER Experiment Name: At_Drought_Reproduction_P Parameter: Plant Line Value: WS
  misc_feature: MA Experiment 20001910 PARAMETER Experiment Name: At_Drought_Reproduction_P Parameter: Timepoint (day) Value: 7
  misc_feature: MA Experiment 20001910 PARAMETER Experiment Name: At_Drought_Reproduction_P Parameter: Tissue Value: Flowers
  misc_feature: MA Experiment 20001910 PARAMETER Experiment Name: At_Drought_Reproduction_P Parameter: Treatment Value: Drought vs. No Drought
  misc_feature: MA Experiment ID: 20001911 Result: Down-regulated in Transcription
  misc_feature: MA Experiment 20001911 PARAMETER Experiment Name: At_Drought_Reproduction_P Parameter: Age (day) Value: 40
  misc_feature: MA Experiment 20001911 PARAMETER Experiment Name: At_Drought_Reproduction_P Parameter: Organism Value: A. thaliana
  misc_feature: MA Experiment 20001911 PARAMETER Experiment Name: At_Drought_Reproduction_P Parameter: Plant Line Value: WS
  misc_feature: MA Experiment 20001911 PARAMETER Experiment Name: At_Drought_Reproduction_P Parameter: Timepoint (day) Value: 10
  misc_feature: MA Experiment 20001911 PARAMETER Experiment Name: At_Drought_Reproduction_P Parameter: Tissue Value: Flowers
  misc_feature: MA Experiment 20001911 PARAMETER Experiment Name: At_Drought_Reproduction_P Parameter: Treatment Value: Drought vs. No Drought
accttctactttcatgcatttgcactcataagctctctctatataaacccaaccttcattaccattcttcattatccaatccaatccattacttactaagtaaaaagagaaaaaaaaaaaattaagatatggagggactcttgaagttgtcaactttggtgattgtgtgcatgttagtgaccgctccaatggcgtccgaggcagcaatctcgtgcggcgcagtcaccggcagcttaggtcaatgctataactacttgacccgaggcggtttcattcctagagggtgttgctctggcgttcagaggctcaacagcttggctcgtaccacccgtgaccgccaacaagcttgtcgttgtatccagggagcagcgagagccttgggttctcgacttaacgctggtcgtgctgctcgtctccctggtgcttgccgtgttaggatctcttaccccatcagtgccagaaccaactgtaacaccgtcaggtgatcaaaagaagatagacgttgaagggttttcatataatcgatgagagagtattaaaaataattaagatgtcacactatatacacactagtgtatccttttactgttattattgttgtgtttctagattttgtgttttcatgtctttctttgtatatgacggtccatttaattggtcgtctgtgttatgtactcctctaatgatatattgaatttacgattatgtattatcttcaaactcttgccattaactttggtcacgttctgc

SEQ ID NO: 28075 - protein, 118 aa, Arabidopsis thaliana
  peptide (1)..(118): Ceres Seq. ID no. 13580821
  misc_feature (29)..(114): Pfam Name: Protease inhibitor/seed storage/LTP family Pfam Description: Protease inhibitor/seed storage/LTP family
  misc_feature (1)..(118): Homolog of NCBI NO: 2497737 NR Description: NONSPECIFIC LIPID-TRANSFER PROTEIN 3 PRECURSOR
  misc_feature (1)..(118): Homolog of NCBI NO: 15224898 NR Description: nonspecific lipid transfer protein 2 (LTP 2)
  misc_feature (1)..(118): Homolog of NCBI NO: 2497736 NR Description: NONSPECIFIC LIPID-TRANSFER PROTEIN 2 PRECURSOR
  misc_feature (1)..(118): Homolog of NCBI NO: 2497738 NR Description: NONSPECIFIC LIPID-TRANSFER PROTEIN A PRECURSOR
  misc_feature (1)..(118): Homolog of NCBI NO: 2497739 NR Description: NONSPECIFIC LIPID-TRANSFER PROTEIN B PRECURSOR
  misc_feature (1)..(118): Homolog of NCBI NO: 11273805 NR Description: lipid transfer protein [imported] - wild cabbage
  misc_feature (1)..(118): Homolog of NCBI NO: 2497735 NR Description: NONSPECIFIC LIPID-TRANSFER PROTEIN 1 PRECURSOR
  misc_feature (1)..(118): Homolog of NCBI NO: 15224899 NR Description: nonspecific lipid transfer protein 1 (LTP 1)
  misc_feature (15)..(118): Homolog of NCBI NO: 21617887 NR Description: non-specific lipid transfer protein [Arabidopsis
  misc_feature (1)..(118): Homolog of NCBI NO: 15230533 NR Description: nonspecific lipid transfer protein 5 (LTP 5)
MEGLLKLSTLVIVCMLVTAPMASEAAISCGAVTGSLGQCYNYLTRGGFIPRGCCSGVQRLNSLARTTRDRQQACRCIQGAARALGSRLNAGRAARLPGACRVRISYPISARTNCNTVR

SEQ ID NO: 28076 - protein, 104 aa, Arabidopsis thaliana
  peptide (1)..(104): Ceres Seq. ID no. 13580822
  misc_feature (15)..(100): Pfam Name: Protease inhibitor/seed storage/LTP family Pfam Description: Protease inhibitor/seed storage/LTP family
  misc_feature (1)..(104): Homolog of NCBI NO: 2497737 NR Description: NONSPECIFIC LIPID-TRANSFER PROTEIN 3 PRECURSOR
  misc_feature (1)..(104): Homolog of NCBI NO: 15224898 NR Description: nonspecific lipid transfer protein 2 (LTP 2)
  misc_feature (1)..(104): Homolog of NCBI NO: 2497736 NR Description: NONSPECIFIC LIPID-TRANSFER PROTEIN 2 PRECURSOR
  misc_feature (1)..(104): Homolog of NCBI NO: 2497738 NR Description: NONSPECIFIC LIPID-TRANSFER PROTEIN A PRECURSOR
  misc_feature (1)..(104): Homolog of NCBI NO: 2497739 NR Description: NONSPECIFIC LIPID-TRANSFER PROTEIN B PRECURSOR
  misc_feature (1)..(104): Homolog of NCBI NO: 11273805 NR Description: lipid transfer protein [imported] - wild cabbage
  misc_feature (1)..(104): Homolog of NCBI NO: 2497735 NR Description: NONSPECIFIC LIPID-TRANSFER PROTEIN 1 PRECURSOR
  misc_feature (1)..(104): Homolog of NCBI NO: 15224899 NR Description: nonspecific lipid transfer protein 1 (LTP 1)
  misc_feature (1)..(104): Homolog of NCBI NO: 21617887 NR Description: non-specific lipid transfer protein [Arabidopsis
  misc_feature (1)..(104): Homolog of NCBI NO: 15230533 NR Description: nonspecific lipid transfer protein 5 (LTP 5)
MLVTAPMASEAAISCGAVTGSLGQCYNYLTRGGFIPRGCCSGVQRLNSLARTTRDRQQACRCIQGAARALGSRLNAGRAARLPGACRVRISYPISARTNCNTVR

SEQ ID NO: 28077 - protein, 98 aa, Arabidopsis thaliana
  peptide (1)..(98): Ceres Seq. ID no. 13580823
  misc_feature (9)..(94): Pfam Name: Protease inhibitor/seed storage/LTP family Pfam Description: Protease inhibitor/seed storage/LTP family
  misc_feature (1)..(98): Homolog of NCBI NO: 2497737 NR Description: NONSPECIFIC LIPID-TRANSFER PROTEIN 3 PRECURSOR
  misc_feature (1)..(98): Homolog of NCBI NO: 15224898 NR Description: nonspecific lipid transfer protein 2 (LTP 2)
  misc_feature (1)..(98): Homolog of NCBI NO: 2497736 NR Description: NONSPECIFIC LIPID-TRANSFER PROTEIN 2 PRECURSOR
  misc_feature (1)..(98): Homolog of NCBI NO: 2497738 NR Description: NONSPECIFIC LIPID-TRANSFER PROTEIN A PRECURSOR
  misc_feature (1)..(98): Homolog of NCBI NO: 2497739 NR Description: NONSPECIFIC LIPID-TRANSFER PROTEIN B PRECURSOR
  misc_feature (1)..(98): Homolog of NCBI NO: 11273805 NR Description: lipid transfer protein [imported] - wild cabbage
  misc_feature (1)..(98): Homolog of NCBI NO: 2497735 NR Description: NONSPECIFIC LIPID-TRANSFER PROTEIN 1 PRECURSOR
  misc_feature (1)..(98): Homolog of NCBI NO: 15224899 NR Description: nonspecific lipid transfer protein 1 (LTP 1)
  misc_feature (1)..(98): Homolog of NCBI NO: 21617887 NR Description: non-specific lipid transfer protein [Arabidopsis
  misc_feature (1)..(98): Homolog of NCBI NO: 15230533 NR Description: nonspecific lipid transfer protein 5 (LTP 5)
MASEAAISCGAVTGSLGQCYNYLTRGGFIPRGCCSGVQRLNSLARTTRDRQQACRCIQGAARALGSRLNAGRAARLPGACRVRISYPISARTNCNTVR

SEQ ID NO: 28078 - DNA, 1482 bp, Arabidopsis thaliana
  misc_feature (1)..(1482): Ceres Seq. ID no. 12324908
  misc_feature: MA Experiment ID: 108434 Result: Up-regulated in Transcription
  misc_feature: MA Experiment 108434 PARAMETER Experiment Name: At_Root_Tips_cDNA_P Parameter: Tissue Value: Root Tips
  misc_feature: MA Experiment ID: 108461 Result: Down-regulated in Transcription
  misc_feature: MA Experiment 108461 PARAMETER Experiment Name: At_Germinating_Seeds_cDNA_P Parameter: Age (day) Value: 1 vs. 0
  misc_feature: MA Experiment 108461 PARAMETER Experiment Name: At_Germinating_Seeds_cDNA_P Parameter: Tissue Value: Germinating Seeds
  misc_feature: MA Experiment ID: 108462 Result: Down-regulated in Transcription
  misc_feature: MA Experiment 108462 PARAMETER Experiment Name: At_Germinating_Seeds_cDNA_P Parameter: Age (day) Value: 2 vs. 0
  misc_feature: MA Experiment 108462 PARAMETER Experiment Name: At_Germinating_Seeds_cDNA_P Parameter: Tissue Value: Germinating Seeds
  misc_feature: MA Experiment ID: 108463 Result: Down-regulated in Transcription
  misc_feature: MA Experiment 108463 PARAMETER Experiment Name: At_Germinating_Seeds_cDNA_P Parameter: Age (day) Value: 3 vs. 0
  misc_feature: MA Experiment 108463 PARAMETER Experiment Name: At_Germinating_Seeds_cDNA_P Parameter: Tissue Value: Germinating Seeds
  misc_feature: MA Experiment ID: 108585 Result: Down-regulated in Transcription
  misc_feature: MA Experiment 108585 PARAMETER Experiment Name: At_5mM_NaNP_cDNA_P Parameter: Timepoint (hr) Value: 6
  misc_feature: MA Experiment 108585 PARAMETER Experiment Name: At_5mM_NaNP_cDNA_P Parameter: Tissue Value: Aerial
  misc_feature: MA Experiment 108585 PARAMETER Experiment Name: At_5mM_NaNP_cDNA_P Parameter: Treatment Value: null
  misc_feature: MA Experiment ID: 20000179 Result: Down-regulated in Transcription
  misc_feature: MA Experiment 20000179 PARAMETER Experiment Name: At_Germinating_Seeds_P Parameter: Age (hr) Value: 6 vs. 0
  misc_feature: MA Experiment 20000179 PARAMETER Experiment Name: At_Germinating_Seeds_P Parameter: Tissue Value: Germinating Seeds
  misc_feature: MA Experiment ID: 20000180 Result: Down-regulated in Transcription
  misc_feature: MA Experiment 20000180 PARAMETER Experiment Name: At_Germinating_Seeds_P Parameter: Age (hr) Value: 24 vs. 0
  misc_feature: MA Experiment 20000180 PARAMETER Experiment Name: At_Germinating_Seeds_P Parameter: Tissue Value: Germinating Seeds
  misc_feature: MA Experiment ID: 20000227 Result: Up-regulated in Transcription
  misc_feature: MA Experiment 20000227 PARAMETER Experiment Name: At_Root-Tips-vs-Tops_P Parameter: Tissue Value: Root Tips vs. Root Tops
  misc_feature: MA Experiment ID: 20000234 Result: Up-regulated in Transcription
  misc_feature: MA Experiment 20000234 PARAMETER Experiment Name: At_Siliques_P Parameter: Age (day) Value: 21
  misc_feature: MA Experiment 20000234 PARAMETER Experiment Name: At_Siliques_P Parameter: Organism Value: A. thaliana
  misc_feature: MA Experiment 20000234 PARAMETER Experiment Name: At_Siliques_P Parameter: Plant Line Value: WS
  misc_feature: MA Experiment 20000234 PARAMETER Experiment Name: At_Siliques_P Parameter: Tissue Value: Less Than 5mm Siliques vs. Whole Plant
  misc_feature: MA Experiment ID: 20000264 Result: Up-regulated in Transcription
  misc_feature: MA Experiment 20000264 PARAMETER Experiment Name: At_Open_Flower_P Parameter: Age (day) Value: 21
  misc_feature: MA Experiment 20000264 PARAMETER Experiment Name: At_Open_Flower_P Parameter: Plant Line Value: WS
  misc_feature: MA Experiment 20000264 PARAMETER Experiment Name: At_Open_Flower_P Parameter: Tissue Value: Open Flower vs. Whole Plant
  misc_feature: MA Experiment ID: 20001557 Result: Up-regulated in Transcription
  misc_feature: MA Experiment 20001557 PARAMETER Experiment Name: At_Drought_Soil_Dry_P Parameter: Age (day) Value: 27
  misc_feature: MA Experiment 20001557 PARAMETER Experiment Name: At_Drought_Soil_Dry_P Parameter: Organism Value: A. thaliana
  misc_feature: MA Experiment 20001557 PARAMETER Experiment Name: At_Drought_Soil_Dry_P Parameter: Plant Line Value: WS
  misc_feature: MA Experiment 20001557 PARAMETER Experiment Name: At_Drought_Soil_Dry_P Parameter: Post Timepoint (hr) Value: 3
  misc_feature: MA Experiment 20001557 PARAMETER Experiment Name: At_Drought_Soil_Dry_P Parameter: Post-Treatment Value: Re-Water vs. No Drought
  misc_feature: MA Experiment 20001557 PARAMETER Experiment Name: At_Drought_Soil_Dry_P Parameter: Timepoint (day) Value: 13
  misc_feature: MA Experiment 20001557 PARAMETER Experiment Name: At_Drought_Soil_Dry_P Parameter: Treatment Value: Drought vs. No Drought
  misc_feature: MA Experiment ID: 20001558 Result: Up-regulated in Transcription
  misc_feature: MA Experiment 20001558 PARAMETER Experiment Name: At_Drought_Soil_Dry_P Parameter: Age (day) Value: 27
  misc_feature: MA Experiment 20001558 PARAMETER Experiment Name: At_Drought_Soil_Dry_P Parameter: Organism Value: A. thaliana
  misc_feature: MA Experiment 20001558 PARAMETER Experiment Name: At_Drought_Soil_Dry_P Parameter: Plant Line Value: WS
  misc_feature: MA Experiment 20001558 PARAMETER Experiment Name: At_Drought_Soil_Dry_P Parameter: Post Timepoint (hr) Value: 6
  misc_feature: MA Experiment 20001558 PARAMETER Experiment Name: At_Drought_Soil_Dry_P Parameter: Post-Treatment Value: Re-Water vs. No Drought
  misc_feature: MA Experiment 20001558 PARAMETER Experiment Name: At_Drought_Soil_Dry_P Parameter: Timepoint (day) Value: 13
  misc_feature: MA Experiment 20001558 PARAMETER Experiment Name: At_Drought_Soil_Dry_P Parameter: Treatment Value: Drought vs. No Drought
actaaactcttaaaccctaaagagtaaagacatttgcactaccccgcgtggtcgacgattcgacgcttccaatgacgtcatctcgcctctatctccgtttcctccgccgcttctccaccgccaccggtatagattctcaaaccactgcttaccccggcgcaatcactatgtccaaagctaaatccaaactccgcaaagtacaagatccagacaaagccttagcgatttacaaatccgtctccaacaattccacatctccactctcctctcgttacgcaatggagcttacagtccaacgtctcgctaaatctcaacgcttctccgacatagaagctctaattgagtctcacaaaaacaacccaaagatcaaaacagagacttttctctctacacttatcagatcttatggacgagcttcaatgtttgatcatgctatgaagatgttcgaggagatggataagcttggcacacccagaaccgttgtttccttcaatgccttactcgctgcttgtcttcattctgatttgtttgaaagagtcccccaactgttcgacgaatttcctcagaggtataataatatcactcctgataaaatctcttacggtatgttgattaagtcgtattgtgactctggtaagcctgaaaaagctatggagattatgagagatatggaggttaaaggtgtggaagttactatcattgctttcactaccattttaggatctttgtataagaatggtttagtcgatgaagcggagagcttgtggattgagatggtgaacaaaggttgtgacttggataacacagtttataatgttagacttatgaatgctgcgaaggaaagtcccgagagagttaaggaattgatggaagaaatgagtagtgtaggattgaaacctgatactgttagctataactatcttatgactgcgtactgcgtgaaaggaatgatgagtgaagccaagaaagtgtatgaagggcttgagcaaccaaacgcagcgacgttcaggacattgatatttcatctgtgtataaacgggttgtatgatcaaggtttaacggtgtttaagaagagcgcgatagtgcacaagattccggatttcaaaacttgtaagcatttgactgaaggattggtgaagaataacagaatggaagatgcaagaggagtggccaggatcgtgaagaagaaattccctccgcgtttggtgaccgagtggaagaaactagaggagaagctgggattgtattcaaagggtaatgcagctgctgtttcatcttcttctcaaactagagaagtgttagatcaagaaagagaggatgatgtataaagctcaagaagttgcttagaagatcttatttttgtttgtgcttgcttgcttcagctaatattatggcttgtggaaactgtgatctagcgtgtagaagacaaacgattcccaatttacttgtctatgctttgagccaattactacgcttgcgttg

SEQ ID NO: 28079 - protein, 418 aa, Arabidopsis thaliana
  peptide (1)..(418): Ceres Seq. ID no. 12324909
  misc_feature (138)..(172): Pfam Name: PPR repeat Pfam Description: PPR repeat
  misc_feature (1)..(371): Homolog of NCBI NO: 21617993 NR Description: unknown [Arabidopsis thaliana]
  misc_feature (6)..(376): Homolog of NCBI NO: 26453140 NR Description: unknown protein [Arabidopsis thaliana]
  misc_feature (6)..(376): Homolog of NCBI NO: 25406637 NR Description: hypothetical protein F18B13.23 [imported] -
  misc_feature (6)..(376): Homolog of NCBI NO: 15220068 NR Description: hypothetical protein; protein id: At1g80150.1
  misc_feature (11)..(371): Homolog of NCBI NO: 15222796 NR Description: unknown protein
  misc_feature (8)..(389): Homolog of NCBI NO: 21553755 NR Description: putative membrane-associated salt-inducible
  misc_feature (11)..(389): Homolog of NCBI NO: 18407365 NR Description: expressed protein
  misc_feature (1)..(397): Homolog of NCBI NO: 25455786 NR Description: membrane-associated salt-inducible protein like
  misc_feature (1)..(397): Homolog of NCBI NO: 15234493 NR Description: salt-inducible like protein
  misc_feature (1)..(418): Homolog of NCBI NO: 18398767 NR Description: expressed protein
MTSSRLYLRFLRRFSTATGIDSQTTAYPGAITMSKAKSKLRKVQDPDKALAIYKSVSNNSTSPLSSRYAMELTVQRLAKSQRFSDIEALIESHKNNPKIKTETFLSTLIRSYGRASMFDHAMKMFEEMDKLGTPRTVVSFNALLAACLHSDLFERVPQLFDEFPQRYNNITPDKISYGMLIKSYCDSGKPEKAMEIMRDMEVKGVEVTIIAFTTILGSLYKNGLVDEAESLWIEMVNKGCDLDNTVYNVRLMNAAKESPERVKELMEEMSSVGLKPDTVSYNYLMTAYCVKGMMSEAKKVYEGLEQPNAATFRTLIFHLCINGLYDQGLTVFKKSAIVHKIPDFKTCKHLTEGLVKNNRMEDARGVARIVKKKFPPRLVTEWKKLEEKLGLYSKGNAAAVSSSSQTREVLDQEREDDV

SEQ ID NO: 28080 - protein, 386 aa, Arabidopsis thaliana
  peptide (1)..(386): Ceres Seq. ID no. 12324910
  misc_feature (106)..(140): Pfam Name: PPR repeat Pfam Description: PPR repeat
  misc_feature (1)..(339): Homolog of NCBI NO: 21617993 NR Description: unknown [Arabidopsis thaliana]
  misc_feature (1)..(344): Homolog of NCBI NO: 26453140 NR Description: unknown protein [Arabidopsis thaliana]
  misc_feature (1)..(344): Homolog of NCBI NO: 25406637 NR Description: hypothetical protein F18B13.23 [imported] -
  misc_feature (1)..(344): Homolog of NCBI NO: 15220068 NR Description: hypothetical protein; protein id: At1g80150.1
  misc_feature (1)..(339): Homolog of NCBI NO: 15222796 NR Description: unknown protein
  misc_feature (1)..(357): Homolog of NCBI NO: 21553755 NR Description: putative membrane-associated salt-inducible
  misc_feature (1)..(357): Homolog of NCBI NO: 18407365 NR Description: expressed protein
  misc_feature (1)..(365): Homolog of NCBI NO: 25455786 NR Description: membrane-associated salt-inducible protein like
  misc_feature (1)..(365): Homolog of NCBI NO: 15234493 NR Description: salt-inducible like protein
  misc_feature (1)..(386): Homolog of NCBI NO: 18398767 NR Description: expressed protein
MSKAKSKLRKVQDPDKALAIYKSVSNNSTSPLSSRYAMELTVQRLAKSQRFSDIEALIESHKNNPKIKTETFLSTLIRSYGRASMFDHAMKMFEEMDKLGTPRTVVSFNALLAACLHSDLFERVPQLFDEFPQRYNNITPDKISYGMLIKSYCDSGKPEKAMEIMRDMEVKGVEVTIIAFTTILGSLYKNGLVDEAESLWIEMVNKGCDLDNTVYNVRLMNAAKESPERVKELMEEMSSVGLKPDTVSYNYLMTAYCVKGMMSEAKKVYEGLEQPNAATFRTLIFHLCINGLYDQGLTVFKKSAIVHKIPDFKTCKHLTEGLVKNNRMEDARGVARIVKKKFPPRLVTEWKKLEEKLGLYSKGNAAAVSSSSQTREVLDQEREDDV

SEQ ID NO: 28081 - protein, 349 aa, Arabidopsis thaliana
  peptide (1)..(349): Ceres Seq. ID no. 12324911
  misc_feature (69)..(103): Pfam Name: PPR repeat Pfam Description: PPR repeat
  misc_feature (1)..(302): Homolog of NCBI NO: 21617993 NR Description: unknown [Arabidopsis thaliana]
  misc_feature (1)..(307): Homolog of NCBI NO: 26453140 NR Description: unknown protein [Arabidopsis thaliana]
  misc_feature (1)..(307): Homolog of NCBI NO: 25406637 NR Description: hypothetical protein F18B13.23 [imported] -
  misc_feature (1)..(307): Homolog of NCBI NO: 15220068 NR Description: hypothetical protein; protein id: At1g80150.1
  misc_feature (1)..(302): Homolog of NCBI NO: 15222796 NR Description: unknown protein
  misc_feature (1)..(320): Homolog of NCBI NO: 21553755 NR Description: putative membrane-associated salt-inducible
  misc_feature (1)..(320): Homolog of NCBI NO: 18407365 NR Description: expressed protein
  misc_feature (1)..(328): Homolog of NCBI NO: 25455786 NR Description: membrane-associated salt-inducible protein like
  misc_feature (1)..(328): Homolog of NCBI NO: 15234493 NR Description: salt-inducible like protein
  misc_feature (1)..(349): Homolog of NCBI NO: 18398767 NR Description: expressed protein
MELTVQRLAKSQRFSDIEALIESHKNNPKIKTETFLSTLIRSYGRASMFDHAMKMFEEMDKLGTPRTVVSFNALLAACLHSDLFERVPQLFDEFPQRYNNITPDKISYGMLIKSYCDSGKPEKAMEIMRDMEVKGVEVTIIAFTTILGSLYKNGLVDEAESLWIEMVNKGCDLDNTVYNVRLMNAAKESPERVKELMEEMSSVGLKPDTVSYNYLMTAYCVKGMMSEAKKVYEGLEQPNAATFRTLIFHLCINGLYDQGLTVFKKSAIVHKIPDFKTCKHLTEGLVKNNRMEDARGVARIVKKKFPPRLVTEWKKLEEKLGLYSKGNAAAVSSSSQTREVLDQEREDDV

SEQ ID NO: 28082 - DNA, 700 bp, Arabidopsis thaliana
  misc_feature (1)..(700): Ceres Seq. ID no. 12423258
  misc_feature: MA Experiment ID: 108435 Result: Down-regulated in Transcription
  misc_feature: MA Experiment 108435 PARAMETER Experiment Name: At_stm_Mutants_cDNA_P Parameter: Plant Line Value: wt Landsburg vs stm
  misc_feature: MA Experiment 108435 PARAMETER Experiment Name: At_stm_Mutants_cDNA_P Parameter: Tissue Value: Shoot Apical Meristem Region
  misc_feature: MA Experiment ID: 108461 Result: Up-regulated in Transcription
  misc_feature: MA Experiment 108461 PARAMETER Experiment Name: At_Germinating_Seeds_cDNA_P Parameter: Age (day) Value: 1 vs. 0
  misc_feature: MA Experiment 108461 PARAMETER Experiment Name: At_Germinating_Seeds_cDNA_P Parameter: Tissue Value: Germinating Seeds
  misc_feature: MA Experiment ID: 108462 Result: Up-regulated in Transcription
  misc_feature: MA Experiment 108462 PARAMETER Experiment Name: At_Germinating_Seeds_cDNA_P Parameter: Age (day) Value: 2 vs. 0
  misc_feature: MA Experiment 108462 PARAMETER Experiment Name: At_Germinating_Seeds_cDNA_P Parameter: Tissue Value: Germinating Seeds
  misc_feature: MA Experiment ID: 108463 Result: Up-regulated in Transcription
  misc_feature: MA Experiment 108463 PARAMETER Experiment Name: At_Germinating_Seeds_cDNA_P Parameter: Age (day) Value: 3 vs. 0
  misc_feature: MA Experiment 108463 PARAMETER Experiment Name: At_Germinating_Seeds_cDNA_P Parameter: Tissue Value: Germinating Seeds
  misc_feature: MA Experiment ID: 108501 Result: Down-regulated in Transcription
  misc_feature: MA Experiment 108501 PARAMETER Experiment Name: At_ap2_floral_buds_cDNA_P Parameter: Plant Line Value: ap2 (Ler.)
  misc_feature: MA Experiment 108501 PARAMETER Experiment Name: At_ap2_floral_buds_cDNA_P Parameter: Tissue Value: Closed Flower
  misc_feature: MA Experiment ID: 108577 Result: Down-regulated in Transcription
  misc_feature: MA Experiment 108577 PARAMETER Experiment Name: At_42deg_Heat_cDNA_P Parameter: Temperature (deg C) Value: 42 vs. 22
  misc_feature: MA Experiment 108577 PARAMETER Experiment Name: At_42deg_Heat_cDNA_P Parameter: Timepoint (hr) Value: 6
  misc_feature: MA Experiment 108577 PARAMETER Experiment Name: At_42deg_Heat_cDNA_P Parameter: Tissue Value: Aerial
  misc_feature: MA Experiment ID: 108594 Result: Up-regulated in Transcription
  misc_feature: MA Experiment 108594 PARAMETER Experiment Name: At_Ler-rhl_Root_cDNA_P Parameter: Plant Line Value: null
  misc_feature: MA Experiment ID: 108595 Result: Down-regulated in Transcription
  misc_feature: MA Experiment 108595 PARAMETER Experiment Name: At_Ler-pi_Ovule_cDNA_P Parameter: Plant Line Value: null
  misc_feature: MA Experiment ID: 20000069 Result: Up-regulated in Transcription
  misc_feature: MA Experiment 20000069 PARAMETER Experiment Name: At_100uM_ABA_Mutants_cDNA_P Parameter: Plant Line Value: CS23
  misc_feature: MA Experiment 20000069 PARAMETER Experiment Name: At_100uM_ABA_Mutants_cDNA_P Parameter: Timepoint (hr) Value: 6
  misc_feature: MA Experiment 20000069 PARAMETER Experiment Name: At_100uM_ABA_Mutants_cDNA_P Parameter: Tissue Value: Aerial
  misc_feature: MA Experiment 20000069 PARAMETER Experiment Name: At_100uM_ABA_Mutants_cDNA_P Parameter: Treatment Value: 100uM ABA vs. No Treatment
  misc_feature: MA Experiment ID: 20000089 Result: Up-regulated in Transcription
  misc_feature: MA Experiment ID: 20000090 Result: Up-regulated in Transcription
  misc_feature: MA Experiment ID: 20000111 Result: Down-regulated in Transcription
  misc_feature: MA Experiment 20000111 PARAMETER Experiment Name: At_42deg_Heat_cDNA_P Parameter: Temperature (deg C) Value: 42 vs. 22
  misc_feature: MA Experiment 20000111 PARAMETER Experiment Name: At_42deg_Heat_cDNA_P Parameter: Timepoint (hr) Value: 6
  misc_feature: MA Experiment 20000111 PARAMETER Experiment Name: At_42deg_Heat_cDNA_P Parameter: Tissue Value: Aerial
  misc_feature: MA Experiment ID: 20000112 Result: Down-regulated in Transcription
  misc_feature: MA Experiment 20000112 PARAMETER Experiment Name: At_42deg_Heat_cDNA_P Parameter: Temperature (deg C) Value: 42 vs. 22
  misc_feature: MA Experiment 20000112 PARAMETER Experiment Name: At_42deg_Heat_cDNA_P Parameter: Timepoint (hr) Value: 2
  misc_feature: MA Experiment 20000112 PARAMETER Experiment Name: At_42deg_Heat_cDNA_P Parameter: Tissue Value: Aerial
  misc_feature: MA Experiment ID: 20000113 Result: Down-regulated in Transcription
  misc_feature: MA Experiment 20000113 PARAMETER Experiment Name: At_42deg_Heat_cDNA_P Parameter: Temperature (deg C) Value: 42 vs. 22
  misc_feature: MA Experiment 20000113 PARAMETER Experiment Name: At_42deg_Heat_cDNA_P Parameter: Timepoint (hr) Value: 8
  misc_feature: MA Experiment 20000113 PARAMETER Experiment Name: At_42deg_Heat_cDNA_P Parameter: Tissue Value: Aerial
  misc_feature: MA Experiment ID: 20000173 Result: Down-regulated in Transcription
  misc_feature: MA Experiment 20000173 PARAMETER Experiment Name: At_42deg_Heat_P Parameter: Age (day) Value: 14
  misc_feature: MA Experiment 20000173 PARAMETER Experiment Name: At_42deg_Heat_P Parameter: Organism Value: A. thaliana
  misc_feature: MA Experiment 20000173 PARAMETER Experiment Name: At_42deg_Heat_P Parameter: Plant Line Value: WS
  misc_feature: MA Experiment 20000173 PARAMETER Experiment Name: At_42deg_Heat_P Parameter: Temperature (deg C) Value: 42 vs. 22
  misc_feature: MA Experiment 20000173 PARAMETER Experiment Name: At_42deg_Heat_P Parameter: Timepoint (hr) Value: 6
  misc_feature: MA Experiment 20000173 PARAMETER Experiment Name: At_42deg_Heat_P Parameter: Tissue Value: Aerial
  misc_feature: MA Experiment ID: 20000180 Result: Up-regulated in Transcription
  misc_feature: MA Experiment 20000180 PARAMETER Experiment Name: At_Germinating_Seeds_P Parameter: Age (hr) Value: 24 vs. 0
  misc_feature: MA Experiment 20000180 PARAMETER Experiment Name: At_Germinating_Seeds_P Parameter: Tissue Value: Germinating Seeds
  misc_feature: MA Experiment ID: 20000182 Result: Down-regulated in Transcription
  misc_feature: MA Experiment 20000182 PARAMETER Experiment Name: At_2mM_SA_P Parameter: Age (day) Value: 14
  misc_feature: MA Experiment 20000182 PARAMETER Experiment Name: At_2mM_SA_P Parameter: Organism Value: A. thaliana
  misc_feature: MA Experiment 20000182 PARAMETER Experiment Name: At_2mM_SA_P Parameter: Plant Line Value: WS
  misc_feature: MA Experiment 20000182 PARAMETER Experiment Name: At_2mM_SA_P Parameter: Timepoint (hr) Value: 6
  misc_feature: MA Experiment 20000182 PARAMETER Experiment Name: At_2mM_SA_P Parameter: Tissue Value: Aerial
  misc_feature: MA Experiment 20000182 PARAMETER Experiment Name: At_2mM_SA_P Parameter: Treatment Value: 2mM SA vs. No Treatment
  misc_feature: MA Experiment ID: 20000185 Result: Down-regulated in Transcription
  misc_feature: MA Experiment 20000185 PARAMETER Experiment Name: At_Roots__P Parameter: Age (day) Value: 7 vs. 21
  misc_feature: MA Experiment 20000185 PARAMETER Experiment Name: At_Roots__P Parameter: Organism Value: A. thaliana
  misc_feature: MA Experiment 20000185 PARAMETER Experiment Name: At_Roots__P Parameter: Tissue Value: Roots vs. Whole Plant
  misc_feature: MA Experiment ID: 20000224 Result: Down-regulated in Transcription
  misc_feature: MA Experiment ID: 20000234 Result: Down-regulated in Transcription
  misc_feature: MA Experiment 20000234 PARAMETER Experiment Name: At_Siliques_P Parameter: Age (day) Value: 21
  misc_feature: MA Experiment 20000234 PARAMETER Experiment Name: At_Siliques_P Parameter: Organism Value: A. thaliana
  misc_feature: MA Experiment 20000234 PARAMETER Experiment Name: At_Siliques_P Parameter: Plant Line Value: WS
  misc_feature: MA Experiment 20000234 PARAMETER Experiment Name: At_Siliques_P Parameter: Tissue Value: Less Than 5mm Siliques vs. Whole Plant
  misc_feature: MA Experiment ID: 20000264 Result: Down-regulated in Transcription
  misc_feature: MA Experiment 20000264 PARAMETER Experiment Name: At_Open_Flower_P Parameter: Age (day) Value: 21
  misc_feature: MA Experiment 20000264 PARAMETER Experiment Name: At_Open_Flower_P Parameter: Plant Line Value: WS
  misc_feature: MA Experiment 20000264 PARAMETER Experiment Name: At_Open_Flower_P Parameter: Tissue Value: Open Flower vs. Whole Plant
  misc_feature: MA Experiment ID: 20000265 Result: Down-regulated in Transcription
  misc_feature: MA Experiment 20000265 PARAMETER Experiment Name: At_Open_Flower_P Parameter: Age (day) Value: 21
  misc_feature: MA Experiment 20000265 PARAMETER Experiment Name: At_Open_Flower_P Parameter: Plant Line Value: WS
  misc_feature: MA Experiment 20000265 PARAMETER Experiment Name: At_Open_Flower_P Parameter: Tissue Value: Closed Flower vs. Whole Plant
  misc_feature: MA Experiment ID: 20000286 Result: Down-regulated in Transcription
  misc_feature: MA Experiment 20000286 PARAMETER Experiment Name: At_Open_Flower_P Parameter: Age (day) Value: 21
  misc_feature: MA Experiment 20000286 PARAMETER Experiment Name: At_Open_Flower_P Parameter: Plant Line Value: WS
  misc_feature: MA Experiment 20000286 PARAMETER Experiment Name: At_Open_Flower_P Parameter: Tissue Value: Half Open vs. Whole Plant
  misc_feature: MA Experiment ID: 20000439 Result: Down-regulated in Transcription
  misc_feature: MA Experiment 20000439 PARAMETER Experiment Name: At_Roots__P Parameter: Age (day) Value: 14 vs. 21
  misc_feature: MA Experiment 20000439 PARAMETER Experiment Name: At_Roots__P Parameter: Organism Value: A. thaliana
  misc_feature: MA Experiment 20000439 PARAMETER Experiment Name: At_Roots__P Parameter: Tissue Value: Roots vs. Whole Plant
  misc_feature: MA Experiment ID: 20000452 Result: Up-regulated in Transcription
  misc_feature: MA Experiment 20000452 PARAMETER Experiment Name: At_CS6879_Shoots-Roots_P Parameter: Age (day) Value: 14
  misc_feature: MA Experiment 20000452 PARAMETER Experiment Name: At_CS6879_Shoots-Roots_P Parameter: Organism Value: A. thaliana
  misc_feature: MA Experiment 20000452 PARAMETER Experiment Name: At_CS6879_Shoots-Roots_P Parameter: Plant Line Value: CS6879 vs. WS
  misc_feature: MA Experiment 20000452 PARAMETER Experiment Name: At_CS6879_Shoots-Roots_P Parameter: Tissue Value: Shoots
  misc_feature: MA Experiment ID: 20000794 Result: Down-regulated in Transcription
  misc_feature: MA Experiment 20000794 PARAMETER Experiment Name: At_Petals_P Parameter: Age (day) Value: 23-25 days
  misc_feature: MA Experiment 20000794 PARAMETER Experiment Name: At_Petals_P Parameter: Plant Line Value: WS
  misc_feature: MA Experiment 20000794 PARAMETER Experiment Name: At_Petals_P Parameter: Tissue Value: Petals vs. Whole plant
  misc_feature: MA Experiment ID: 20001248 Result: Up-regulated in Transcription
  misc_feature: MA Experiment 20001248 PARAMETER Experiment Name: At_Far-red-induction_P Parameter: Age (day) Value: 7
  misc_feature: MA Experiment 20001248 PARAMETER Experiment Name: At_Far-red-induction_P Parameter: Light Value: Far-red vs. White
  misc_feature: MA Experiment 20001248 PARAMETER Experiment Name: At_Far-red-induction_P Parameter: Organism Value: A. thaliana
  misc_feature: MA Experiment 20001248 PARAMETER Experiment Name: At_Far-red-induction_P Parameter: Plant Line Value: Columbia
  misc_feature: MA Experiment 20001248 PARAMETER Experiment Name: At_Far-red-induction_P Parameter: Timepoint (hr) Value: 4
  misc_feature: MA Experiment 20001248 PARAMETER Experiment Name: At_Far-red-induction_P Parameter: Tissue Value: Whole Plant
  misc_feature: MA Experiment ID: 20001450 Result: Up-regulated in Transcription
  misc_feature: MA Experiment 20001450 PARAMETER Experiment Name: At_Far-red-induction_P Parameter: Age (day) Value: 7
  misc_feature: MA Experiment 20001450 PARAMETER Experiment Name: At_Far-red-induction_P Parameter: Light Value: Far-red vs. White
  misc_feature: MA Experiment 20001450 PARAMETER Experiment Name: At_Far-red-induction_P Parameter: Organism Value: A. thaliana
  misc_feature: MA Experiment 20001450 PARAMETER Experiment Name: At_Far-red-induction_P Parameter: Plant Line Value: Columbia
  misc_feature: MA Experiment 20001450 PARAMETER Experiment Name: At_Far-red-induction_P Parameter: Timepoint (hr) Value: 8
  misc_feature: MA Experiment 20001450 PARAMETER Experiment Name: At_Far-red-induction_P Parameter: Tissue Value: Whole Plant
  misc_feature: MA Experiment ID: 20001555 Result: Down-regulated in Transcription
  misc_feature: MA Experiment 20001555 PARAMETER Experiment Name: At_Drought_Soil_Dry_P Parameter: Age (day) Value: 24
  misc_feature: MA Experiment 20001555 PARAMETER Experiment Name: At_Drought_Soil_Dry_P Parameter: Organism Value: A. thaliana
  misc_feature: MA Experiment 20001555 PARAMETER Experiment Name: At_Drought_Soil_Dry_P Parameter: Plant Line Value: WS
  misc_feature: MA Experiment 20001555 PARAMETER Experiment Name: At_Drought_Soil_Dry_P Parameter: Post Timepoint (hr) Value: None
  misc_feature: MA Experiment 20001555 PARAMETER Experiment Name: At_Drought_Soil_Dry_P Parameter: Post-Treatment Value: None
  misc_feature: MA Experiment 20001555 PARAMETER Experiment Name: At_Drought_Soil_Dry_P Parameter: Timepoint (day) Value: 10
  misc_feature: MA Experiment 20001555 PARAMETER Experiment Name: At_Drought_Soil_Dry_P Parameter: Treatment Value: Drought vs. No Drought
  misc_feature: MA Experiment ID: 20001556 Result: Down-regulated in Transcription
  misc_feature: MA Experiment 20001556 PARAMETER Experiment Name: At_Drought_Soil_Dry_P Parameter: Age (day) Value: 26
  misc_feature: MA Experiment 20001556 PARAMETER Experiment Name: At_Drought_Soil_Dry_P Parameter: Organism Value: A. thaliana
  misc_feature: MA Experiment 20001556 PARAMETER Experiment Name: At_Drought_Soil_Dry_P Parameter: Plant Line Value: WS
  misc_feature: MA Experiment 20001556 PARAMETER Experiment Name: At_Drought_Soil_Dry_P Parameter: Post Timepoint (hr) Value: None
  misc_feature: MA Experiment 20001556 PARAMETER Experiment Name: At_Drought_Soil_Dry_P Parameter: Post-Treatment Value: None
  misc_feature: MA Experiment 20001556 PARAMETER Experiment Name: At_Drought_Soil_Dry_P Parameter: Timepoint (day) Value: 12
  misc_feature: MA Experiment 20001556 PARAMETER Experiment Name: At_Drought_Soil_Dry_P Parameter: Treatment Value: Drought vs. No Drought
  misc_feature: MA Experiment ID: 20001557 Result: Down-regulated in Transcription
  misc_feature: MA Experiment 20001557 PARAMETER Experiment Name: At_Drought_Soil_Dry_P Parameter: Age (day) Value: 27
  misc_feature: MA Experiment 20001557 PARAMETER Experiment Name: At_Drought_Soil_Dry_P Parameter: Organism Value: A. thaliana
  misc_feature: MA Experiment 20001557 PARAMETER Experiment Name: At_Drought_Soil_Dry_P Parameter: Plant Line Value: WS
  misc_feature: MA Experiment 20001557 PARAMETER Experiment Name: At_Drought_Soil_Dry_P Parameter: Post Timepoint (hr) Value: 3
  misc_feature: MA Experiment 20001557 PARAMETER Experiment Name: At_Drought_Soil_Dry_P Parameter: Post-Treatment Value: Re-Water vs. No Drought
  misc_feature: MA Experiment 20001557 PARAMETER Experiment Name: At_Drought_Soil_Dry_P Parameter: Timepoint (day) Value: 13
  misc_feature: MA Experiment 20001557 PARAMETER Experiment Name: At_Drought_Soil_Dry_P Parameter: Treatment Value: Drought vs. No Drought
  misc_feature: MA Experiment ID: 20001558 Result: Down-regulated in Transcription
  misc_feature: MA Experiment 20001558 PARAMETER Experiment Name: At_Drought_Soil_Dry_P Parameter: Age (day) Value: 27
  misc_feature: MA Experiment 20001558 PARAMETER Experiment Name: At_Drought_Soil_Dry_P Parameter: Organism Value: A. thaliana
  misc_feature: MA Experiment 20001558 PARAMETER Experiment Name: At_Drought_Soil_Dry_P Parameter: Plant Line Value: WS
  misc_feature: MA Experiment 20001558 PARAMETER Experiment Name: At_Drought_Soil_Dry_P Parameter: Post Timepoint (hr) Value: 6
  misc_feature: MA Experiment 20001558 PARAMETER Experiment Name: At_Drought_Soil_Dry_P Parameter: Post-Treatment Value: Re-Water vs. No Drought
  misc_feature: MA Experiment 20001558 PARAMETER Experiment Name: At_Drought_Soil_Dry_P Parameter: Timepoint (day) Value: 13
  misc_feature: MA Experiment 20001558 PARAMETER Experiment Name: At_Drought_Soil_Dry_P Parameter: Treatment Value: Drought vs. No Drought
  misc_feature: MA Experiment ID: 20001559 Result: Down-regulated in Transcription
  misc_feature: MA Experiment 20001559 PARAMETER Experiment Name: At_Drought_Soil_Dry_P Parameter: Age (day) Value: 28
  misc_feature: MA Experiment 20001559 PARAMETER Experiment Name: At_Drought_Soil_Dry_P Parameter: Organism Value: A. thaliana
  misc_feature: MA Experiment 20001559 PARAMETER Experiment Name: At_Drought_Soil_Dry_P Parameter: Plant Line Value: WS
  misc_feature: MA Experiment 20001559 PARAMETER Experiment Name: At_Drought_Soil_Dry_P Parameter: Post Timepoint (hr) Value: 29
  misc_feature: MA Experiment 20001559 PARAMETER Experiment Name: At_Drought_Soil_Dry_P Parameter: Post-Treatment Value: Re-Water vs. No Drought
  misc_feature: MA Experiment 20001559 PARAMETER Experiment Name: At_Drought_Soil_Dry_P Parameter: Timepoint (day) Value: 14
  misc_feature: MA Experiment 20001559 PARAMETER Experiment Name: At_Drought_Soil_Dry_P Parameter: Treatment Value: Drought vs. No Drought
  misc_feature: MA Experiment ID: 20001757 Result: Up-regulated in Transcription
  misc_feature: MA Experiment 20001757 PARAMETER Experiment Name: At_50mM_NH4NO3_L-to-H_P Parameter: Timepoint (hr) Value: 6
  misc_feature: MA Experiment 20001757 PARAMETER Experiment Name: At_50mM_NH4NO3_L-to-H_P Parameter: Tissue Value: Leaf
  misc_feature: MA Experiment 20001757 PARAMETER Experiment Name: At_50mM_NH4NO3_L-to-H_P Parameter: Treatment Value: 50mM NH4NO3 vs 100mM Mannitol
  misc_feature: MA Experiment ID: 20001904 Result: Down-regulated in Transcription
  misc_feature: MA Experiment 20001904 PARAMETER Experiment Name: At_Drought_Reproduction_P Parameter: Age (day) Value: 37
  misc_feature: MA Experiment 20001904 PARAMETER Experiment Name: At_Drought_Reproduction_P Parameter: Organism Value: A. thaliana
  misc_feature: MA Experiment 20001904 PARAMETER Experiment Name: At_Drought_Reproduction_P Parameter: Plant Line Value: WS
  misc_feature: MA Experiment 20001904 PARAMETER Experiment Name: At_Drought_Reproduction_P Parameter: Timepoint (day) Value: 7
  misc_feature: MA Experiment 20001904 PARAMETER Experiment Name: At_Drought_Reproduction_P Parameter: Tissue Value: Rosettes
  misc_feature: MA Experiment 20001904 PARAMETER Experiment Name: At_Drought_Reproduction_P Parameter: Treatment Value: Drought vs. No Drought
  misc_feature: MA Experiment ID: 20001906 Result: Down-regulated in Transcription
  misc_feature: MA Experiment 20001906 PARAMETER Experiment Name: At_Drought_Reproduction_P Parameter: Age (day) Value: 35
  misc_feature: MA Experiment 20001906 PARAMETER Experiment Name: At_Drought_Reproduction_P Parameter: Organism Value: A. thaliana
  misc_feature: MA Experiment 20001906 PARAMETER Experiment Name: At_Drought_Reproduction_P Parameter: Plant Line Value: WS
  misc_feature: MA Experiment 20001906 PARAMETER Experiment Name: At_Drought_Reproduction_P Parameter: Timepoint (day) Value: 5
  misc_feature: MA Experiment 20001906 PARAMETER Experiment Name: At_Drought_Reproduction_P Parameter: Tissue Value: Siliques
  misc_feature: MA Experiment 20001906 PARAMETER Experiment Name: At_Drought_Reproduction_P Parameter: Treatment Value: Drought vs. No Drought
aaaagaaaactgaagaaccccaaaaatcccaagtgaaagaaaacgttatccacttcgagagagtgacacgtcacgaagcaaatccaaattcaaaacttttccataaaaatcaaatcacttcttcttattacttccccaaatcgaaatcagtcacttattaaaaccctaaatcatgacgatcgcaccggcattgcagacgacgttcgtgtcatcaaccaacttcctgaaacattcttcttcgtggggatcatcatcaccaaacaatgtgattcttcccaaaaacaagagatcttctacctccgtagttgtcgccgccgtcggtgatgtctcttctgacggaacaatctacttaatcggcggagccatcgccgttgcactcgtcggaactgcatttccgatcctcttcaaacgcaaagacacgtgtccggaatgtgatggagcaggatttgtgaggaaaggaggagtgactctgagagccaacgccgcacggaaggatcttcctcagatcgtttgtgctaattgcaatggactcggaaagcttaaccagattgataaatcataagtcttcttcatatatatgtaaaaagctccatttctcattcctcttcttatctacaatatacctctgtaagagtagatagcttcgaatgatcaatggttgcttggagatggatggatatatatatacaattgctttttt

SEQ ID NO: 28083 - protein, 129 aa, Arabidopsis thaliana
  peptide (1)..(129): Ceres Seq. ID no. 12423259
  misc_feature (22)..(127): Homolog of NCBI NO: 14719330 NR Description: unknown protein [Oryza sativa]
  misc_feature (1)..(81): Homolog of NCBI NO: 15241706 NR Description: putative protein
  misc_feature (1)..(129): Homolog of NCBI NO: 11762216 NR Description: AT5g02160 [Arabidopsis thaliana]
MTIAPALQTTFVSSTNFLKHSSSWGSSSPNNVILPKNKRSSTSVVVAAVGDVSSDGTIYLIGGAIAVALVGTAFPILFKRKDTCPECDGAGFVRKGGVTLRANAARKDLPQIVCANCNGLGKLNQIDKS

SEQ ID NO: 28084 - DNA, 1277 bp, Arabidopsis thaliana
  misc_feature (1)..(1277): Ceres Seq. ID no. 12324789
  misc_feature: MA Experiment ID: 108433 Result: Down-regulated in Transcription
  misc_feature: MA Experiment 108433 PARAMETER Experiment Name: At_rhl_Mutant2_cDNA_P Parameter: Age (day) Value: 7
  misc_feature: MA Experiment 108433 PARAMETER Experiment Name: At_rhl_Mutant2_cDNA_P Parameter: Organism Value: A. thaliana
  misc_feature: MA Experiment 108433 PARAMETER Experiment Name: At_rhl_Mutant2_cDNA_P Parameter: Plant Line Value: rhl Mutant vs. wt landsburg
  misc_feature: MA Experiment 108433 PARAMETER Experiment Name: At_rhl_Mutant2_cDNA_P Parameter: Tissue Value: Roots
  misc_feature: MA Experiment ID: 108434 Result: Up-regulated in Transcription
  misc_feature: MA Experiment 108434 PARAMETER Experiment Name: At_Root_Tips_cDNA_P Parameter: Tissue Value: Root Tips
  misc_feature: MA Experiment ID: 108464 Result: Down-regulated in Transcription
  misc_feature: MA Experiment 108464 PARAMETER Experiment Name: At_Germinating_Seeds_cDNA_P Parameter: Age (day) Value: 4 vs. 0
  misc_feature: MA Experiment 108464 PARAMETER Experiment Name: At_Germinating_Seeds_cDNA_P Parameter: Tissue Value: Germinating Seeds
  misc_feature: MA Experiment ID: 108576 Result: Up-regulated in Transcription
  misc_feature: MA Experiment 108576 PARAMETER Experiment Name: At_42deg_Heat_cDNA_P Parameter: Temperature (deg C) Value: 42 vs. 22
  misc_feature: MA Experiment 108576 PARAMETER Experiment Name: At_42deg_Heat_cDNA_P Parameter: Timepoint (hr) Value: 1
  misc_feature: MA Experiment 108576 PARAMETER Experiment Name: At_42deg_Heat_cDNA_P Parameter: Tissue Value: Aerial
  misc_feature: MA Experiment ID: 108577 Result: Up-regulated in Transcription
  misc_feature: MA Experiment 108577 PARAMETER Experiment Name: At_42deg_Heat_cDNA_P Parameter: Temperature (deg C) Value: 42 vs. 22
  misc_feature: MA Experiment 108577 PARAMETER Experiment Name: At_42deg_Heat_cDNA_P Parameter: Timepoint (hr) Value: 6
  misc_feature: MA Experiment 108577 PARAMETER Experiment Name: At_42deg_Heat_cDNA_P Parameter: Tissue Value: Aerial
  misc_feature: MA Experiment ID: 108579 Result: Up-regulated in Transcription
  misc_feature: MA Experiment 108579 PARAMETER Experiment Name: At_4deg_Cold_cDNA_P Parameter: Temperature (deg C) Value: 4 vs. 22
  misc_feature: MA Experiment 108579 PARAMETER Experiment Name: At_4deg_Cold_cDNA_P Parameter: Timepoint (hr) Value: 6
  misc_feature: MA Experiment 108579 PARAMETER Experiment Name: At_4deg_Cold_cDNA_P Parameter: Tissue Value: Aerial
  misc_feature: MA Experiment ID: 108595 Result: Up-regulated in Transcription
  misc_feature: MA Experiment 108595 PARAMETER Experiment Name: At_Ler-pi_Ovule_cDNA_P Parameter: Plant Line Value: null
  misc_feature: MA Experiment ID: 108607 Result: Down-regulated in Transcription
  misc_feature: MA Experiment 108607 PARAMETER Experiment Name: At_100uM_ABA_cDNA_P Parameter: Timepoint (hr) Value: 4
  misc_feature: MA Experiment 108607 PARAMETER Experiment Name: At_100uM_ABA_cDNA_P Parameter: Tissue Value: Aerial
  misc_feature: MA Experiment 108607 PARAMETER Experiment Name: At_100uM_ABA_cDNA_P Parameter: Treatment Value: 100uM ABA vs. No Treatment
  misc_feature: MA Experiment ID: 108668 Result: Down-regulated in Transcription
  misc_feature: MA Experiment 108668 PARAMETER Experiment Name: At_2mM_SA_cDNA_P Parameter: Plant Line Value: WS
  misc_feature: MA Experiment 108668 PARAMETER Experiment Name: At_2mM_SA_cDNA_P Parameter: Timepoint (hr) Value: 6
  misc_feature: MA Experiment 108668 PARAMETER Experiment Name: At_2mM_SA_cDNA_P Parameter: Treatment Value: 2mM SA vs. No Treatment
  misc_feature: MA Experiment ID: 20000070 Result: Down-regulated in Transcription
  misc_feature: MA Experiment 20000070 PARAMETER Experiment Name: At_100uM_ABA_Mutants_cDNA_P Parameter: Plant Line Value: CS24
  misc_feature: MA Experiment 20000070 PARAMETER Experiment Name: At_100uM_ABA_Mutants_cDNA_P Parameter: Timepoint (hr) Value: 6
  misc_feature: MA Experiment 20000070 PARAMETER Experiment Name: At_100uM_ABA_Mutants_cDNA_P Parameter: Tissue Value: Aerial
  misc_feature: MA Experiment 20000070 PARAMETER Experiment Name: At_100uM_ABA_Mutants_cDNA_P Parameter: Treatment Value: 100uM ABA vs. No Treatment
  misc_feature: MA Experiment ID: 20000093 Result: Up-regulated in Transcription
  misc_feature: MA Experiment 20000093 PARAMETER Experiment Name: At_42deg_Heat_cDNA_P Parameter: Temperature (deg C) Value: 42 vs. 22
  misc_feature: MA Experiment 20000093 PARAMETER Experiment Name: At_42deg_Heat_cDNA_P Parameter: Timepoint (hr) Value: 0.5
  misc_feature: MA Experiment 20000093 PARAMETER Experiment Name: At_42deg_Heat_cDNA_P Parameter: Tissue Value: Aerial
  misc_feature: MA Experiment ID: 20000111 Result: Up-regulated in Transcription
  misc_feature: MA Experiment 20000111 PARAMETER Experiment Name: At_42deg_Heat_cDNA_P Parameter: Temperature (deg C) Value: 42 vs. 22
  misc_feature: MA Experiment 20000111 PARAMETER Experiment Name: At_42deg_Heat_cDNA_P Parameter: Timepoint (hr) Value: 6
  misc_feature: MA Experiment 20000111 PARAMETER Experiment Name: At_42deg_Heat_cDNA_P Parameter: Tissue Value: Aerial
  misc_feature: MA Experiment ID: 20000112 Result: Up-regulated in Transcription
  misc_feature: MA Experiment 20000112 PARAMETER Experiment Name: At_42deg_Heat_cDNA_P Parameter: Temperature (deg C) Value: 42 vs. 22
  misc_feature: MA Experiment 20000112 PARAMETER Experiment Name: At_42deg_Heat_cDNA_P Parameter: Timepoint (hr) Value: 2
  misc_feature: MA Experiment 20000112 PARAMETER Experiment Name: At_42deg_Heat_cDNA_P Parameter: Tissue Value: Aerial
  misc_feature: MA Experiment ID: 20000113 Result: Up-regulated in Transcription
  misc_feature: MA Experiment 20000113 PARAMETER Experiment Name: At_42deg_Heat_cDNA_P Parameter: Temperature (deg C) Value: 42 vs. 22
  misc_feature: MA Experiment 20000113 PARAMETER Experiment Name: At_42deg_Heat_cDNA_P Parameter: Timepoint (hr) Value: 8
  misc_feature: MA Experiment 20000113 PARAMETER Experiment Name: At_42deg_Heat_cDNA_P Parameter: Tissue Value: Aerial
  misc_feature: MA Experiment ID: 20000144 Result: Up-regulated in Transcription
  misc_feature: MA Experiment 20000144 PARAMETER Experiment Name: At_42deg_Heat_cDNA_P Parameter: Temperature (deg C) Value: 42 vs. 22
  misc_feature: MA Experiment 20000144 PARAMETER Experiment Name: At_42deg_Heat_cDNA_P Parameter: Timepoint (hr) Value: 1
  misc_feature: MA Experiment 20000144 PARAMETER Experiment Name: At_42deg_Heat_cDNA_P Parameter: Tissue Value: Aerial
  misc_feature: MA Experiment ID: 20000171 Result: Up-regulated in Transcription
  misc_feature: MA Experiment 20000171 PARAMETER Experiment Name: At_42deg_Heat_P Parameter: Age (day) Value: 14
  misc_feature: MA Experiment 20000171 PARAMETER Experiment Name: At_42deg_Heat_P Parameter: Organism Value: A. thaliana
  misc_feature: MA Experiment 20000171 PARAMETER Experiment Name: At_42deg_Heat_P Parameter: Plant Line Value: WS
  misc_feature: MA Experiment 20000171 PARAMETER Experiment Name: At_42deg_Heat_P Parameter: Temperature (deg C) Value: 42 vs. 22
  misc_feature: MA Experiment 20000171 PARAMETER Experiment Name: At_42deg_Heat_P Parameter: Timepoint (hr) Value: 1
  misc_feature: MA Experiment 20000171 PARAMETER Experiment Name: At_42deg_Heat_P Parameter: Tissue Value: Aerial
  misc_feature: MA Experiment ID: 20000173 Result: Up-regulated in Transcription
  misc_feature: MA Experiment 20000173 PARAMETER Experiment Name: At_42deg_Heat_P Parameter: Age (day) Value: 14
  misc_feature: MA Experiment 20000173 PARAMETER Experiment Name: At_42deg_Heat_P Parameter: Organism Value: A. thaliana
  misc_feature: MA Experiment 20000173 PARAMETER Experiment Name: At_42deg_Heat_P Parameter: Plant Line Value: WS
  misc_feature: MA Experiment 20000173 PARAMETER Experiment Name: At_42deg_Heat_P Parameter: Temperature (deg C) Value: 42 vs. 22
  misc_feature: MA Experiment 20000173 PARAMETER Experiment Name: At_42deg_Heat_P Parameter: Timepoint (hr) Value: 6
  misc_feature: MA Experiment 20000173 PARAMETER Experiment Name: At_42deg_Heat_P Parameter: Tissue Value: Aerial
  misc_feature: MA Experiment ID: 20000179 Result: Up-regulated in Transcription
  misc_feature: MA Experiment 20000179 PARAMETER Experiment Name: At_Germinating_Seeds_P Parameter: Age (hr) Value: 6 vs. 0
  misc_feature: MA Experiment 20000179 PARAMETER Experiment Name: At_Germinating_Seeds_P Parameter: Tissue Value: Germinating Seeds
  misc_feature: MA Experiment ID: 20000180 Result: Up-regulated in Transcription
  misc_feature: MA Experiment 20000180 PARAMETER Experiment Name: At_Germinating_Seeds_P Parameter: Age (hr) Value: 24 vs. 0
  misc_feature: MA Experiment 20000180 PARAMETER Experiment Name: At_Germinating_Seeds_P Parameter: Tissue Value: Germinating Seeds
  misc_feature: MA Experiment ID: 20000182 Result: Down-regulated in Transcription
  misc_feature: MA Experiment 20000182 PARAMETER Experiment Name: At_2mM_SA_P Parameter: Age (day) Value: 14
  misc_feature: MA Experiment 20000182 PARAMETER Experiment Name: At_2mM_SA_P Parameter: Organism Value: A. thaliana
  misc_feature: MA Experiment 20000182 PARAMETER Experiment Name: At_2mM_SA_P Parameter: Plant Line Value: WS
  misc_feature: MA Experiment 20000182 PARAMETER Experiment Name: At_2mM_SA_P Parameter: Timepoint (hr) Value: 6
  misc_feature: MA Experiment 20000182 PARAMETER Experiment Name: At_2mM_SA_P Parameter: Tissue Value: Aerial
  misc_feature: MA Experiment 20000182 PARAMETER Experiment Name: At_2mM_SA_P Parameter: Treatment Value: 2mM SA vs. No Treatment
  misc_feature: MA Experiment ID: 20000185 Result: Up-regulated in Transcription
  misc_feature: MA Experiment 20000185 PARAMETER Experiment Name: At_Roots__P Parameter: Age (day) Value: 7 vs. 21
  misc_feature: MA Experiment 20000185 PARAMETER Experiment Name: At_Roots__P Parameter: Organism Value: A. thaliana
  misc_feature: MA Experiment 20000185 PARAMETER Experiment Name: At_Roots__P Parameter: Tissue Value: Roots vs. Whole Plant
  misc_feature: MA Experiment ID: 20000227 Result: Up-regulated in Transcription
  misc_feature: MA Experiment 20000227 PARAMETER Experiment Name: At_Root-Tips-vs-Tops_P Parameter: Tissue Value: Root Tips vs. Root Tops
  misc_feature: MA Experiment ID: 20000234 Result: Up-regulated in Transcription
  misc_feature: MA Experiment 20000234 PARAMETER Experiment Name: At_Siliques_P Parameter: Age (day) Value: 21
  misc_feature: MA Experiment 20000234 PARAMETER Experiment Name: At_Siliques_P Parameter: Organism Value: A. thaliana
  misc_feature: MA Experiment 20000234 PARAMETER Experiment Name: At_Siliques_P Parameter: Plant Line Value: WS
  misc_feature: MA Experiment 20000234 PARAMETER Experiment Name: At_Siliques_P Parameter: Tissue Value: Less Than 5mm Siliques vs. Whole Plant
  misc_feature: MA Experiment ID: 20000235 Result: Up-regulated in Transcription
  misc_feature: MA Experiment 20000235 PARAMETER Experiment Name: At_Siliques_P Parameter: Age (day) Value: 21
  misc_feature: MA Experiment 20000235 PARAMETER Experiment Name: At_Siliques_P Parameter: Organism Value: A. thaliana
  misc_feature: MA Experiment 20000235 PARAMETER Experiment Name: At_Siliques_P Parameter: Plant Line Value: WS
  misc_feature: MA Experiment 20000235 PARAMETER Experiment Name: At_Siliques_P Parameter: Tissue Value: 5-10mm Siliques vs. Whole Plant
  misc_feature: MA Experiment ID: 20000264 Result: Up-regulated in Transcription
  misc_feature: MA Experiment 20000264 PARAMETER Experiment Name: At_Open_Flower_P Parameter: Age (day) Value: 21
  misc_feature: MA Experiment 20000264 PARAMETER Experiment Name: At_Open_Flower_P Parameter: Plant Line Value: WS
  misc_feature: MA Experiment 20000264 PARAMETER Experiment Name: At_Open_Flower_P Parameter: Tissue Value: Open Flower vs. Whole Plant
  misc_feature: MA Experiment ID: 20000265 Result: Up-regulated in Transcription
  misc_feature: MA Experiment 20000265 PARAMETER Experiment Name: At_Open_Flower_P Parameter: Age (day) Value: 21
  misc_feature: MA Experiment 20000265 PARAMETER Experiment Name: At_Open_Flower_P Parameter: Plant Line Value: WS
  misc_feature: MA Experiment 20000265 PARAMETER Experiment Name: At_Open_Flower_P Parameter: Tissue Value: Closed Flower vs. Whole Plant
  misc_feature: MA Experiment ID: 20000286 Result: Up-regulated in Transcription
  misc_feature: MA Experiment 20000286 PARAMETER Experiment Name: At_Open_Flower_P Parameter: Age (day) Value: 21
  misc_feature: MA Experiment 20000286 PARAMETER Experiment Name: At_Open_Flower_P Parameter: Plant Line Value: WS
  misc_feature: MA Experiment 20000286 PARAMETER Experiment Name: At_Open_Flower_P Parameter: Tissue Value: Half Open vs. Whole Plant
  misc_feature: MA Experiment ID: 20000451 Result: Up-regulated in Transcription
  misc_feature: MA Experiment 20000451 PARAMETER Experiment Name: At_CS6879_Shoots-Roots_P Parameter: Age (day) Value: 14
  misc_feature: MA Experiment 20000451 PARAMETER Experiment Name: At_CS6879_Shoots-Roots_P Parameter: Organism Value: A. thaliana
  misc_feature: MA Experiment 20000451 PARAMETER Experiment Name: At_CS6879_Shoots-Roots_P Parameter: Plant Line Value: CS6879 vs. WS
  misc_feature: MA Experiment 20000451 PARAMETER Experiment Name: At_CS6879_Shoots-Roots_P Parameter: Tissue Value: Roots
  misc_feature: MA Experiment ID: 20001557 Result: Up-regulated in Transcription
  misc_feature: MA Experiment 20001557 PARAMETER Experiment Name: At_Drought_Soil_Dry_P Parameter: Age (day) Value: 27
  misc_feature: MA Experiment 20001557 PARAMETER Experiment Name: At_Drought_Soil_Dry_P Parameter: Organism Value: A. thaliana
  misc_feature: MA Experiment 20001557 PARAMETER Experiment Name: At_Drought_Soil_Dry_P Parameter: Plant Line Value: WS
  misc_feature: MA Experiment 20001557 PARAMETER Experiment Name: At_Drought_Soil_Dry_P Parameter: Post Timepoint (hr) Value: 3
  misc_feature: MA Experiment 20001557 PARAMETER Experiment Name: At_Drought_Soil_Dry_P Parameter: Post-Treatment Value: Re-Water vs. No Drought
  misc_feature: MA Experiment 20001557 PARAMETER Experiment Name: At_Drought_Soil_Dry_P Parameter: Timepoint (day) Value: 13
  misc_feature: MA Experiment 20001557 PARAMETER Experiment Name: At_Drought_Soil_Dry_P Parameter: Treatment Value: Drought vs. No Drought
  misc_feature: MA Experiment ID: 20001558 Result: Up-regulated in Transcription
  misc_feature: MA Experiment 20001558 PARAMETER Experiment Name: At_Drought_Soil_Dry_P Parameter: Age (day) Value: 27
  misc_feature: MA Experiment 20001558 PARAMETER Experiment Name: At_Drought_Soil_Dry_P Parameter: Organism Value: A. thaliana
  misc_feature: MA Experiment 20001558 PARAMETER Experiment Name: At_Drought_Soil_Dry_P Parameter: Plant Line Value: WS
  misc_feature: MA Experiment 20001558 PARAMETER Experiment Name: At_Drought_Soil_Dry_P Parameter: Post Timepoint (hr) Value: 6
  misc_feature: MA Experiment 20001558 PARAMETER Experiment Name: At_Drought_Soil_Dry_P Parameter: Post-Treatment Value: Re-Water vs. No Drought
  misc_feature: MA Experiment 20001558 PARAMETER Experiment Name: At_Drought_Soil_Dry_P Parameter: Timepoint (day) Value: 13
  misc_feature: MA Experiment 20001558 PARAMETER Experiment Name: At_Drought_Soil_Dry_P Parameter: Treatment Value: Drought vs. No Drought
  misc_feature: MA Experiment ID: 20001560 Result: Up-regulated in Transcription
  misc_feature: MA Experiment 20001560 PARAMETER Experiment Name: At_Drought_Soil_Dry_P Parameter: Age (day) Value: 28
  misc_feature: MA Experiment 20001560 PARAMETER Experiment Name: At_Drought_Soil_Dry_P Parameter: Organism Value: A. thaliana
  misc_feature: MA Experiment 20001560 PARAMETER Experiment Name: At_Drought_Soil_Dry_P Parameter: Plant Line Value: WS
  misc_feature: MA Experiment 20001560 PARAMETER Experiment Name: At_Drought_Soil_Dry_P Parameter: Post Timepoint (hr) Value: None
  misc_feature: MA Experiment 20001560 PARAMETER Experiment Name: At_Drought_Soil_Dry_P Parameter: Post-Treatment Value: None
  misc_feature: MA Experiment 20001560 PARAMETER Experiment Name: At_Drought_Soil_Dry_P Parameter: Timepoint (day) Value: 14
  misc_feature: MA Experiment 20001560 PARAMETER Experiment Name: At_Drought_Soil_Dry_P Parameter: Treatment Value: Drought vs. No Drought
  misc_feature: MA Experiment ID: 20001911 Result: Down-regulated in Transcription
  misc_feature: MA Experiment 20001911 PARAMETER Experiment Name: At_Drought_Reproduction_P Parameter: Age (day) Value: 40
  misc_feature: MA Experiment 20001911 PARAMETER Experiment Name: At_Drought_Reproduction_P Parameter: Organism Value: A. thaliana
  misc_feature: MA Experiment 20001911 PARAMETER Experiment Name: At_Drought_Reproduction_P Parameter: Plant Line Value: WS
  misc_feature: MA Experiment 20001911 PARAMETER Experiment Name: At_Drought_Reproduction_P Parameter: Timepoint (day) Value: 10
  misc_feature: MA Experiment 20001911 PARAMETER Experiment Name: At_Drought_Reproduction_P Parameter: Tissue Value: Flowers
  misc_feature: MA Experiment 20001911 PARAMETER Experiment Name: At_Drought_Reproduction_P Parameter: Treatment Value: Drought vs. No Drought
acgcctctcttcttctgcttcacttcactactgctttctctatttctccatagatggctccttcttcatcacctcttcgtactacaagtgaaacagatgaaaaatatgcgaatgtcaaatgggaagagcttggattcgctctgactccaatagattatatgtatgtagccaaatgcagacaaggagagagctttacacaagggaagattgttccttatggcgacatttcaattagcccttgttctccgattctcaattacggccagggactatttgaaggtctcaaagcttacagaacagaagacgaccggattaggattttccggcctgaccaaaacgctcttcgcatgcaaactggtgcggagaggctttgtatgacacctcctactctagaacaatttgtcgaggcagttaagcaaactgtgcttgccaacaagaaatgggttcctcctccgggtaaaggaactctgtatataaggcctctgctactagggagtggtgctacccttggagtagctccagcacctgaatacacttttctcatatatgcatctcccgtaggagattaccataaggtaagctcaggcttgaacctcaaagttgatcataagtatcaccgagcccattcaggtggaacggggggtgtcaagagctgcacaaactattctccagttgtgaaatcgttactcgaagcaaagtcagcgggtttctctgatgtcctgttcctggatgcagcaactggtagaaacatcgaagagcttactgcttgtaacatcttcattgtcaagggaaacattgtatccaccccaccaacttcaggaaccattttacctggagtcacgaggaaaagcataagtgagctggctcatgatattggctaccaggtcgaagaacgcgatgtatctgtggatgagctactagaggcagaagaagttttctgcacagggactgcagtggtcgttaaagctgttgaaactgtgaccttccatgacaaaaaggtaaaatacaggacaggagaagcagcattgtctacgaagcttcactcgatgttgaccaatattcagatgggagttgttgaagataagaaaggttggatggtggacattgatccttgtcaaggttgaaagaagaagtttagaaagctgatgattctatgtactcaaacgtgtatctttcttctcatgtgttggtttttattaggattcttctttttttatcatgggacttgtaataaataatgggtaactcttaagatacaagaggcggcagtatgttcg

SEQ ID NO: 28085 - protein, 356 aa, Arabidopsis thaliana
  peptide (1)..(356): Ceres Seq. ID no. 12324790
  misc_feature (49)..(334): Pfam Name: Aminotransferase class IV Pfam Description: Aminotransferase class IV
  misc_feature (19)..(351): Homolog of NCBI NO: 18408919 NR Description: branched-chain-amino-acid transaminase -like
  misc_feature (10)..(351): Homolog of NCBI NO: 26391655 NR Description: Branched-chain amino acid aminotransferase 5,
  misc_feature (19)..(352): Homolog of NCBI NO: 34902362 NR Description: Putative aminotransferase
  misc_feature (1)..(351): Homolog of NCBI NO: 6319167 NR Description: branched-chain amino acid aminotransferase
  misc_feature (4)..(352): Homolog of NCBI NO: 27311239 NR Description: Unknown protein [Oryza sativa (japonica
  misc_feature (1)..(352): Homolog of NCBI NO: 15218409 NR Description: tat-binding protein, putative
  misc_feature (1)..(352): Homolog of NCBI NO: 15230923 NR Description: branched-chain amino acid aminotransferase,
  misc_feature (1)..(356): Homolog of NCBI NO: 15222881 NR Description: branched-chain amino acid aminotransferase,
  misc_feature (1)..(356): Homolog of NCBI NO: 21617893 NR Description: branched-chain amino acid aminotransferase,
  misc_feature (1)..(356): Homolog of NCBI NO: 15222882 NR Description: branched-chain amino acid aminotransferase,
MAPSSSPLRTTSETDEKYANVKWEELGFALTPIDYMYVAKCRQGESFTQGKIVPYGDISISPCSPILNYGQGLFEGLKAYRTEDDRIRIFRPDQNALRMQTGAERLCMTPPTLEQFVEAVKQTVLANKKWVPPPGKGTLYIRPLLLGSGATLGVAPAPEYTFLIYASPVGDYHKVSSGLNLKVDHKYHRAHSGGTGGVKSCTNYSPVVKSLLEAKSAGFSDVLFLDAATGRNIEELTACNIFIVKGNIVSTPPTSGTILPGVTRKSISELAHDIGYQVEERDVSVDELLEAEEVFCTGTAVVVKAVETVTFHDKKVKYRTGEAALSTKLHSMLTNIQMGVVEDKKGWMVDIDPCQG

SEQ ID NO: 28086 - protein, 321 aa, Arabidopsis thaliana
  peptide (1)..(321): Ceres Seq. ID no. 12324791
  misc_feature (14)..(299): Pfam Name: Aminotransferase class IV Pfam Description: Aminotransferase class IV
  misc_feature (1)..(316): Homolog of NCBI NO: 18408919 NR Description: branched-chain-amino-acid transaminase -like
  misc_feature (1)..(316): Homolog of NCBI NO: 26391655 NR Description: Branched-chain amino acid aminotransferase 5,
  misc_feature (1)..(317): Homolog of NCBI NO: 34902362 NR Description: Putative aminotransferase
  misc_feature (1)..(316): Homolog of NCBI NO: 6319167 NR Description: branched-chain amino acid aminotransferase
  misc_feature (1)..(317): Homolog of NCBI NO: 27311239 NR Description: Unknown protein [Oryza sativa (japonica
  misc_feature (1)..(317): Homolog of NCBI NO: 15218409 NR Description: tat-binding protein, putative
  misc_feature (1)..(317): Homolog of NCBI NO: 15230923 NR Description: branched-chain amino acid aminotransferase,
  misc_feature (1)..(321): Homolog of NCBI NO: 15222881 NR Description: branched-chain amino acid aminotransferase,
  misc_feature (1)..(321): Homolog of NCBI NO: 21617893 NR Description: branched-chain amino acid aminotransferase,
  misc_feature (1)..(321): Homolog of NCBI NO: 15222882 NR Description: branched-chain amino acid aminotransferase,
MYVAKCRQGESFTQGKIVPYGDISISPCSPILNYGQGLFEGLKAYRTEDDRIRIFRPDQNALRMQTGAERLCMTPPTLEQFVEAVKQTVLANKKWVPPPGKGTLYIRPLLLGSGATLGVAPAPEYTFLIYASPVGDYHKVSSGLNLKVDHKYHRAHSGGTGGVKSCTNYSPVVKSLLEAKSAGFSDVLFLDAATGRNIEELTACNIFIVKGNIVSTPPTSGTILPGVTRKSISELAHDIGYQVEERDVSVDELLEAEEVFCTGTAVVVKAVETVTFHDKKVKYRTGEAALSTKLHSMLTNIQMGVVEDKKGWMVDIDPCQG

SEQ ID NO: 28087 - protein, 258 aa, Arabidopsis thaliana
  peptide (1)..(258): Ceres Seq. ID no. 12324792
  misc_feature (1)..(236): Pfam Name: Aminotransferase class IV Pfam Description: Aminotransferase class IV
  misc_feature (1)..(253): Homolog of NCBI NO: 18408919 NR Description: branched-chain-amino-acid transaminase -like
  misc_feature (1)..(253): Homolog of NCBI NO: 26391655 NR Description: Branched-chain amino acid aminotransferase 5,
  misc_feature (1)..(254): Homolog of NCBI NO: 34902362 NR Description: Putative aminotransferase
  misc_feature (1)..(253): Homolog of NCBI NO: 6319167 NR Description: branched-chain amino acid aminotransferase
  misc_feature (1)..(254): Homolog of NCBI NO: 27311239 NR Description: Unknown protein [Oryza sativa (japonica
  misc_feature (1)..(254): Homolog of NCBI NO: 15218409 NR Description: tat-binding protein, putative
  misc_feature (1)..(254): Homolog of NCBI NO: 15230923 NR Description: branched-chain amino acid aminotransferase,
  misc_feature (1)..(258): Homolog of NCBI NO: 15222881 NR Description: branched-chain amino acid aminotransferase,
  misc_feature (1)..(258): Homolog of NCBI NO: 21617893 NR Description: branched-chain amino acid aminotransferase,
  misc_feature (1)..(258): Homolog of NCBI NO: 15222882 NR Description: branched-chain amino acid aminotransferase,
MQTGAERLCMTPPTLEQFVEAVKQTVLANKKWVPPPGKGTLYIRPLLLGSGATLGVAPAPEYTFLIYASPVGDYHKVSSGLNLKVDHKYHRAHSGGTGGVKSCTNYSPVVKSLLEAKSAGFSDVLFLDAATGRNIEELTACNIFIVKGNIVSTPPTSGTILPGVTRKSISELAHDIGYQVEERDVSVDELLEAEEVFCTGTAVVVKAVETVTFHDKKVKYRTGEAALSTKLHSMLTNIQMGVVEDKKGWMVDIDPCQG

SEQ ID NO: 28088 - DNA, 1067 bp, Arabidopsis thaliana
  misc_feature (1)..(1067): Ceres Seq. ID no. 13646184
  misc_feature: MA Experiment ID: 20000234 Result: Down-regulated in Transcription
  misc_feature: MA Experiment 20000234 PARAMETER Experiment Name: At_Siliques_P Parameter: Age (day) Value: 21
  misc_feature: MA Experiment 20000234 PARAMETER Experiment Name: At_Siliques_P Parameter: Organism Value: A. thaliana
  misc_feature: MA Experiment 20000234 PARAMETER Experiment Name: At_Siliques_P Parameter: Plant Line Value: WS
  misc_feature: MA Experiment 20000234 PARAMETER Experiment Name: At_Siliques_P Parameter: Tissue Value: Less Than 5mm Siliques vs. Whole Plant
  misc_feature: MA Experiment ID: 20000235 Result: Down-regulated in Transcription
  misc_feature: MA Experiment 20000235 PARAMETER Experiment Name: At_Siliques_P Parameter: Age (day) Value: 21
  misc_feature: MA Experiment 20000235 PARAMETER Experiment Name: At_Siliques_P Parameter: Organism Value: A. thaliana
  misc_feature: MA Experiment 20000235 PARAMETER Experiment Name: At_Siliques_P Parameter: Plant Line Value: WS
  misc_feature: MA Experiment 20000235 PARAMETER Experiment Name: At_Siliques_P Parameter: Tissue Value: 5-10mm Siliques vs. Whole Plant
  misc_feature: MA Experiment ID: 20000265 Result: Down-regulated in Transcription
  misc_feature: MA Experiment 20000265 PARAMETER Experiment Name: At_Open_Flower_P Parameter: Age (day) Value: 21
  misc_feature: MA Experiment 20000265 PARAMETER Experiment Name: At_Open_Flower_P Parameter: Plant Line Value: WS
  misc_feature: MA Experiment 20000265 PARAMETER Experiment Name: At_Open_Flower_P Parameter: Tissue Value: Closed Flower vs. Whole Plant
  misc_feature: MA Experiment ID: 20000286 Result: Down-regulated in Transcription
  misc_feature: MA Experiment 20000286 PARAMETER Experiment Name: At_Open_Flower_P Parameter: Age (day) Value: 21
  misc_feature: MA Experiment 20000286 PARAMETER Experiment Name: At_Open_Flower_P Parameter: Plant Line Value: WS
  misc_feature: MA Experiment 20000286 PARAMETER Experiment Name: At_Open_Flower_P Parameter: Tissue Value: Half Open vs. Whole Plant
  misc_feature: MA Experiment ID: 20000438 Result: Down-regulated in Transcription
  misc_feature: MA Experiment 20000438 PARAMETER Experiment Name: At_Shoots__P Parameter: Age (day) Value: 14
  misc_feature: MA Experiment 20000438 PARAMETER Experiment Name: At_Shoots__P Parameter: Tissue Value: Shoots vs. Whole Plant
  misc_feature: MA Experiment ID: 20001757 Result: Down-regulated in Transcription
  misc_feature: MA Experiment 20001757 PARAMETER Experiment Name: At_50mM_NH4NO3_L-to-H_P Parameter: Timepoint (hr) Value: 6
  misc_feature: MA Experiment 20001757 PARAMETER Experiment Name: At_50mM_NH4NO3_L-to-H_P Parameter: Tissue Value: Leaf
  misc_feature: MA Experiment 20001757 PARAMETER Experiment Name: At_50mM_NH4NO3_L-to-H_P Parameter: Treatment Value: 50mM NH4NO3 vs 100mM Mannitol
acttctctctaatttcttaatcatctcttcttatagtttttaccctaaagaaaatggcaaccgtcgatgtcatcaacggtgattcaatctcaactcttcattctgacataatccaaacccaaatcttgacccgactcgatggtccgacgctagcctccaccgcaacaacctcttcttacctccaaactctatgcacggaagagaaactctggcaagaactctccatcgacacgtggccttcgatcaatgatccacgtgttgtccaagctatctcctctttcccttccggttaccgttctttctttgctgactcgtacccgttcactgaacacacgtggcagtctgaaaaacatgatccaccgacgggattaatctcagccgttgatttatactacagaggagagattatatactcgaaggtacaagagatggaaacagagaaaggtaaatcaggatggttcttgtcatcaccgtttcgggtcgatatactcgacccgaaagagtcggtccaaacccggattcgatatccgggtggggactacgaagcgtgggtgaaagatatggaagagagcatgaaacttaattggatactaatcgatccgatcaagaaacgagcggcgaatatatctagtcgaaaggcggtgtcggcgcggcggaactggctaacgggggatttagaaatacggttttcaacggtagtgacggcggaggcggcggaagtggcggcggttgtgtcatgcgggtcagcggaagcgtggaaagaggtggatgaggaagtgggaggagaaatacacgtgagggacgtgaggctacaagtagaggacatagaaggaaaatgtatgaaaggtagggatagtttggtaattttacaagggttgttagatggaaagagatcgtgtaaagatgatgaagagagaagagctaaagaaaggtatgaagaatacgtgcgaatgaagatacaatggagagagaataaagagaggagagaaaaagctcaagacacaatttgtatgatctttgggttctctatgtttgtgcttttgtggagttttattttgttaaggtaa

SEQ ID NO: 28089 - protein, 337 aa, Arabidopsis thaliana
  peptide (1)..(337): Ceres Seq. ID no. 13646185
  misc_feature (11)..(337): Homolog of NCBI NO: 32479726 NR Description: OJ991214_12.2 [Oryza sativa (japonica
  misc_feature (74)..(337): Homolog of NCBI NO: 15227574 NR Description: F-box protein family [Arabidopsis thaliana]
  misc_feature (10)..(288): Homolog of NCBI NO: 15227574 NR Description: F-box protein family [Arabidopsis thaliana]
  misc_feature (1)..(337): Homolog of NCBI NO: 15225867 NR Description: F-box protein family [Arabidopsis thaliana]
MATVDVINGDSISTLHSDIIQTQILTRLDGPTLASTATTSSYLQTLCTEEKLWQELSIDTWPSINDPRVVQAISSFPSGYRSFFADSYPFTEHTWQSEKHDPPTGLISAVDLYYRGEIIYSKVQEMETEKGKSGWFLSSPFRVDILDPKESVQTRIRYPGGDYEAWVKDMEESMKLNWILIDPIKKRAANISSRKAVSARRNWLTGDLEIRFSTVVTAEAAEVAAVVSCGSAEAWKEVDEEVGGEIHVRDVRLQVEDIEGKCMKGRDSLVILQGLLDGKRSCKDDEERRAKERYEEYVRMKIQWRENKERREKAQDTICMIFGFSMFVLLWSFILLR

SEQ ID NO: 28090 - protein, 212 aa, Arabidopsis thaliana
  peptide (1)..(212): Ceres Seq. ID no. 13646186
  misc_feature (1)..(212): Homolog of NCBI NO: 32479726 NR Description: OJ991214_12.2 [Oryza sativa (japonica
  misc_feature (1)..(212): Homolog of NCBI NO: 15227574 NR Description: F-box protein family [Arabidopsis thaliana]
  misc_feature (1)..(163): Homolog of NCBI NO: 15227574 NR Description: F-box protein family [Arabidopsis thaliana]
  misc_feature (1)..(212): Homolog of NCBI NO: 15225867 NR Description: F-box protein family [Arabidopsis thaliana]
METEKGKSGWFLSSPFRVDILDPKESVQTRIRYPGGDYEAWVKDMEESMKLNWILIDPIKKRAANISSRKAVSARRNWLTGDLEIRFSTVVTAEAAEVAAVVSCGSAEAWKEVDEEVGGEIHVRDVRLQVEDIEGKCMKGRDSLVILQGLLDGKRSCKDDEERRAKERYEEYVRMKIQWRENKERREKAQDTICMIFGFSMFVLLWSFILLR

SEQ ID NO: 28091 - protein, 168 aa, Arabidopsis thaliana
  peptide (1)..(168): Ceres Seq. ID no. 13646187
  misc_feature (1)..(168): Homolog of NCBI NO: 32479726 NR Description: OJ991214_12.2 [Oryza sativa (japonica
  misc_feature (1)..(168): Homolog of NCBI NO: 15227574 NR Description: F-box protein family [Arabidopsis thaliana]
  misc_feature (1)..(119): Homolog of NCBI NO: 15227574 NR Description: F-box protein family [Arabidopsis thaliana]
  misc_feature (1)..(168): Homolog of NCBI NO: 15225867 NR Description: F-box protein family [Arabidopsis thaliana]
MEESMKLNWILIDPIKKRAANISSRKAVSARRNWLTGDLEIRFSTVVTAEAAEVAAVVSCGSAEAWKEVDEEVGGEIHVRDVRLQVEDIEGKCMKGRDSLVILQGLLDGKRSCKDDEERRAKERYEEYVRMKIQWRENKERREKAQDTICMIFGFSMFVLLWSFILLR

SEQ ID NO: 28092 - DNA, 796 bp, Arabidopsis thaliana
  misc_feature (1)..(796): Ceres Seq. ID no. 13499570
  misc_feature: MA Experiment ID: 108434 Result: Down-regulated in Transcription
  misc_feature: MA Experiment 108434 PARAMETER Experiment Name: At_Root_Tips_cDNA_P Parameter: Tissue Value: Root Tips
  misc_feature: MA Experiment ID: 108464 Result: Up-regulated in Transcription
  misc_feature: MA Experiment 108464 PARAMETER Experiment Name: At_Germinating_Seeds_cDNA_P Parameter: Age (day) Value: 4 vs. 0
  misc_feature: MA Experiment 108464 PARAMETER Experiment Name: At_Germinating_Seeds_cDNA_P Parameter: Tissue Value: Germinating Seeds
  misc_feature: MA Experiment ID: 108573 Result: Up-regulated in Transcription
  misc_feature: MA Experiment 108573 PARAMETER Experiment Name: At_Drought_cDNA_P Parameter: Timepoint (hr) Value: 6
  misc_feature: MA Experiment 108573 PARAMETER Experiment Name: At_Drought_cDNA_P Parameter: Tissue Value: Aerial
  misc_feature: MA Experiment 108573 PARAMETER Experiment Name: At_Drought_cDNA_P Parameter: Treatment Value: Drought vs. No Drought
  misc_feature: MA Experiment ID: 108577 Result: Down-regulated in Transcription
  misc_feature: MA Experiment 108577 PARAMETER Experiment Name: At_42deg_Heat_cDNA_P Parameter: Temperature (deg C) Value: 42 vs. 22
  misc_feature: MA Experiment 108577 PARAMETER Experiment Name: At_42deg_Heat_cDNA_P Parameter: Timepoint (hr) Value: 6
  misc_feature: MA Experiment 108577 PARAMETER Experiment Name: At_42deg_Heat_cDNA_P Parameter: Tissue Value: Aerial
  misc_feature: MA Experiment ID: 108585 Result: Up-regulated in Transcription
  misc_feature: MA Experiment 108585 PARAMETER Experiment Name: At_5mM_NaNP_cDNA_P Parameter: Timepoint (hr) Value: 6
  misc_feature: MA Experiment 108585 PARAMETER Experiment Name: At_5mM_NaNP_cDNA_P Parameter: Tissue Value: Aerial
  misc_feature: MA Experiment 108585 PARAMETER Experiment Name: At_5mM_NaNP_cDNA_P Parameter: Treatment Value: null
  misc_feature: MA Experiment ID: 108607 Result: Up-regulated in Transcription
  misc_feature: MA Experiment 108607 PARAMETER Experiment Name: At_100uM_ABA_cDNA_P Parameter: Timepoint (hr) Value: 4
  misc_feature: MA Experiment 108607 PARAMETER Experiment Name: At_100uM_ABA_cDNA_P Parameter: Tissue Value: Aerial
  misc_feature: MA Experiment 108607 PARAMETER Experiment Name: At_100uM_ABA_cDNA_P Parameter: Treatment Value: 100uM ABA vs. No Treatment
  misc_feature: MA Experiment ID: 20000111 Result: Down-regulated in Transcription
  misc_feature: MA Experiment 20000111 PARAMETER Experiment Name: At_42deg_Heat_cDNA_P Parameter: Temperature (deg C) Value: 42 vs. 22
  misc_feature: MA Experiment 20000111 PARAMETER Experiment Name: At_42deg_Heat_cDNA_P Parameter: Timepoint (hr) Value: 6
  misc_feature: MA Experiment 20000111 PARAMETER Experiment Name: At_42deg_Heat_cDNA_P Parameter: Tissue Value: Aerial
  misc_feature: MA Experiment ID: 20000113 Result: Down-regulated in Transcription
  misc_feature: MA Experiment 20000113 PARAMETER Experiment Name: At_42deg_Heat_cDNA_P Parameter: Temperature (deg C) Value: 42 vs. 22
  misc_feature: MA Experiment 20000113 PARAMETER Experiment Name: At_42deg_Heat_cDNA_P Parameter: Timepoint (hr) Value: 8
  misc_feature: MA Experiment 20000113 PARAMETER Experiment Name: At_42deg_Heat_cDNA_P Parameter: Tissue Value: Aerial
  misc_feature: MA Experiment ID: 20000144 Result: Down-regulated in Transcription
  misc_feature: MA Experiment 20000144 PARAMETER Experiment Name: At_42deg_Heat_cDNA_P Parameter: Temperature (deg C) Value: 42 vs. 22
  misc_feature: MA Experiment 20000144 PARAMETER Experiment Name: At_42deg_Heat_cDNA_P Parameter: Timepoint (hr) Value: 1
  misc_feature: MA Experiment 20000144 PARAMETER Experiment Name: At_42deg_Heat_cDNA_P Parameter: Tissue Value: Aerial
  misc_feature: MA Experiment ID: 20000224 Result: Down-regulated in Transcription
actttctctattcaatctcacacgcgctaaaccataacccgatattactaatgacgaactacggtgcgattccgacgtcgtctcatgcatctccgttggtggatgtcgagtctctctcacgcgctaaacaccgtatcaaagccgggctagccacgcgccgtgcttggagagtgatgttcgatttccactccatgggactgcctcacggtgtctccgatgcgttcacaagaatcaagaccaatcttgcttacttccgtatgaactacgcaatcgttgtcttgatcgttatcttcttcagcttgatctggcatccgacatcgctcatcgtcttcaccgtcttggtcgttgtttggatctttctgtattttctccgtgatgagcctatcaagctgttccggtttcagatcgatgatcggacggtcttgattgttttatcggtgttaaccgtcgttttactcctgttgaccaacgcgacgtttaatattgttggagcgcttgtgaccggagctgtgttggttttgatccattcggtggttaggaagacggaggatcttttcttggatgaagaagcggcgacgactgagacttctgggctgacgtcatacccgtcgacttaaatcgtttcatctcgaaatttgtgtatcttttctatttttgtatattatcttgtttttttaattatgcgtaatcaatttttattggtgtgagtttggtttgagactttctctctctcttttgttttctgagttttgagctctgtctgaagtttgaacaattctaatttgttataattttt

SEQ ID NO: 28093 - protein, 204 aa, Arabidopsis thaliana
  peptide (1)..(204): Ceres Seq. ID no. 13499571
  misc_feature (38)..(200): Homolog of NCBI NO: 7487097 NR Description: hypothetical protein T16L4.170 - Arabidopsis
  misc_feature (24)..(191): Homolog of NCBI NO: 40539036 NR Description: putative prenylated rab acceptor protein
  misc_feature (21)..(191): Homolog of NCBI NO: 21594668 NR Description: unknown [Arabidopsis thaliana]
  misc_feature (21)..(200): Homolog of NCBI NO: 18390939 NR Description: expressed protein [Arabidopsis thaliana]
  misc_feature (17)..(191): Homolog of NCBI NO: 15220814 NR Description: expressed protein [Arabidopsis thaliana]
  misc_feature (17)..(188): Homolog of NCBI NO: 34903576 NR Description: P0419B01.1 [Oryza sativa (japonica
  misc_feature (17)..(204): Homolog of NCBI NO: 18405248 NR Description: expressed protein [Arabidopsis thaliana]
  misc_feature (17)..(204): Homolog of NCBI NO: 15231332 NR Description: expressed protein [Arabidopsis thaliana]
  misc_feature (17)..(204): Homolog of NCBI NO: 21617895 NR Description: unknown [Arabidopsis thaliana]
  misc_feature (17)..(204): Homolog of NCBI NO: 18400140 NR Description: expressed protein [Arabidopsis thaliana]
FLYSISHALNHNPILLMTNYGAIPTSSHASPLVDVESLSRAKHRIKAGLATRRAWRVMFDFHSMGLPHGVSDAFTRIKTNLAYFRMNYAIVVLIVIFFSLIWHPTSLIVFTVLVVVWIFLYFLRDEPIKLFRFQIDDRTVLIVLSVLTVVLLLLTNATFNIVGALVTGAVLVLIHSVVRKTEDLFLDEEAATTETSGLTSYPST

SEQ ID NO: 28094 - protein, 188 aa, Arabidopsis thaliana
  peptide (1)..(188): Ceres Seq. ID no. 13499572
  misc_feature (22)..(184): Homolog of NCBI NO: 7487097 NR Description: hypothetical protein T16L4.170 - Arabidopsis
  misc_feature (8)..(175): Homolog of NCBI NO: 40539036 NR Description: putative prenylated rab acceptor protein
  misc_feature (5)..(175): Homolog of NCBI NO: 21594668 NR Description: unknown [Arabidopsis thaliana]
  misc_feature (5)..(184): Homolog of NCBI NO: 18390939 NR Description: expressed protein [Arabidopsis thaliana]
  misc_feature (1)..(175): Homolog of NCBI NO: 15220814 NR Description: expressed protein [Arabidopsis thaliana]
  misc_feature (1)..(172): Homolog of NCBI NO: 34903576 NR Description: P0419B01.1 [Oryza sativa (japonica
  misc_feature (1)..(188): Homolog of NCBI NO: 18405248 NR Description: expressed protein [Arabidopsis thaliana]
  misc_feature (1)..(188): Homolog of NCBI NO: 15231332 NR Description: expressed protein [Arabidopsis thaliana]
  misc_feature (1)..(188): Homolog of NCBI NO: 21617895 NR Description: unknown [Arabidopsis thaliana]
  misc_feature (1)..(188): Homolog of NCBI NO: 18400140 NR Description: expressed protein [Arabidopsis thaliana]
MTNYGAIPTSSHASPLVDVESLSRAKHRIKAGLATRRAWRVMFDFHSMGLPHGVSDAFTRIKTNLAYFRMNYAIVVLIVIFFSLIWHPTSLIVFTVLVVVWIFLYFLRDEPIKLFRFQIDDRTVLIVLSVLTVVLLLLTNATFNIVGALVTGAVLVLIHSVVRKTEDLFLDEEAATTETSGLTSYPST

SEQ ID NO: 28095 - protein, 147 aa, Arabidopsis thaliana
  peptide (1)..(147): Ceres Seq. ID no. 13499573
  misc_feature (1)..(143): Homolog of NCBI NO: 7487097 NR Description: hypothetical protein T16L4.170 - Arabidopsis
  misc_feature (1)..(134): Homolog of NCBI NO: 40539036 NR Description: putative prenylated rab acceptor protein
  misc_feature (1)..(134): Homolog of NCBI NO: 21594668 NR Description: unknown [Arabidopsis thaliana]
  misc_feature (1)..(143): Homolog of NCBI NO: 18390939 NR Description: expressed protein [Arabidopsis thaliana]
  misc_feature (1)..(134): Homolog of NCBI NO: 15220814 NR Description: expressed protein [Arabidopsis thaliana]
  misc_feature (1)..(131): Homolog of NCBI NO: 34903576 NR Description: P0419B01.1 [Oryza sativa (japonica
  misc_feature (1)..(147): Homolog of NCBI NO: 18405248 NR Description: expressed protein [Arabidopsis thaliana]
  misc_feature (1)..(147): Homolog of NCBI NO: 15231332 NR Description: expressed protein [Arabidopsis thaliana]
  misc_feature (1)..(147): Homolog of NCBI NO: 21617895 NR Description: unknown [Arabidopsis thaliana]
  misc_feature (1)..(147): Homolog of NCBI NO: 18400140 NR Description: expressed protein [Arabidopsis thaliana]
MFDFHSMGLPHGVSDAFTRIKTNLAYFRMNYAIVVLIVIFFSLIWHPTSLIVFTVLVVVWIFLYFLRDEPIKLFRFQIDDRTVLIVLSVLTVVLLLLTNATFNIVGALVTGAVLVLIHSVVRKTEDLFLDEEAATTETSGLTSYPST

SEQ ID NO: 28096 - DNA, 970 bp, Arabidopsis thaliana
  misc_feature (1)..(970): Ceres Seq. ID no. 12654004
  misc_feature: MA Experiment ID: 20000113 Result: Down-regulated in Transcription
  misc_feature: MA Experiment 20000113 PARAMETER Experiment Name: At_42deg_Heat_cDNA_P Parameter: Temperature (deg C) Value: 42 vs. 22
  misc_feature: MA Experiment 20000113 PARAMETER Experiment Name: At_42deg_Heat_cDNA_P Parameter: Timepoint (hr) Value: 8
  misc_feature: MA Experiment 20000113 PARAMETER Experiment Name: At_42deg_Heat_cDNA_P Parameter: Tissue Value: Aerial
  misc_feature: MA Experiment ID: 20001911 Result: Down-regulated in Transcription
  misc_feature: MA Experiment 20001911 PARAMETER Experiment Name: At_Drought_Reproduction_P Parameter: Age (day) Value: 40
  misc_feature: MA Experiment 20001911 PARAMETER Experiment Name: At_Drought_Reproduction_P Parameter: Organism Value: A. thaliana
  misc_feature: MA Experiment 20001911 PARAMETER Experiment Name: At_Drought_Reproduction_P Parameter: Plant Line Value: WS
  misc_feature: MA Experiment 20001911 PARAMETER Experiment Name: At_Drought_Reproduction_P Parameter: Timepoint (day) Value: 10
  misc_feature: MA Experiment 20001911 PARAMETER Experiment Name: At_Drought_Reproduction_P Parameter: Tissue Value: Flowers
  misc_feature: MA Experiment 20001911 PARAMETER Experiment Name: At_Drought_Reproduction_P Parameter: Treatment Value: Drought vs. No Drought
aaaactgtaaccacgcttccgatctctaaaacctgagagagagagagagagagagagagagagacagagagaagtgtttcaatagtttggcgtgaagatggccggaggaggcggatacggcggcgcatcggggaaagttgattacgtcttcaaagttgttctaatcggagattcggctgttgggaaatcgcaactacttgctcgattcgctagagacgaattcagcatggattctaaagccaccatcggcgtcgagttccaaactcgtaccctctccattgaacaaaaaagcattaaggctcagatctgggataccgctggtcaggaaagatacagagccgttacaagcgcatactacagaggagcagttggcgcaatgctggtttatgatatgacgaaacgtgagacctttgagcatattccgcgttggcttgaagaactgagggcgcacgctgataagaacattgtcatcatccttattggaaacaagtctgatctagaagatcaaagagctgttcccactgaagacgctaaagagtttgctgagaaggaaggactctttttcctcgagacctctgctttaaacgcaaccaatgtcgaaaactccttcaacactctaatgactcagatatacaataccgtgaacaagaagaatcttgcatctgaaggcgactcaaataaccccggttcattggctggtaagaagattctcatcccaggttctggacaggagattcccgctaagaccagcacttgttgtacttcttcttgatctgtctcctactcaagcaagattcattttttttcctcctgaaatttgtgatagagaatgctactttcattgtatattctttttcgaatctggcttgtttgctagttcattaaacattggtgtgcaattggacaccgatagaaagtattggaacaaatagcttttgaatgaaatatgaaacaaacagtctttgagagt

SEQ ID NO: 28097 - protein, 224 aa, Arabidopsis thaliana
  peptide (1)..(224): Ceres Seq. ID no. 12654005
  misc_feature (19)..(180): Pfam Name: Ras family Pfam Description: Ras family
  misc_feature (6)..(223): Homolog of NCBI NO: 3024503 NR Description: RAS-RELATED PROTEIN RAB11C
  misc_feature (6)..(223): Homolog of NCBI NO: 3024505 NR Description: RAS-RELATED PROTEIN RAB11D
  misc_feature (1)..(224): Homolog of NCBI NO: 3024500 NR Description: RAS-RELATED PROTEIN RAB11A
  misc_feature (1)..(223): Homolog of NCBI NO: 7438430 NR Description: GTP-binding protein - garden pea
  misc_feature (1)..(223): Homolog of NCBI NO: 15238392 NR Description: GTP-binding protein, putative
  misc_feature (1)..(224): Homolog of NCBI NO: 1184985 NR Description: ATGB3 [Arabidopsis thaliana]
  misc_feature (1)..(224): Homolog of NCBI NO: 21617896 NR Description: GTP-binding protein GB3 [Arabidopsis thaliana]
  misc_feature (1)..(224): Homolog of NCBI NO: 15236099 NR Description: GTP-binding protein, putative
MAGGGGYGGASGKVDYVFKVVLIGDSAVGKSQLLARFARDEFSMDSKATIGVEFQTRTLSIEQKSIKAQIWDTAGQERYRAVTSAYYRGAVGAMLVYDMTKRETFEHIPRWLEELRAHADKNIVIILIGNKSDLEDQRAVPTEDAKEFAEKEGLFFLETSALNATNVENSFNTLMTQIYNTVNKKNLASEGDSNNPGSLAGKKILIPGSGQEIPAKTSTCCTSS

SEQ ID NO: 28098 - protein, 181 aa, Arabidopsis thaliana
  peptide (1)..(181): Ceres Seq. ID no. 12654006
  misc_feature (1)..(137): Pfam Name: Ras family Pfam Description: Ras family
  misc_feature (1)..(180): Homolog of NCBI NO: 3024503 NR Description: RAS-RELATED PROTEIN RAB11C
  misc_feature (1)..(180): Homolog of NCBI NO: 3024505 NR Description: RAS-RELATED PROTEIN RAB11D
  misc_feature (1)..(181): Homolog of NCBI NO: 3024500 NR Description: RAS-RELATED PROTEIN RAB11A
  misc_feature (1)..(180): Homolog of NCBI NO: 7438430 NR Description: GTP-binding protein - garden pea
  misc_feature (1)..(180): Homolog of NCBI NO: 15238392 NR Description: GTP-binding protein, putative
  misc_feature (1)..(181): Homolog of NCBI NO: 1184985 NR Description: ATGB3 [Arabidopsis thaliana]
  misc_feature (1)..(181): Homolog of NCBI NO: 21617896 NR Description: GTP-binding protein GB3 [Arabidopsis thaliana]
  misc_feature (1)..(181): Homolog of NCBI NO: 15236099 NR Description: GTP-binding protein, putative
MDSKATIGVEFQTRTLSIEQKSIKAQIWDTAGQERYRAVTSAYYRGAVGAMLVYDMTKRETFEHIPRWLEELRAHADKNIVIILIGNKSDLEDQRAVPTEDAKEFAEKEGLFFLETSALNATNVENSFNTLMTQIYNTVNKKNLASEGDSNNPGSLAGKKILIPGSGQEIPAKTSTCCTSS

SEQ ID NO: 28099 - protein, 131 aa, Arabidopsis thaliana
  peptide (1)..(131): Ceres Seq. ID no. 12654007
  misc_feature (1)..(87): Pfam Name: Ras family Pfam Description: Ras family
  misc_feature (1)..(130): Homolog of NCBI NO: 3024503 NR Description: RAS-RELATED PROTEIN RAB11C
  misc_feature (1)..(130): Homolog of NCBI NO: 3024505 NR Description: RAS-RELATED PROTEIN RAB11D
  misc_feature (1)..(131): Homolog of NCBI NO: 3024500 NR Description: RAS-RELATED PROTEIN RAB11A
  misc_feature (1)..(130): Homolog of NCBI NO: 7438430 NR Description: GTP-binding protein - garden pea
  misc_feature (1)..(130): Homolog of NCBI NO: 15238392 NR Description: GTP-binding protein, putative
  misc_feature (1)..(131): Homolog of NCBI NO: 1184985 NR Description: ATGB3 [Arabidopsis thaliana]
  misc_feature (1)..(131): Homolog of NCBI NO: 21617896 NR Description: GTP-binding protein GB3 [Arabidopsis thaliana]
  misc_feature (1)..(131): Homolog of NCBI NO: 15236099 NR Description: GTP-binding protein, putative
MLVYDMTKRETFEHIPRWLEELRAHADKNIVIILIGNKSDLEDQRAVPTEDAKEFAEKEGLFFLETSALNATNVENSFNTLMTQIYNTVNKKNLASEGDSNNPGSLAGKKILIPGSGQEIPAKTSTCCTSS

SEQ ID NO: 28100 - DNA, 1521 bp, Arabidopsis thaliana; identical to SEQ ID NO: 22510
  misc_feature (1)..(1521): Ceres Seq. ID no. 12394809
  misc_feature: MA Experiment ID: 20000071 Result: Up-regulated in Transcription
  misc_feature: MA Experiment 20000071 PARAMETER Experiment Name: At_100uM_ABA_Mutants_cDNA_P Parameter: Plant Line Value: CS8104
  misc_feature: MA Experiment 20000071 PARAMETER Experiment Name: At_100uM_ABA_Mutants_cDNA_P Parameter: Timepoint (hr) Value: 6
  misc_feature: MA Experiment 20000071 PARAMETER Experiment Name: At_100uM_ABA_Mutants_cDNA_P Parameter: Tissue Value: Aerial
  misc_feature: MA Experiment 20000071 PARAMETER Experiment Name: At_100uM_ABA_Mutants_cDNA_P Parameter: Treatment Value: 100uM ABA vs. No Treatment
  misc_feature: MA Experiment ID: 20000169 Result: Up-regulated in Transcription
  misc_feature: MA Experiment 20000169 PARAMETER Experiment Name: At_100uM_ABA_P Parameter: Age (day) Value: 14
  misc_feature: MA Experiment 20000169 PARAMETER Experiment Name: At_100uM_ABA_P Parameter: Organism Value: A. thaliana
  misc_feature: MA Experiment 20000169 PARAMETER Experiment Name: At_100uM_ABA_P Parameter: Plant Line Value: WS
  misc_feature: MA Experiment 20000169 PARAMETER Experiment Name: At_100uM_ABA_P Parameter: Timepoint (hr) Value: 6
  misc_feature: MA Experiment 20000169 PARAMETER Experiment Name: At_100uM_ABA_P Parameter: Tissue Value: Aerial
  misc_feature: MA Experiment 20000169 PARAMETER Experiment Name: At_100uM_ABA_P Parameter: Treatment Value: 100uM ABA vs. No Treatment
  misc_feature: MA Experiment ID: 20000185 Result: Down-regulated in Transcription
  misc_feature: MA Experiment 20000185 PARAMETER Experiment Name: At_Roots__P Parameter: Age (day) Value: 7 vs. 21
  misc_feature: MA Experiment 20000185 PARAMETER Experiment Name: At_Roots__P Parameter: Organism Value: A. thaliana
  misc_feature: MA Experiment 20000185 PARAMETER Experiment Name: At_Roots__P Parameter: Tissue Value: Roots vs. Whole Plant
  misc_feature: MA Experiment ID: 20000267 Result: Up-regulated in Transcription
  misc_feature: MA Experiment 20000267 PARAMETER Experiment Name: At_Drought_P Parameter: Age (day) Value: 7
  misc_feature: MA Experiment 20000267 PARAMETER Experiment Name: At_Drought_P Parameter: Organism Value: A. thaliana
  misc_feature: MA Experiment 20000267 PARAMETER Experiment Name: At_Drought_P Parameter: Plant Line Value: WS
  misc_feature: MA Experiment 20000267 PARAMETER Experiment Name: At_Drought_P Parameter: Timepoint (hr) Value: 6
  misc_feature: MA Experiment 20000267 PARAMETER Experiment Name: At_Drought_P Parameter: Tissue Value: Whole Plant
  misc_feature: MA Experiment 20000267 PARAMETER Experiment Name: At_Drought_P Parameter: Treatment Value: Drought vs. No Drought
  misc_feature: MA Experiment ID: 20000268 Result: Up-regulated in Transcription
  misc_feature: MA Experiment 20000268 PARAMETER Experiment Name: At_100mM_NaCl__P Parameter: Age (day) Value: 14
  misc_feature: MA Experiment 20000268 PARAMETER Experiment Name: At_100mM_NaCl__P Parameter: Organism Value: A. thaliana
  misc_feature: MA Experiment 20000268 PARAMETER Experiment Name: At_100mM_NaCl__P Parameter: Plant Line Value: WS
  misc_feature: MA Experiment 20000268 PARAMETER Experiment Name: At_100mM_NaCl__P Parameter: Timepoint (hr) Value: 6
  misc_feature: MA Experiment 20000268 PARAMETER Experiment Name: At_100mM_NaCl__P Parameter: Tissue Value: Whole Plant
  misc_feature: MA Experiment 20000268 PARAMETER Experiment Name: At_100mM_NaCl__P Parameter: Treatment Value: 100mM NaCl vs. No Treatment
  misc_feature: MA Experiment ID: 20000436 Result: Up-regulated in Transcription
  misc_feature: MA Experiment 20000436 PARAMETER Experiment Name: At_Drought_P Parameter: Age (day) Value: 7
  misc_feature: MA Experiment 20000436 PARAMETER Experiment Name: At_Drought_P Parameter: Organism Value: A. thaliana
  misc_feature: MA Experiment 20000436 PARAMETER Experiment Name: At_Drought_P Parameter: Plant Line Value: WS
  misc_feature: MA Experiment 20000436 PARAMETER Experiment Name: At_Drought_P Parameter: Timepoint (hr) Value: 12
  misc_feature: MA Experiment 20000436 PARAMETER Experiment Name: At_Drought_P Parameter: Tissue Value: Whole Plant
  misc_feature: MA Experiment 20000436 PARAMETER Experiment Name: At_Drought_P Parameter: Treatment Value: Drought vs. No Drought
  misc_feature: MA Experiment ID: 20000437 Result: Up-regulated in Transcription
  misc_feature: MA Experiment 20000437 PARAMETER Experiment Name: At_Drought_P Parameter: Age (day) Value: 8
  misc_feature: MA Experiment 20000437 PARAMETER Experiment Name: At_Drought_P Parameter: Organism Value: A. thaliana
  misc_feature: MA Experiment 20000437 PARAMETER Experiment Name: At_Drought_P Parameter: Plant Line Value: WS
  misc_feature: MA Experiment 20000437 PARAMETER Experiment Name: At_Drought_P Parameter: Timepoint (hr) Value: 24
  misc_feature: MA Experiment 20000437 PARAMETER Experiment Name: At_Drought_P Parameter: Tissue Value: Whole Plant
  misc_feature: MA Experiment 20000437 PARAMETER Experiment Name: At_Drought_P Parameter: Treatment Value: Drought vs. No Drought
  misc_feature: MA Experiment ID: 20000439 Result: Down-regulated in Transcription
  misc_feature: MA Experiment 20000439 PARAMETER Experiment Name: At_Roots__P Parameter: Age (day) Value: 14 vs. 21
  misc_feature: MA Experiment 20000439 PARAMETER Experiment Name: At_Roots__P Parameter: Organism Value: A. thaliana
  misc_feature: MA Experiment 20000439 PARAMETER Experiment Name: At_Roots__P Parameter: Tissue Value: Roots vs. Whole Plant
  misc_feature: MA Experiment ID: 20000453 Result: Up-regulated in Transcription
  misc_feature: MA Experiment 20000453 PARAMETER Experiment Name: At_100uM_ABA_P Parameter: Age (day) Value: 15
  misc_feature: MA Experiment 20000453 PARAMETER Experiment Name: At_100uM_ABA_P Parameter: Organism Value: A. thaliana
  misc_feature: MA Experiment 20000453 PARAMETER Experiment Name: At_100uM_ABA_P Parameter: Plant Line Value: WS
  misc_feature: MA Experiment 20000453 PARAMETER Experiment Name: At_100uM_ABA_P Parameter: Timepoint (hr) Value: 24
  misc_feature: MA Experiment 20000453 PARAMETER Experiment Name: At_100uM_ABA_P Parameter: Tissue Value: Aerial
  misc_feature: MA Experiment 20000453 PARAMETER Experiment Name: At_100uM_ABA_P Parameter: Treatment Value: 100uM ABA vs. No Treatment
  misc_feature: MA Experiment ID: 20000573 Result: Down-regulated in Transcription
  misc_feature: MA Experiment 20000573 PARAMETER Experiment Name: At_100uM_ABA_Mutants__P Parameter: Organism Value: A. thaliana
  misc_feature: MA Experiment 20000573 PARAMETER Experiment Name: At_100uM_ABA_Mutants__P Parameter: Plant Line Value: CS22 vs. Ler wt
  misc_feature: MA Experiment 20000573 PARAMETER Experiment Name: At_100uM_ABA_Mutants__P Parameter: Timepoint (hr) Value: N/A
  misc_feature: MA Experiment 20000573 PARAMETER Experiment Name: At_100uM_ABA_Mutants__P Parameter: Tissue Value: Whole Plant
  misc_feature: MA Experiment 20000573 PARAMETER Experiment Name: At_100uM_ABA_Mutants__P Parameter: Treatment Value: None
  misc_feature: MA Experiment ID: 20000574 Result: Down-regulated in Transcription
  misc_feature: MA Experiment 20000574 PARAMETER Experiment Name: At_100uM_ABA_Mutants__P Parameter: Organism Value: A. thaliana
  misc_feature: MA Experiment 20000574 PARAMETER Experiment Name: At_100uM_ABA_Mutants__P Parameter: Plant Line Value: CS23 vs. Ler wt
  misc_feature: MA Experiment 20000574 PARAMETER Experiment Name: At_100uM_ABA_Mutants__P Parameter: Timepoint (hr) Value: N/A
  misc_feature: MA Experiment 20000574 PARAMETER Experiment Name: At_100uM_ABA_Mutants__P Parameter: Tissue Value: Whole Plant
  misc_feature: MA Experiment 20000574 PARAMETER Experiment Name: At_100uM_ABA_Mutants__P Parameter: Treatment Value: None
  misc_feature: MA Experiment ID: 20001247 Result: Up-regulated in Transcription
  misc_feature: MA Experiment 20001247 PARAMETER Experiment Name: At_Far-red-induction_P Parameter: Age (day) Value: 7
  misc_feature: MA Experiment 20001247 PARAMETER Experiment Name: At_Far-red-induction_P Parameter: Light Value: Far-red vs. White
  misc_feature: MA Experiment 20001247 PARAMETER Experiment Name: At_Far-red-induction_P Parameter: Organism Value: A. thaliana
  misc_feature: MA Experiment 20001247 PARAMETER Experiment Name: At_Far-red-induction_P Parameter: Plant Line Value: Columbia
  misc_feature: MA Experiment 20001247 PARAMETER Experiment Name: At_Far-red-induction_P Parameter: Timepoint (hr) Value: 1
  misc_feature: MA Experiment 20001247 PARAMETER Experiment Name: At_Far-red-induction_P Parameter: Tissue Value: Whole Plant
  misc_feature: MA Experiment ID: 20001248 Result: Down-regulated in Transcription
  misc_feature: MA Experiment 20001248 PARAMETER Experiment Name: At_Far-red-induction_P Parameter: Age (day) Value: 7
  misc_feature: MA Experiment 20001248 PARAMETER Experiment Name: At_Far-red-induction_P Parameter: Light Value: Far-red vs. White
  misc_feature: MA Experiment 20001248 PARAMETER Experiment Name: At_Far-red-induction_P Parameter: Organism Value: A. thaliana
  misc_feature: MA Experiment 20001248 PARAMETER Experiment Name: At_Far-red-induction_P Parameter: Plant Line Value: Columbia
  misc_feature: MA Experiment 20001248 PARAMETER Experiment Name: At_Far-red-induction_P Parameter: Timepoint (hr) Value: 4
  misc_feature: MA Experiment 20001248 PARAMETER Experiment Name: At_Far-red-induction_P Parameter: Tissue Value: Whole Plant
  misc_feature: MA Experiment ID: 20001451 Result: Down-regulated in Transcription
  misc_feature: MA Experiment 20001451 PARAMETER Experiment Name: At_Far-red-induction_P Parameter: Age (day) Value: 7
  misc_feature: MA Experiment 20001451 PARAMETER Experiment Name: At_Far-red-induction_P Parameter: Light Value: Far-red vs. White
  misc_feature: MA Experiment 20001451 PARAMETER Experiment Name: At_Far-red-induction_P Parameter: Organism Value: A. thaliana
  misc_feature: MA Experiment 20001451 PARAMETER Experiment Name: At_Far-red-induction_P Parameter: Plant Line Value: Columbia
  misc_feature: MA Experiment 20001451 PARAMETER Experiment Name: At_Far-red-induction_P Parameter: Timepoint (hr) Value: 24
  misc_feature: MA Experiment 20001451 PARAMETER Experiment Name: At_Far-red-induction_P Parameter: Tissue Value: Whole Plant
  misc_feature: MA Experiment ID: 20001554 Result: Up-regulated in Transcription
  misc_feature: MA Experiment 20001554 PARAMETER Experiment Name: At_Drought_Soil_Dry_P Parameter: Age (day) Value: 21
  misc_feature: MA Experiment 20001554 PARAMETER Experiment Name: At_Drought_Soil_Dry_P Parameter: Organism Value: A. thaliana
  misc_feature: MA Experiment 20001554 PARAMETER Experiment Name: At_Drought_Soil_Dry_P Parameter: Plant Line Value: WS
  misc_feature: MA Experiment 20001554 PARAMETER Experiment Name: At_Drought_Soil_Dry_P Parameter: Post Timepoint (hr) Value: None
  misc_feature: MA Experiment 20001554 PARAMETER Experiment Name: At_Drought_Soil_Dry_P Parameter: Post-Treatment Value: None
  misc_feature: MA Experiment 20001554 PARAMETER Experiment Name: At_Drought_Soil_Dry_P Parameter: Timepoint (day) Value: 7
  misc_feature: MA Experiment 20001554 PARAMETER Experiment Name: At_Drought_Soil_Dry_P Parameter: Treatment Value: Drought vs. No Drought
  misc_feature: MA Experiment ID: 20001555 Result: Up-regulated in Transcription
  misc_feature: MA Experiment 20001555 PARAMETER Experiment Name: At_Drought_Soil_Dry_P Parameter: Age (day) Value: 24
  misc_feature: MA Experiment 20001555 PARAMETER Experiment Name: At_Drought_Soil_Dry_P Parameter: Organism Value: A. thaliana
  misc_feature: MA Experiment 20001555 PARAMETER Experiment Name: At_Drought_Soil_Dry_P Parameter: Plant Line Value: WS
  misc_feature: MA Experiment 20001555 PARAMETER Experiment Name: At_Drought_Soil_Dry_P Parameter: Post Timepoint (hr) Value: None
  misc_feature: MA Experiment 20001555 PARAMETER Experiment Name: At_Drought_Soil_Dry_P Parameter: Post-Treatment Value: None
  misc_feature: MA Experiment 20001555 PARAMETER Experiment Name: At_Drought_Soil_Dry_P Parameter: Timepoint (day) Value: 10
  misc_feature: MA Experiment 20001555 PARAMETER Experiment Name: At_Drought_Soil_Dry_P Parameter: Treatment Value: Drought vs. No Drought
  misc_feature: MA Experiment ID: 20001556 Result: Up-regulated in Transcription
  misc_feature: MA Experiment 20001556 PARAMETER Experiment Name: At_Drought_Soil_Dry_P Parameter: Age (day) Value: 26
  misc_feature: MA Experiment 20001556 PARAMETER Experiment Name: At_Drought_Soil_Dry_P Parameter: Organism Value: A. thaliana
  misc_feature: MA Experiment 20001556 PARAMETER Experiment Name: At_Drought_Soil_Dry_P Parameter: Plant Line Value: WS
  misc_feature: MA Experiment 20001556 PARAMETER Experiment Name: At_Drought_Soil_Dry_P Parameter: Post Timepoint (hr) Value: None
  misc_feature: MA Experiment 20001556 PARAMETER Experiment Name: At_Drought_Soil_Dry_P Parameter: Post-Treatment Value: None
  misc_feature: MA Experiment 20001556 PARAMETER Experiment Name: At_Drought_Soil_Dry_P Parameter: Timepoint (day) Value: 12
  misc_feature: MA Experiment 20001556 PARAMETER Experiment Name: At_Drought_Soil_Dry_P Parameter: Treatment Value: Drought vs. No Drought
  misc_feature: MA Experiment ID: 20001559 Result: Up-regulated in Transcription
  misc_feature: MA Experiment 20001559 PARAMETER Experiment Name: At_Drought_Soil_Dry_P Parameter: Age (day) Value: 28
  misc_feature: MA Experiment 20001559 PARAMETER Experiment Name: At_Drought_Soil_Dry_P Parameter: Organism Value: A. thaliana
  misc_feature: MA Experiment 20001559 PARAMETER Experiment Name: At_Drought_Soil_Dry_P Parameter: Plant Line Value: WS
  misc_feature: MA Experiment 20001559 PARAMETER Experiment Name: At_Drought_Soil_Dry_P Parameter: Post Timepoint (hr) Value: 29
  misc_feature: MA Experiment 20001559 PARAMETER Experiment Name: At_Drought_Soil_Dry_P Parameter: Post-Treatment Value: Re-Water vs. No Drought
  misc_feature: MA Experiment 20001559 PARAMETER Experiment Name: At_Drought_Soil_Dry_P Parameter: Timepoint (day) Value: 14
  misc_feature: MA Experiment 20001559 PARAMETER Experiment Name: At_Drought_Soil_Dry_P Parameter: Treatment Value: Drought vs. No Drought
  misc_feature: MA Experiment ID: 20001904 Result: Up-regulated in Transcription
  misc_feature: MA Experiment 20001904 PARAMETER Experiment Name: At_Drought_Reproduction_P Parameter: Age (day) Value: 37
  misc_feature: MA Experiment 20001904 PARAMETER Experiment Name: At_Drought_Reproduction_P Parameter: Organism Value: A. thaliana
  misc_feature: MA Experiment 20001904 PARAMETER Experiment Name: At_Drought_Reproduction_P Parameter: Plant Line Value: WS
  misc_feature: MA Experiment 20001904 PARAMETER Experiment Name: At_Drought_Reproduction_P Parameter: Timepoint (day) Value: 7
  misc_feature: MA Experiment 20001904 PARAMETER Experiment Name: At_Drought_Reproduction_P Parameter: Tissue Value: Rosettes
  misc_feature: MA Experiment 20001904 PARAMETER Experiment Name: At_Drought_Reproduction_P Parameter: Treatment Value: Drought vs. No Drought
  misc_feature: MA Experiment ID: 20001911 Result: Up-regulated in Transcription
  misc_feature: MA Experiment 20001911 PARAMETER Experiment Name: At_Drought_Reproduction_P Parameter: Age (day) Value: 40
  misc_feature: MA Experiment 20001911 PARAMETER Experiment Name: At_Drought_Reproduction_P Parameter: Organism Value: A. thaliana
  misc_feature: MA Experiment 20001911 PARAMETER Experiment Name: At_Drought_Reproduction_P Parameter: Plant Line Value: WS
  misc_feature: MA Experiment 20001911 PARAMETER Experiment Name: At_Drought_Reproduction_P Parameter: Timepoint (day) Value: 10
  misc_feature: MA Experiment 20001911 PARAMETER Experiment Name: At_Drought_Reproduction_P Parameter: Tissue Value: Flowers
  misc_feature: MA Experiment 20001911 PARAMETER Experiment Name: At_Drought_Reproduction_P Parameter: Treatment Value: Drought vs. No Drought

SEQ ID NO: 28101 - protein, 392 aa, Arabidopsis thaliana; identical to SEQ ID NO: 22511
  peptide (1)..(392): Ceres Seq. ID no. 12394810
  misc_feature (141)..(389): Homolog of NCBI NO: 14422442 NR Description: BURP domain-containing protein [Bruguiera
  misc_feature (100)..(389): Homolog of NCBI NO: 33578034 NR Description: BURP domain-containing protein [Gossypium
  misc_feature (77)..(99): Homolog of NCBI NO: 14422448 NR Description: BURP domain-containing protein [Bruguiera
  misc_feature (100)..(389): Homolog of NCBI NO: 18447761 NR Description: dehydration-induced protein RD22-like protein
  misc_feature (56)..(389): Homolog of NCBI NO: 34910186 NR Description: putative dehydration-responsive protein RD22
  misc_feature (16)..(83): Homolog of NCBI NO: 14422448 NR Description: BURP domain-containing protein [Bruguiera
  misc_feature (123)..(389): Homolog of NCBI NO: 14422448 NR Description: BURP domain-containing protein [Bruguiera
  misc_feature (77)..(389): Homolog of NCBI NO: 14422444 NR Description: BURP domain-containing protein [Bruguiera
  misc_feature (77)..(389): Homolog of NCBI NO: 16588826 NR Description: dehydration-responsive protein RD22 [Prunus
  misc_feature (1)..(392): Homolog of NCBI NO: 15239478 NR Description: dehydration-induced protein RD22
  misc_feature (141)..(389): Homolog of NCBI NO: 14422442 NR Description: BURP domain-containing protein [Bruguiera
  misc_feature (100)..(389): Homolog of NCBI NO: 33578034 NR Description: BURP domain-containing protein [Gossypium
  misc_feature (77)..(99): Homolog of NCBI NO: 14422448 NR Description: BURP domain-containing protein [Bruguiera
  misc_feature (100)..(389): Homolog of NCBI NO: 18447761 NR Description: dehydration-induced protein RD22-like protein
  misc_feature (56)..(389): Homolog of NCBI NO: 34910186 NR Description: putative dehydration-responsive protein RD22
  misc_feature (16)..(83): Homolog of NCBI NO: 14422448 NR Description: BURP domain-containing protein [Bruguiera
  misc_feature (123)..(389): Homolog of NCBI NO: 14422448 NR Description: BURP domain-containing protein [Bruguiera
  misc_feature (77)..(389): Homolog of NCBI NO: 14422444 NR Description: BURP domain-containing protein [Bruguiera
  misc_feature (77)..(389): Homolog of NCBI NO: 16588826 NR Description: dehydration-responsive protein RD22 [Prunus
  misc_feature (1)..(392): Homolog of NCBI NO: 15239478 NR Description: dehydration-induced protein RD22
  misc_feature (141)..(389): Homolog of NCBI NO: 14422442 NR Description: BURP domain-containing protein [Bruguiera
  misc_feature (100)..(389): Homolog of NCBI NO: 33578034 NR Description: BURP domain-containing protein [Gossypium
  misc_feature (77)..(99): Homolog of NCBI NO: 14422448 NR Description: BURP domain-containing protein [Bruguiera
  misc_feature (100)..(389): Homolog of NCBI NO: 18447761 NR Description: dehydration-induced protein RD22-like protein
  misc_feature (56)..(389): Homolog of NCBI NO: 34910186 NR Description: putative dehydration-responsive protein RD22
  misc_feature (16)..(83): Homolog of NCBI NO: 14422448 NR Description: BURP domain-containing protein [Bruguiera
  misc_feature (123)..(389): Homolog of NCBI NO: 14422448 NR Description: BURP domain-containing protein [Bruguiera
  misc_feature (77)..(389): Homolog of NCBI NO: 14422444 NR Description: BURP domain-containing protein [Bruguiera
  misc_feature (77)..(389): Homolog of NCBI NO: 16588826 NR Description: dehydration-responsive protein RD22 [Prunus
  misc_feature (1)..(392): Homolog of NCBI NO: 15239478 NR Description: dehydration-induced protein RD22

SEQ ID NO: 28102 - protein, 378 aa, Arabidopsis thaliana; identical to SEQ ID NO: 22512
  peptide (1)..(378): Ceres Seq. ID no. 12394811
  misc_feature (127)..(375): Homolog of NCBI NO: 14422442 NR Description: BURP domain-containing protein [Bruguiera
  misc_feature (86)..(375): Homolog of NCBI NO: 33578034 NR Description: BURP domain-containing protein [Gossypium
  misc_feature (63)..(85): Homolog of NCBI NO: 14422448 NR Description: BURP domain-containing protein [Bruguiera
  misc_feature (86)..(375): Homolog of NCBI NO: 18447761 NR Description: dehydration-induced protein RD22-like protein
  misc_feature (42)..(375): Homolog of NCBI NO: 34910186 NR Description: putative dehydration-responsive protein RD22
  misc_feature (2)..(69): Homolog of NCBI NO: 14422448 NR Description: BURP domain-containing protein [Bruguiera
  misc_feature (109)..(375): Homolog of NCBI NO: 14422448 NR Description: BURP domain-containing protein [Bruguiera
  misc_feature (63)..(375): Homolog of NCBI NO: 14422444 NR Description: BURP domain-containing protein [Bruguiera
  misc_feature (63)..(375): Homolog of NCBI NO: 16588826 NR Description: dehydration-responsive protein RD22 [Prunus
  misc_feature (1)..(378): Homolog of NCBI NO: 15239478 NR Description: dehydration-induced protein RD22
  misc_feature (127)..(375): Homolog of NCBI NO: 14422442 NR Description: BURP domain-containing protein [Bruguiera
  misc_feature (86)..(375): Homolog of NCBI NO: 33578034 NR Description: BURP domain-containing protein [Gossypium
  misc_feature (63)..(85): Homolog of NCBI NO: 14422448 NR Description: BURP domain-containing protein [Bruguiera
  misc_feature (86)..(375): Homolog of NCBI NO: 18447761 NR Description: dehydration-induced protein RD22-like protein
  misc_feature (42)..(375): Homolog of NCBI NO: 34910186 NR Description: putative dehydration-responsive protein RD22
  misc_feature (2)..(69): Homolog of NCBI NO: 14422448 NR Description: BURP domain-containing protein [Bruguiera
  misc_feature (109)..(375): Homolog of NCBI NO: 14422448 NR Description: BURP domain-containing protein [Bruguiera
  misc_feature (63)..(375): Homolog of NCBI NO: 14422444 NR Description: BURP domain-containing protein [Bruguiera
  misc_feature (63)..(375): Homolog of NCBI NO: 16588826 NR Description: dehydration-responsive protein RD22 [Prunus
  misc_feature (1)..(378): Homolog of NCBI NO: 15239478 NR Description: dehydration-induced protein RD22
  misc_feature (127)..(375): Homolog of NCBI NO: 14422442 NR Description: BURP domain-containing protein [Bruguiera
  misc_feature (86)..(375): Homolog of NCBI NO: 33578034 NR Description: BURP domain-containing protein [Gossypium
  misc_feature (63)..(85): Homolog of NCBI NO: 14422448 NR Description: BURP domain-containing protein [Bruguiera
  misc_feature (86)..(375): Homolog of NCBI NO: 18447761 NR Description: dehydration-induced protein RD22-like protein
  misc_feature (42)..(375): Homolog of NCBI NO: 34910186 NR Description: putative dehydration-responsive protein RD22
  misc_feature (2)..(69): Homolog of NCBI NO: 14422448 NR Description: BURP domain-containing protein [Bruguiera
  misc_feature (109)..(375): Homolog of NCBI NO: 14422448 NR Description: BURP domain-containing protein [Bruguiera
  misc_feature (63)..(375): Homolog of NCBI NO: 14422444 NR Description: BURP domain-containing protein [Bruguiera
  misc_feature (63)..(375): Homolog of NCBI NO: 16588826 NR Description: dehydration-responsive protein RD22 [Prunus
  misc_feature (1)..(378): Homolog of NCBI NO: 15239478 NR Description: dehydration-induced protein RD22

SEQ ID NO: 28103 - protein, 205 aa, Arabidopsis thaliana; identical to SEQ ID NO: 22513
  peptide (1)..(205): Ceres Seq. ID no. 12394812
  misc_feature (1)..(204): Homolog of NCBI NO: 24416614 NR Description: resistant specific protein-1(4) [Vigna radiata]
  misc_feature (1)..(202): Homolog of NCBI NO: 14422446 NR Description: BURP domain-containing protein [Bruguiera
  misc_feature (1)..(202): Homolog of NCBI NO: 14422442 NR Description: BURP domain-containing protein [Bruguiera
  misc_feature (1)..(202): Homolog of NCBI NO: 33578034 NR Description: BURP domain-containing protein [Gossypium
  misc_feature (1)..(202): Homolog of NCBI NO: 18447761 NR Description: dehydration-induced protein RD22-like protein
  misc_feature (1)..(202): Homolog of NCBI NO: 34910186 NR Description: putative dehydration-responsive protein RD22
  misc_feature (1)..(202): Homolog of NCBI NO: 14422448 NR Description: BURP domain-containing protein [Bruguiera
  misc_feature (1)..(202): Homolog of NCBI NO: 14422444 NR Description: BURP domain-containing protein [Bruguiera
  misc_feature (1)..(202): Homolog of NCBI NO: 16588826 NR Description: dehydration-responsive protein RD22 [Prunus
  misc_feature (1)..(205): Homolog of NCBI NO: 15239478 NR Description: dehydration-induced protein RD22
  misc_feature (1)..(204): Homolog of NCBI NO: 24416614 NR Description: resistant specific protein-1(4) [Vigna radiata]
  misc_feature (1)..(202): Homolog of NCBI NO: 14422446 NR Description: BURP domain-containing protein [Bruguiera
  misc_feature (1)..(202): Homolog of NCBI NO: 14422442 NR Description: BURP domain-containing protein [Bruguiera
  misc_feature (1)..(202): Homolog of NCBI NO: 33578034 NR Description: BURP domain-containing protein [Gossypium
  misc_feature (1)..(202): Homolog of NCBI NO: 18447761 NR Description: dehydration-induced protein RD22-like protein
  misc_feature (1)..(202): Homolog of NCBI NO: 34910186 NR Description: putative dehydration-responsive protein RD22
  misc_feature (1)..(202): Homolog of NCBI NO: 14422448 NR Description: BURP domain-containing protein [Bruguiera
  misc_feature (1)..(202): Homolog of NCBI NO: 14422444 NR Description: BURP domain-containing protein [Bruguiera
  misc_feature (1)..(202): Homolog of NCBI NO: 16588826 NR Description: dehydration-responsive protein RD22 [Prunus
  misc_feature (1)..(205): Homolog of NCBI NO: 15239478 NR Description: dehydration-induced protein RD22
  misc_feature (1)..(202): Homolog of NCBI NO: 33578034 NR Description: BURP domain-containing protein [Gossypium
  misc_feature (1)..(202): Homolog of NCBI NO: 18447761 NR Description: dehydration-induced protein RD22-like protein
  misc_feature (1)..(202): Homolog of NCBI NO: 34910186 NR Description: putative dehydration-responsive protein RD22
  misc_feature (1)..(202): Homolog of NCBI NO: 14422448 NR Description: BURP domain-containing protein [Bruguiera
  misc_feature (1)..(202): Homolog of NCBI NO: 14422444 NR Description: BURP domain-containing protein [Bruguiera
  misc_feature (1)..(202): Homolog of NCBI NO: 16588826 NR Description: dehydration-responsive protein RD22 [Prunus
  misc_feature (1)..(205): Homolog of NCBI NO: 15239478 NR Description: dehydration-induced protein RD22
  misc_feature (1)..(204): Homolog of NCBI NO: 24416614 NR Description: resistant specific protein-1(4) [Vigna radiata]
  misc_feature (1)..(202): Homolog of NCBI NO: 14422446 NR Description: BURP domain-containing protein [Bruguiera
  misc_feature (1)..(202): Homolog of NCBI NO: 14422442 NR Description: BURP domain-containing protein [Bruguiera

SEQ ID NO: 28104 - DNA, 1002 bp, Arabidopsis thaliana
  misc_feature (1)..(1002): Ceres Seq. ID no. 13622101
  misc_feature: MA Experiment ID: 108434 Result: Up-regulated in Transcription
  misc_feature: MA Experiment 108434 PARAMETER Experiment Name: At_Root_Tips_cDNA_P Parameter: Tissue Value: Root Tips
  misc_feature: MA Experiment ID: 108461 Result: Down-regulated in Transcription
  misc_feature: MA Experiment 108461 PARAMETER Experiment Name: At_Germinating_Seeds_cDNA_P Parameter: Age (day) Value: 1 vs. 0
  misc_feature: MA Experiment 108461 PARAMETER Experiment Name: At_Germinating_Seeds_cDNA_P Parameter: Tissue Value: Germinating Seeds
  misc_feature: MA Experiment ID: 108462 Result: Down-regulated in Transcription
  misc_feature: MA Experiment 108462 PARAMETER Experiment Name: At_Germinating_Seeds_cDNA_P Parameter: Age (day) Value: 2 vs. 0
  misc_feature: MA Experiment 108462 PARAMETER Experiment Name: At_Germinating_Seeds_cDNA_P Parameter: Tissue Value: Germinating Seeds
  misc_feature: MA Experiment ID: 108463 Result: Down-regulated in Transcription
  misc_feature: MA Experiment 108463 PARAMETER Experiment Name: At_Germinating_Seeds_cDNA_P Parameter: Age (day) Value: 3 vs. 0
  misc_feature: MA Experiment 108463 PARAMETER Experiment Name: At_Germinating_Seeds_cDNA_P Parameter: Tissue Value: Germinating Seeds
  misc_feature: MA Experiment ID: 108464 Result: Down-regulated in Transcription
  misc_feature: MA Experiment 108464 PARAMETER Experiment Name: At_Germinating_Seeds_cDNA_P Parameter: Age (day) Value: 4 vs. 0
  misc_feature: MA Experiment 108464 PARAMETER Experiment Name: At_Germinating_Seeds_cDNA_P Parameter: Tissue Value: Germinating Seeds
  misc_feature: MA Experiment ID: 108585 Result: Up-regulated in Transcription
  misc_feature: MA Experiment 108585 PARAMETER Experiment Name: At_5mM_NaNP_cDNA_P Parameter: Timepoint (hr) Value: 6
  misc_feature: MA Experiment 108585 PARAMETER Experiment Name: At_5mM_NaNP_cDNA_P Parameter: Tissue Value: Aerial
  misc_feature: MA Experiment 108585 PARAMETER Experiment Name: At_5mM_NaNP_cDNA_P Parameter: Treatment Value: null
  misc_feature: MA Experiment ID: 20000071 Result: Up-regulated in Transcription
  misc_feature: MA Experiment 20000071 PARAMETER Experiment Name: At_100uM_ABA_Mutants_cDNA_P Parameter: Plant Line Value: CS8104
  misc_feature: MA Experiment 20000071 PARAMETER Experiment Name: At_100uM_ABA_Mutants_cDNA_P Parameter: Timepoint (hr) Value: 6
  misc_feature: MA Experiment 20000071 PARAMETER Experiment Name: At_100uM_ABA_Mutants_cDNA_P Parameter: Tissue Value: Aerial
  misc_feature: MA Experiment 20000071 PARAMETER Experiment Name: At_100uM_ABA_Mutants_cDNA_P Parameter: Treatment Value: 100uM ABA vs. No Treatment
  misc_feature: MA Experiment ID: 20000088 Result: Up-regulated in Transcription
  misc_feature: MA Experiment 20000088 PARAMETER Experiment Name: At_100uM_ABA_Mutants_cDNA_P Parameter: Plant Line Value: Landsberg
  misc_feature: MA Experiment 20000088 PARAMETER Experiment Name: At_100uM_ABA_Mutants_cDNA_P Parameter: Timepoint (hr) Value: 6
  misc_feature: MA Experiment 20000088 PARAMETER Experiment Name: At_100uM_ABA_Mutants_cDNA_P Parameter: Tissue Value: Aerial
  misc_feature: MA Experiment 20000088 PARAMETER Experiment Name: At_100uM_ABA_Mutants_cDNA_P Parameter: Treatment Value: 100uM ABA vs. No Treatment
  misc_feature: MA Experiment ID: 20000111 Result: Down-regulated in Transcription
  misc_feature: MA Experiment 20000111 PARAMETER Experiment Name: At_42deg_Heat_cDNA_P Parameter: Temperature (deg C) Value: 42 vs. 22
  misc_feature: MA Experiment 20000111 PARAMETER Experiment Name: At_42deg_Heat_cDNA_P Parameter: Timepoint (hr) Value: 6
  misc_feature: MA Experiment 20000111 PARAMETER Experiment Name: At_42deg_Heat_cDNA_P Parameter: Tissue Value: Aerial
  misc_feature: MA Experiment ID: 20000173 Result: Down-regulated in Transcription
  misc_feature: MA Experiment 20000173 PARAMETER Experiment Name: At_42deg_Heat_P Parameter: Age (day) Value: 14
  misc_feature: MA Experiment 20000173 PARAMETER Experiment Name: At_42deg_Heat_P Parameter: Organism Value: A. thaliana
  misc_feature: MA Experiment 20000173 PARAMETER Experiment Name: At_42deg_Heat_P Parameter: Plant Line Value: WS
  misc_feature: MA Experiment 20000173 PARAMETER Experiment Name: At_42deg_Heat_P Parameter: Temperature (deg C) Value: 42 vs. 22
  misc_feature: MA Experiment 20000173 PARAMETER Experiment Name: At_42deg_Heat_P Parameter: Timepoint (hr) Value: 6
  misc_feature: MA Experiment 20000173 PARAMETER Experiment Name: At_42deg_Heat_P Parameter: Tissue Value: Aerial
  misc_feature: MA Experiment ID: 20000179 Result: Down-regulated in Transcription
  misc_feature: MA Experiment 20000179 PARAMETER Experiment Name: At_Germinating_Seeds_P Parameter: Age (hr) Value: 6 vs. 0
  misc_feature: MA Experiment 20000179 PARAMETER Experiment Name: At_Germinating_Seeds_P Parameter: Tissue Value: Germinating Seeds
  misc_feature: MA Experiment ID: 20000180 Result: Down-regulated in Transcription
  misc_feature: MA Experiment 20000180 PARAMETER Experiment Name: At_Germinating_Seeds_P Parameter: Age (hr) Value: 24 vs. 0
  misc_feature: MA Experiment 20000180 PARAMETER Experiment Name: At_Germinating_Seeds_P Parameter: Tissue Value: Germinating Seeds
acttcaaccttctcttctctgcaagaaacctaaaagcctatttatttcacctctctctctctctctctgcaactaatcacttgttcgatctcgaagctgaagctaaagctttcgctaatttgcttaaggagctatgggagatagtcagtactcgttttctctcaccactttcagcccatctggtaagctggtgcagatagaacatgcccttacagctgttggatctggccaaacatctttagggattaaagcttctaatggagttgtcattgcaactgaaaagaagttgccttctattctggttgatgaagcatctgttcaaaaaattcagcatttgactcctaatattggagttgtttacagtggcatgggtcctgattttcgagttcttgttaggaagagtaggaaacaggctgagcaatatcttcgtctgtacaaagaacccatccctgttacccaacttgtaagggaaaccgctactgttatgcaagagtttactcaatcgggaggtgttaggcctttcggggtttccttgctggtggctggatatgatgacaagggtccacaattgtatcaggtggatccatctggctcttatttctcctggaaagcttcagccatggggaagaacgtttctaatgcaaaaaccttccttgagaaaaggtacacagaagacatggaacttgacgatgccattcacacagcgatactgacattgaaagaaggctttgagggagagatctcaagcaaaaatattgaaattggcaaaatcggtgctgacaaagttttcagggtactaacaccagcagagatcgatgattaccttgctgaagtcgagtaactcccagcatagtctagcaacaaagtttaagaccggaatttcgtggcatttacagtcttaaagagttgttttttctgtaaaactttggatctttaaatagtttgttgctgaacacaagctgagtgtctctcaataactaatgaaatctgtttctttttttc

SEQ ID NO: 28105 - protein, 235 aa, Arabidopsis thaliana
  peptide (1)..(235): Ceres Seq. ID no. 13622102
  misc_feature (1)..(234): Homolog of NCBI NO: 4506181 NR Description: proteasome alpha 2 subunit
  misc_feature (1)..(234): Homolog of NCBI NO: 31241267 NR Description: ENSANGP00000011336 [Anopheles gambiae]
  misc_feature (1)..(234): Homolog of NCBI NO: 19168518 NR Description: PROSAg25 protein [Anopheles gambiae]
  misc_feature (1)..(234): Homolog of NCBI NO: 130852 NR Description: Proteasome subunit alpha type 2 (Proteasome C3) (Macropain subunit C3) (Multicatalytic endopeptidase complex
  misc_feature (1)..(234): Homolog of NCBI NO: 6093780 NR Description: Proteasome subunit alpha type 2
  misc_feature (1)..(235): Homolog of NCBI NO: 7435867 NR Description: hypothetical protein YUP8H12R.19 - Arabidopsis
  misc_feature (1)..(227): Homolog of NCBI NO: 7435868 NR Description: proteasome chain - rice
  misc_feature (1)..(235): Homolog of NCBI NO: 12229921 NR Description: Proteasome subunit alpha type 2 (20S proteasome
  misc_feature (1)..(235): Homolog of NCBI NO: 15219317 NR Description: 20S proteasome alpha subunit B, putative
  misc_feature (1)..(235): Homolog of NCBI NO: 15219257 NR Description: 20S proteasome alpha subunit B (PAB1)
MGDSQYSFSLTTFSPSGKLVQIEHALTAVGSGQTSLGIKASNGVVIATEKKLPSILVDEASVQKIQHLTPNIGVVYSGMGPDFRVLVRKSRKQAEQYLRLYKEPIPVTQLVRETATVMQEFTQSGGVRPFGVSLLVAGYDDKGPQLYQVDPSGSYFSWKASAMGKNVSNAKTFLEKRYTEDMELDDAIHTAILTLKEGFEGEISSKNIEIGKIGADKVFRVLTPAEIDDYLAEVE

SEQ ID NO: 28106 - protein, 157 aa, Arabidopsis thaliana
  peptide (1)..(157): Ceres Seq. ID no. 13622103
  misc_feature (1)..(156): Homolog of NCBI NO: 4506181 NR Description: proteasome alpha 2 subunit
  misc_feature (1)..(156): Homolog of NCBI NO: 31241267 NR Description: ENSANGP00000011336 [Anopheles gambiae]
  misc_feature (1)..(156): Homolog of NCBI NO: 19168518 NR Description: PROSAg25 protein [Anopheles gambiae]
  misc_feature (1)..(156): Homolog of NCBI NO: 130852 NR Description: Proteasome subunit alpha type 2 (Proteasome C3) (Macropain subunit C3) (Multicatalytic endopeptidase complex
  misc_feature (1)..(156): Homolog of NCBI NO: 6093780 NR Description: Proteasome subunit alpha type 2
  misc_feature (1)..(157): Homolog of NCBI NO: 7435867 NR Description: hypothetical protein YUP8H12R.19 - Arabidopsis
  misc_feature (1)..(149): Homolog of NCBI NO: 7435868 NR Description: proteasome chain - rice
  misc_feature (1)..(157): Homolog of NCBI NO: 12229921 NR Description: Proteasome subunit alpha type 2 (20S proteasome
  misc_feature (1)..(157): Homolog of NCBI NO: 15219317 NR Description: 20S proteasome alpha subunit B, putative
  misc_feature (1)..(157): Homolog of NCBI NO: 15219257 NR Description: 20S proteasome alpha subunit B (PAB1)
MGPDFRVLVRKSRKQAEQYLRLYKEPIPVTQLVRETATVMQEFTQSGGVRPFGVSLLVAGYDDKGPQLYQVDPSGSYFSWKASAMGKNVSNAKTFLEKRYTEDMELDDAIHTAILTLKEGFEGEISSKNIEIGKIGADKVFRVLTPAEIDDYLAEVE

SEQ ID NO: 28107 - protein, 118 aa, Arabidopsis thaliana
  peptide (1)..(118): Ceres Seq. ID no. 13622104
  misc_feature (1)..(117): Homolog of NCBI NO: 4506181 NR Description: proteasome alpha 2 subunit
  misc_feature (1)..(117): Homolog of NCBI NO: 31241267 NR Description: ENSANGP00000011336 [Anopheles gambiae]
  misc_feature (1)..(117): Homolog of NCBI NO: 19168518 NR Description: PROSAg25 protein [Anopheles gambiae]
  misc_feature (1)..(117): Homolog of NCBI NO: 130852 NR Description: Proteasome subunit alpha type 2 (Proteasome C3) (Macropain subunit C3) (Multicatalytic endopeptidase complex
  misc_feature (1)..(117): Homolog of NCBI NO: 6093780 NR Description: Proteasome subunit alpha type 2
  misc_feature (1)..(118): Homolog of NCBI NO: 7435867 NR Description: hypothetical protein YUP8H12R.19 - Arabidopsis
  misc_feature (1)..(110): Homolog of NCBI NO: 7435868 NR Description: proteasome chain - rice
  misc_feature (1)..(118): Homolog of NCBI NO: 12229921 NR Description: Proteasome subunit alpha type 2 (20S proteasome
  misc_feature (1)..(118): Homolog of NCBI NO: 15219317 NR Description: 20S proteasome alpha subunit B, putative
  misc_feature (1)..(118): Homolog of NCBI NO: 15219257 NR Description: 20S proteasome alpha subunit B (PAB1)
MQEFTQSGGVRPFGVSLLVAGYDDKGPQLYQVDPSGSYFSWKASAMGKNVSNAKTFLEKRYTEDMELDDAIHTAILTLKEGFEGEISSKNIEIGKIGADKVFRVLTPAEIDDYLAEVE

SEQ ID NO: 28108 - DNA, 1326 bp, Arabidopsis thaliana
  misc_feature (1)..(1326): Ceres Seq. ID no. 13501426
  misc_feature: MA Experiment ID: 108434 Result: Up-regulated in Transcription
  misc_feature: MA Experiment 108434 PARAMETER Experiment Name: At_Root_Tips_cDNA_P Parameter: Tissue Value: Root Tips
  misc_feature: MA Experiment ID: 20000184 Result: Down-regulated in Transcription
  misc_feature: MA Experiment 20000184 PARAMETER Experiment Name: At_Shoots__P Parameter: Age (day) Value: 7
  misc_feature: MA Experiment 20000184 PARAMETER Experiment Name: At_Shoots__P Parameter: Tissue Value: Shoots vs. Whole Plant
  misc_feature: MA Experiment ID: 20000794 Result: Down-regulated in Transcription
  misc_feature: MA Experiment 20000794 PARAMETER Experiment Name: At_Petals_P Parameter: Age (day) Value: 23-25 days
  misc_feature: MA Experiment 20000794 PARAMETER Experiment Name: At_Petals_P Parameter: Plant Line Value: WS
  misc_feature: MA Experiment 20000794 PARAMETER Experiment Name: At_Petals_P Parameter: Tissue Value: Petals vs. Whole plant
  misc_feature: MA Experiment ID: 20001905 Result: Down-regulated in Transcription
  misc_feature: MA Experiment 20001905 PARAMETER Experiment Name: At_Drought_Reproduction_P Parameter: Age (day) Value: 40
  misc_feature: MA Experiment 20001905 PARAMETER Experiment Name: At_Drought_Reproduction_P Parameter: Organism Value: A. thaliana
  misc_feature: MA Experiment 20001905 PARAMETER Experiment Name: At_Drought_Reproduction_P Parameter: Plant Line Value: WS
  misc_feature: MA Experiment 20001905 PARAMETER Experiment Name: At_Drought_Reproduction_P Parameter: Timepoint (day) Value: 10
  misc_feature: MA Experiment 20001905 PARAMETER Experiment Name: At_Drought_Reproduction_P Parameter: Tissue Value: Rosettes
  misc_feature: MA Experiment 20001905 PARAMETER Experiment Name: At_Drought_Reproduction_P Parameter: Treatment Value: Drought vs. No Drought
agtctctctttcgagtctgcagctagcgtgaagacgatgaaatcgatgggaggagatagataagcgcgaatttgagagtgaaaattctaaattcagacccattttcaccggcgcgagtcatcgttgaaccatgtcttggcttcctgtagaatctgatcctggtattttcactgagattatacaacaaatgcaagtgaaaggtgtgcaggttgaggaattgtattccttggacttcaactctctggatgaaataagacctgtctatggattgatattgctttacaagtggcgtccagaagaaaaggagaatcgtgttgtcatcacagagccaaacccgaatttcttctttgcaagccagataatcaacaatgcttgtgcgacccaagcgatattatcagtcctcatgaactcttcgagtattgatattggctcagaactatcagaactgaaacaattcgccaaagaatttcctcctgaactgaaaggtttagccatcaacaacaatgaggcaatacgtgcagctcacaacacatttgccaggcctgacccgtcttccatcatggaagatgaagaattagctgctgcgaaaaatctagacgaagatgatgatgtgtatcattacatcagctacttacctgttgatggtatcttatatgagctcgatggtcttaaagaaggacccattagtcttggacagtgtctgggtgagccagaaggaatcgagtggctcagaatggtccaacctgtggtacaagagcagattgaccggtattcgcagaatgagattcggtttagtctcttagctgtagttaagaacaggaaagagatgtatgtagctgaactgaaagagtatcaaagaaagcgagagagggttttgcagcagttaggtgctttgcaagctgataaatacgctgagaaaagcagttacgaggctcttgatagagagctttcggaagtcaatatcgggatagagactgtttcacaaaagattgtaatggaggaggagaaatctaagaactggaagaaagagaacatgagaaggaaacacaactatgtccctttcctcttcaacttcctcaagattcttgctgacaagaagaagctgaaacctctcattgctaagcaccatccctaaatctgctttaccgggatgttaacttgatagaaatcagatgttttagtgatctgaatactgtggtggcgtggttatatgtagccaaactttaacttgatggaagtcagatgttttagcgatccttgattgtaattggtctgaggattatgttgaaccaaatctttttttttttttacttaattacatgttcc

SEQ ID NO: 28109 - protein, 334 aa, Arabidopsis thaliana
  peptide (1)..(334): Ceres Seq. ID no. 13501427
  misc_feature (3)..(287): Homolog of NCBI NO: 15930175 NR Description: Unknown (protein for MGC:9314) [Homo sapiens]
  misc_feature (3)..(301): Homolog of NCBI NO: 7706753 NR Description: ubiquitin C-terminal hydrolase UCH37
  misc_feature (259)..(329): Homolog of NCBI NO: 39587753 NR Description: Hypothetical protein CBG13346 [Caenorhabditis
  misc_feature (2)..(234): Homolog of NCBI NO: 39587753 NR Description: Hypothetical protein CBG13346 [Caenorhabditis
  misc_feature (3)..(331): Homolog of NCBI NO: 12314148 NR Description: bA101E13.3 (ubiquitin C-terminal hydrolase UCH37)
  misc_feature (3)..(331): Homolog of NCBI NO: 34880465 NR Description: similar to Ubiquitin carboxyl-terminal hydrolase L5 (UCH-L5) (Ubiquitin thiolesterase L5) (Ubiquitin C-terminal
  misc_feature (3)..(331): Homolog of NCBI NO: 6686411 NR Description: F1E22.3 [Arabidopsis thaliana]
  misc_feature (1)..(331): Homolog of NCBI NO: 15724238 NR Description: F5I14.29/F5I14.29 [Arabidopsis thaliana]
  misc_feature (1)..(331): Homolog of NCBI NO: 18408331 NR Description: expressed protein [Arabidopsis thaliana]
  misc_feature (1)..(334): Homolog of NCBI NO: 15237324 NR Description: ubiquitin C-terminal hydrolase-related protein
MSWLPVESDPGIFTEIIQQMQVKGVQVEELYSLDFNSLDEIRPVYGLILLYKWRPEEKENRVVITEPNPNFFFASQIINNACATQAILSVLMNSSSIDIGSELSELKQFAKEFPPELKGLAINNNEAIRAAHNTFARPDPSSIMEDEELAAAKNLDEDDDVYHYISYLPVDGILYELDGLKEGPISLGQCLGEPEGIEWLRMVQPVVQEQIDRYSQNEIRFSLLAVVKNRKEMYVAELKEYQRKRERVLQQLGALQADKYAEKSSYEALDRELSEVNIGIETVSQKIVMEEEKSKNWKKENMRRKHNYVPFLFNFLKILADKKKLKPLIAKHHP

SEQ ID NO: 28110 - protein, 315 aa, Arabidopsis thaliana
  peptide (1)..(315): Ceres Seq. ID no. 13501428
  misc_feature (1)..(268): Homolog of NCBI NO: 15930175 NR Description: Unknown (protein for MGC:9314) [Homo sapiens]
  misc_feature (1)..(282): Homolog of NCBI NO: 7706753 NR Description: ubiquitin C-terminal hydrolase UCH37
  misc_feature (240)..(310): Homolog of NCBI NO: 39587753 NR Description: Hypothetical protein CBG13346 [Caenorhabditis
  misc_feature (1)..(215): Homolog of NCBI NO: 39587753 NR Description: Hypothetical protein CBG13346 [Caenorhabditis
  misc_feature (1)..(312): Homolog of NCBI NO: 12314148 NR Description: bA101E13.3 (ubiquitin C-terminal hydrolase UCH37)
  misc_feature (1)..(312): Homolog of NCBI NO: 34880465 NR Description: similar to Ubiquitin carboxyl-terminal hydrolase L5 (UCH-L5) (Ubiquitin thiolesterase L5) (Ubiquitin C-terminal
  misc_feature (1)..(312): Homolog of NCBI NO: 6686411 NR Description: F1E22.3 [Arabidopsis thaliana]
  misc_feature (1)..(312): Homolog of NCBI NO: 15724238 NR Description: F5I14.29/F5I14.29 [Arabidopsis thaliana]
  misc_feature (1)..(312): Homolog of NCBI NO: 18408331 NR Description: expressed protein [Arabidopsis thaliana]
  misc_feature (1)..(315): Homolog of NCBI NO: 15237324 NR Description: ubiquitin C-terminal hydrolase-related protein
MQVKGVQVEELYSLDFNSLDEIRPVYGLILLYKWRPEEKENRVVITEPNPNFFFASQIINNACATQAILSVLMNSSSIDIGSELSELKQFAKEFPPELKGLAINNNEAIRAAHNTFARPDPSSIMEDEELAAAKNLDEDDDVYHYISYLPVDGILYELDGLKEGPISLGQCLGEPEGIEWLRMVQPVVQEQIDRYSQNEIRFSLLAVVKNRKEMYVAELKEYQRKRERVLQQLGALQADKYAEKSSYEALDRELSEVNIGIETVSQKIVMEEEKSKNWKKENMRRKHNYVPFLFNFLKILADKKKLKPLIAKHHP

SEQ ID NO: 28111 - protein, 243 aa, Arabidopsis thaliana
  peptide (1)..(243): Ceres Seq. ID no. 13501429
  misc_feature (1)..(196): Homolog of NCBI NO: 15930175 NR Description: Unknown (protein for MGC:9314) [Homo sapiens]
  misc_feature (1)..(210): Homolog of NCBI NO: 7706753 NR Description: ubiquitin C-terminal hydrolase UCH37
  misc_feature (168)..(238): Homolog of NCBI NO: 39587753 NR Description: Hypothetical protein CBG13346 [Caenorhabditis
  misc_feature (1)..(143): Homolog of NCBI NO: 39587753 NR Description: Hypothetical protein CBG13346 [Caenorhabditis
  misc_feature (1)..(240): Homolog of NCBI NO: 12314148 NR Description: bA101E13.3 (ubiquitin C-terminal hydrolase UCH37)
  misc_feature (1)..(240): Homolog of NCBI NO: 34880465 NR Description: similar to Ubiquitin carboxyl-terminal hydrolase L5 (UCH-L5) (Ubiquitin thiolesterase L5) (Ubiquitin C-terminal
  misc_feature (1)..(240): Homolog of NCBI NO: 6686411 NR Description: F1E22.3 [Arabidopsis thaliana]
  misc_feature (1)..(240): Homolog of NCBI NO: 15724238 NR Description: F5I14.29/F5I14.29 [Arabidopsis thaliana]
  misc_feature (1)..(240): Homolog of NCBI NO: 18408331 NR Description: expressed protein [Arabidopsis thaliana]
  misc_feature (1)..(243): Homolog of NCBI NO: 15237324 NR Description: ubiquitin C-terminal hydrolase-related protein
MNSSSIDIGSELSELKQFAKEFPPELKGLAINNNEAIRAAHNTFARPDPSSIMEDEELAAAKNLDEDDDVYHYISYLPVDGILYELDGLKEGPISLGQCLGEPEGIEWLRMVQPVVQEQIDRYSQNEIRFSLLAVVKNRKEMYVAELKEYQRKRERVLQQLGALQADKYAEKSSYEALDRELSEVNIGIETVSQKIVMEEEKSKNWKKENMRRKHNYVPFLFNFLKILADKKKLKPLIAKHHP

SEQ ID NO: 28112 - DNA, 1160 bp, Arabidopsis thaliana
  misc_feature (1)..(1160): Ceres Seq. ID no. 12333821
  misc_feature: MA Experiment ID: 108434 Result: Down-regulated in Transcription
  misc_feature: MA Experiment 108434 PARAMETER Experiment Name: At_Root_Tips_cDNA_P Parameter: Tissue Value: Root Tips
  misc_feature: MA Experiment ID: 108488 Result: Up-regulated in Transcription
  misc_feature: MA Experiment ID: 108569 Result: Up-regulated in Transcription
  misc_feature: MA Experiment 108569 PARAMETER Experiment Name: At_0.001%_MeJA__cDNA_P Parameter: Timepoint (hr) Value: 6
  misc_feature: MA Experiment 108569 PARAMETER Experiment Name: At_0.001%_MeJA__cDNA_P Parameter: Tissue Value: Aerial
  misc_feature: MA Experiment 108569 PARAMETER Experiment Name: At_0.001%_MeJA__cDNA_P Parameter: Treatment Value: 0.001% MeJA vs. No Treatment
  misc_feature: MA Experiment ID: 108573 Result: Down-regulated in Transcription
  misc_feature: MA Experiment 108573 PARAMETER Experiment Name: At_Drought_cDNA_P Parameter: Timepoint (hr) Value: 6
  misc_feature: MA Experiment 108573 PARAMETER Experiment Name: At_Drought_cDNA_P Parameter: Tissue Value: Aerial
  misc_feature: MA Experiment 108573 PARAMETER Experiment Name: At_Drought_cDNA_P Parameter: Treatment Value: Drought vs. No Drought
  misc_feature: MA Experiment ID: 108574 Result: Up-regulated in Transcription
  misc_feature: MA Experiment 108574 PARAMETER Experiment Name: At_Wounding__cDNA_P Parameter: Timepoint (hr) Value: 1
  misc_feature: MA Experiment 108574 PARAMETER Experiment Name: At_Wounding__cDNA_P Parameter: Tissue Value: Aerial
  misc_feature: MA Experiment 108574 PARAMETER Experiment Name: At_Wounding__cDNA_P Parameter: Treatment Value: Wounding vs. No Wounding
  misc_feature: MA Experiment ID: 108576 Result: Down-regulated in Transcription
  misc_feature: MA Experiment 108576 PARAMETER Experiment Name: At_42deg_Heat_cDNA_P Parameter: Temperature (deg C) Value: 42 vs. 22
  misc_feature: MA Experiment 108576 PARAMETER Experiment Name: At_42deg_Heat_cDNA_P Parameter: Timepoint (hr) Value: 1
  misc_feature: MA Experiment 108576 PARAMETER Experiment Name: At_42deg_Heat_cDNA_P Parameter: Tissue Value: Aerial
  misc_feature: MA Experiment ID: 108595 Result: Down-regulated in Transcription
  misc_feature: MA Experiment 108595 PARAMETER Experiment Name: At_Ler-pi_Ovule_cDNA_P Parameter: Plant Line Value: null
  misc_feature: MA Experiment ID: 20000090 Result: Down-regulated in Transcription
  misc_feature: MA Experiment ID: 20000093 Result: Down-regulated in Transcription
  misc_feature: MA Experiment 20000093 PARAMETER Experiment Name: At_42deg_Heat_cDNA_P Parameter: Temperature (deg C) Value: 42 vs. 22
  misc_feature: MA Experiment 20000093 PARAMETER Experiment Name: At_42deg_Heat_cDNA_P Parameter: Timepoint (hr) Value: 0.5
  misc_feature: MA Experiment 20000093 PARAMETER Experiment Name: At_42deg_Heat_cDNA_P Parameter: Tissue Value: Aerial
  misc_feature: MA Experiment ID: 20000111 Result: Down-regulated in Transcription
  misc_feature: MA Experiment 20000111 PARAMETER Experiment Name: At_42deg_Heat_cDNA_P Parameter: Temperature (deg C) Value: 42 vs. 22
  misc_feature: MA Experiment 20000111 PARAMETER Experiment Name: At_42deg_Heat_cDNA_P Parameter: Timepoint (hr) Value: 6
  misc_feature: MA Experiment 20000111 PARAMETER Experiment Name: At_42deg_Heat_cDNA_P Parameter: Tissue Value: Aerial
  misc_feature: MA Experiment ID: 20000112 Result: Down-regulated in Transcription
  misc_feature: MA Experiment 20000112 PARAMETER Experiment Name: At_42deg_Heat_cDNA_P Parameter: Temperature (deg C) Value: 42 vs. 22
  misc_feature: MA Experiment 20000112 PARAMETER Experiment Name: At_42deg_Heat_cDNA_P Parameter: Timepoint (hr) Value: 2
  misc_feature: MA Experiment 20000112 PARAMETER Experiment Name: At_42deg_Heat_cDNA_P Parameter: Tissue Value: Aerial
  misc_feature: MA Experiment ID: 20000113 Result: Down-regulated in Transcription
  misc_feature: MA Experiment 20000113 PARAMETER Experiment Name: At_42deg_Heat_cDNA_P Parameter: Temperature (deg C) Value: 42 vs. 22
  misc_feature: MA Experiment 20000113 PARAMETER Experiment Name: At_42deg_Heat_cDNA_P Parameter: Timepoint (hr) Value: 8
  misc_feature: MA Experiment 20000113 PARAMETER Experiment Name: At_42deg_Heat_cDNA_P Parameter: Tissue Value: Aerial
  misc_feature: MA Experiment ID: 20000144 Result: Down-regulated in Transcription
  misc_feature: MA Experiment 20000144 PARAMETER Experiment Name: At_42deg_Heat_cDNA_P Parameter: Temperature (deg C) Value: 42 vs. 22
  misc_feature: MA Experiment 20000144 PARAMETER Experiment Name: At_42deg_Heat_cDNA_P Parameter: Timepoint (hr) Value: 1
  misc_feature: MA Experiment 20000144 PARAMETER Experiment Name: At_42deg_Heat_cDNA_P Parameter: Tissue Value: Aerial
  misc_feature: MA Experiment ID: 20000171 Result: Down-regulated in Transcription
  misc_feature: MA Experiment 20000171 PARAMETER Experiment Name: At_42deg_Heat_P Parameter: Age (day) Value: 14
  misc_feature: MA Experiment 20000171 PARAMETER Experiment Name: At_42deg_Heat_P Parameter: Organism Value: A. thaliana
  misc_feature: MA Experiment 20000171 PARAMETER Experiment Name: At_42deg_Heat_P Parameter: Plant Line Value: WS
  misc_feature: MA Experiment 20000171 PARAMETER Experiment Name: At_42deg_Heat_P Parameter: Temperature (deg C) Value: 42 vs. 22
  misc_feature: MA Experiment 20000171 PARAMETER Experiment Name: At_42deg_Heat_P Parameter: Timepoint (hr) Value: 1
  misc_feature: MA Experiment 20000171 PARAMETER Experiment Name: At_42deg_Heat_P Parameter: Tissue Value: Aerial
  misc_feature: MA Experiment ID: 20000173 Result: Down-regulated in Transcription
  misc_feature: MA Experiment 20000173 PARAMETER Experiment Name: At_42deg_Heat_P Parameter: Age (day) Value: 14
  misc_feature: MA Experiment 20000173 PARAMETER Experiment Name: At_42deg_Heat_P Parameter: Organism Value: A. thaliana
  misc_feature: MA Experiment 20000173 PARAMETER Experiment Name: At_42deg_Heat_P Parameter: Plant Line Value: WS
  misc_feature: MA Experiment 20000173 PARAMETER Experiment Name: At_42deg_Heat_P Parameter: Temperature (deg C) Value: 42 vs. 22
  misc_feature: MA Experiment 20000173 PARAMETER Experiment Name: At_42deg_Heat_P Parameter: Timepoint (hr) Value: 6
  misc_feature: MA Experiment 20000173 PARAMETER Experiment Name: At_42deg_Heat_P Parameter: Tissue Value: Aerial
  misc_feature: MA Experiment ID: 20000180 Result: Up-regulated in Transcription
  misc_feature: MA Experiment 20000180 PARAMETER Experiment Name: At_Germinating_Seeds_P Parameter: Age (hr) Value: 24 vs. 0
  misc_feature: MA Experiment 20000180 PARAMETER Experiment Name: At_Germinating_Seeds_P Parameter: Tissue Value: Germinating Seeds
  misc_feature: MA Experiment ID: 20000182 Result: Down-regulated in Transcription
  misc_feature: MA Experiment 20000182 PARAMETER Experiment Name: At_2mM_SA_P Parameter: Age (day) Value: 14
  misc_feature: MA Experiment 20000182 PARAMETER Experiment Name: At_2mM_SA_P Parameter: Organism Value: A. thaliana
  misc_feature: MA Experiment 20000182 PARAMETER Experiment Name: At_2mM_SA_P Parameter: Plant Line Value: WS
  misc_feature: MA Experiment 20000182 PARAMETER Experiment Name: At_2mM_SA_P Parameter: Timepoint (hr) Value: 6
  misc_feature: MA Experiment 20000182 PARAMETER Experiment Name: At_2mM_SA_P Parameter: Tissue Value: Aerial
  misc_feature: MA Experiment 20000182 PARAMETER Experiment Name: At_2mM_SA_P Parameter: Treatment Value: 2mM SA vs. No Treatment
  misc_feature: MA Experiment ID: 20000184 Result: Down-regulated in Transcription
  misc_feature: MA Experiment 20000184 PARAMETER Experiment Name: At_Shoots__P Parameter: Age (day) Value: 7
  misc_feature: MA Experiment 20000184 PARAMETER Experiment Name: At_Shoots__P Parameter: Tissue Value: Shoots vs. Whole Plant
  misc_feature: MA Experiment ID: 20000185 Result: Down-regulated in Transcription
  misc_feature: MA Experiment 20000185 PARAMETER Experiment Name: At_Roots__P Parameter: Age (day) Value: 7 vs. 21
  misc_feature: MA Experiment 20000185 PARAMETER Experiment Name: At_Roots__P Parameter: Organism Value: A. thaliana
  misc_feature: MA Experiment 20000185 PARAMETER Experiment Name: At_Roots__P Parameter: Tissue Value: Roots vs. Whole Plant
  misc_feature: MA Experiment ID: 20000211 Result: Up-regulated in Transcription
  misc_feature: MA Experiment 20000211 PARAMETER Experiment Name: At_0.001percent_MeJA__P Parameter: Age (day) Value: 14
  misc_feature: MA Experiment 20000211 PARAMETER Experiment Name: At_0.001percent_MeJA__P Parameter: Organism Value: A. thaliana
  misc_feature: MA Experiment 20000211 PARAMETER Experiment Name: At_0.001percent_MeJA__P Parameter: Plant Line Value: WS
  misc_feature: MA Experiment 20000211 PARAMETER Experiment Name: At_0.001percent_MeJA__P Parameter: Timepoint (hr) Value: 1
  misc_feature: MA Experiment 20000211 PARAMETER Experiment Name: At_0.001percent_MeJA__P Parameter: Tissue Value: Aerial
  misc_feature: MA Experiment 20000211 PARAMETER Experiment Name: At_0.001percent_MeJA__P Parameter: Treatment Value: 0.001percent MeJA vs. No Treatment
  misc_feature: MA Experiment ID: 20000224 Result: Up-regulated in Transcription
  misc_feature: MA Experiment ID: 20000227 Result: Down-regulated in Transcription
  misc_feature: MA Experiment 20000227 PARAMETER Experiment Name: At_Root-Tips-vs-Tops_P Parameter: Tissue Value: Root Tips vs. Root Tops
  misc_feature: MA Experiment ID: 20000234 Result: Down-regulated in Transcription
  misc_feature: MA Experiment 20000234 PARAMETER Experiment Name: At_Siliques_P Parameter: Age (day) Value: 21
  misc_feature: MA Experiment 20000234 PARAMETER Experiment Name: At_Siliques_P Parameter: Organism Value: A. thaliana
  misc_feature: MA Experiment 20000234 PARAMETER Experiment Name: At_Siliques_P Parameter: Plant Line Value: WS
  misc_feature: MA Experiment 20000234 PARAMETER Experiment Name: At_Siliques_P Parameter: Tissue Value: Less Than 5mm Siliques vs. Whole Plant
  misc_feature: MA Experiment ID: 20000235 Result: Down-regulated in Transcription
  misc_feature: MA Experiment 20000235 PARAMETER Experiment Name: At_Siliques_P Parameter: Age (day) Value: 21
  misc_feature: MA Experiment 20000235 PARAMETER Experiment Name: At_Siliques_P Parameter: Organism Value: A. thaliana
  misc_feature: MA Experiment 20000235 PARAMETER Experiment Name: At_Siliques_P Parameter: Plant Line Value: WS
  misc_feature: MA Experiment 20000235 PARAMETER Experiment Name: At_Siliques_P Parameter: Tissue Value: 5-10mm Siliques vs. Whole Plant
  misc_feature: MA Experiment ID: 20000264 Result: Down-regulated in Transcription
  misc_feature: MA Experiment 20000264 PARAMETER Experiment Name: At_Open_Flower_P Parameter: Age (day) Value: 21
  misc_feature: MA Experiment 20000264 PARAMETER Experiment Name: At_Open_Flower_P Parameter: Plant Line Value: WS
  misc_feature: MA Experiment 20000264 PARAMETER Experiment Name: At_Open_Flower_P Parameter: Tissue Value: Open Flower vs. Whole Plant
  misc_feature: MA Experiment ID: 20000265 Result: Down-regulated in Transcription
  misc_feature: MA Experiment 20000265 PARAMETER Experiment Name: At_Open_Flower_P Parameter: Age (day) Value: 21
  misc_feature: MA Experiment 20000265 PARAMETER Experiment Name: At_Open_Flower_P Parameter: Plant Line Value: WS
  misc_feature: MA Experiment 20000265 PARAMETER Experiment Name: At_Open_Flower_P Parameter: Tissue Value: Closed Flower vs. Whole Plant
  misc_feature: MA Experiment ID: 20000286 Result: Down-regulated in Transcription
  misc_feature: MA Experiment 20000286 PARAMETER Experiment Name: At_Open_Flower_P Parameter: Age (day) Value: 21
  misc_feature: MA Experiment 20000286 PARAMETER Experiment Name: At_Open_Flower_P Parameter: Plant Line Value: WS
  misc_feature: MA Experiment 20000286 PARAMETER Experiment Name: At_Open_Flower_P Parameter: Tissue Value: Half Open vs. Whole Plant
  misc_feature: MA Experiment ID: 20000436 Result: Down-regulated in Transcription
  misc_feature: MA Experiment 20000436 PARAMETER Experiment Name: At_Drought_P Parameter: Age (day) Value: 7
  misc_feature: MA Experiment 20000436 PARAMETER Experiment Name: At_Drought_P Parameter: Organism Value: A. thaliana
  misc_feature: MA Experiment 20000436 PARAMETER Experiment Name: At_Drought_P Parameter: Plant Line Value: WS
  misc_feature: MA Experiment 20000436 PARAMETER Experiment Name: At_Drought_P Parameter: Timepoint (hr) Value: 12
  misc_feature: MA Experiment 20000436 PARAMETER Experiment Name: At_Drought_P Parameter: Tissue Value: Whole Plant
  misc_feature: MA Experiment 20000436 PARAMETER Experiment Name: At_Drought_P Parameter: Treatment Value: Drought vs. No Drought
  misc_feature: MA Experiment ID: 20000437 Result: Down-regulated in Transcription
  misc_feature: MA Experiment 20000437 PARAMETER Experiment Name: At_Drought_P Parameter: Age (day) Value: 8
  misc_feature: MA Experiment 20000437 PARAMETER Experiment Name: At_Drought_P Parameter: Organism Value: A. thaliana
  misc_feature: MA Experiment 20000437 PARAMETER Experiment Name: At_Drought_P Parameter: Plant Line Value: WS
  misc_feature: MA Experiment 20000437 PARAMETER Experiment Name: At_Drought_P Parameter: Timepoint (hr) Value: 24
  misc_feature: MA Experiment 20000437 PARAMETER Experiment Name: At_Drought_P Parameter: Tissue Value: Whole Plant
  misc_feature: MA Experiment 20000437 PARAMETER Experiment Name: At_Drought_P Parameter: Treatment Value: Drought vs. No Drought
  misc_feature: MA Experiment ID: 20000445 Result: Down-regulated in Transcription
  misc_feature: MA Experiment 20000445 PARAMETER Experiment Name: At_100uM_NAA__P Parameter: Age (day) Value: 14
  misc_feature: MA Experiment 20000445 PARAMETER Experiment Name: At_100uM_NAA__P Parameter: Organism Value: A. thaliana
  misc_feature: MA Experiment 20000445 PARAMETER Experiment Name: At_100uM_NAA__P Parameter: Plant Line Value: WS
  misc_feature: MA Experiment 20000445 PARAMETER Experiment Name: At_100uM_NAA__P Parameter: Timepoint (hr) Value: 6
  misc_feature: MA Experiment 20000445 PARAMETER Experiment Name: At_100uM_NAA__P Parameter: Tissue Value: Aerial
  misc_feature: MA Experiment 20000445 PARAMETER Experiment Name: At_100uM_NAA__P Parameter: Treatment Value: 100uM NAA vs. No Treatment
  misc_feature: MA Experiment ID: 20000451 Result: Up-regulated in Transcription
  misc_feature: MA Experiment 20000451 PARAMETER Experiment Name: At_CS6879_Shoots-Roots_P Parameter: Age (day) Value: 14
  misc_feature: MA Experiment 20000451 PARAMETER Experiment Name: At_CS6879_Shoots-Roots_P Parameter: Organism Value: A. thaliana
  misc_feature: MA Experiment 20000451 PARAMETER Experiment Name: At_CS6879_Shoots-Roots_P Parameter: Plant Line Value: CS6879 vs. WS
  misc_feature: MA Experiment 20000451 PARAMETER Experiment Name: At_CS6879_Shoots-Roots_P Parameter: Tissue Value: Roots
  misc_feature: MA Experiment ID: 20000794 Result: Down-regulated in Transcription
  misc_feature: MA Experiment 20000794 PARAMETER Experiment Name: At_Petals_P Parameter: Age (day) Value: 23-25 days
  misc_feature: MA Experiment 20000794 PARAMETER Experiment Name: At_Petals_P Parameter: Plant Line Value: WS
  misc_feature: MA Experiment 20000794 PARAMETER Experiment Name: At_Petals_P Parameter: Tissue Value: Petals vs. Whole plant
  misc_feature: MA Experiment ID: 20001248 Result: Down-regulated in Transcription
  misc_feature: MA Experiment 20001248 PARAMETER Experiment Name: At_Far-red-induction_P Parameter: Age (day) Value: 7
  misc_feature: MA Experiment 20001248 PARAMETER Experiment Name: At_Far-red-induction_P Parameter: Light Value: Far-red vs. White
  misc_feature: MA Experiment 20001248 PARAMETER Experiment Name: At_Far-red-induction_P Parameter: Organism Value: A. thaliana
  misc_feature: MA Experiment 20001248 PARAMETER Experiment Name: At_Far-red-induction_P Parameter: Plant Line Value: Columbia
  misc_feature: MA Experiment 20001248 PARAMETER Experiment Name: At_Far-red-induction_P Parameter: Timepoint (hr) Value: 4
  misc_feature: MA Experiment 20001248 PARAMETER Experiment Name: At_Far-red-induction_P Parameter: Tissue Value: Whole Plant
  misc_feature: MA Experiment ID: 20001450 Result: Down-regulated in Transcription
  misc_feature: MA Experiment 20001450 PARAMETER Experiment Name: At_Far-red-induction_P Parameter: Age (day) Value: 7
  misc_feature: MA Experiment 20001450 PARAMETER Experiment Name: At_Far-red-induction_P Parameter: Light Value: Far-red vs. White
  misc_feature: MA Experiment 20001450 PARAMETER Experiment Name: At_Far-red-induction_P Parameter: Organism Value: A. thaliana
  misc_feature: MA Experiment 20001450 PARAMETER Experiment Name: At_Far-red-induction_P Parameter: Plant Line Value: Columbia
  misc_feature: MA Experiment 20001450 PARAMETER Experiment Name: At_Far-red-induction_P Parameter: Timepoint (hr) Value: 8
  misc_feature: MA Experiment 20001450 PARAMETER Experiment Name: At_Far-red-induction_P Parameter: Tissue Value: Whole Plant
  misc_feature: MA Experiment ID: 20001451 Result: Down-regulated in Transcription
  misc_feature: MA Experiment 20001451 PARAMETER Experiment Name: At_Far-red-induction_P Parameter: Age (day) Value: 7
  misc_feature: MA Experiment 20001451 PARAMETER Experiment Name: At_Far-red-induction_P Parameter: Light Value: Far-red vs. White
  misc_feature: MA Experiment 20001451 PARAMETER Experiment Name: At_Far-red-induction_P Parameter: Organism Value: A. thaliana
  misc_feature: MA Experiment 20001451 PARAMETER Experiment Name: At_Far-red-induction_P Parameter: Plant Line Value: Columbia
  misc_feature: MA Experiment 20001451 PARAMETER Experiment Name: At_Far-red-induction_P Parameter: Timepoint (hr) Value: 24
  misc_feature: MA Experiment 20001451 PARAMETER Experiment Name: At_Far-red-induction_P Parameter: Tissue Value: Whole Plant
  misc_feature: MA Experiment ID: 20001457 Result: Down-regulated in Transcription
  misc_feature: MA Experiment 20001457 PARAMETER Experiment Name: At_50mM_NH4NO3_L-to-H_P Parameter: Age (day) Value: Undefined
  misc_feature: MA Experiment 20001457 PARAMETER Experiment Name: At_50mM_NH4NO3_L-to-H_P Parameter: Organism Value: Undefined
  misc_feature: MA Experiment 20001457 PARAMETER Experiment Name: At_50mM_NH4NO3_L-to-H_P Parameter: Plant Line Value: Undefined
  misc_feature: MA Experiment 20001457 PARAMETER Experiment Name: At_50mM_NH4NO3_L-to-H_P Parameter: Timepoint (hr) Value: 0.5
  misc_feature: MA Experiment 20001457 PARAMETER Experiment Name: At_50mM_NH4NO3_L-to-H_P Parameter: Tissue Value: Siliques
  misc_feature: MA Experiment 20001457 PARAMETER Experiment Name: At_50mM_NH4NO3_L-to-H_P Parameter: Treatment Value: 50mM NH4NO3 vs. 100mM Manitol
  misc_feature: MA Experiment ID: 20001560 Result: Up-regulated in Transcription
  misc_feature: MA Experiment 20001560 PARAMETER Experiment Name: At_Drought_Soil_Dry_P Parameter: Age (day) Value: 28
  misc_feature: MA Experiment 20001560 PARAMETER Experiment Name: At_Drought_Soil_Dry_P Parameter: Organism Value: A. thaliana
  misc_feature: MA Experiment 20001560 PARAMETER Experiment Name: At_Drought_Soil_Dry_P Parameter: Plant Line Value: WS
  misc_feature: MA Experiment 20001560 PARAMETER Experiment Name: At_Drought_Soil_Dry_P Parameter: Post Timepoint (hr) Value: None
  misc_feature: MA Experiment 20001560 PARAMETER Experiment Name: At_Drought_Soil_Dry_P Parameter: Post-Treatment Value: None
  misc_feature: MA Experiment 20001560 PARAMETER Experiment Name: At_Drought_Soil_Dry_P Parameter: Timepoint (day) Value: 14
  misc_feature: MA Experiment 20001560 PARAMETER Experiment Name: At_Drought_Soil_Dry_P Parameter: Treatment Value: Drought vs. No Drought
  misc_feature: MA Experiment ID: 20001906 Result: Up-regulated in Transcription
  misc_feature: MA Experiment 20001906 PARAMETER Experiment Name: At_Drought_Reproduction_P Parameter: Age (day) Value: 35
  misc_feature: MA Experiment 20001906 PARAMETER Experiment Name: At_Drought_Reproduction_P Parameter: Organism Value: A. thaliana
  misc_feature: MA Experiment 20001906 PARAMETER Experiment Name: At_Drought_Reproduction_P Parameter: Plant Line Value: WS
  misc_feature: MA Experiment 20001906 PARAMETER Experiment Name: At_Drought_Reproduction_P Parameter: Timepoint (day) Value: 5
  misc_feature: MA Experiment 20001906 PARAMETER Experiment Name: At_Drought_Reproduction_P Parameter: Tissue Value: Siliques
  misc_feature: MA Experiment 20001906 PARAMETER Experiment Name: At_Drought_Reproduction_P Parameter: Treatment Value: Drought vs. No Drought
aatcaacgagtattaatctcttcattacatagccaaaaagaaaacactctctataatggaatccaaaaccataaacgacgtcgtcgtatcagagtcaaatcacgagttagcatcttcgtcgccatcagaatttgagaagaaccagaaacattaccaagaaatcatcgcaactcttcctcacaaagatggctggagaccaaaagatccgttcgttgagtacggtggtcactggtggctacaacctcttcttgaaggtttacttcacgcccagaagttcttcaaggcacgtcccaatgatttcttcgtctgcagctacccaaaaaccggcacgacttggctcaaagccttaactttcgcaatcgcaaatcgctccaagttcgacgtttcaacaaaccctcttctcaaacgtaatccacacgagtttgtgccttacatcgaaatcgacttcccgtttttcccaagcgttgatgttcttaaagacgaaggaaacacgcttttctcgactcatatcccttatgatctcttacctgaatcagttgtgaaatctggttgcaagattgtttacatatggagagacccaaaggacacgtttgtgtcgatgtggacttttgctcacaaggagagatcacaacaaggaccagtgggtattggaaagcttaccaagcaaacccggatcagattttgtttctcaagtatgagacaatgagagctgatccattgccttatgtgaagagattagctgagtttataggttatgggttcacgaaggaggaagaggagggaaatgttgttgagaaagtagtgaagctttgtagctttgagactttgaagaatcttgaagctaacaaaggtgagaaagatagagaagatcgtcctgctgtttatgccaacagtgcgtatttcaggaaagggaaagttggggattggcagaattatctgactccggagatggtggctcgtattgatggtttgatggaagagaagtttaaaggaactggctttctttcttcaaaatcatgaatgtgatcttcttttgtcttgttttcgagctatgaatgtctgattcttctgatccttttgctggttatagcataagttgcttttgtttactagtatactctccattggaggaatatgtggtgaactgctgtattgttgct

SEQ ID NO: 28113 - protein, 216 aa, Arabidopsis thaliana
  peptide (1)..(216): Ceres Seq. ID no. 12333822
  misc_feature (79)..(196): Pfam Name: Sulfotransferase domain Pfam Description: Sulfotransferase domain
  misc_feature (34)..(185): Homolog of NCBI NO: 4321096 NR Description: flavonol 3-sulfotransferase [Flaveria
  misc_feature (34)..(185): Homolog of NCBI NO: 1706738 NR Description: FLAVONOL 3-SULFOTRANSFERASE (F3-ST)
  misc_feature (34)..(185): Homolog of NCBI NO: 1706918 NR Description: FLAVONOL SULFOTRANSFERASE-LIKE
  misc_feature (25)..(188): Homolog of NCBI NO: 285286 NR Description: flavonol 4'-sulfotransferase - Flaveria
  misc_feature (25)..(188): Homolog of NCBI NO: 1706740 NR Description: FLAVONOL 4'-SULFOTRANSFERASE (F4-ST)
  misc_feature (1)..(194): Homolog of NCBI NO: 15221131 NR Description: putative flavonol sulfotransferase
  misc_feature (1)..(194): Homolog of NCBI NO: 21593087 NR Description: putative flavonol sulfotransferase [Arabidopsis
  misc_feature (1)..(196): Homolog of NCBI NO: 21593660 NR Description: putative flavonol sulfotransferase [Arabidopsis
  misc_feature (1)..(196): Homolog of NCBI NO: 15221130 NR Description: putative flavonol sulfotransferase
  misc_feature (1)..(196): Homolog of NCBI NO: 15221820 NR Description: flavonol 4'-sulfotransferase, putative; protein
MESKTINDVVVSESNHELASSSPSEFEKNQKHYQEIIATLPHKDGWRPKDPFVEYGGHWWLQPLLEGLLHAQKFFKARPNDFFVCSYPKTGTTWLKALTFAIANRSKFDVSTNPLLKRNPHEFVPYIEIDFPFFPSVDVLKDEGNTLFSTHIPYDLLPESVVKSGCKIVYIWRDPKDTFVSMWTFAHKERSQQGPVGIGKLTKQTRIRFCFSSMRQ

SEQ ID NO: 28114 - protein, 150 aa, Arabidopsis thaliana
  peptide (1)..(150): Ceres Seq. ID no. 12333823
  misc_feature (26)..(144): Pfam Name: Sulfotransferase domain Pfam Description: Sulfotransferase domain
  misc_feature (9)..(146): Homolog of NCBI NO: 4321096 NR Description: flavonol 3-sulfotransferase [Flaveria
  misc_feature (1)..(146): Homolog of NCBI NO: 1706738 NR Description: FLAVONOL 3-SULFOTRANSFERASE (F3-ST)
  misc_feature (16)..(146): Homolog of NCBI NO: 1706918 NR Description: FLAVONOL SULFOTRANSFERASE-LIKE
  misc_feature (26)..(146): Homolog of NCBI NO: 285286 NR Description: flavonol 4'-sulfotransferase - Flaveria
  misc_feature (26)..(146): Homolog of NCBI NO: 1706740 NR Description: FLAVONOL 4'-SULFOTRANSFERASE (F4-ST)
  misc_feature (26)..(146): Homolog of NCBI NO: 15221131 NR Description: putative flavonol sulfotransferase
  misc_feature (26)..(146): Homolog of NCBI NO: 21593087 NR Description: putative flavonol sulfotransferase [Arabidopsis
  misc_feature (1)..(146): Homolog of NCBI NO: 21593660 NR Description: putative flavonol sulfotransferase [Arabidopsis
  misc_feature (1)..(146): Homolog of NCBI NO: 15221130 NR Description: putative flavonol sulfotransferase
  misc_feature (26)..(150): Homolog of NCBI NO: 15221820 NR Description: flavonol 4'-sulfotransferase, putative; protein
MERPKGHVCVDVDFCSQGEITTRTSGYWKAYQANPDQILFLKYETMRADPLPYVKRLAEFIGYGFTKEEEEGNVVEKVVKLCSFETLKNLEANKGEKDREDRPAVYANSAYFRKGKVGDWQNYLTPEMVARIDGLMEEKFKGTGFLSSKS

SEQ ID NO: 28115 - DNA, 951 bp, Arabidopsis thaliana
  misc_feature (1)..(951): Ceres Seq. ID no. 12333817
  misc_feature: MA Experiment ID: 20000171 Result: Down-regulated in Transcription
  misc_feature: MA Experiment 20000171 PARAMETER Experiment Name: At_42deg_Heat_P Parameter: Age (day) Value: 14
  misc_feature: MA Experiment 20000171 PARAMETER Experiment Name: At_42deg_Heat_P Parameter: Organism Value: A. thaliana
  misc_feature: MA Experiment 20000171 PARAMETER Experiment Name: At_42deg_Heat_P Parameter: Plant Line Value: WS
  misc_feature: MA Experiment 20000171 PARAMETER Experiment Name: At_42deg_Heat_P Parameter: Temperature (deg C) Value: 42 vs. 22
  misc_feature: MA Experiment 20000171 PARAMETER Experiment Name: At_42deg_Heat_P Parameter: Timepoint (hr) Value: 1
  misc_feature: MA Experiment 20000171 PARAMETER Experiment Name: At_42deg_Heat_P Parameter: Tissue Value: Aerial
  misc_feature: MA Experiment ID: 20000179 Result: Up-regulated in Transcription
  misc_feature: MA Experiment 20000179 PARAMETER Experiment Name: At_Germinating_Seeds_P Parameter: Age (hr) Value: 6 vs. 0
  misc_feature: MA Experiment 20000179 PARAMETER Experiment Name: At_Germinating_Seeds_P Parameter: Tissue Value: Germinating Seeds
  misc_feature: MA Experiment ID: 20000180 Result: Up-regulated in Transcription
  misc_feature: MA Experiment 20000180 PARAMETER Experiment Name: At_Germinating_Seeds_P Parameter: Age (hr) Value: 24 vs. 0
  misc_feature: MA Experiment 20000180 PARAMETER Experiment Name: At_Germinating_Seeds_P Parameter: Tissue Value: Germinating Seeds
  misc_feature: MA Experiment ID: 20000185 Result: Down-regulated in Transcription
  misc_feature: MA Experiment 20000185 PARAMETER Experiment Name: At_Roots__P Parameter: Age (day) Value: 7 vs. 21
  misc_feature: MA Experiment 20000185 PARAMETER Experiment Name: At_Roots__P Parameter: Organism Value: A. thaliana
  misc_feature: MA Experiment 20000185 PARAMETER Experiment Name: At_Roots__P Parameter: Tissue Value: Roots vs. Whole Plant
  misc_feature: MA Experiment ID: 20000227 Result: Up-regulated in Transcription
  misc_feature: MA Experiment 20000227 PARAMETER Experiment Name: At_Root-Tips-vs-Tops_P Parameter: Tissue Value: Root Tips vs. Root Tops
  misc_feature: MA Experiment ID: 20000264 Result: Up-regulated in Transcription
  misc_feature: MA Experiment 20000264 PARAMETER Experiment Name: At_Open_Flower_P Parameter: Age (day) Value: 21
  misc_feature: MA Experiment 20000264 PARAMETER Experiment Name: At_Open_Flower_P Parameter: Plant Line Value: WS
  misc_feature: MA Experiment 20000264 PARAMETER Experiment Name: At_Open_Flower_P Parameter: Tissue Value: Open Flower vs. Whole Plant
  misc_feature: MA Experiment ID: 20000265 Result: Up-regulated in Transcription
  misc_feature: MA Experiment 20000265 PARAMETER Experiment Name: At_Open_Flower_P Parameter: Age (day) Value: 21
  misc_feature: MA Experiment 20000265 PARAMETER Experiment Name: At_Open_Flower_P Parameter: Plant Line Value: WS
  misc_feature: MA Experiment 20000265 PARAMETER Experiment Name: At_Open_Flower_P Parameter: Tissue Value: Closed Flower vs. Whole Plant
  misc_feature: MA Experiment ID: 20000286 Result: Up-regulated in Transcription
  misc_feature: MA Experiment 20000286 PARAMETER Experiment Name: At_Open_Flower_P Parameter: Age (day) Value: 21
  misc_feature: MA Experiment 20000286 PARAMETER Experiment Name: At_Open_Flower_P Parameter: Plant Line Value: WS
  misc_feature: MA Experiment 20000286 PARAMETER Experiment Name: At_Open_Flower_P Parameter: Tissue Value: Half Open vs. Whole Plant
  misc_feature: MA Experiment ID: 20000439 Result: Down-regulated in Transcription
  misc_feature: MA Experiment 20000439 PARAMETER Experiment Name: At_Roots__P Parameter: Age (day) Value: 14 vs. 21
  misc_feature: MA Experiment 20000439 PARAMETER Experiment Name: At_Roots__P Parameter: Organism Value: A. thaliana
  misc_feature: MA Experiment 20000439 PARAMETER Experiment Name: At_Roots__P Parameter: Tissue Value: Roots vs. Whole Plant
  misc_feature: MA Experiment ID: 20001555 Result: Up-regulated in Transcription
  misc_feature: MA Experiment 20001555 PARAMETER Experiment Name: At_Drought_Soil_Dry_P Parameter: Age (day) Value: 24
  misc_feature: MA Experiment 20001555 PARAMETER Experiment Name: At_Drought_Soil_Dry_P Parameter: Organism Value: A. thaliana
  misc_feature: MA Experiment 20001555 PARAMETER Experiment Name: At_Drought_Soil_Dry_P Parameter: Plant Line Value: WS
  misc_feature: MA Experiment 20001555 PARAMETER Experiment Name: At_Drought_Soil_Dry_P Parameter: Post Timepoint (hr) Value: None
  misc_feature: MA Experiment 20001555 PARAMETER Experiment Name: At_Drought_Soil_Dry_P Parameter: Post-Treatment Value: None
  misc_feature: MA Experiment 20001555 PARAMETER Experiment Name: At_Drought_Soil_Dry_P Parameter: Timepoint (day) Value: 10
  misc_feature: MA Experiment 20001555 PARAMETER Experiment Name: At_Drought_Soil_Dry_P Parameter: Treatment Value: Drought vs. No Drought
  misc_feature: MA Experiment ID: 20001556 Result: Up-regulated in Transcription
  misc_feature: MA Experiment 20001556 PARAMETER Experiment Name: At_Drought_Soil_Dry_P Parameter: Age (day) Value: 26
  misc_feature: MA Experiment 20001556 PARAMETER Experiment Name: At_Drought_Soil_Dry_P Parameter: Organism Value: A. thaliana
  misc_feature: MA Experiment 20001556 PARAMETER Experiment Name: At_Drought_Soil_Dry_P Parameter: Plant Line Value: WS
  misc_feature: MA Experiment 20001556 PARAMETER Experiment Name: At_Drought_Soil_Dry_P Parameter: Post Timepoint (hr) Value: None
  misc_feature: MA Experiment 20001556 PARAMETER Experiment Name: At_Drought_Soil_Dry_P Parameter: Post-Treatment Value: None
  misc_feature: MA Experiment 20001556 PARAMETER Experiment Name: At_Drought_Soil_Dry_P Parameter: Timepoint (day) Value: 12
  misc_feature: MA Experiment 20001556 PARAMETER Experiment Name: At_Drought_Soil_Dry_P Parameter: Treatment Value: Drought vs. No Drought
  misc_feature: MA Experiment ID: 20001559 Result: Up-regulated in Transcription
  misc_feature: MA Experiment 20001559 PARAMETER Experiment Name: At_Drought_Soil_Dry_P Parameter: Age (day) Value: 28
  misc_feature: MA Experiment 20001559 PARAMETER Experiment Name: At_Drought_Soil_Dry_P Parameter: Organism Value: A. thaliana
  misc_feature: MA Experiment 20001559 PARAMETER Experiment Name: At_Drought_Soil_Dry_P Parameter: Plant Line Value: WS
  misc_feature: MA Experiment 20001559 PARAMETER Experiment Name: At_Drought_Soil_Dry_P Parameter: Post Timepoint (hr) Value: 29
  misc_feature: MA Experiment 20001559 PARAMETER Experiment Name: At_Drought_Soil_Dry_P Parameter: Post-Treatment Value: Re-Water vs. No Drought
  misc_feature: MA Experiment 20001559 PARAMETER Experiment Name: At_Drought_Soil_Dry_P Parameter: Timepoint (day) Value: 14
  misc_feature: MA Experiment 20001559 PARAMETER Experiment Name: At_Drought_Soil_Dry_P Parameter: Treatment Value: Drought vs. No Drought
  misc_feature: MA Experiment ID: 20001904 Result: Up-regulated in Transcription
  misc_feature: MA Experiment 20001904 PARAMETER Experiment Name: At_Drought_Reproduction_P Parameter: Age (day) Value: 37
  misc_feature: MA Experiment 20001904 PARAMETER Experiment Name: At_Drought_Reproduction_P Parameter: Organism Value: A. thaliana
  misc_feature: MA Experiment 20001904 PARAMETER Experiment Name: At_Drought_Reproduction_P Parameter: Plant Line Value: WS
  misc_feature: MA Experiment 20001904 PARAMETER Experiment Name: At_Drought_Reproduction_P Parameter: Timepoint (day) Value: 7
  misc_feature: MA Experiment 20001904 PARAMETER Experiment Name: At_Drought_Reproduction_P Parameter: Tissue Value: Rosettes
  misc_feature: MA Experiment 20001904 PARAMETER Experiment Name: At_Drought_Reproduction_P Parameter: Treatment Value: Drought vs. No Drought
acattttcgagttttacaccaaagcctcttcactttctctctctctctctactatagtctcctactacctactactacttcttctctctctctttcattcactacataaaaagcttcgagctcccatcactatataccctccaaagatgcaattttcaagaaactcaatccttaggcaactaagccgaaaagaaggttggagatcggcttctaaaaggtggacttccggagatagctcaacagccttcaacgacgacacaagtggtggtggttgtggtggtggttactcatcaatggagggtctttatggagtttactccggtggagacacggcggcgagaagtaagagagtgatggttgtagttgatgaaagttcgaggtctaagcatgctatgatgtgggctttgactcatttgactaacaaaggagatttagtgactcttcttcatgttgtgtctcctgatgatgaagctactccttctttggctcaatctcttggttctctttgcaaagcttgtaaacccgaggtggatgtggaggcattggtgattcaaggaccaaagctagcaacagtgttaagccaagtaaagaaacttgaagtctctgttcttgtgttgggtcagaagaaatctgcaccactcatctcttgcttatgtggacctagcagatcagaggagctcgtgaatcgttgcatcaacggtgcagattgtttgacgattggtgtgagaaaacaatgcaaaggtgttggtgggtacttgatcaatacacgatggcagaagaatttctggctcttggcctaatcacaattctaatcttaatagataaattgtgttaattctgtgtttattgtagtttaataaactctatgtagtctctttgttgtcttatgttaacctaacttgtcttatatgtcttgtaagaaaaattaaagttgaatctttttatcccacc

SEQ ID NO: 28116 - protein, 265 aa, Arabidopsis thaliana
  peptide (1)..(265): Ceres Seq. ID no. 12333818
  misc_feature (113)..(242): Pfam Name: Universal stress protein family Pfam Description: Universal stress protein family
  misc_feature (118)..(209): Homolog of NCBI NO: 15227695 NR Description: unknown protein; protein id: At2g03720.1
  misc_feature (158)..(265): Homolog of NCBI NO: 15228516 NR Description: hypothetical protein; protein id: At3g03290.1
  misc_feature (84)..(213): Homolog of NCBI NO: 15237955 NR Description: putative protein; protein id: At5g17390.1
  misc_feature (158)..(265): Homolog of NCBI NO: 15237955 NR Description: putative protein; protein id: At5g17390.1
  misc_feature (155)..(265): Homolog of NCBI NO: 21592322 NR Description: unknown [Arabidopsis thaliana]
  misc_feature (155)..(265): Homolog of NCBI NO: 18409190 NR Description: expressed protein
  misc_feature (65)..(265): Homolog of NCBI NO: 34907308 NR Description: hypothetical protein~similar to Arabidopsis
  misc_feature (49)..(265): Homolog of NCBI NO: 15219439 NR Description: hypothetical protein
IFEFYTKASSLSLSLSTIVSYYLLLLLLSLFHSLHKKLRAPITIYPPKMQFSRNSILRQLSRKEGWRSASKRWTSGDSSTAFNDDTSGGGCGGGYSSMEGLYGVYSGGDTAARSKRVMVVVDESSRSKHAMMWALTHLTNKGDLVTLLHVVSPDDEATPSLAQSLGSLCKACKPEVDVEALVIQGPKLATVLSQVKKLEVSVLVLGQKKSAPLISCLCGPSRSEELVNRCINGADCLTIGVRKQCKGVGGYLINTRWQKNFWLLA

SEQ ID NO: 28117 - protein, 217 aa, Arabidopsis thaliana
  peptide (1)..(217): Ceres Seq. ID no. 12333819
  misc_feature (65)..(194): Pfam Name: Universal stress protein family Pfam Description: Universal stress protein family
  misc_feature (70)..(161): Homolog of NCBI NO: 15227695 NR Description: unknown protein; protein id: At2g03720.1
  misc_feature (110)..(217): Homolog of NCBI NO: 15228516 NR Description: hypothetical protein; protein id: At3g03290.1
  misc_feature (36)..(165): Homolog of NCBI NO: 15237955 NR Description: putative protein; protein id: At5g17390.1
  misc_feature (110)..(217): Homolog of NCBI NO: 15237955 NR Description: putative protein; protein id: At5g17390.1
  misc_feature (107)..(217): Homolog of NCBI NO: 21592322 NR Description: unknown [Arabidopsis thaliana]
  misc_feature (107)..(217): Homolog of NCBI NO: 18409190 NR Description: expressed protein
  misc_feature (17)..(217): Homolog of NCBI NO: 34907308 NR Description: hypothetical protein~similar to Arabidopsis
  misc_feature (1)..(217): Homolog of NCBI NO: 15219439 NR Description: hypothetical protein
MQFSRNSILRQLSRKEGWRSASKRWTSGDSSTAFNDDTSGGGCGGGYSSMEGLYGVYSGGDTAARSKRVMVVVDESSRSKHAMMWALTHLTNKGDLVTLLHVVSPDDEATPSLAQSLGSLCKACKPEVDVEALVIQGPKLATVLSQVKKLEVSVLVLGQKKSAPLISCLCGPSRSEELVNRCINGADCLTIGVRKQCKGVGGYLINTRWQKNFWLLA

SEQ ID NO: 28118 - protein, 168 aa, Arabidopsis thaliana
  peptide (1)..(168): Ceres Seq. ID no. 12333820
  misc_feature (16)..(145): Pfam Name: Universal stress protein family Pfam Description: Universal stress protein family
  misc_feature (21)..(112): Homolog of NCBI NO: 15227695 NR Description: unknown protein; protein id: At2g03720.1
  misc_feature (61)..(168): Homolog of NCBI NO: 15228516 NR Description: hypothetical protein; protein id: At3g03290.1
  misc_feature (1)..(116): Homolog of NCBI NO: 15237955 NR Description: putative protein; protein id: At5g17390.1
  misc_feature (61)..(168): Homolog of NCBI NO: 15237955 NR Description: putative protein; protein id: At5g17390.1
  misc_feature (58)..(168): Homolog of NCBI NO: 21592322 NR Description: unknown [Arabidopsis thaliana]
  misc_feature (58)..(168): Homolog of NCBI NO: 18409190 NR Description: expressed protein
  misc_feature (1)..(168): Homolog of NCBI NO: 34907308 NR Description: hypothetical protein~similar to Arabidopsis
  misc_feature (1)..(168): Homolog of NCBI NO: 15219439 NR Description: hypothetical protein
MEGLYGVYSGGDTAARSKRVMVVVDESSRSKHAMMWALTHLTNKGDLVTLLHVVSPDDEATPSLAQSLGSLCKACKPEVDVEALVIQGPKLATVLSQVKKLEVSVLVLGQKKSAPLISCLCGPSRSEELVNRCINGADCLTIGVRKQCKGVGGYLINTRWQKNFWLLA

SEQ ID NO: 28119 - DNA, 1058 bp, Arabidopsis thaliana
  misc_feature (1)..(1058): Ceres Seq. ID no. 12327410
  misc_feature: MA Experiment ID: 108434 Result: Down-regulated in Transcription
  misc_feature: MA Experiment 108434 PARAMETER Experiment Name: At_Root_Tips_cDNA_P Parameter: Tissue Value: Root Tips
  misc_feature: MA Experiment ID: 108488 Result: Down-regulated in Transcription
  misc_feature: MA Experiment ID: 108573 Result: Up-regulated in Transcription
  misc_feature: MA Experiment 108573 PARAMETER Experiment Name: At_Drought_cDNA_P Parameter: Timepoint (hr) Value: 6
  misc_feature: MA Experiment 108573 PARAMETER Experiment Name: At_Drought_cDNA_P Parameter: Tissue Value: Aerial
  misc_feature: MA Experiment 108573 PARAMETER Experiment Name: At_Drought_cDNA_P Parameter: Treatment Value: Drought vs. No Drought
  misc_feature: MA Experiment ID: 108668 Result: Up-regulated in Transcription
  misc_feature: MA Experiment 108668 PARAMETER Experiment Name: At_2mM_SA_cDNA_P Parameter: Plant Line Value: WS
  misc_feature: MA Experiment 108668 PARAMETER Experiment Name: At_2mM_SA_cDNA_P Parameter: Timepoint (hr) Value: 6
  misc_feature: MA Experiment 108668 PARAMETER Experiment Name: At_2mM_SA_cDNA_P Parameter: Treatment Value: 2mM SA vs. No Treatment
  misc_feature: MA Experiment ID: 20000069 Result: Up-regulated in Transcription
  misc_feature: MA Experiment 20000069 PARAMETER Experiment Name: At_100uM_ABA_Mutants_cDNA_P Parameter: Plant Line Value: CS23
  misc_feature: MA Experiment 20000069 PARAMETER Experiment Name: At_100uM_ABA_Mutants_cDNA_P Parameter: Timepoint (hr) Value: 6
  misc_feature: MA Experiment 20000069 PARAMETER Experiment Name: At_100uM_ABA_Mutants_cDNA_P Parameter: Tissue Value: Aerial
  misc_feature: MA Experiment 20000069 PARAMETER Experiment Name: At_100uM_ABA_Mutants_cDNA_P Parameter: Treatment Value: 100uM ABA vs. No Treatment
  misc_feature: MA Experiment ID: 20000070 Result: Up-regulated in Transcription
  misc_feature: MA Experiment 20000070 PARAMETER Experiment Name: At_100uM_ABA_Mutants_cDNA_P Parameter: Plant Line Value: CS24
  misc_feature: MA Experiment 20000070 PARAMETER Experiment Name: At_100uM_ABA_Mutants_cDNA_P Parameter: Timepoint (hr) Value: 6
  misc_feature: MA Experiment 20000070 PARAMETER Experiment Name: At_100uM_ABA_Mutants_cDNA_P Parameter: Tissue Value: Aerial
  misc_feature: MA Experiment 20000070 PARAMETER Experiment Name: At_100uM_ABA_Mutants_cDNA_P Parameter: Treatment Value: 100uM ABA vs. No Treatment
  misc_feature: MA Experiment ID: 20000072 Result: Up-regulated in Transcription
  misc_feature: MA Experiment 20000072 PARAMETER Experiment Name: At_100uM_ABA_Mutants_cDNA_P Parameter: Plant Line Value: CS8105
  misc_feature: MA Experiment 20000072 PARAMETER Experiment Name: At_100uM_ABA_Mutants_cDNA_P Parameter: Timepoint (hr) Value: 6
  misc_feature: MA Experiment 20000072 PARAMETER Experiment Name: At_100uM_ABA_Mutants_cDNA_P Parameter: Tissue Value: Aerial
  misc_feature: MA Experiment 20000072 PARAMETER Experiment Name: At_100uM_ABA_Mutants_cDNA_P Parameter: Treatment Value: 100uM ABA vs. No Treatment
  misc_feature: MA Experiment ID: 20000086 Result: Up-regulated in Transcription
  misc_feature: MA Experiment 20000086 PARAMETER Experiment Name: At_100uM_ABA_Mutants_cDNA_P Parameter: Plant Line Value: CS22
  misc_feature: MA Experiment 20000086 PARAMETER Experiment Name: At_100uM_ABA_Mutants_cDNA_P Parameter: Timepoint (hr) Value: 6
  misc_feature: MA Experiment 20000086 PARAMETER Experiment Name: At_100uM_ABA_Mutants_cDNA_P Parameter: Tissue Value: Aerial
  misc_feature: MA Experiment 20000086 PARAMETER Experiment Name: At_100uM_ABA_Mutants_cDNA_P Parameter: Treatment Value: 100uM ABA vs. No Treatment
  misc_feature: MA Experiment ID: 20000087 Result: Up-regulated in Transcription
  misc_feature: MA Experiment 20000087 PARAMETER Experiment Name: At_100uM_ABA_Mutants_cDNA_P Parameter: Plant Line Value: WS
  misc_feature: MA Experiment 20000087 PARAMETER Experiment Name: At_100uM_ABA_Mutants_cDNA_P Parameter: Timepoint (hr) Value: 6
  misc_feature: MA Experiment 20000087 PARAMETER Experiment Name: At_100uM_ABA_Mutants_cDNA_P Parameter: Tissue Value: Aerial
  misc_feature: MA Experiment 20000087 PARAMETER Experiment Name: At_100uM_ABA_Mutants_cDNA_P Parameter: Treatment Value: 100uM ABA vs. No Treatment
  misc_feature: MA Experiment ID: 20000090 Result: Up-regulated in Transcription
  misc_feature: MA Experiment ID: 20000117 Result: Up-regulated in Transcription
  misc_feature: MA Experiment 20000117 PARAMETER Experiment Name: At_100uM_ABA_Mutants_cDNA_P Parameter: Plant Line Value: Columbia
  misc_feature: MA Experiment 20000117 PARAMETER Experiment Name: At_100uM_ABA_Mutants_cDNA_P Parameter: Timepoint (hr) Value: 6
  misc_feature: MA Experiment 20000117 PARAMETER Experiment Name: At_100uM_ABA_Mutants_cDNA_P Parameter: Tissue Value: Aerial
  misc_feature: MA Experiment 20000117 PARAMETER Experiment Name: At_100uM_ABA_Mutants_cDNA_P Parameter: Treatment Value: 100uM ABA vs. No Treatment
  misc_feature: MA Experiment ID: 20000182 Result: Up-regulated in Transcription
  misc_feature: MA Experiment 20000182 PARAMETER Experiment Name: At_2mM_SA_P Parameter: Age (day) Value: 14
  misc_feature: MA Experiment 20000182 PARAMETER Experiment Name: At_2mM_SA_P Parameter: Organism Value: A. thaliana
  misc_feature: MA Experiment 20000182 PARAMETER Experiment Name: At_2mM_SA_P Parameter: Plant Line Value: WS
  misc_feature: MA Experiment 20000182 PARAMETER Experiment Name: At_2mM_SA_P Parameter: Timepoint (hr) Value: 6
  misc_feature: MA Experiment 20000182 PARAMETER Experiment Name: At_2mM_SA_P Parameter: Tissue Value: Aerial
  misc_feature: MA Experiment 20000182 PARAMETER Experiment Name: At_2mM_SA_P Parameter: Treatment Value: 2mM SA vs. No Treatment
  misc_feature: MA Experiment ID: 20000227 Result: Down-regulated in Transcription
  misc_feature: MA Experiment 20000227 PARAMETER Experiment Name: At_Root-Tips-vs-Tops_P Parameter: Tissue Value: Root Tips vs. Root Tops
  misc_feature: MA Experiment ID: 20000234 Result: Down-regulated in Transcription
  misc_feature: MA Experiment 20000234 PARAMETER Experiment Name: At_Siliques_P Parameter: Age (day) Value: 21
  misc_feature: MA Experiment 20000234 PARAMETER Experiment Name: At_Siliques_P Parameter: Organism Value: A. thaliana
  misc_feature: MA Experiment 20000234 PARAMETER Experiment Name: At_Siliques_P Parameter: Plant Line Value: WS
  misc_feature: MA Experiment 20000234 PARAMETER Experiment Name: At_Siliques_P Parameter: Tissue Value: Less Than 5mm Siliques vs. Whole Plant
  misc_feature: MA Experiment ID: 20000235 Result: Down-regulated in Transcription
  misc_feature: MA Experiment 20000235 PARAMETER Experiment Name: At_Siliques_P Parameter: Age (day) Value: 21
  misc_feature: MA Experiment 20000235 PARAMETER Experiment Name: At_Siliques_P Parameter: Organism Value: A. thaliana
  misc_feature: MA Experiment 20000235 PARAMETER Experiment Name: At_Siliques_P Parameter: Plant Line Value: WS
  misc_feature: MA Experiment 20000235 PARAMETER Experiment Name: At_Siliques_P Parameter: Tissue Value: 5-10mm Siliques vs. Whole Plant
  misc_feature: MA Experiment ID: 20000265 Result: Down-regulated in Transcription
  misc_feature: MA Experiment 20000265 PARAMETER Experiment Name: At_Open_Flower_P Parameter: Age (day) Value: 21
  misc_feature: MA Experiment 20000265 PARAMETER Experiment Name: At_Open_Flower_P Parameter: Plant Line Value: WS
  misc_feature: MA Experiment 20000265 PARAMETER Experiment Name: At_Open_Flower_P Parameter: Tissue Value: Closed Flower vs. Whole Plant
  misc_feature: MA Experiment ID: 20000438 Result: Down-regulated in Transcription
  misc_feature: MA Experiment 20000438 PARAMETER Experiment Name: At_Shoots__P Parameter: Age (day) Value: 14
  misc_feature: MA Experiment 20000438 PARAMETER Experiment Name: At_Shoots__P Parameter: Tissue Value: Shoots vs. Whole Plant
  misc_feature: MA Experiment ID: 20000794 Result: Up-regulated in Transcription
  misc_feature: MA Experiment 20000794 PARAMETER Experiment Name: At_Petals_P Parameter: Age (day) Value: 23-25 days
  misc_feature: MA Experiment 20000794 PARAMETER Experiment Name: At_Petals_P Parameter: Plant Line Value: WS
  misc_feature: MA Experiment 20000794 PARAMETER Experiment Name: At_Petals_P Parameter: Tissue Value: Petals vs. Whole plant
  misc_feature: MA Experiment ID: 20001911 Result: Up-regulated in Transcription
  misc_feature: MA Experiment 20001911 PARAMETER Experiment Name: At_Drought_Reproduction_P Parameter: Age (day) Value: 40
  misc_feature: MA Experiment 20001911 PARAMETER Experiment Name: At_Drought_Reproduction_P Parameter: Organism Value: A. thaliana
  misc_feature: MA Experiment 20001911 PARAMETER Experiment Name: At_Drought_Reproduction_P Parameter: Plant Line Value: WS
  misc_feature: MA Experiment 20001911 PARAMETER Experiment Name: At_Drought_Reproduction_P Parameter: Timepoint (day) Value: 10
  misc_feature: MA Experiment 20001911 PARAMETER Experiment Name: At_Drought_Reproduction_P Parameter: Tissue Value: Flowers
  misc_feature: MA Experiment 20001911 PARAMETER Experiment Name: At_Drought_Reproduction_P Parameter: Treatment Value: Drought vs. No Drought
aaaacactagtataaaaaattgaacccgttaaccggcgacccgaaacaatgacccggtccgtcagtttccctctcttcctcttcgccgttgtactctccctctcttcttctctcctcgccgacgatcccaaaccaatccgccgtgaggtctacgaaggaggtaagatatacgacatcagccatcgttacacgccggagattccagcttgggaatcttcggaaggattgggaaagacgttcctgcgattagccgcgagtatgaagaatggatcattcgctaacgtatcggagatgaaactatctgttcactctggaactcacgtggatgctccaggtcacttttgggataattattacgatgctggttttgatactgattcgcttgatctccaagtcctaaatggtcctgctttgttggttgatgttccgagagataagaacattactgctgaggtaatggaatcacttcatatacaaagaggagttcgtcgtgtgctctttagaacatccaacaccgacaagcggcttatgtttaagaaagagtttgattcaagctttgctgggttcatgaccgatggggctaaatggttggttgagaatacagacatcaaacttattgggcttgattatctttcatttgctgcttttgaggaatcacctgcaacacacagggttatacttaaaggacgggatataatcccagtggaagcgctgaagctggatggtgtggaggtaggaacatactcgcttcattgcttaccgctgagattagttggagcggaaggagcaccgacaagatgcattctcatcaagtgattcagttcttcttcttcttcttctgtgtaagttgttcagtataccaaactgataatgaataatatgcttcttactttacaagatctcagaacccatgaagcagatgtgatgattcagttgtaaaaggaagcatacctttataaacgtgtgaatgtattatgtatgacagtatatttgtaattctgaaggacatgataataaacctagactgaaacaaacgaataatataaccacttgcagcg

SEQ ID NO: 28120 - protein, 255 aa, Arabidopsis thaliana
  peptide (1)..(255): Ceres Seq. ID no. 12327411
  misc_feature (40)..(241): Pfam Name: Putative cyclase Pfam Description: Putative cyclase
  misc_feature (39)..(253): Homolog of NCBI NO: 39998438 NR Description: cyclase, putative [Geobacter sulfurreducens PCA]
  misc_feature (40)..(253): Homolog of NCBI NO: 23056289 NR Description: hypothetical protein [Geobacter metallireducens]
  misc_feature (40)..(253): Homolog of NCBI NO: 16330650 NR Description: hypothetical protein [Synechocystis sp. PCC 6803]
  misc_feature (41)..(255): Homolog of NCBI NO: 23016903 NR Description: hypothetical protein [Magnetospirillum
  misc_feature (25)..(133): Homolog of NCBI NO: 7486023 NR Description: hypothetical protein F23E12.220 - Arabidopsis
  misc_feature (21)..(255): Homolog of NCBI NO: 35215089 NR Description: hypothetical protein [Oryza sativa (japonica
  misc_feature (25)..(254): Homolog of NCBI NO: 18418598 NR Description: putative protein
  misc_feature (26)..(255): Homolog of NCBI NO: 15219416 NR Description: hypothetical protein; protein id: At1g44542.1
  misc_feature (1)..(214): Homolog of NCBI NO: 7486287 NR Description: hypothetical protein F28A23.60 - Arabidopsis
  misc_feature (1)..(255): Homolog of NCBI NO: 18418393 NR Description: putative protein
MTRSVSFPLFLFAVVLSLSSSLLADDPKPIRREVYEGGKIYDISHRYTPEIPAWESSEGLGKTFLRLAASMKNGSFANVSEMKLSVHSGTHVDAPGHFWDNYYDAGFDTDSLDLQVLNGPALLVDVPRDKNITAEVMESLHIQRGVRRVLFRTSNTDKRLMFKKEFDSSFAGFMTDGAKWLVENTDIKLIGLDYLSFAAFEESPATHRVILKGRDIIPVEALKLDGVEVGTYSLHCLPLRLVGAEGAPTRCILIK

SEQ ID NO: 28121 - protein, 185 aa, Arabidopsis thaliana
  peptide (1)..(185): Ceres Seq. ID no. 12327412
  misc_feature (1)..(171): Pfam Name: Putative cyclase Pfam Description: Putative cyclase
  misc_feature (1)..(183): Homolog of NCBI NO: 39998438 NR Description: cyclase, putative [Geobacter sulfurreducens PCA]
  misc_feature (1)..(183): Homolog of NCBI NO: 23056289 NR Description: hypothetical protein [Geobacter metallireducens]
  misc_feature (1)..(183): Homolog of NCBI NO: 16330650 NR Description: hypothetical protein [Synechocystis sp. PCC 6803]
  misc_feature (1)..(185): Homolog of NCBI NO: 23016903 NR Description: hypothetical protein [Magnetospirillum
  misc_feature (1)..(63): Homolog of NCBI NO: 7486023 NR Description: hypothetical protein F23E12.220 - Arabidopsis
  misc_feature (1)..(185): Homolog of NCBI NO: 35215089 NR Description: hypothetical protein [Oryza sativa (japonica
  misc_feature (1)..(184): Homolog of NCBI NO: 18418598 NR Description: putative protein
  misc_feature (1)..(185): Homolog of NCBI NO: 15219416 NR Description: hypothetical protein; protein id: At1g44542.1
  misc_feature (1)..(144): Homolog of NCBI NO: 7486287 NR Description: hypothetical protein F28A23.60 - Arabidopsis
  misc_feature (1)..(185): Homolog of NCBI NO: 18418393 NR Description: putative protein
MKNGSFANVSEMKLSVHSGTHVDAPGHFWDNYYDAGFDTDSLDLQVLNGPALLVDVPRDKNITAEVMESLHIQRGVRRVLFRTSNTDKRLMFKKEFDSSFAGFMTDGAKWLVENTDIKLIGLDYLSFAAFEESPATHRVILKGRDIIPVEALKLDGVEVGTYSLHCLPLRLVGAEGAPTRCILIK

SEQ ID NO: 28122 - protein, 174 aa, Arabidopsis thaliana
  peptide (1)..(174): Ceres Seq. ID no. 12327413
  misc_feature (1)..(160): Pfam Name: Putative cyclase Pfam Description: Putative cyclase
  misc_feature (1)..(172): Homolog of NCBI NO: 39998438 NR Description: cyclase, putative [Geobacter sulfurreducens PCA]
  misc_feature (1)..(172): Homolog of NCBI NO: 23056289 NR Description: hypothetical protein [Geobacter metallireducens]
  misc_feature (1)..(172): Homolog of NCBI NO: 16330650 NR Description: hypothetical protein [Synechocystis sp. PCC 6803]
  misc_feature (1)..(174): Homolog of NCBI NO: 23016903 NR Description: hypothetical protein [Magnetospirillum
  misc_feature (1)..(52): Homolog of NCBI NO: 7486023 NR Description: hypothetical protein F23E12.220 - Arabidopsis
  misc_feature (1)..(174): Homolog of NCBI NO: 35215089 NR Description: hypothetical protein [Oryza sativa (japonica
  misc_feature (1)..(173): Homolog of NCBI NO: 18418598 NR Description: putative protein
  misc_feature (1)..(174): Homolog of NCBI NO: 15219416 NR Description: hypothetical protein; protein id: At1g44542.1
  misc_feature (1)..(133): Homolog of NCBI NO: 7486287 NR Description: hypothetical protein F28A23.60 - Arabidopsis
  misc_feature (1)..(174): Homolog of NCBI NO: 18418393 NR Description: putative protein
MKLSVHSGTHVDAPGHFWDNYYDAGFDTDSLDLQVLNGPALLVDVPRDKNITAEVMESLHIQRGVRRVLFRTSNTDKRLMFKKEFDSSFAGFMTDGAKWLVENTDIKLIGLDYLSFAAFEESPATHRVILKGRDIIPVEALKLDGVEVGTYSLHCLPLRLVGAEGAPTRCILIK

SEQ ID NO: 28123 - DNA, 731 bp, Arabidopsis thaliana
  misc_feature (1)..(731): Ceres Seq. ID no. 12343557
  misc_feature: MA Experiment ID: 108434 Result: Up-regulated in Transcription
  misc_feature: MA Experiment 108434 PARAMETER Experiment Name: At_Root_Tips_cDNA_P Parameter: Tissue Value: Root Tips
  misc_feature: MA Experiment ID: 108435 Result: Up-regulated in Transcription
  misc_feature: MA Experiment 108435 PARAMETER Experiment Name: At_stm_Mutants_cDNA_P Parameter: Plant Line Value: wt Landsburg vs stm
  misc_feature: MA Experiment 108435 PARAMETER Experiment Name: At_stm_Mutants_cDNA_P Parameter: Tissue Value: Shoot Apical Meristem Region
  misc_feature: MA Experiment ID: 108462 Result: Down-regulated in Transcription
  misc_feature: MA Experiment 108462 PARAMETER Experiment Name: At_Germinating_Seeds_cDNA_P Parameter: Age (day) Value: 2 vs. 0
  misc_feature: MA Experiment 108462 PARAMETER Experiment Name: At_Germinating_Seeds_cDNA_P Parameter: Tissue Value: Germinating Seeds
  misc_feature: MA Experiment ID: 108463 Result: Down-regulated in Transcription
  misc_feature: MA Experiment 108463 PARAMETER Experiment Name: At_Germinating_Seeds_cDNA_P Parameter: Age (day) Value: 3 vs. 0
  misc_feature: MA Experiment 108463 PARAMETER Experiment Name: At_Germinating_Seeds_cDNA_P Parameter: Tissue Value: Germinating Seeds
  misc_feature: MA Experiment ID: 108464 Result: Down-regulated in Transcription
  misc_feature: MA Experiment 108464 PARAMETER Experiment Name: At_Germinating_Seeds_cDNA_P Parameter: Age (day) Value: 4 vs. 0
  misc_feature: MA Experiment 108464 PARAMETER Experiment Name: At_Germinating_Seeds_cDNA_P Parameter: Tissue Value: Germinating Seeds
  misc_feature: MA Experiment ID: 108573 Result: Down-regulated in Transcription
  misc_feature: MA Experiment 108573 PARAMETER Experiment Name: At_Drought_cDNA_P Parameter: Timepoint (hr) Value: 6
  misc_feature: MA Experiment 108573 PARAMETER Experiment Name: At_Drought_cDNA_P Parameter: Tissue Value: Aerial
  misc_feature: MA Experiment 108573 PARAMETER Experiment Name: At_Drought_cDNA_P Parameter: Treatment Value: Drought vs. No Drought
  misc_feature: MA Experiment ID: 108577 Result: Down-regulated in Transcription
  misc_feature: MA Experiment 108577 PARAMETER Experiment Name: At_42deg_Heat_cDNA_P Parameter: Temperature (deg C) Value: 42 vs. 22
  misc_feature: MA Experiment 108577 PARAMETER Experiment Name: At_42deg_Heat_cDNA_P Parameter: Timepoint (hr) Value: 6
  misc_feature: MA Experiment 108577 PARAMETER Experiment Name: At_42deg_Heat_cDNA_P Parameter: Tissue Value: Aerial
  misc_feature: MA Experiment ID: 108579 Result: Up-regulated in Transcription
  misc_feature: MA Experiment 108579 PARAMETER Experiment Name: At_4deg_Cold_cDNA_P Parameter: Temperature (deg C) Value: 4 vs. 22
  misc_feature: MA Experiment 108579 PARAMETER Experiment Name: At_4deg_Cold_cDNA_P Parameter: Timepoint (hr) Value: 6
  misc_feature: MA Experiment 108579 PARAMETER Experiment Name: At_4deg_Cold_cDNA_P Parameter: Tissue Value: Aerial
  misc_feature: MA Experiment ID: 20000093 Result: Down-regulated in Transcription
  misc_feature: MA Experiment 20000093 PARAMETER Experiment Name: At_42deg_Heat_cDNA_P Parameter: Temperature (deg C) Value: 42 vs. 22
  misc_feature: MA Experiment 20000093 PARAMETER Experiment Name: At_42deg_Heat_cDNA_P Parameter: Timepoint (hr) Value: 0.5
  misc_feature: MA Experiment 20000093 PARAMETER Experiment Name: At_42deg_Heat_cDNA_P Parameter: Tissue Value: Aerial
  misc_feature: MA Experiment ID: 20000111 Result: Down-regulated in Transcription
  misc_feature: MA Experiment 20000111 PARAMETER Experiment Name: At_42deg_Heat_cDNA_P Parameter: Temperature (deg C) Value: 42 vs. 22
  misc_feature: MA Experiment 20000111 PARAMETER Experiment Name: At_42deg_Heat_cDNA_P Parameter: Timepoint (hr) Value: 6
  misc_feature: MA Experiment 20000111 PARAMETER Experiment Name: At_42deg_Heat_cDNA_P Parameter: Tissue Value: Aerial
  misc_feature: MA Experiment ID: 20000113 Result: Down-regulated in Transcription
  misc_feature: MA Experiment 20000113 PARAMETER Experiment Name: At_42deg_Heat_cDNA_P Parameter: Temperature (deg C) Value: 42 vs. 22
  misc_feature: MA Experiment 20000113 PARAMETER Experiment Name: At_42deg_Heat_cDNA_P Parameter: Timepoint (hr) Value: 8
  misc_feature: MA Experiment 20000113 PARAMETER Experiment Name: At_42deg_Heat_cDNA_P Parameter: Tissue Value: Aerial
  misc_feature: MA Experiment ID: 20000144 Result: Down-regulated in Transcription
  misc_feature: MA Experiment 20000144 PARAMETER Experiment Name: At_42deg_Heat_cDNA_P Parameter: Temperature (deg C) Value: 42 vs. 22
  misc_feature: MA Experiment 20000144 PARAMETER Experiment Name: At_42deg_Heat_cDNA_P Parameter: Timepoint (hr) Value: 1
  misc_feature: MA Experiment 20000144 PARAMETER Experiment Name: At_42deg_Heat_cDNA_P Parameter: Tissue Value: Aerial
  misc_feature: MA Experiment ID: 20000173 Result: Down-regulated in Transcription
  misc_feature: MA Experiment 20000173 PARAMETER Experiment Name: At_42deg_Heat_P Parameter: Age (day) Value: 14
  misc_feature: MA Experiment 20000173 PARAMETER Experiment Name: At_42deg_Heat_P Parameter: Organism Value: A. thaliana
  misc_feature: MA Experiment 20000173 PARAMETER Experiment Name: At_42deg_Heat_P Parameter: Plant Line Value: WS
  misc_feature: MA Experiment 20000173 PARAMETER Experiment Name: At_42deg_Heat_P Parameter: Temperature (deg C) Value: 42 vs. 22
  misc_feature: MA Experiment 20000173 PARAMETER Experiment Name: At_42deg_Heat_P Parameter: Timepoint (hr) Value: 6
  misc_feature: MA Experiment 20000173 PARAMETER Experiment Name: At_42deg_Heat_P Parameter: Tissue Value: Aerial
  misc_feature: MA Experiment ID: 20000234 Result: Up-regulated in Transcription
  misc_feature: MA Experiment 20000234 PARAMETER Experiment Name: At_Siliques_P Parameter: Age (day) Value: 21
  misc_feature: MA Experiment 20000234 PARAMETER Experiment Name: At_Siliques_P Parameter: Organism Value: A. thaliana
  misc_feature: MA Experiment 20000234 PARAMETER Experiment Name: At_Siliques_P Parameter: Plant Line Value: WS
  misc_feature: MA Experiment 20000234 PARAMETER Experiment Name: At_Siliques_P Parameter: Tissue Value: Less Than 5mm Siliques vs. Whole Plant
  misc_feature: MA Experiment ID: 20000264 Result: Up-regulated in Transcription
  misc_feature: MA Experiment 20000264 PARAMETER Experiment Name: At_Open_Flower_P Parameter: Age (day) Value: 21
  misc_feature: MA Experiment 20000264 PARAMETER Experiment Name: At_Open_Flower_P Parameter: Plant Line Value: WS
  misc_feature: MA Experiment 20000264 PARAMETER Experiment Name: At_Open_Flower_P Parameter: Tissue Value: Open Flower vs. Whole Plant
  misc_feature: MA Experiment ID: 20000265 Result: Up-regulated in Transcription
  misc_feature: MA Experiment 20000265 PARAMETER Experiment Name: At_Open_Flower_P Parameter: Age (day) Value: 21
  misc_feature: MA Experiment 20000265 PARAMETER Experiment Name: At_Open_Flower_P Parameter: Plant Line Value: WS
  misc_feature: MA Experiment 20000265 PARAMETER Experiment Name: At_Open_Flower_P Parameter: Tissue Value: Closed Flower vs. Whole Plant
  misc_feature: MA Experiment ID: 20000286 Result: Up-regulated in Transcription
  misc_feature: MA Experiment 20000286 PARAMETER Experiment Name: At_Open_Flower_P Parameter: Age (day) Value: 21
  misc_feature: MA Experiment 20000286 PARAMETER Experiment Name: At_Open_Flower_P Parameter: Plant Line Value: WS
  misc_feature: MA Experiment 20000286 PARAMETER Experiment Name: At_Open_Flower_P Parameter: Tissue Value: Half Open vs. Whole Plant
  misc_feature: MA Experiment ID: 20000437 Result: Down-regulated in Transcription
  misc_feature: MA Experiment 20000437 PARAMETER Experiment Name: At_Drought_P Parameter: Age (day) Value: 8
  misc_feature: MA Experiment 20000437 PARAMETER Experiment Name: At_Drought_P Parameter: Organism Value: A. thaliana
  misc_feature: MA Experiment 20000437 PARAMETER Experiment Name: At_Drought_P Parameter: Plant Line Value: WS
  misc_feature: MA Experiment 20000437 PARAMETER Experiment Name: At_Drought_P Parameter: Timepoint (hr) Value: 24
  misc_feature: MA Experiment 20000437 PARAMETER Experiment Name: At_Drought_P Parameter: Tissue Value: Whole Plant
  misc_feature: MA Experiment 20000437 PARAMETER Experiment Name: At_Drought_P Parameter: Treatment Value: Drought vs. No Drought
  misc_feature: MA Experiment ID: 20001248 Result: Down-regulated in Transcription
  misc_feature: MA Experiment 20001248 PARAMETER Experiment Name: At_Far-red-induction_P Parameter: Age (day) Value: 7
  misc_feature: MA Experiment 20001248 PARAMETER Experiment Name: At_Far-red-induction_P Parameter: Light Value: Far-red vs. White
  misc_feature: MA Experiment 20001248 PARAMETER Experiment Name: At_Far-red-induction_P Parameter: Organism Value: A. thaliana
  misc_feature: MA Experiment 20001248 PARAMETER Experiment Name: At_Far-red-induction_P Parameter: Plant Line Value: Columbia
  misc_feature: MA Experiment 20001248 PARAMETER Experiment Name: At_Far-red-induction_P Parameter: Timepoint (hr) Value: 4
  misc_feature: MA Experiment 20001248 PARAMETER Experiment Name: At_Far-red-induction_P Parameter: Tissue Value: Whole Plant
  misc_feature: MA Experiment ID: 20001451 Result: Down-regulated in Transcription
  misc_feature: MA Experiment 20001451 PARAMETER Experiment Name: At_Far-red-induction_P Parameter: Age (day) Value: 7
  misc_feature: MA Experiment 20001451 PARAMETER Experiment Name: At_Far-red-induction_P Parameter: Light Value: Far-red vs. White
  misc_feature: MA Experiment 20001451 PARAMETER Experiment Name: At_Far-red-induction_P Parameter: Organism Value: A. thaliana
  misc_feature: MA Experiment 20001451 PARAMETER Experiment Name: At_Far-red-induction_P Parameter: Plant Line Value: Columbia
  misc_feature: MA Experiment 20001451 PARAMETER Experiment Name: At_Far-red-induction_P Parameter: Timepoint (hr) Value: 24
  misc_feature: MA Experiment 20001451 PARAMETER Experiment Name: At_Far-red-induction_P Parameter: Tissue Value: Whole Plant
aatcaccattcaccactaaactacttcaatcaacttccttttcccgagaaaatcagaaagaaaattcacgatggcaccaagagccgagaagaagcccgccgagaaaaaaaccgccgctgagagaccggtggaagagaacaaggctgctgaaaaggctccggcggagaagaaacccaaggcggggaagaaattgccaccaaaggaagccggtgacaagaagaagaagcgatctaagaaaaacgtcgaaacctacaagatctacatcttcaaggtgctgaagcaggttcatccagatatcggaatttcaagcaaagccatggggattatgaacagtttcatcaacgacatattcgagaagctagctcaggaatcttcgaaactcgctaggtacaacaagaagccgaccattacatctcgcgagatccagacggctgtgagactcgtcctccccggtgaactcgctaaacacgccgtctctgaaggtaccaaggcggttaccaagtttactagctcttgaagagacccggttagggtttttagggatttcaatttcggtttggtttttagtacttgtaggaaattagatgcattattcgcttaacttcgtattttgtggctttgtaactctaggaagtagagaagattgttccttccttttatgaatttcaatgttggattatatatttttaacgatttttttttccatttcaatttcatttacctaatcactt

SEQ ID NO: 28124 - protein, 148 aa, Arabidopsis thaliana
  peptide (1)..(148): Ceres Seq. ID no. 12343558
  misc_feature (31)..(147): Pfam Name: Core histone H2A/H2B/H3/H4 Pfam Description: Core histone H2A/H2B/H3/H4
  misc_feature (1)..(148): Homolog of NCBI NO: 7387727 NR Description: Histone H2B (CaH2B)
  misc_feature (1)..(148): Homolog of NCBI NO: 7439756 NR Description: histone H2B - tomato
  misc_feature (1)..(148): Homolog of NCBI NO: 7387726 NR Description: Histone H2B
  misc_feature (1)..(148): Homolog of NCBI NO: 15231313 NR Description: histone H2B -like protein
  misc_feature (1)..(148): Homolog of NCBI NO: 15226943 NR Description: putative histone H2B
  misc_feature (1)..(148): Homolog of NCBI NO: 21554180 NR Description: histone H2B-like protein [Arabidopsis thaliana]
  misc_feature (1)..(148): Homolog of NCBI NO: 15238563 NR Description: histone H2B - like protein
  misc_feature (1)..(148): Homolog of NCBI NO: 15231304 NR Description: histone H2B; protein id: At3g45980.1, supported
  misc_feature (1)..(148): Homolog of NCBI NO: 21617908 NR Description: histone H2B [Arabidopsis thaliana]
  misc_feature (1)..(148): Homolog of NCBI NO: 15223016 NR Description: histone H2B
MAPRAEKKPAEKKTAAERPVEENKAAEKAPAEKKPKAGKKLPPKEAGDKKKKRSKKNVETYKIYIFKVLKQVHPDIGISSKAMGIMNSFINDIFEKLAQESSKLARYNKKPTITSREIQTAVRLVLPGELAKHAVSEGTKAVTKFTSS

SEQ ID NO: 28125 - protein, 91 aa, Arabidopsis thaliana
  peptide (1)..(91): Ceres Seq. ID no. 12343559
SPFTTKLLQSTSFSRENQKENSRWHQEPRRSPPRKKPPLRDRWKRTRLLKRLRRRRNPRRGRNCHQRKPVTRRRSDLRKTSKPTRSTSSRC

SEQ ID NO: 28126 - DNA, 750 bp, Arabidopsis thaliana
  misc_feature (1)..(750): Ceres Seq. ID no. 12339757
  misc_feature: MA Experiment ID: 108461 Result: Down-regulated in Transcription
  misc_feature: MA Experiment 108461 PARAMETER Experiment Name: At_Germinating_Seeds_cDNA_P Parameter: Age (day) Value: 1 vs. 0
  misc_feature: MA Experiment 108461 PARAMETER Experiment Name: At_Germinating_Seeds_cDNA_P Parameter: Tissue Value: Germinating Seeds
  misc_feature: MA Experiment ID: 108462 Result: Down-regulated in Transcription
  misc_feature: MA Experiment 108462 PARAMETER Experiment Name: At_Germinating_Seeds_cDNA_P Parameter: Age (day) Value: 2 vs. 0
  misc_feature: MA Experiment 108462 PARAMETER Experiment Name: At_Germinating_Seeds_cDNA_P Parameter: Tissue Value: Germinating Seeds
  misc_feature: MA Experiment ID: 108463 Result: Down-regulated in Transcription
  misc_feature: MA Experiment 108463 PARAMETER Experiment Name: At_Germinating_Seeds_cDNA_P Parameter: Age (day) Value: 3 vs. 0
  misc_feature: MA Experiment 108463 PARAMETER Experiment Name: At_Germinating_Seeds_cDNA_P Parameter: Tissue Value: Germinating Seeds
  misc_feature: MA Experiment ID: 108464 Result: Down-regulated in Transcription
  misc_feature: MA Experiment 108464 PARAMETER Experiment Name: At_Germinating_Seeds_cDNA_P Parameter: Age (day) Value: 4 vs. 0
  misc_feature: MA Experiment 108464 PARAMETER Experiment Name: At_Germinating_Seeds_cDNA_P Parameter: Tissue Value: Germinating Seeds
  misc_feature: MA Experiment ID: 20000112 Result: Up-regulated in Transcription
  misc_feature: MA Experiment 20000112 PARAMETER Experiment Name: At_42deg_Heat_cDNA_P Parameter: Temperature (deg C) Value: 42 vs. 22
  misc_feature: MA Experiment 20000112 PARAMETER Experiment Name: At_42deg_Heat_cDNA_P Parameter: Timepoint (hr) Value: 2
  misc_feature: MA Experiment 20000112 PARAMETER Experiment Name: At_42deg_Heat_cDNA_P Parameter: Tissue Value: Aerial
  misc_feature: MA Experiment ID: 20000144 Result: Up-regulated in Transcription
  misc_feature: MA Experiment 20000144 PARAMETER Experiment Name: At_42deg_Heat_cDNA_P Parameter: Temperature (deg C) Value: 42 vs. 22
  misc_feature: MA Experiment 20000144 PARAMETER Experiment Name: At_42deg_Heat_cDNA_P Parameter: Timepoint (hr) Value: 1
  misc_feature: MA Experiment 20000144 PARAMETER Experiment Name: At_42deg_Heat_cDNA_P Parameter: Tissue Value: Aerial
  misc_feature: MA Experiment ID: 20000224 Result: Up-regulated in Transcription
  misc_feature: MA Experiment ID: 20001451 Result: Down-regulated in Transcription
  misc_feature: MA Experiment 20001451 PARAMETER Experiment Name: At_Far-red-induction_P Parameter: Age (day) Value: 7
  misc_feature: MA Experiment 20001451 PARAMETER Experiment Name: At_Far-red-induction_P Parameter: Light Value: Far-red vs. White
  misc_feature: MA Experiment 20001451 PARAMETER Experiment Name: At_Far-red-induction_P Parameter: Organism Value: A. thaliana
  misc_feature: MA Experiment 20001451 PARAMETER Experiment Name: At_Far-red-induction_P Parameter: Plant Line Value: Columbia
  misc_feature: MA Experiment 20001451 PARAMETER Experiment Name: At_Far-red-induction_P Parameter: Timepoint (hr) Value: 24
  misc_feature: MA Experiment 20001451 PARAMETER Experiment Name: At_Far-red-induction_P Parameter: Tissue Value: Whole Plant
ctgtggaacctctttagattctcaccatggctatattgttgaatatggaaaagatagggatgttgatcttgggtttcatgtggatgactcagaagttagtttaaatgtctgcttgggtaaacaattctctggctgggagctgtattttcgaggggtgagatgtgataagcatgtgaattccgatagcactgaaaaggaagtttatgattactctcatgtacctggtcacgccattcttcatcgtggacgtcatcgccatggtgctagagctacaacttctggacaccgagccaacttgattttgtggtgtagaagctcaacttttcgagagatgaagaattatcagagagatttctcaggttggtgtgtaggatgcaaacttgataaacagagaaggcagcgtgattcgattaatgcaactaaagagatactagcaaggaaagctgcagagaagacacttgttgagctggcttcaaaatcatgtgccgagtagacaaaaacaagaatatgtcaaatacctcatcttctttgtaccattccagaggctatgtgtatatagagaggcaagttaaatcgtttgtttgtaagcaagcattagatacctttgtcaaaggtaaattttgttccatttttcagattgctgcctgtaacaataaatttcttagaggagtgaaggcaaatgaaatacacaaatgttatctcttggagaatttgagaatgttggaagtttttggaagtaaaaatgtttgt

SEQ ID NO: 28127 - protein, 163 aa, Arabidopsis thaliana
  peptide (1)..(163): Ceres Seq. ID no. 12339758
  misc_feature (6)..(105): Pfam Name: 2OG-Fe(II) oxygenase superfamily Pfam Description: 2OG-Fe(II) oxygenase superfamily
  misc_feature (2)..(109): Homolog of NCBI NO: 21313390 NR Description: RIKEN cDNA 5730405M13 [Mus musculus]
  misc_feature (2)..(109): Homolog of NCBI NO: 18490973 NR Description: RIKEN cDNA 1300006G11 gene [Mus musculus]
  misc_feature (1)..(109): Homolog of NCBI NO: 34872325 NR Description: similar to RIKEN cDNA 5730405M13 [Rattus
  misc_feature (1)..(147): Homolog of NCBI NO: 15239932 NR Description: putative protein; protein id: At5g43660.1
  misc_feature (1)..(148): Homolog of NCBI NO: 15221946 NR Description: unknown protein; protein id: At1g48740.1
  misc_feature (1)..(141): Homolog of NCBI NO: 15221938 NR Description: unknown protein; protein id: At1g48700.1
  misc_feature (2)..(144): Homolog of NCBI NO: 18401806 NR Description: expressed protein
  misc_feature (2)..(153): Homolog of NCBI NO: 34914494 NR Description: B1080D07.28 [Oryza sativa (japonica
  misc_feature (1)..(163): Homolog of NCBI NO: 25518648 NR Description: hypothetical protein F19G10.9 [imported] -
  misc_feature (1)..(163): Homolog of NCBI NO: 15219973 NR Description: unknown protein; protein id: At1g22950.1
CGTSLDSHHGYIVEYGKDRDVDLGFHVDDSEVSLNVCLGKQFSGWELYFRGVRCDKHVNSDSTEKEVYDYSHVPGHAILHRGRHRHGARATTSGHRANLILWCRSSTFREMKNYQRDFSGWCVGCKLDKQRRQRDSINATKEILARKAAEKTLVELASKSCAE

SEQ ID NO: 28128 - protein, 90 aa, Arabidopsis thaliana
  peptide (1)..(90): Ceres Seq. ID no. 12339759
MCRVDKNKNMSNTSSSLYHSRGYVYIERQVKSFVCKQALDTFVKGKFCSIFQIAACNNKFLRGVKANEIHKCYLLENLRMLEVFGSKNVC

SEQ ID NO: 28129 - DNA, 1024 bp, Arabidopsis thaliana
  misc_feature (1)..(1024): Ceres Seq. ID no. 13495970
  misc_feature: MA Experiment ID: 108462 Result: Down-regulated in Transcription
  misc_feature: MA Experiment 108462 PARAMETER Experiment Name: At_Germinating_Seeds_cDNA_P Parameter: Age (day) Value: 2 vs. 0
  misc_feature: MA Experiment 108462 PARAMETER Experiment Name: At_Germinating_Seeds_cDNA_P Parameter: Tissue Value: Germinating Seeds
  misc_feature: MA Experiment ID: 108463 Result: Down-regulated in Transcription
  misc_feature: MA Experiment 108463 PARAMETER Experiment Name: At_Germinating_Seeds_cDNA_P Parameter: Age (day) Value: 3 vs. 0
  misc_feature: MA Experiment 108463 PARAMETER Experiment Name: At_Germinating_Seeds_cDNA_P Parameter: Tissue Value: Germinating Seeds
  misc_feature: MA Experiment ID: 108464 Result: Down-regulated in Transcription
  misc_feature: MA Experiment 108464 PARAMETER Experiment Name: At_Germinating_Seeds_cDNA_P Parameter: Age (day) Value: 4 vs. 0
  misc_feature: MA Experiment 108464 PARAMETER Experiment Name: At_Germinating_Seeds_cDNA_P Parameter: Tissue Value: Germinating Seeds
  misc_feature: MA Experiment ID: 108561 Result: Down-regulated in Transcription
  misc_feature: MA Experiment 108561 PARAMETER Experiment Name: At_100uM_ABA_cDNA_P Parameter: Timepoint (hr) Value: 6
  misc_feature: MA Experiment 108561 PARAMETER Experiment Name: At_100uM_ABA_cDNA_P Parameter: Tissue Value: Aerial
  misc_feature: MA Experiment 108561 PARAMETER Experiment Name: At_100uM_ABA_cDNA_P Parameter: Treatment Value: 100uM ABA vs. No Treatment
  misc_feature: MA Experiment ID: 108595 Result: Down-regulated in Transcription
  misc_feature: MA Experiment 108595 PARAMETER Experiment Name: At_Ler-pi_Ovule_cDNA_P Parameter: Plant Line Value: null
  misc_feature: MA Experiment ID: 108607 Result: Down-regulated in Transcription
  misc_feature: MA Experiment 108607 PARAMETER Experiment Name: At_100uM_ABA_cDNA_P Parameter: Timepoint (hr) Value: 4
  misc_feature: MA Experiment 108607 PARAMETER Experiment Name: At_100uM_ABA_cDNA_P Parameter: Tissue Value: Aerial
  misc_feature: MA Experiment 108607 PARAMETER Experiment Name: At_100uM_ABA_cDNA_P Parameter: Treatment Value: 100uM ABA vs. No Treatment
  misc_feature: MA Experiment ID: 108668 Result: Down-regulated in Transcription
  misc_feature: MA Experiment 108668 PARAMETER Experiment Name: At_2mM_SA_cDNA_P Parameter: Plant Line Value: WS
  misc_feature: MA Experiment 108668 PARAMETER Experiment Name: At_2mM_SA_cDNA_P Parameter: Timepoint (hr) Value: 6
  misc_feature: MA Experiment 108668 PARAMETER Experiment Name: At_2mM_SA_cDNA_P Parameter: Treatment Value: 2mM SA vs. No Treatment
  misc_feature: MA Experiment ID: 20000113 Result: Up-regulated in Transcription
  misc_feature: MA Experiment 20000113 PARAMETER Experiment Name: At_42deg_Heat_cDNA_P Parameter: Temperature (deg C) Value: 42 vs. 22
  misc_feature: MA Experiment 20000113 PARAMETER Experiment Name: At_42deg_Heat_cDNA_P Parameter: Timepoint (hr) Value: 8
  misc_feature: MA Experiment 20000113 PARAMETER Experiment Name: At_42deg_Heat_cDNA_P Parameter: Tissue Value: Aerial
  misc_feature: MA Experiment ID: 20000185 Result: Down-regulated in Transcription
  misc_feature: MA Experiment 20000185 PARAMETER Experiment Name: At_Roots__P Parameter: Age (day) Value: 7 vs. 21
  misc_feature: MA Experiment 20000185 PARAMETER Experiment Name: At_Roots__P Parameter: Organism Value: A. thaliana
  misc_feature: MA Experiment 20000185 PARAMETER Experiment Name: At_Roots__P Parameter: Tissue Value: Roots vs. Whole Plant
  misc_feature: MA Experiment ID: 20000437 Result: Down-regulated in Transcription
  misc_feature: MA Experiment 20000437 PARAMETER Experiment Name: At_Drought_P Parameter: Age (day) Value: 8
  misc_feature: MA Experiment 20000437 PARAMETER Experiment Name: At_Drought_P Parameter: Organism Value: A. thaliana
  misc_feature: MA Experiment 20000437 PARAMETER Experiment Name: At_Drought_P Parameter: Plant Line Value: WS
  misc_feature: MA Experiment 20000437 PARAMETER Experiment Name: At_Drought_P Parameter: Timepoint (hr) Value: 24
  misc_feature: MA Experiment 20000437 PARAMETER Experiment Name: At_Drought_P Parameter: Tissue Value: Whole Plant
  misc_feature: MA Experiment 20000437 PARAMETER Experiment Name: At_Drought_P Parameter: Treatment Value: Drought vs. No Drought
  misc_feature: MA Experiment ID: 20000439 Result: Down-regulated in Transcription
  misc_feature: MA Experiment 20000439 PARAMETER Experiment Name: At_Roots__P Parameter: Age (day) Value: 14 vs. 21
  misc_feature: MA Experiment 20000439 PARAMETER Experiment Name: At_Roots__P Parameter: Organism Value: A. thaliana
  misc_feature: MA Experiment 20000439 PARAMETER Experiment Name: At_Roots__P Parameter: Tissue Value: Roots vs. Whole Plant
  misc_feature: MA Experiment ID: 20000496 Result: Up-regulated in Transcription
  misc_feature: MA Experiment 20000496 PARAMETER Experiment Name: At_Guard_Cells_P Parameter: Harvest Date Value: 7/19/2002
  misc_feature: MA Experiment 20000496 PARAMETER Experiment Name: At_Guard_Cells_P Parameter: Organism Value: Canola
  misc_feature: MA Experiment 20000496 PARAMETER Experiment Name: At_Guard_Cells_P Parameter: Tissue Value: Guard Cells vs. Leaves
  misc_feature: MA Experiment ID: 20000794 Result: Down-regulated in Transcription
  misc_feature: MA Experiment 20000794 PARAMETER Experiment Name: At_Petals_P Parameter: Age (day) Value: 23-25 days
  misc_feature: MA Experiment 20000794 PARAMETER Experiment Name: At_Petals_P Parameter: Plant Line Value: WS
  misc_feature: MA Experiment 20000794 PARAMETER Experiment Name: At_Petals_P Parameter: Tissue Value: Petals vs. Whole plant
  misc_feature: MA Experiment ID: 20001458 Result: Up-regulated in Transcription
  misc_feature: MA Experiment 20001458 PARAMETER Experiment Name: At_50mM_NH4NO3_L-to-H_P Parameter: Age (day) Value: Undefined
  misc_feature: MA Experiment 20001458 PARAMETER Experiment Name: At_50mM_NH4NO3_L-to-H_P Parameter: Organism Value: Undefined
  misc_feature: MA Experiment 20001458 PARAMETER Experiment Name: At_50mM_NH4NO3_L-to-H_P Parameter: Plant Line Value: Undefined
  misc_feature: MA Experiment 20001458 PARAMETER Experiment Name: At_50mM_NH4NO3_L-to-H_P Parameter: Timepoint (hr) Value: 2
  misc_feature: MA Experiment 20001458 PARAMETER Experiment Name: At_50mM_NH4NO3_L-to-H_P Parameter: Tissue Value: Siliques
  misc_feature: MA Experiment 20001458 PARAMETER Experiment Name: At_50mM_NH4NO3_L-to-H_P Parameter: Treatment Value: 50mM NH4NO3 vs. 100mM Manitol
  misc_feature: MA Experiment ID: 20001556 Result: Up-regulated in Transcription
  misc_feature: MA Experiment 20001556 PARAMETER Experiment Name: At_Drought_Soil_Dry_P Parameter: Age (day) Value: 26
  misc_feature: MA Experiment 20001556 PARAMETER Experiment Name: At_Drought_Soil_Dry_P Parameter: Organism Value: A. thaliana
  misc_feature: MA Experiment 20001556 PARAMETER Experiment Name: At_Drought_Soil_Dry_P Parameter: Plant Line Value: WS
  misc_feature: MA Experiment 20001556 PARAMETER Experiment Name: At_Drought_Soil_Dry_P Parameter: Post Timepoint (hr) Value: None
  misc_feature: MA Experiment 20001556 PARAMETER Experiment Name: At_Drought_Soil_Dry_P Parameter: Post-Treatment Value: None
  misc_feature: MA Experiment 20001556 PARAMETER Experiment Name: At_Drought_Soil_Dry_P Parameter: Timepoint (day) Value: 12
  misc_feature: MA Experiment 20001556 PARAMETER Experiment Name: At_Drought_Soil_Dry_P Parameter: Treatment Value: Drought vs. No Drought
  misc_feature: MA Experiment ID: 20001558 Result: Up-regulated in Transcription
  misc_feature: MA Experiment 20001558 PARAMETER Experiment Name: At_Drought_Soil_Dry_P Parameter: Age (day) Value: 27
  misc_feature: MA Experiment 20001558 PARAMETER Experiment Name: At_Drought_Soil_Dry_P Parameter: Organism Value: A. thaliana
  misc_feature: MA Experiment 20001558 PARAMETER Experiment Name: At_Drought_Soil_Dry_P Parameter: Plant Line Value: WS
  misc_feature: MA Experiment 20001558 PARAMETER Experiment Name: At_Drought_Soil_Dry_P Parameter: Post Timepoint (hr) Value: 6
  misc_feature: MA Experiment 20001558 PARAMETER Experiment Name: At_Drought_Soil_Dry_P Parameter: Post-Treatment Value: Re-Water vs. No Drought
  misc_feature: MA Experiment 20001558 PARAMETER Experiment Name: At_Drought_Soil_Dry_P Parameter: Timepoint (day) Value: 13
  misc_feature: MA Experiment 20001558 PARAMETER Experiment Name: At_Drought_Soil_Dry_P Parameter: Treatment Value: Drought vs. No Drought
  misc_feature: MA Experiment ID: 20001757 Result: Up-regulated in Transcription
  misc_feature: MA Experiment 20001757 PARAMETER Experiment Name: At_50mM_NH4NO3_L-to-H_P Parameter: Timepoint (hr) Value: 6
  misc_feature: MA Experiment 20001757 PARAMETER Experiment Name: At_50mM_NH4NO3_L-to-H_P Parameter: Tissue Value: Leaf
  misc_feature: MA Experiment 20001757 PARAMETER Experiment Name: At_50mM_NH4NO3_L-to-H_P Parameter: Treatment Value: 50mM NH4NO3 vs 100mM Mannitol
gtgaaacctccattaccttcgtctttcttcctcagtcgccctacaatggctttgcctttgtctggcacgcgccacctcacgcgcgctctcctctctaatgtcactcttatggctcctcctcggattccttcctctgttcactacggtggatctcggttaggttgttcgacccggttcttctcaattcgatgtggagctaaccggtcaggttctacttactcgccgcttaactctggctctaactttagtgatcggcctccgacggagatggctcctttgtttccgggatgcgattatgagcactggcttattgttatggataaacctggcggggaaggcgcgactaagcagcagatgattgattgttacattcaaaccctagcgaaagtcgttggaagtgaggaagaggcgaagaagcgaatctacaatgtttcatgtgagaggtatttagggtttggttgtgagattgatgaagagacatccactaagcttgaaggtttaccaggtgttctgtttgtgcttccagattcctatgtggatcctgaaaacaaagattatggagctgagctgtttgttaatggagagatagtccaacgatcaccagagaggcagaggcgggttgagccacagccgcagagagcccaagatagaccgagatacaatgacagaactcgttactctcgccgcagagaaaacacaagatgaactgtaactgaagatggtatacatacacctaagctaagccagtatgaggatgatgatgatgatgatgatgatgataatggtggtgaggatgatgttactgccgccacacgagggctctgtattccagtccgttgcagttaatggaccgggcttactttggatattgttgaaattctaagttttgtttctatgtaacaattttatttaataatgtaaattgaggtttcactgttttaggaaattactttgggtagaagattagttttcttttcaagaacaattcatgtgggaaatggtaaatttattttagtaatctttt

SEQ ID NO: 28130 - protein, 234 aa, Arabidopsis thaliana
  peptide (1)..(234): Ceres Seq. ID no. 13495971
  misc_feature (12)..(234): Homolog of NCBI NO: 15230785 NR Description: DAG protein -related [Arabidopsis thaliana]
  misc_feature (12)..(234): Homolog of NCBI NO: 27754695 NR Description: putative DAG protein [Arabidopsis thaliana]
  misc_feature (43)..(234): Homolog of NCBI NO: 15226934 NR Description: expressed protein [Arabidopsis thaliana]
  misc_feature (51)..(234): Homolog of NCBI NO: 34897972 NR Description: putative plastid protein [Oryza sativa (japonica
  misc_feature (58)..(234): Homolog of NCBI NO: 15223247 NR Description: plastid protein -related [Arabidopsis thaliana]
  misc_feature (61)..(232): Homolog of NCBI NO: 38344141 NR Description: OSJNBa0041A02.8 [Oryza sativa (japonica
  misc_feature (37)..(234): Homolog of NCBI NO: 25370552 NR Description: DAG protein homolog [imported] - Arabidopsis
  misc_feature (16)..(234): Homolog of NCBI NO: 2440029 NR Description: DAL1 protein [Arabidopsis thaliana]
  misc_feature (16)..(234): Homolog of NCBI NO: 21617909 NR Description: plastid protein [Arabidopsis thaliana]
  misc_feature (16)..(234): Homolog of NCBI NO: 15226108 NR Description: plastid protein [Arabidopsis thaliana]
VKPPLPSSFFLSRPTMALPLSGTRHLTRALLSNVTLMAPPRIPSSVHYGGSRLGCSTRFFSIRCGANRSGSTYSPLNSGSNFSDRPPTEMAPLFPGCDYEHWLIVMDKPGGEGATKQQMIDCYIQTLAKVVGSEEEAKKRIYNVSCERYLGFGCEIDEETSTKLEGLPGVLFVLPDSYVDPENKDYGAELFVNGEIVQRSPERQRRVEPQPQRAQDRPRYNDRTRYSRRRENTR

SEQ ID NO: 28131 - protein, 219 aa, Arabidopsis thaliana
  peptide (1)..(219): Ceres Seq. ID no. 13495972
  misc_feature (1)..(219): Homolog of NCBI NO: 15230785 NR Description: DAG protein -related [Arabidopsis thaliana]
  misc_feature (1)..(219): Homolog of NCBI NO: 27754695 NR Description: putative DAG protein [Arabidopsis thaliana]
  misc_feature (28)..(219): Homolog of NCBI NO: 15226934 NR Description: expressed protein [Arabidopsis thaliana]
  misc_feature (36)..(219): Homolog of NCBI NO: 34897972 NR Description: putative plastid protein [Oryza sativa (japonica
  misc_feature (43)..(219): Homolog of NCBI NO: 15223247 NR Description: plastid protein -related [Arabidopsis thaliana]
  misc_feature (46)..(217): Homolog of NCBI NO: 38344141 NR Description: OSJNBa0041A02.8 [Oryza sativa (japonica
  misc_feature (22)..(219): Homolog of NCBI NO: 25370552 NR Description: DAG protein homolog [imported] - Arabidopsis
  misc_feature (1)..(219): Homolog of NCBI NO: 2440029 NR Description: DAL1 protein [Arabidopsis thaliana]
  misc_feature (1)..(219): Homolog of NCBI NO: 21617909 NR Description: plastid protein [Arabidopsis thaliana]
  misc_feature (1)..(219): Homolog of NCBI NO: 15226108 NR Description: plastid protein [Arabidopsis thaliana]
MALPLSGTRHLTRALLSNVTLMAPPRIPSSVHYGGSRLGCSTRFFSIRCGANRSGSTYSPLNSGSNFSDRPPTEMAPLFPGCDYEHWLIVMDKPGGEGATKQQMIDCYIQTLAKVVGSEEEAKKRIYNVSCERYLGFGCEIDEETSTKLEGLPGVLFVLPDSYVDPENKDYGAELFVNGEIVQRSPERQRRVEPQPQRAQDRPRYNDRTRYSRRRENTR

SEQ ID NO: 28132 - protein, 198 aa, Arabidopsis thaliana
  peptide (1)..(198): Ceres Seq. ID no. 13495973
  misc_feature (1)..(198): Homolog of NCBI NO: 15230785 NR Description: DAG protein -related [Arabidopsis thaliana]
  misc_feature (1)..(198): Homolog of NCBI NO: 27754695 NR Description: putative DAG protein [Arabidopsis thaliana]
  misc_feature (7)..(198): Homolog of NCBI NO: 15226934 NR Description: expressed protein [Arabidopsis thaliana]
  misc_feature (15)..(198): Homolog of NCBI NO: 34897972 NR Description: putative plastid protein [Oryza sativa (japonica
  misc_feature (22)..(198): Homolog of NCBI NO: 15223247 NR Description: plastid protein -related [Arabidopsis thaliana]
  misc_feature (25)..(196): Homolog of NCBI NO: 38344141 NR Description: OSJNBa0041A02.8 [Oryza sativa (japonica
  misc_feature (1)..(198): Homolog of NCBI NO: 25370552 NR Description: DAG protein homolog [imported] - Arabidopsis
  misc_feature (1)..(198): Homolog of NCBI NO: 2440029 NR Description: DAL1 protein [Arabidopsis thaliana]
  misc_feature (1)..(198): Homolog of NCBI NO: 21617909 NR Description: plastid protein [Arabidopsis thaliana]
  misc_feature (1)..(198): Homolog of NCBI NO: 15226108 NR Description: plastid protein [Arabidopsis thaliana]
MAPPRIPSSVHYGGSRLGCSTRFFSIRCGANRSGSTYSPLNSGSNFSDRPPTEMAPLFPGCDYEHWLIVMDKPGGEGATKQQMIDCYIQTLAKVVGSEEEAKKRIYNVSCERYLGFGCEIDEETSTKLEGLPGVLFVLPDSYVDPENKDYGAELFVNGEIVQRSPERQRRVEPQPQRAQDRPRYNDRTRYSRRRENTR

SEQ ID NO: 28133 - DNA, 656 bp, Arabidopsis thaliana
  misc_feature (1)..(656): Ceres Seq. ID no. 13486772
  misc_feature: MA Experiment ID: 108434 Result: Up-regulated in Transcription
  misc_feature: MA Experiment 108434 PARAMETER Experiment Name: At_Root_Tips_cDNA_P Parameter: Tissue Value: Root Tips
  misc_feature: MA Experiment ID: 20000179 Result: Down-regulated in Transcription
  misc_feature: MA Experiment 20000179 PARAMETER Experiment Name: At_Germinating_Seeds_P Parameter: Age (hr) Value: 6 vs. 0
  misc_feature: MA Experiment 20000179 PARAMETER Experiment Name: At_Germinating_Seeds_P Parameter: Tissue Value: Germinating Seeds
  misc_feature: MA Experiment ID: 20001451 Result: Up-regulated in Transcription
  misc_feature: MA Experiment 20001451 PARAMETER Experiment Name: At_Far-red-induction_P Parameter: Age (day) Value: 7
  misc_feature: MA Experiment 20001451 PARAMETER Experiment Name: At_Far-red-induction_P Parameter: Light Value: Far-red vs. White
  misc_feature: MA Experiment 20001451 PARAMETER Experiment Name: At_Far-red-induction_P Parameter: Organism Value: A. thaliana
  misc_feature: MA Experiment 20001451 PARAMETER Experiment Name: At_Far-red-induction_P Parameter: Plant Line Value: Columbia
  misc_feature: MA Experiment 20001451 PARAMETER Experiment Name: At_Far-red-induction_P Parameter: Timepoint (hr) Value: 24
  misc_feature: MA Experiment 20001451 PARAMETER Experiment Name: At_Far-red-induction_P Parameter: Tissue Value: Whole Plant
tcatcgctgtctggaacagcttgagtgcttcctagagcaaaggagaaaaaaaatggtgaactatgtgctcaaaatcaccgctgatctcgagaatctcactaatctccagccttccggtggctgcgacgattccaacttcccttacctcttcaagttgaaatgtgaaagatgtggagaggtgactccgaaagaaacatgtgtgactttgaatgagacttttactcctccgggaggtaggggtacttgtcatcttgttcagaagtgtaagttctgtggaagggaagggaatgtgactatgattccgggcaaaggtcgacctttaactctggaagattctgaggctggagaacatgcccctcttatggtgtttgactgtcgtggctatgaacccattgatttcggatttggtggatattggaaagctcaagctgaatctggaaccaaatttgatgagattgatttgtcgagcggggaggaattcacagagtacgatgagaagggagaatgcccagtaatgatatcgaatttccgtgcaagcttcagcgtcaccaagtgaagttggtctctgttgtctattttctgattccctacacacttggtgtatgtaaaaaccatggggattatcatttctcaagttctaataaaattctcttttt

SEQ ID NO: 28134 - protein, 184 aa, Arabidopsis thaliana
  peptide (1)..(184): Ceres Seq. ID no. 13486773
  misc_feature (18)..(184): Pfam Name: Eukaryotic protein of unknown function (DUF866) Pfam Description: Eukaryotic protein of unknown function (DUF866)
  misc_feature (21)..(177): Homolog of NCBI NO: 32418144 NR Description: hypothetical protein [Neurospora crassa]
  misc_feature (18)..(168): Homolog of NCBI NO: 26341300 NR Description: unnamed protein product [Mus musculus]
  misc_feature (23)..(168): Homolog of NCBI NO: 21539639 NR Description: RIKEN cDNA 0610037L13 [Mus musculus]
  misc_feature (18)..(166): Homolog of NCBI NO: 27715611 NR Description: similar to hypothetical protein FLJ20580
  misc_feature (18)..(168): Homolog of NCBI NO: 26328397 NR Description: unnamed protein product [Mus musculus]
  misc_feature (23)..(184): Homolog of NCBI NO: 7503539 NR Description: hypothetical protein F46B6.3 - Caenorhabditis
  misc_feature (18)..(168): Homolog of NCBI NO: 8923541 NR Description: hypothetical protein FLJ20580 [Homo sapiens]
  misc_feature (14)..(182): Homolog of NCBI NO: 34914208 NR Description: OSJNBb0049O23.17 [Oryza sativa (japonica
  misc_feature (18)..(184): Homolog of NCBI NO: 7486215 NR Description: hypothetical protein F26P21.50 - Arabidopsis
  misc_feature (18)..(184): Homolog of NCBI NO: 18418118 NR Description: expressed protein [Arabidopsis thaliana]
HRCLEQLECFLEQRRKKMVNYVLKITADLENLTNLQPSGGCDDSNFPYLFKLKCERCGEVTPKETCVTLNETFTPPGGRGTCHLVQKCKFCGREGNVTMIPGKGRPLTLEDSEAGEHAPLMVFDCRGYEPIDFGFGGYWKAQAESGTKFDEIDLSSGEEFTEYDEKGECPVMISNFRASFSVTK

SEQ ID NO: 28135 - protein, 167 aa, Arabidopsis thaliana
  peptide (1)..(167): Ceres Seq. ID no. 13486774
  misc_feature (1)..(167): Pfam Name: Eukaryotic protein of unknown function (DUF866) Pfam Description: Eukaryotic protein of unknown function (DUF866)
  misc_feature (4)..(160): Homolog of NCBI NO: 32418144 NR Description: hypothetical protein [Neurospora crassa]
  misc_feature (1)..(151): Homolog of NCBI NO: 26341300 NR Description: unnamed protein product [Mus musculus]
  misc_feature (6)..(151): Homolog of NCBI NO: 21539639 NR Description: RIKEN cDNA 0610037L13 [Mus musculus]
  misc_feature (1)..(149): Homolog of NCBI NO: 27715611 NR Description: similar to hypothetical protein FLJ20580
  misc_feature (1)..(151): Homolog of NCBI NO: 26328397 NR Description: unnamed protein product [Mus musculus]
  misc_feature (6)..(167): Homolog of NCBI NO: 7503539 NR Description: hypothetical protein F46B6.3 - Caenorhabditis
  misc_feature (1)..(151): Homolog of NCBI NO: 8923541 NR Description: hypothetical protein FLJ20580 [Homo sapiens]
  misc_feature (1)..(165): Homolog of NCBI NO: 34914208 NR Description: OSJNBb0049O23.17 [Oryza sativa (japonica
  misc_feature (1)..(167): Homolog of NCBI NO: 7486215 NR Description: hypothetical protein F26P21.50 - Arabidopsis
  misc_feature (1)..(167): Homolog of NCBI NO: 18418118 NR Description: expressed protein [Arabidopsis thaliana]
MVNYVLKITADLENLTNLQPSGGCDDSNFPYLFKLKCERCGEVTPKETCVTLNETFTPPGGRGTCHLVQKCKFCGREGNVTMIPGKGRPLTLEDSEAGEHAPLMVFDCRGYEPIDFGFGGYWKAQAESGTKFDEIDLSSGEEFTEYDEKGECPVMISNFRASFSVTK

SEQ ID NO: 28136 - DNA, 795 bp, Arabidopsis thaliana
  misc_feature (1)..(795): Ceres Seq. ID no. 13486637
  misc_feature: MA Experiment ID: 108434 Result: Up-regulated in Transcription
  misc_feature: MA Experiment 108434 PARAMETER Experiment Name: At_Root_Tips_cDNA_P Parameter: Tissue Value: Root Tips
  misc_feature: MA Experiment ID: 108573 Result: Down-regulated in Transcription
  misc_feature: MA Experiment 108573 PARAMETER Experiment Name: At_Drought_cDNA_P Parameter: Timepoint (hr) Value: 6
  misc_feature: MA Experiment 108573 PARAMETER Experiment Name: At_Drought_cDNA_P Parameter: Tissue Value: Aerial
  misc_feature: MA Experiment 108573 PARAMETER Experiment Name: At_Drought_cDNA_P Parameter: Treatment Value: Drought vs. No Drought
  misc_feature: MA Experiment ID: 20000227 Result: Down-regulated in Transcription
  misc_feature: MA Experiment 20000227 PARAMETER Experiment Name: At_Root-Tips-vs-Tops_P Parameter: Tissue Value: Root Tips vs. Root Tops
  misc_feature: MA Experiment ID: 20000437 Result: Down-regulated in Transcription
  misc_feature: MA Experiment 20000437 PARAMETER Experiment Name: At_Drought_P Parameter: Age (day) Value: 8
  misc_feature: MA Experiment 20000437 PARAMETER Experiment Name: At_Drought_P Parameter: Organism Value: A. thaliana
  misc_feature: MA Experiment 20000437 PARAMETER Experiment Name: At_Drought_P Parameter: Plant Line Value: WS
  misc_feature: MA Experiment 20000437 PARAMETER Experiment Name: At_Drought_P Parameter: Timepoint (hr) Value: 24
  misc_feature: MA Experiment 20000437 PARAMETER Experiment Name: At_Drought_P Parameter: Tissue Value: Whole Plant
  misc_feature: MA Experiment 20000437 PARAMETER Experiment Name: At_Drought_P Parameter: Treatment Value: Drought vs. No Drought
  misc_feature: MA Experiment ID: 20000496 Result: Up-regulated in Transcription
  misc_feature: MA Experiment 20000496 PARAMETER Experiment Name: At_Guard_Cells_P Parameter: Harvest Date Value: 7/19/2002
  misc_feature: MA Experiment 20000496 PARAMETER Experiment Name: At_Guard_Cells_P Parameter: Organism Value: Canola
  misc_feature: MA Experiment 20000496 PARAMETER Experiment Name: At_Guard_Cells_P Parameter: Tissue Value: Guard Cells vs. Leaves
  misc_feature: MA Experiment ID: 20001905 Result: Down-regulated in Transcription
  misc_feature: MA Experiment 20001905 PARAMETER Experiment Name: At_Drought_Reproduction_P Parameter: Age (day) Value: 40
  misc_feature: MA Experiment 20001905 PARAMETER Experiment Name: At_Drought_Reproduction_P Parameter: Organism Value: A. thaliana
  misc_feature: MA Experiment 20001905 PARAMETER Experiment Name: At_Drought_Reproduction_P Parameter: Plant Line Value: WS
  misc_feature: MA Experiment 20001905 PARAMETER Experiment Name: At_Drought_Reproduction_P Parameter: Timepoint (day) Value: 10
  misc_feature: MA Experiment 20001905 PARAMETER Experiment Name: At_Drought_Reproduction_P Parameter: Tissue Value: Rosettes
  misc_feature: MA Experiment 20001905 PARAMETER Experiment Name: At_Drought_Reproduction_P Parameter: Treatment Value: Drought vs. No Drought
gctcagataagggagacaaaaatggaagtgaaagggaaagagacagcttcggttctgtgtctgagcaaatacgtggatctatcgagtgaagagagtcatagatactatcttgcgcggcgaaatggcttgcagatgctccgagacagaggctacgaagtctccgacgaagatatcaatctctcccttcacgattttcgaactgtttacggtgaacgtcccgatgttgatcgtcttcgcatctccgctctgcatcgctccgattctaccaaaaaggtaaaaattgtcttttttggtactagtatggttaaagtcaacgcaatccgcagtgtagtagcggatatacttagccaagaaaccataactgggctgatattggttctgcaaaaccatgtaaccaatcaagccttgaaagccattgaacttttttctttcaaggtcgagatattccagataacggatctgctagtcaacataaccaaacattcactgaagccacaacatcaggtgttgaatgatgaagagaagacaacacttctcaagaagttcagcattgaggaaaaacagcttcctcggatttcaaagaaagatgctatcgtccggtactacggattagagaaagggcaagttgtgaaggtgaattacagaggcgaactcacggaatcgcatgttgccttccgatgtgtgtggtgaagaaaccaattaaaaaccatcttgtgtacttattttcaggaaaaaataacttgtatgtttctaaggttttgtttttaatcctagaagatccgttgctttgaacac

SEQ ID NO: 28137 - protein, 229 aa, Arabidopsis thaliana
  peptide (1)..(229): Ceres Seq. ID no. 13486638
  misc_feature (25)..(115): Pfam Name: RNA polymerase Rpb5, N-terminal domain Pfam Description: RNA polymerase Rpb5, N-terminal domain
  misc_feature (30)..(228): Homolog of NCBI NO: 14589951 NR Description: DNA directed RNA polymerase II polypeptide E
  misc_feature (30)..(228): Homolog of NCBI NO: 1173134 NR Description: DNA-directed RNA polymerase II 23 kDa polypeptide
  misc_feature (30)..(228): Homolog of NCBI NO: 28497750 NR Description: polymerase (RNA) II (DNA directed) polypeptide E
  misc_feature (27)..(228): Homolog of NCBI NO: 15228724 NR Description: DNA-directed RNA polymerase (RNA polymerase),
  misc_feature (28)..(228): Homolog of NCBI NO: 38344231 NR Description: OJ991113_30.8 [Oryza sativa (japonica
  misc_feature (20)..(228): Homolog of NCBI NO: 15232524 NR Description: eukaryotic rpb5 RNA polymerase subunit family
  misc_feature (8)..(229): Homolog of NCBI NO: 8896071 NR Description: RPB5d [Brassica napus]
  misc_feature (8)..(228): Homolog of NCBI NO: 15227327 NR Description: eukaryotic rpb5 RNA polymerase subunit family
  misc_feature (8)..(229): Homolog of NCBI NO: 21617912 NR Description: putative DNA-directed RNA polymerase 23kD subunit
  misc_feature (8)..(229): Homolog of NCBI NO: 15230206 NR Description: eukaryotic rpb5 RNA polymerase subunit family
AQIRETKMEVKGKETASVLCLSKYVDLSSEESHRYYLARRNGLQMLRDRGYEVSDEDINLSLHDFRTVYGERPDVDRLRISALHRSDSTKKVKIVFFGTSMVKVNAIRSVVADILSQETITGLILVLQNHVTNQALKAIELFSFKVEIFQITDLLVNITKHSLKPQHQVLNDEEKTTLLKKFSIEEKQLPRISKKDAIVRYYGLEKGQVVKVNYRGELTESHVAFRCVW

SEQ ID NO: 28138 - protein, 222 aa, Arabidopsis thaliana
  peptide (1)..(222): Ceres Seq. ID no. 13486639
  misc_feature (18)..(108): Pfam Name: RNA polymerase Rpb5, N-terminal domain Pfam Description: RNA polymerase Rpb5, N-terminal domain
  misc_feature (23)..(221): Homolog of NCBI NO: 14589951 NR Description: DNA directed RNA polymerase II polypeptide E
  misc_feature (23)..(221): Homolog of NCBI NO: 1173134 NR Description: DNA-directed RNA polymerase II 23 kDa polypeptide
  misc_feature (23)..(221): Homolog of NCBI NO: 28497750 NR Description: polymerase (RNA) II (DNA directed) polypeptide E
  misc_feature (20)..(221): Homolog of NCBI NO: 15228724 NR Description: DNA-directed RNA polymerase (RNA polymerase),
  misc_feature (21)..(221): Homolog of NCBI NO: 38344231 NR Description: OJ991113_30.8 [Oryza sativa (japonica
  misc_feature (13)..(221): Homolog of NCBI NO: 15232524 NR Description: eukaryotic rpb5 RNA polymerase subunit family
  misc_feature (1)..(222): Homolog of NCBI NO: 8896071 NR Description: RPB5d [Brassica napus]
  misc_feature (1)..(221): Homolog of NCBI NO: 15227327 NR Description: eukaryotic rpb5 RNA polymerase subunit family
  misc_feature (1)..(222): Homolog of NCBI NO: 21617912 NR Description: putative DNA-directed RNA polymerase 23kD subunit
  misc_feature (1)..(222): Homolog of NCBI NO: 15230206 NR Description: eukaryotic rpb5 RNA polymerase subunit family
MEVKGKETASVLCLSKYVDLSSEESHRYYLARRNGLQMLRDRGYEVSDEDINLSLHDFRTVYGERPDVDRLRISALHRSDSTKKVKIVFFGTSMVKVNAIRSVVADILSQETITGLILVLQNHVTNQALKAIELFSFKVEIFQITDLLVNITKHSLKPQHQVLNDEEKTTLLKKFSIEEKQLPRISKKDAIVRYYGLEKGQVVKVNYRGELTESHVAFRCVW

SEQ ID NO: 28139 - protein, 185 aa, Arabidopsis thaliana
  peptide (1)..(185): Ceres Seq. ID no. 13486640
  misc_feature (1)..(71): Pfam Name: RNA polymerase Rpb5, N-terminal domain Pfam Description: RNA polymerase Rpb5, N-terminal domain
  misc_feature (1)..(184): Homolog of NCBI NO: 14589951 NR Description: DNA directed RNA polymerase II polypeptide E
  misc_feature (1)..(184): Homolog of NCBI NO: 1173134 NR Description: DNA-directed RNA polymerase II 23 kDa polypeptide
  misc_feature (1)..(184): Homolog of NCBI NO: 28497750 NR Description: polymerase (RNA) II (DNA directed) polypeptide E
  misc_feature (1)..(184): Homolog of NCBI NO: 15228724 NR Description: DNA-directed RNA polymerase (RNA polymerase),
  misc_feature (1)..(184): Homolog of NCBI NO: 38344231 NR Description: OJ991113_30.8 [Oryza sativa (japonica
  misc_feature (1)..(184): Homolog of NCBI NO: 15232524 NR Description: eukaryotic rpb5 RNA polymerase subunit family
  misc_feature (1)..(185): Homolog of NCBI NO: 8896071 NR Description: RPB5d [Brassica napus]
  misc_feature (1)..(184): Homolog of NCBI NO: 15227327 NR Description: eukaryotic rpb5 RNA polymerase subunit family
  misc_feature (1)..(185): Homolog of NCBI NO: 21617912 NR Description: putative DNA-directed RNA polymerase 23kD subunit
  misc_feature (1)..(185): Homolog of NCBI NO: 15230206 NR Description: eukaryotic rpb5 RNA polymerase subunit family
MLRDRGYEVSDEDINLSLHDFRTVYGERPDVDRLRISALHRSDSTKKVKIVFFGTSMVKVNAIRSVVADILSQETITGLILVLQNHVTNQALKAIELFSFKVEIFQITDLLVNITKHSLKPQHQVLNDEEKTTLLKKFSIEEKQLPRISKKDAIVRYYGLEKGQVVKVNYRGELTESHVAFRCVW

SEQ ID NO: 28140 - DNA, 900 bp, Arabidopsis thaliana
  misc_feature (1)..(900): Ceres Seq. ID no. 12325562
  misc_feature: MA Experiment ID: 20000072 Result: Up-regulated in Transcription
  misc_feature: MA Experiment 20000072 PARAMETER Experiment Name: At_100uM_ABA_Mutants_cDNA_P Parameter: Plant Line Value: CS8105
  misc_feature: MA Experiment 20000072 PARAMETER Experiment Name: At_100uM_ABA_Mutants_cDNA_P Parameter: Timepoint (hr) Value: 6
  misc_feature: MA Experiment 20000072 PARAMETER Experiment Name: At_100uM_ABA_Mutants_cDNA_P Parameter: Tissue Value: Aerial
  misc_feature: MA Experiment 20000072 PARAMETER Experiment Name: At_100uM_ABA_Mutants_cDNA_P Parameter: Treatment Value: 100uM ABA vs. No Treatment
  misc_feature: MA Experiment ID: 20000180 Result: Down-regulated in Transcription
  misc_feature: MA Experiment 20000180 PARAMETER Experiment Name: At_Germinating_Seeds_P Parameter: Age (hr) Value: 24 vs. 0
  misc_feature: MA Experiment 20000180 PARAMETER Experiment Name: At_Germinating_Seeds_P Parameter: Tissue Value: Germinating Seeds
aaaagaacaagaaaaaagggtgttgttacgatggcatcgagtgataaggttccggtggcgtgtccggcaagcagtggagatggaaaggagccaatgggaaatccgacgaaaaccactacggcgatgctagagaaaggaacggctatgatgcaatcgatgaaaccgatcaggcaaatgagcctccacgtgtgttcattcgcttgctatagccatgatcccggtcgtcagatcgaagttcatatttacggccaccgtataaaccaggatttcctccaatgtgctgtctacgattccaattcctctaaggctcatctcatagggatcgaatatatagtgtcggaaaagttattcgaaagtctctcaccggaggaacaaaagctttggcactcgcatgattacgagatccaaatggctcttctagtaactccaagggtccctgagctcgttgcgaaaccggagcttaaaaatcttgccaaatcttacgggaaattttggtgtacatggcagattgaccgaggggataaattaccactaggtgtaccatcactaatggtatcgccacaagacgtgaatctcgggagaatcaaaccggagttggtgaaaaagagagatgaagaacatggaaactcgactgaatcgttgaagccgtcaagagatgggatctgtggaccagagaagaagaacctggttgctgattattgggttaggtttaggaaaggctttgcgcttgatgttgttgaaacagatatgaagagaacagctcccttcccctaacttttgtgtgtgctttttttctcagacattaattatataagttttcgtaagcttacactagatgggttgtgtacttattatgttatggagtatgataatgtcataaacatgagaattttttcgccc

SEQ ID NO: 28141 - protein, 257 aa, Arabidopsis thaliana
  peptide (1)..(257): Ceres Seq. ID no. 12325563
  misc_feature (20)..(251): Homolog of NCBI NO: 30685146 NR Description: expressed protein [Arabidopsis thaliana]
  misc_feature (24)..(257): Homolog of NCBI NO: 15220526 NR Description: hypothetical protein
  misc_feature (11)..(257): Homolog of NCBI NO: 34910820 NR Description: P0456A01.15 [Oryza sativa (japonica
  misc_feature (24)..(257): Homolog of NCBI NO: 15220516 NR Description: unknown protein; protein id: At1g29680.1
  misc_feature (11)..(257): Homolog of NCBI NO: 34909516 NR Description: P0481E12.28 [Oryza sativa (japonica
  misc_feature (11)..(257): Homolog of NCBI NO: 9758672 NR Description: gene_id:MRA19.8~pir||T05029~strong similarity to
  misc_feature (11)..(257): Homolog of NCBI NO: 15242474 NR Description: putative protein
  misc_feature (11)..(257): Homolog of NCBI NO: 7452426 NR Description: hypothetical protein F13C5.90 - Arabidopsis
  misc_feature (11)..(257): Homolog of NCBI NO: 18415199 NR Description: expressed protein
  misc_feature (11)..(257): Homolog of NCBI NO: 21617913 NR Description: unknown [Arabidopsis thaliana]
KRTRKKGVVTMASSDKVPVACPASSGDGKEPMGNPTKTTTAMLEKGTAMMQSMKPIRQMSLHVCSFACYSHDPGRQIEVHIYGHRINQDFLQCAVYDSNSSKAHLIGIEYIVSEKLFESLSPEEQKLWHSHDYEIQMALLVTPRVPELVAKPELKNLAKSYGKFWCTWQIDRGDKLPLGVPSLMVSPQDVNLGRIKPELVKKRDEEHGNSTESLKPSRDGICGPEKKNLVADYWVRFRKGFALDVVETDMKRTAPFP

SEQ ID NO: 28142 - protein, 247 aa, Arabidopsis thaliana
  peptide (1)..(247): Ceres Seq. ID no. 12325564
  misc_feature (10)..(241): Homolog of NCBI NO: 30685146 NR Description: expressed protein [Arabidopsis thaliana]
  misc_feature (14)..(247): Homolog of NCBI NO: 15220526 NR Description: hypothetical protein
  misc_feature (1)..(247): Homolog of NCBI NO: 34910820 NR Description: P0456A01.15 [Oryza sativa (japonica
  misc_feature (14)..(247): Homolog of NCBI NO: 15220516 NR Description: unknown protein; protein id: At1g29680.1
  misc_feature (1)..(247): Homolog of NCBI NO: 34909516 NR Description: P0481E12.28 [Oryza sativa (japonica
  misc_feature (1)..(247): Homolog of NCBI NO: 9758672 NR Description: gene_id:MRA19.8~pir||T05029~strong similarity to
  misc_feature (1)..(247): Homolog of NCBI NO: 15242474 NR Description: putative protein
  misc_feature (1)..(247): Homolog of NCBI NO: 7452426 NR Description: hypothetical protein F13C5.90 - Arabidopsis
  misc_feature (1)..(247): Homolog of NCBI NO: 18415199 NR Description: expressed protein
  misc_feature (1)..(247): Homolog of NCBI NO: 21617913 NR Description: unknown [Arabidopsis thaliana]
MASSDKVPVACPASSGDGKEPMGNPTKTTTAMLEKGTAMMQSMKPIRQMSLHVCSFACYSHDPGRQIEVHIYGHRINQDFLQCAVYDSNSSKAHLIGIEYIVSEKLFESLSPEEQKLWHSHDYEIQMALLVTPRVPELVAKPELKNLAKSYGKFWCTWQIDRGDKLPLGVPSLMVSPQDVNLGRIKPELVKKRDEEHGNSTESLKPSRDGICGPEKKNLVADYWVRFRKGFALDVVETDMKRTAPFP

SEQ ID NO: 28143 - protein, 226 aa, Arabidopsis thaliana
  peptide (1)..(226): Ceres Seq. ID no. 12325565
  misc_feature (1)..(220): Homolog of NCBI NO: 30685146 NR Description: expressed protein [Arabidopsis thaliana]
  misc_feature (1)..(226): Homolog of NCBI NO: 15220526 NR Description: hypothetical protein
  misc_feature (1)..(226): Homolog of NCBI NO: 34910820 NR Description: P0456A01.15 [Oryza sativa (japonica
  misc_feature (1)..(226): Homolog of NCBI NO: 15220516 NR Description: unknown protein; protein id: At1g29680.1
  misc_feature (1)..(226): Homolog of NCBI NO: 34909516 NR Description: P0481E12.28 [Oryza sativa (japonica
  misc_feature (1)..(226): Homolog of NCBI NO: 9758672 NR Description: gene_id:MRA19.8~pir||T05029~strong similarity to
  misc_feature (1)..(226): Homolog of NCBI NO: 15242474 NR Description: putative protein
  misc_feature (1)..(226): Homolog of NCBI NO: 7452426 NR Description: hypothetical protein F13C5.90 - Arabidopsis
  misc_feature (1)..(226): Homolog of NCBI NO: 18415199 NR Description: expressed protein
  misc_feature (1)..(226): Homolog of NCBI NO: 21617913 NR Description: unknown [Arabidopsis thaliana]
MGNPTKTTTAMLEKGTAMMQSMKPIRQMSLHVCSFACYSHDPGRQIEVHIYGHRINQDFLQCAVYDSNSSKAHLIGIEYIVSEKLFESLSPEEQKLWHSHDYEIQMALLVTPRVPELVAKPELKNLAKSYGKFWCTWQIDRGDKLPLGVPSLMVSPQDVNLGRIKPELVKKRDEEHGNSTESLKPSRDGICGPEKKNLVADYWVRFRKGFALDVVETDMKRTAPFP

SEQ ID NO: 28144 - DNA, 1145 bp, Arabidopsis thaliana
  misc_feature (1)..(1145): Ceres Seq. ID no. 12340183
  misc_feature: MA Experiment ID: 108561 Result: Down-regulated in Transcription
  misc_feature: MA Experiment 108561 PARAMETER Experiment Name: At_100uM_ABA_cDNA_P Parameter: Timepoint (hr) Value: 6
  misc_feature: MA Experiment 108561 PARAMETER Experiment Name: At_100uM_ABA_cDNA_P Parameter: Tissue Value: Aerial
  misc_feature: MA Experiment 108561 PARAMETER Experiment Name: At_100uM_ABA_cDNA_P Parameter: Treatment Value: 100uM ABA vs. No Treatment
  misc_feature: MA Experiment ID: 108569 Result: Up-regulated in Transcription
  misc_feature: MA Experiment 108569 PARAMETER Experiment Name: At_0.001%_MeJA__cDNA_P Parameter: Timepoint (hr) Value: 6
  misc_feature: MA Experiment 108569 PARAMETER Experiment Name: At_0.001%_MeJA__cDNA_P Parameter: Tissue Value: Aerial
  misc_feature: MA Experiment 108569 PARAMETER Experiment Name: At_0.001%_MeJA__cDNA_P Parameter: Treatment Value: 0.001% MeJA vs. No Treatment
  misc_feature: MA Experiment ID: 108573 Result: Down-regulated in Transcription
  misc_feature: MA Experiment 108573 PARAMETER Experiment Name: At_Drought_cDNA_P Parameter: Timepoint (hr) Value: 6
  misc_feature: MA Experiment 108573 PARAMETER Experiment Name: At_Drought_cDNA_P Parameter: Tissue Value: Aerial
  misc_feature: MA Experiment 108573 PARAMETER Experiment Name: At_Drought_cDNA_P Parameter: Treatment Value: Drought vs. No Drought
  misc_feature: MA Experiment ID: 108574 Result: Up-regulated in Transcription
  misc_feature: MA Experiment 108574 PARAMETER Experiment Name: At_Wounding__cDNA_P Parameter: Timepoint (hr) Value: 1
  misc_feature: MA Experiment 108574 PARAMETER Experiment Name: At_Wounding__cDNA_P Parameter: Tissue Value: Aerial
  misc_feature: MA Experiment 108574 PARAMETER Experiment Name: At_Wounding__cDNA_P Parameter: Treatment Value: Wounding vs. No Wounding
  misc_feature: MA Experiment ID: 108595 Result: Down-regulated in Transcription
  misc_feature: MA Experiment 108595 PARAMETER Experiment Name: At_Ler-pi_Ovule_cDNA_P Parameter: Plant Line Value: null
  misc_feature: MA Experiment ID: 108668 Result: Down-regulated in Transcription
  misc_feature: MA Experiment 108668 PARAMETER Experiment Name: At_2mM_SA_cDNA_P Parameter: Plant Line Value: WS
  misc_feature: MA Experiment 108668 PARAMETER Experiment Name: At_2mM_SA_cDNA_P Parameter: Timepoint (hr) Value: 6
  misc_feature: MA Experiment 108668 PARAMETER Experiment Name: At_2mM_SA_cDNA_P Parameter: Treatment Value: 2mM SA vs. No Treatment
  misc_feature: MA Experiment ID: 20000166 Result: Down-regulated in Transcription
  misc_feature: MA Experiment 20000166 PARAMETER Experiment Name: At_100uM_ABA_P Parameter: Age (day) Value: 14
  misc_feature: MA Experiment 20000166 PARAMETER Experiment Name: At_100uM_ABA_P Parameter: Organism Value: A. thaliana
  misc_feature: MA Experiment 20000166 PARAMETER Experiment Name: At_100uM_ABA_P Parameter: Plant Line Value: WS
  misc_feature: MA Experiment 20000166 PARAMETER Experiment Name: At_100uM_ABA_P Parameter: Timepoint (hr) Value: 1
  misc_feature: MA Experiment 20000166 PARAMETER Experiment Name: At_100uM_ABA_P Parameter: Tissue Value: Aerial
  misc_feature: MA Experiment 20000166 PARAMETER Experiment Name: At_100uM_ABA_P Parameter: Treatment Value: 100uM ABA vs. No Treatment
  misc_feature: MA Experiment ID: 20000169 Result: Down-regulated in Transcription
  misc_feature: MA Experiment 20000169 PARAMETER Experiment Name: At_100uM_ABA_P Parameter: Age (day) Value: 14
  misc_feature: MA Experiment 20000169 PARAMETER Experiment Name: At_100uM_ABA_P Parameter: Organism Value: A. thaliana
  misc_feature: MA Experiment 20000169 PARAMETER Experiment Name: At_100uM_ABA_P Parameter: Plant Line Value: WS
  misc_feature: MA Experiment 20000169 PARAMETER Experiment Name: At_100uM_ABA_P Parameter: Timepoint (hr) Value: 6
  misc_feature: MA Experiment 20000169 PARAMETER Experiment Name: At_100uM_ABA_P Parameter: Tissue Value: Aerial
  misc_feature: MA Experiment 20000169 PARAMETER Experiment Name: At_100uM_ABA_P Parameter: Treatment Value: 100uM ABA vs. No Treatment
  misc_feature: MA Experiment ID: 20000171 Result: Down-regulated in Transcription
  misc_feature: MA Experiment 20000171 PARAMETER Experiment Name: At_42deg_Heat_P Parameter: Age (day) Value: 14
  misc_feature: MA Experiment 20000171 PARAMETER Experiment Name: At_42deg_Heat_P Parameter: Organism Value: A. thaliana
  misc_feature: MA Experiment 20000171 PARAMETER Experiment Name: At_42deg_Heat_P Parameter: Plant Line Value: WS
  misc_feature: MA Experiment 20000171 PARAMETER Experiment Name: At_42deg_Heat_P Parameter: Temperature (deg C) Value: 42 vs. 22
  misc_feature: MA Experiment 20000171 PARAMETER Experiment Name: At_42deg_Heat_P Parameter: Timepoint (hr) Value: 1
  misc_feature: MA Experiment 20000171 PARAMETER Experiment Name: At_42deg_Heat_P Parameter: Tissue Value: Aerial
  misc_feature: MA Experiment ID: 20000173 Result: Down-regulated in Transcription
  misc_feature: MA Experiment 20000173 PARAMETER Experiment Name: At_42deg_Heat_P Parameter: Age (day) Value: 14
  misc_feature: MA Experiment 20000173 PARAMETER Experiment Name: At_42deg_Heat_P Parameter: Organism Value: A. thaliana
  misc_feature: MA Experiment 20000173 PARAMETER Experiment Name: At_42deg_Heat_P Parameter: Plant Line Value: WS
  misc_feature: MA Experiment 20000173 PARAMETER Experiment Name: At_42deg_Heat_P Parameter: Temperature (deg C) Value: 42 vs. 22
  misc_feature: MA Experiment 20000173 PARAMETER Experiment Name: At_42deg_Heat_P Parameter: Timepoint (hr) Value: 6
  misc_feature: MA Experiment 20000173 PARAMETER Experiment Name: At_42deg_Heat_P Parameter: Tissue Value: Aerial
  misc_feature: MA Experiment ID: 20000180 Result: Up-regulated in Transcription
  misc_feature: MA Experiment 20000180 PARAMETER Experiment Name: At_Germinating_Seeds_P Parameter: Age (hr) Value: 24 vs. 0
  misc_feature: MA Experiment 20000180 PARAMETER Experiment Name: At_Germinating_Seeds_P Parameter: Tissue Value: Germinating Seeds
  misc_feature: MA Experiment ID: 20000211 Result: Up-regulated in Transcription
  misc_feature: MA Experiment 20000211 PARAMETER Experiment Name: At_0.001percent_MeJA__P Parameter: Age (day) Value: 14
  misc_feature: MA Experiment 20000211 PARAMETER Experiment Name: At_0.001percent_MeJA__P Parameter: Organism Value: A. thaliana
  misc_feature: MA Experiment 20000211 PARAMETER Experiment Name: At_0.001percent_MeJA__P Parameter: Plant Line Value: WS
  misc_feature: MA Experiment 20000211 PARAMETER Experiment Name: At_0.001percent_MeJA__P Parameter: Timepoint (hr) Value: 1
  misc_feature: MA Experiment 20000211 PARAMETER Experiment Name: At_0.001percent_MeJA__P Parameter: Tissue Value: Aerial
  misc_feature: MA Experiment 20000211 PARAMETER Experiment Name: At_0.001percent_MeJA__P Parameter: Treatment Value: 0.001percent MeJA vs. No Treatment
  misc_feature: MA Experiment ID: 20000227 Result: Down-regulated in Transcription
  misc_feature: MA Experiment 20000227 PARAMETER Experiment Name: At_Root-Tips-vs-Tops_P Parameter: Tissue Value: Root Tips vs. Root Tops
  misc_feature: MA Experiment ID: 20000436 Result: Down-regulated in Transcription
  misc_feature: MA Experiment 20000436 PARAMETER Experiment Name: At_Drought_P Parameter: Age (day) Value: 7
  misc_feature: MA Experiment 20000436 PARAMETER Experiment Name: At_Drought_P Parameter: Organism Value: A. thaliana
  misc_feature: MA Experiment 20000436 PARAMETER Experiment Name: At_Drought_P Parameter: Plant Line Value: WS
  misc_feature: MA Experiment 20000436 PARAMETER Experiment Name: At_Drought_P Parameter: Timepoint (hr) Value: 12
  misc_feature: MA Experiment 20000436 PARAMETER Experiment Name: At_Drought_P Parameter: Tissue Value: Whole Plant
  misc_feature: MA Experiment 20000436 PARAMETER Experiment Name: At_Drought_P Parameter: Treatment Value: Drought vs. No Drought
  misc_feature: MA Experiment ID: 20000437 Result: Down-regulated in Transcription
  misc_feature: MA Experiment 20000437 PARAMETER Experiment Name: At_Drought_P Parameter: Age (day) Value: 8
  misc_feature: MA Experiment 20000437 PARAMETER Experiment Name: At_Drought_P Parameter: Organism Value: A. thaliana
  misc_feature: MA Experiment 20000437 PARAMETER Experiment Name: At_Drought_P Parameter: Plant Line Value: WS
  misc_feature: MA Experiment 20000437 PARAMETER Experiment Name: At_Drought_P Parameter: Timepoint (hr) Value: 24
  misc_feature: MA Experiment 20000437 PARAMETER Experiment Name: At_Drought_P Parameter: Tissue Value: Whole Plant
  misc_feature: MA Experiment 20000437 PARAMETER Experiment Name: At_Drought_P Parameter: Treatment Value: Drought vs. No Drought
  misc_feature: MA Experiment ID: 20000438 Result: Up-regulated in Transcription
  misc_feature: MA Experiment 20000438 PARAMETER Experiment Name: At_Shoots__P Parameter: Age (day) Value: 14
  misc_feature: MA Experiment 20000438 PARAMETER Experiment Name: At_Shoots__P Parameter: Tissue Value: Shoots vs. Whole Plant
  misc_feature: MA Experiment ID: 20000439 Result: Up-regulated in Transcription
  misc_feature: MA Experiment 20000439 PARAMETER Experiment Name: At_Roots__P Parameter: Age (day) Value: 14 vs. 21
  misc_feature: MA Experiment 20000439 PARAMETER Experiment Name: At_Roots__P Parameter: Organism Value: A. thaliana
  misc_feature: MA Experiment 20000439 PARAMETER Experiment Name: At_Roots__P Parameter: Tissue Value: Roots vs. Whole Plant
  misc_feature: MA Experiment ID: 20000453 Result: Down-regulated in Transcription
  misc_feature: MA Experiment 20000453 PARAMETER Experiment Name: At_100uM_ABA_P Parameter: Age (day) Value: 15
  misc_feature: MA Experiment 20000453 PARAMETER Experiment Name: At_100uM_ABA_P Parameter: Organism Value: A. thaliana
  misc_feature: MA Experiment 20000453 PARAMETER Experiment Name: At_100uM_ABA_P Parameter: Plant Line Value: WS
  misc_feature: MA Experiment 20000453 PARAMETER Experiment Name: At_100uM_ABA_P Parameter: Timepoint (hr) Value: 24
  misc_feature: MA Experiment 20000453 PARAMETER Experiment Name: At_100uM_ABA_P Parameter: Tissue Value: Aerial
  misc_feature: MA Experiment 20000453 PARAMETER Experiment Name: At_100uM_ABA_P Parameter: Treatment Value: 100uM ABA vs. No Treatment
  misc_feature: MA Experiment ID: 20000574 Result: Down-regulated in Transcription
  misc_feature: MA Experiment 20000574 PARAMETER Experiment Name: At_100uM_ABA_Mutants__P Parameter: Organism Value: A. thaliana
  misc_feature: MA Experiment 20000574 PARAMETER Experiment Name: At_100uM_ABA_Mutants__P Parameter: Plant Line Value: CS23 vs. Ler wt
  misc_feature: MA Experiment 20000574 PARAMETER Experiment Name: At_100uM_ABA_Mutants__P Parameter: Timepoint (hr) Value: N/A
  misc_feature: MA Experiment 20000574 PARAMETER Experiment Name: At_100uM_ABA_Mutants__P Parameter: Tissue Value: Whole Plant
  misc_feature: MA Experiment 20000574 PARAMETER Experiment Name: At_100uM_ABA_Mutants__P Parameter: Treatment Value: None
  misc_feature: MA Experiment ID: 20001450 Result: Down-regulated in Transcription
  misc_feature: MA Experiment 20001450 PARAMETER Experiment Name: At_Far-red-induction_P Parameter: Age (day) Value: 7
  misc_feature: MA Experiment 20001450 PARAMETER Experiment Name: At_Far-red-induction_P Parameter: Light Value: Far-red vs. White
  misc_feature: MA Experiment 20001450 PARAMETER Experiment Name: At_Far-red-induction_P Parameter: Organism Value: A. thaliana
  misc_feature: MA Experiment 20001450 PARAMETER Experiment Name: At_Far-red-induction_P Parameter: Plant Line Value: Columbia
  misc_feature: MA Experiment 20001450 PARAMETER Experiment Name: At_Far-red-induction_P Parameter: Timepoint (hr) Value: 8
  misc_feature: MA Experiment 20001450 PARAMETER Experiment Name: At_Far-red-induction_P Parameter: Tissue Value: Whole Plant
  misc_feature: MA Experiment ID: 20001554 Result: Down-regulated in Transcription
  misc_feature: MA Experiment 20001554 PARAMETER Experiment Name: At_Drought_Soil_Dry_P Parameter: Age (day) Value: 21
  misc_feature: MA Experiment 20001554 PARAMETER Experiment Name: At_Drought_Soil_Dry_P Parameter: Organism Value: A. thaliana
  misc_feature: MA Experiment 20001554 PARAMETER Experiment Name: At_Drought_Soil_Dry_P Parameter: Plant Line Value: WS
  misc_feature: MA Experiment 20001554 PARAMETER Experiment Name: At_Drought_Soil_Dry_P Parameter: Post Timepoint (hr) Value: None
  misc_feature: MA Experiment 20001554 PARAMETER Experiment Name: At_Drought_Soil_Dry_P Parameter: Post-Treatment Value: None
  misc_feature: MA Experiment 20001554 PARAMETER Experiment Name: At_Drought_Soil_Dry_P Parameter: Timepoint (day) Value: 7
  misc_feature: MA Experiment 20001554 PARAMETER Experiment Name: At_Drought_Soil_Dry_P Parameter: Treatment Value: Drought vs. No Drought
  misc_feature: MA Experiment ID: 20001904 Result: Down-regulated in Transcription
  misc_feature: MA Experiment 20001904 PARAMETER Experiment Name: At_Drought_Reproduction_P Parameter: Age (day) Value: 37
  misc_feature: MA Experiment 20001904 PARAMETER Experiment Name: At_Drought_Reproduction_P Parameter: Organism Value: A. thaliana
  misc_feature: MA Experiment 20001904 PARAMETER Experiment Name: At_Drought_Reproduction_P Parameter: Plant Line Value: WS
  misc_feature: MA Experiment 20001904 PARAMETER Experiment Name: At_Drought_Reproduction_P Parameter: Timepoint (day) Value: 7
  misc_feature: MA Experiment 20001904 PARAMETER Experiment Name: At_Drought_Reproduction_P Parameter: Tissue Value: Rosettes
  misc_feature: MA Experiment 20001904 PARAMETER Experiment Name: At_Drought_Reproduction_P Parameter: Treatment Value: Drought vs. No Drought
ctcaaaccaaccaaccaatatatcagatggcttccatggatcacaatcattttctttttcctctcctcttcatcatcatcatctcttccttgcacgttttgcgtgcttcaaccacaccttcacactcacacaaactaaaatccgccactaccattagaaaaatcaaccgtagaggaccttacattggccttgtgacggtctttgagaccgaagaagatgcttttctcggcagtgttgatttcagactcgatcctacgcatcctttcctcgatctctctggaagacgttttcgtatagggaagattcatggaaagaaggttgtgtatgtcagatgtgggataggaatggtgaacgcagcagcagcaacacaacaaatgatagatgtgttcagtgtgaaagggattgtgcattttgggattgctggaaatataaacaactcgatgtccataggagatgtgagcatccctaagcaaatcacgaatgctggcttgtgggattggctgaatccaggcaaagcaaaaggaaatgaggatgtagcgtacttagatgtcgggaactataatgttccacaaggaaacaataagttaggaactattggatacagttacgaggaattatattcagtcagtggtcacatcaattcaccaaagaaagtgttttggattaatacaactcaagagtggcttcatcttgcagctgatcttgagaagatggagctattgcagtgtgtgaatgcaagtctgtgtcttccaaataaacccaaagtagtagttggattaaaagcagccactgctgacatatttgtggataatgcagcctatagaaatttcttatacgatacttttggagtttcctcctcagacatggagagttctgctgtggccatgacgtgcgcatcaaatgggtatccgataattgtgataaggggattatcagatttagcaggagtaggaggagataacactgttcgaaagttcggatctttggctgccactaacactgccaaagctgttttggagttcattaaaaagctcccactgtcctaattcctacgtgtaacctatcattatggatgtttgaatctgtattttccctcttttttctacgttaagaataaaattactaaaatctgttttttcttctcc

SEQ ID NO: 28145 - protein, 347 aa, Arabidopsis thaliana
  peptide (1)..(347): Ceres Seq. ID no. 12340184
  misc_feature (60)..(341): Pfam Name: Phosphorylase family Pfam Description: Phosphorylase family
  misc_feature (61)..(345): Homolog of NCBI NO: 421813 NR Description: storage protein, bark - cottonwood
  misc_feature (116)..(341): Homolog of NCBI NO: 34897886 NR Description: ESTs AU032452(S10068),C23571(S10068) correspond a region of the predicted gene.~Similar to P.trichocarpa x P.
  misc_feature (61)..(345): Homolog of NCBI NO: 481815 NR Description: vegetative storage protein win4.5 - western
  misc_feature (237)..(345): Homolog of NCBI NO: 7487319 NR Description: hypothetical protein T22A6.190 - Arabidopsis
  misc_feature (12)..(235): Homolog of NCBI NO: 7487318 NR Description: hypothetical protein T22A6.180 - Arabidopsis
  misc_feature (12)..(345): Homolog of NCBI NO: 30686500 NR Description: expressed protein [Arabidopsis thaliana]
  misc_feature (12)..(345): Homolog of NCBI NO: 21593613 NR Description: unknown [Arabidopsis thaliana]
  misc_feature (12)..(347): Homolog of NCBI NO: 7487317 NR Description: hypothetical protein T22A6.170 - Arabidopsis
  misc_feature (9)..(347): Homolog of NCBI NO: 18416327 NR Description: putative protein
  misc_feature (9)..(347): Homolog of NCBI NO: 21617914 NR Description: unknown [Arabidopsis thaliana]
QTNQPIYQMASMDHNHFLFPLLFIIIISSLHVLRASTTPSHSHKLKSATTIRKINRRGPYIGLVTVFETEEDAFLGSVDFRLDPTHPFLDLSGRRFRIGKIHGKKVVYVRCGIGMVNAAAATQQMIDVFSVKGIVHFGIAGNINNSMSIGDVSIPKQITNAGLWDWLNPGKAKGNEDVAYLDVGNYNVPQGNNKLGTIGYSYEELYSVSGHINSPKKVFWINTTQEWLHLAADLEKMELLQCVNASLCLPNKPKVVVGLKAATADIFVDNAAYRNFLYDTFGVSSSDMESSAVAMTCASNGYPIIVIRGLSDLAGVGGDNTVRKFGSLAATNTAKAVLEFIKKLPLS

SEQ ID NO: 28146 - protein, 339 aa, Arabidopsis thaliana
  peptide (1)..(339): Ceres Seq. ID no. 12340185
  misc_feature (52)..(333): Pfam Name: Phosphorylase family Pfam Description: Phosphorylase family
  misc_feature (53)..(337): Homolog of NCBI NO: 421813 NR Description: storage protein, bark - cottonwood
  misc_feature (108)..(333): Homolog of NCBI NO: 34897886 NR Description: ESTs AU032452(S10068),C23571(S10068) correspond a region of the predicted gene.~Similar to P.trichocarpa x P.
  misc_feature (53)..(337): Homolog of NCBI NO: 481815 NR Description: vegetative storage protein win4.5 - western
  misc_feature (229)..(337): Homolog of NCBI NO: 7487319 NR Description: hypothetical protein T22A6.190 - Arabidopsis
  misc_feature (4)..(227): Homolog of NCBI NO: 7487318 NR Description: hypothetical protein T22A6.180 - Arabidopsis
  misc_feature (4)..(337): Homolog of NCBI NO: 30686500 NR Description: expressed protein [Arabidopsis thaliana]
  misc_feature (4)..(337): Homolog of NCBI NO: 21593613 NR Description: unknown [Arabidopsis thaliana]
  misc_feature (4)..(339): Homolog of NCBI NO: 7487317 NR Description: hypothetical protein T22A6.170 - Arabidopsis
  misc_feature (1)..(339): Homolog of NCBI NO: 18416327 NR Description: putative protein
  misc_feature (1)..(339): Homolog of NCBI NO: 21617914 NR Description: unknown [Arabidopsis thaliana]
MASMDHNHFLFPLLFIIIISSLHVLRASTTPSHSHKLKSATTIRKINRRGPYIGLVTVFETEEDAFLGSVDFRLDPTHPFLDLSGRRFRIGKIHGKKVVYVRCGIGMVNAAAATQQMIDVFSVKGIVHFGIAGNINNSMSIGDVSIPKQITNAGLWDWLNPGKAKGNEDVAYLDVGNYNVPQGNNKLGTIGYSYEELYSVSGHINSPKKVFWINTTQEWLHLAADLEKMELLQCVNASLCLPNKPKVVVGLKAATADIFVDNAAYRNFLYDTFGVSSSDMESSAVAMTCASNGYPIIVIRGLSDLAGVGGDNTVRKFGSLAATNTAKAVLEFIKKLPLS

SEQ ID NO: 28147 - protein, 336 aa, Arabidopsis thaliana
  peptide (1)..(336): Ceres Seq. ID no. 12340186
  misc_feature (49)..(330): Pfam Name: Phosphorylase family Pfam Description: Phosphorylase family
  misc_feature (50)..(334): Homolog of NCBI NO: 421813 NR Description: storage protein, bark - cottonwood
  misc_feature (105)..(330): Homolog of NCBI NO: 34897886 NR Description: ESTs AU032452(S10068),C23571(S10068) correspond a region of the predicted gene.~Similar to P.trichocarpa x P.
  misc_feature (50)..(334): Homolog of NCBI NO: 481815 NR Description: vegetative storage protein win4.5 - western
  misc_feature (226)..(334): Homolog of NCBI NO: 7487319 NR Description: hypothetical protein T22A6.190 - Arabidopsis
  misc_feature (1)..(224): Homolog of NCBI NO: 7487318 NR Description: hypothetical protein T22A6.180 - Arabidopsis
  misc_feature (1)..(334): Homolog of NCBI NO: 30686500 NR Description: expressed protein [Arabidopsis thaliana]
  misc_feature (1)..(334): Homolog of NCBI NO: 21593613 NR Description: unknown [Arabidopsis thaliana]
  misc_feature (1)..(336): Homolog of NCBI NO: 7487317 NR Description: hypothetical protein T22A6.170 - Arabidopsis
  misc_feature (1)..(336): Homolog of NCBI NO: 18416327 NR Description: putative protein
  misc_feature (1)..(336): Homolog of NCBI NO: 21617914 NR Description: unknown [Arabidopsis thaliana]
MDHNHFLFPLLFIIIISSLHVLRASTTPSHSHKLKSATTIRKINRRGPYIGLVTVFETEEDAFLGSVDFRLDPTHPFLDLSGRRFRIGKIHGKKVVYVRCGIGMVNAAAATQQMIDVFSVKGIVHFGIAGNINNSMSIGDVSIPKQITNAGLWDWLNPGKAKGNEDVAYLDVGNYNVPQGNNKLGTIGYSYEELYSVSGHINSPKKVFWINTTQEWLHLAADLEKMELLQCVNASLCLPNKPKVVVGLKAATADIFVDNAAYRNFLYDTFGVSSSDMESSAVAMTCASNGYPIIVIRGLSDLAGVGGDNTVRKFGSLAATNTAKAVLEFIKKLPLS

SEQ ID NO: 28148 - DNA, 837 bp, Arabidopsis thaliana
  misc_feature (1)..(837): Ceres Seq. ID no. 13490911
  misc_feature: MA Experiment ID: 108435 Result: Down-regulated in Transcription
  misc_feature: MA Experiment 108435 PARAMETER Experiment Name: At_stm_Mutants_cDNA_P Parameter: Plant Line Value: wt Landsburg vs stm
  misc_feature: MA Experiment 108435 PARAMETER Experiment Name: At_stm_Mutants_cDNA_P Parameter: Tissue Value: Shoot Apical Meristem Region
  misc_feature: MA Experiment ID: 108488 Result: Up-regulated in Transcription
  misc_feature: MA Experiment ID: 108561 Result: Down-regulated in Transcription
  misc_feature: MA Experiment 108561 PARAMETER Experiment Name: At_100uM_ABA_cDNA_P Parameter: Timepoint (hr) Value: 6
  misc_feature: MA Experiment 108561 PARAMETER Experiment Name: At_100uM_ABA_cDNA_P Parameter: Tissue Value: Aerial
  misc_feature: MA Experiment 108561 PARAMETER Experiment Name: At_100uM_ABA_cDNA_P Parameter: Treatment Value: 100uM ABA vs. No Treatment
  misc_feature: MA Experiment ID: 108595 Result: Down-regulated in Transcription
  misc_feature: MA Experiment 108595 PARAMETER Experiment Name: At_Ler-pi_Ovule_cDNA_P Parameter: Plant Line Value: null
  misc_feature: MA Experiment ID: 20000069 Result: Down-regulated in Transcription
  misc_feature: MA Experiment 20000069 PARAMETER Experiment Name: At_100uM_ABA_Mutants_cDNA_P Parameter: Plant Line Value: CS23
  misc_feature: MA Experiment 20000069 PARAMETER Experiment Name: At_100uM_ABA_Mutants_cDNA_P Parameter: Timepoint (hr) Value: 6
  misc_feature: MA Experiment 20000069 PARAMETER Experiment Name: At_100uM_ABA_Mutants_cDNA_P Parameter: Tissue Value: Aerial
  misc_feature: MA Experiment 20000069 PARAMETER Experiment Name: At_100uM_ABA_Mutants_cDNA_P Parameter: Treatment Value: 100uM ABA vs. No Treatment
  misc_feature: MA Experiment ID: 20000070 Result: Down-regulated in Transcription
  misc_feature: MA Experiment 20000070 PARAMETER Experiment Name: At_100uM_ABA_Mutants_cDNA_P Parameter: Plant Line Value: CS24
  misc_feature: MA Experiment 20000070 PARAMETER Experiment Name: At_100uM_ABA_Mutants_cDNA_P Parameter: Timepoint (hr) Value: 6
  misc_feature: MA Experiment 20000070 PARAMETER Experiment Name: At_100uM_ABA_Mutants_cDNA_P Parameter: Tissue Value: Aerial
  misc_feature: MA Experiment 20000070 PARAMETER Experiment Name: At_100uM_ABA_Mutants_cDNA_P Parameter: Treatment Value: 100uM ABA vs. No Treatment
  misc_feature: MA Experiment ID: 20000071 Result: Down-regulated in Transcription
  misc_feature: MA Experiment 20000071 PARAMETER Experiment Name: At_100uM_ABA_Mutants_cDNA_P Parameter: Plant Line Value: CS8104
  misc_feature: MA Experiment 20000071 PARAMETER Experiment Name: At_100uM_ABA_Mutants_cDNA_P Parameter: Timepoint (hr) Value: 6
  misc_feature: MA Experiment 20000071 PARAMETER Experiment Name: At_100uM_ABA_Mutants_cDNA_P Parameter: Tissue Value: Aerial
  misc_feature: MA Experiment 20000071 PARAMETER Experiment Name: At_100uM_ABA_Mutants_cDNA_P Parameter: Treatment Value: 100uM ABA vs. No Treatment
  misc_feature: MA Experiment ID: 20000072 Result: Down-regulated in Transcription
  misc_feature: MA Experiment 20000072 PARAMETER Experiment Name: At_100uM_ABA_Mutants_cDNA_P Parameter: Plant Line Value: CS8105
  misc_feature: MA Experiment 20000072 PARAMETER Experiment Name: At_100uM_ABA_Mutants_cDNA_P Parameter: Timepoint (hr) Value: 6
  misc_feature: MA Experiment 20000072 PARAMETER Experiment Name: At_100uM_ABA_Mutants_cDNA_P Parameter: Tissue Value: Aerial
  misc_feature: MA Experiment 20000072 PARAMETER Experiment Name: At_100uM_ABA_Mutants_cDNA_P Parameter: Treatment Value: 100uM ABA vs. No Treatment
  misc_feature: MA Experiment ID: 20000086 Result: Down-regulated in Transcription
  misc_feature: MA Experiment 20000086 PARAMETER Experiment Name: At_100uM_ABA_Mutants_cDNA_P Parameter: Plant Line Value: CS22
  misc_feature: MA Experiment 20000086 PARAMETER Experiment Name: At_100uM_ABA_Mutants_cDNA_P Parameter: Timepoint (hr) Value: 6
  misc_feature: MA Experiment 20000086 PARAMETER Experiment Name: At_100uM_ABA_Mutants_cDNA_P Parameter: Tissue Value: Aerial
  misc_feature: MA Experiment 20000086 PARAMETER Experiment Name: At_100uM_ABA_Mutants_cDNA_P Parameter: Treatment Value: 100uM ABA vs. No Treatment
  misc_feature: MA Experiment ID: 20000087 Result: Down-regulated in Transcription
  misc_feature: MA Experiment 20000087 PARAMETER Experiment Name: At_100uM_ABA_Mutants_cDNA_P Parameter: Plant Line Value: WS
  misc_feature: MA Experiment 20000087 PARAMETER Experiment Name: At_100uM_ABA_Mutants_cDNA_P Parameter: Timepoint (hr) Value: 6
  misc_feature: MA Experiment 20000087 PARAMETER Experiment Name: At_100uM_ABA_Mutants_cDNA_P Parameter: Tissue Value: Aerial
  misc_feature: MA Experiment 20000087 PARAMETER Experiment Name: At_100uM_ABA_Mutants_cDNA_P Parameter: Treatment Value: 100uM ABA vs. No Treatment
  misc_feature: MA Experiment ID: 20000088 Result: Down-regulated in Transcription
  misc_feature: MA Experiment 20000088 PARAMETER Experiment Name: At_100uM_ABA_Mutants_cDNA_P Parameter: Plant Line Value: Landsberg
  misc_feature: MA Experiment 20000088 PARAMETER Experiment Name: At_100uM_ABA_Mutants_cDNA_P Parameter: Timepoint (hr) Value: 6
  misc_feature: MA Experiment 20000088 PARAMETER Experiment Name: At_100uM_ABA_Mutants_cDNA_P Parameter: Tissue Value: Aerial
  misc_feature: MA Experiment 20000088 PARAMETER Experiment Name: At_100uM_ABA_Mutants_cDNA_P Parameter: Treatment Value: 100uM ABA vs. No Treatment
  misc_feature: MA Experiment ID: 20000089 Result: Down-regulated in Transcription
  misc_feature: MA Experiment ID: 20000090 Result: Down-regulated in Transcription
  misc_feature: MA Experiment ID: 20000113 Result: Up-regulated in Transcription
  misc_feature: MA Experiment 20000113 PARAMETER Experiment Name: At_42deg_Heat_cDNA_P Parameter: Temperature (deg C) Value: 42 vs. 22
  misc_feature: MA Experiment 20000113 PARAMETER Experiment Name: At_42deg_Heat_cDNA_P Parameter: Timepoint (hr) Value: 8
  misc_feature: MA Experiment 20000113 PARAMETER Experiment Name: At_42deg_Heat_cDNA_P Parameter: Tissue Value: Aerial
  misc_feature: MA Experiment ID: 20000117 Result: Down-regulated in Transcription
  misc_feature: MA Experiment 20000117 PARAMETER Experiment Name: At_100uM_ABA_Mutants_cDNA_P Parameter: Plant Line Value: Columbia
  misc_feature: MA Experiment 20000117 PARAMETER Experiment Name: At_100uM_ABA_Mutants_cDNA_P Parameter: Timepoint (hr) Value: 6
  misc_feature: MA Experiment 20000117 PARAMETER Experiment Name: At_100uM_ABA_Mutants_cDNA_P Parameter: Tissue Value: Aerial
  misc_feature: MA Experiment 20000117 PARAMETER Experiment Name: At_100uM_ABA_Mutants_cDNA_P Parameter: Treatment Value: 100uM ABA vs. No Treatment
  misc_feature: MA Experiment ID: 20000184 Result: Up-regulated in Transcription
  misc_feature: MA Experiment 20000184 PARAMETER Experiment Name: At_Shoots__P Parameter: Age (day) Value: 7
  misc_feature: MA Experiment 20000184 PARAMETER Experiment Name: At_Shoots__P Parameter: Tissue Value: Shoots vs. Whole Plant
  misc_feature: MA Experiment ID: 20000185 Result: Down-regulated in Transcription
  misc_feature: MA Experiment 20000185 PARAMETER Experiment Name: At_Roots__P Parameter: Age (day) Value: 7 vs. 21
  misc_feature: MA Experiment 20000185 PARAMETER Experiment Name: At_Roots__P Parameter: Organism Value: A. thaliana
  misc_feature: MA Experiment 20000185 PARAMETER Experiment Name: At_Roots__P Parameter: Tissue Value: Roots vs. Whole Plant
  misc_feature: MA Experiment ID: 20000227 Result: Down-regulated in Transcription
  misc_feature: MA Experiment 20000227 PARAMETER Experiment Name: At_Root-Tips-vs-Tops_P Parameter: Tissue Value: Root Tips vs. Root Tops
  misc_feature: MA Experiment ID: 20000439 Result: Down-regulated in Transcription
  misc_feature: MA Experiment 20000439 PARAMETER Experiment Name: At_Roots__P Parameter: Age (day) Value: 14 vs. 21
  misc_feature: MA Experiment 20000439 PARAMETER Experiment Name: At_Roots__P Parameter: Organism Value: A. thaliana
  misc_feature: MA Experiment 20000439 PARAMETER Experiment Name: At_Roots__P Parameter: Tissue Value: Roots vs. Whole Plant
  misc_feature: MA Experiment ID: 20000794 Result: Down-regulated in Transcription
  misc_feature: MA Experiment 20000794 PARAMETER Experiment Name: At_Petals_P Parameter: Age (day) Value: 23-25 days
  misc_feature: MA Experiment 20000794 PARAMETER Experiment Name: At_Petals_P Parameter: Plant Line Value: WS
  misc_feature: MA Experiment 20000794 PARAMETER Experiment Name: At_Petals_P Parameter: Tissue Value: Petals vs. Whole plant
gctctctaaaaaccaaaactcttatcttcggtacagagcaaatcacagctcccgatggccgccacgtcatcatcaccgccgtgtaacatctccgcgtcctccctcctcctccgtcaaccttctcgctcaatccttaaagtgttcggtttattaccacctgtaagtaggaataaccgtaaactcggccggttaacggtgacccggtctaatctggcgcaggattttcttggtgacttcggagctcgtgacccttacccggaggagatagcgagtcaattcggagataaagtgttgggatgccaaagcactgagcacaagattttgataccaaacgcatctgttttgtctctctcccagcttcagtgttcccctgtttcgtcttcacagcctcctttgtccggcgatgatgccagaactctcctccacaaggttttgggatggagtatagtggataatgaagcgggtggtctgaaaataaggtgtatgtggaaagtgagggattttgggtgcggtgttgaactcataaacaggatccataaggttgctgaagcttctggtcattacccttctcttcacttggaaagtcctacccaagttcgagctgaactatttacctcttctatcggagggttgagcatgaatgatttcataatggcggctaaaatagatgatatcaagacttctgatctttcccctaggaaaagagcttgggcgtgatcttcttttcattattttggaacatttttgtttgatagtatgtaatgtatgtgatgtattctaaattgtgtgtgatcggtctacatgtcgagttatatagaaagcattgtcataaccgcc

SEQ ID NO: 28149 - protein, 220 aa, Arabidopsis thaliana
  peptide (1)..(220): Ceres Seq. ID no. 13490912
  misc_feature (108)..(209): Pfam Name: Pterin 4 alpha carbinolamine dehydratase Pfam Description: Pterin 4 alpha carbinolamine dehydratase
  misc_feature (99)..(207): Homolog of NCBI NO: 21673181 NR Description: pterin-4-alpha-carbinolamine dehydratase
  misc_feature (95)..(217): Homolog of NCBI NO: 30690915 NR Description: expressed protein [Arabidopsis thaliana]
  misc_feature (95)..(217): Homolog of NCBI NO: 26449459 NR Description: unknown protein [Arabidopsis thaliana]
  misc_feature (1)..(220): Homolog of NCBI NO: 21617915 NR Description: unknown [Arabidopsis thaliana]
  misc_feature (1)..(220): Homolog of NCBI NO: 15241386 NR Description: expressed protein [Arabidopsis thaliana]
MAATSSSPPCNISASSLLLRQPSRSILKVFGLLPPVSRNNRKLGRLTVTRSNLAQDFLGDFGARDPYPEEIASQFGDKVLGCQSTEHKILIPNASVLSLSQLQCSPVSSSQPPLSGDDARTLLHKVLGWSIVDNEAGGLKIRCMWKVRDFGCGVELINRIHKVAEASGHYPSLHLESPTQVRAELFTSSIGGLSMNDFIMAAKIDDIKTSDLSPRKRAWA

SEQ ID NO: 28150 - DNA, 793 bp, Arabidopsis thaliana
  misc_feature (1)..(793): Ceres Seq. ID no. 12423232
  misc_feature: MA Experiment ID: 108434 Result: Down-regulated in Transcription
  misc_feature: MA Experiment 108434 PARAMETER Experiment Name: At_Root_Tips_cDNA_P Parameter: Tissue Value: Root Tips
  misc_feature: MA Experiment ID: 108435 Result: Up-regulated in Transcription
  misc_feature: MA Experiment 108435 PARAMETER Experiment Name: At_stm_Mutants_cDNA_P Parameter: Plant Line Value: wt Landsburg vs stm
  misc_feature: MA Experiment 108435 PARAMETER Experiment Name: At_stm_Mutants_cDNA_P Parameter: Tissue Value: Shoot Apical Meristem Region
  misc_feature: MA Experiment ID: 108462 Result: Up-regulated in Transcription
  misc_feature: MA Experiment 108462 PARAMETER Experiment Name: At_Germinating_Seeds_cDNA_P Parameter: Age (day) Value: 2 vs. 0
  misc_feature: MA Experiment 108462 PARAMETER Experiment Name: At_Germinating_Seeds_cDNA_P Parameter: Tissue Value: Germinating Seeds
  misc_feature: MA Experiment ID: 108463 Result: Up-regulated in Transcription
  misc_feature: MA Experiment 108463 PARAMETER Experiment Name: At_Germinating_Seeds_cDNA_P Parameter: Age (day) Value: 3 vs. 0
  misc_feature: MA Experiment 108463 PARAMETER Experiment Name: At_Germinating_Seeds_cDNA_P Parameter: Tissue Value: Germinating Seeds
  misc_feature: MA Experiment ID: 108464 Result: Up-regulated in Transcription
  misc_feature: MA Experiment 108464 PARAMETER Experiment Name: At_Germinating_Seeds_cDNA_P Parameter: Age (day) Value: 4 vs. 0
  misc_feature: MA Experiment 108464 PARAMETER Experiment Name: At_Germinating_Seeds_cDNA_P Parameter: Tissue Value: Germinating Seeds
  misc_feature: MA Experiment ID: 108574 Result: Down-regulated in Transcription
  misc_feature: MA Experiment 108574 PARAMETER Experiment Name: At_Wounding__cDNA_P Parameter: Timepoint (hr) Value: 1
  misc_feature: MA Experiment 108574 PARAMETER Experiment Name: At_Wounding__cDNA_P Parameter: Tissue Value: Aerial
  misc_feature: MA Experiment 108574 PARAMETER Experiment Name: At_Wounding__cDNA_P Parameter: Treatment Value: Wounding vs. No Wounding
  misc_feature: MA Experiment ID: 108577 Result: Down-regulated in Transcription
  misc_feature: MA Experiment 108577 PARAMETER Experiment Name: At_42deg_Heat_cDNA_P Parameter: Temperature (deg C) Value: 42 vs. 22
  misc_feature: MA Experiment 108577 PARAMETER Experiment Name: At_42deg_Heat_cDNA_P Parameter: Timepoint (hr) Value: 6
  misc_feature: MA Experiment 108577 PARAMETER Experiment Name: At_42deg_Heat_cDNA_P Parameter: Tissue Value: Aerial
  misc_feature: MA Experiment ID: 108579 Result: Down-regulated in Transcription
  misc_feature: MA Experiment 108579 PARAMETER Experiment Name: At_4deg_Cold_cDNA_P Parameter: Temperature (deg C) Value: 4 vs. 22
  misc_feature: MA Experiment 108579 PARAMETER Experiment Name: At_4deg_Cold_cDNA_P Parameter: Timepoint (hr) Value: 6
  misc_feature: MA Experiment 108579 PARAMETER Experiment Name: At_4deg_Cold_cDNA_P Parameter: Tissue Value: Aerial
  misc_feature: MA Experiment ID: 108594 Result: Down-regulated in Transcription
  misc_feature: MA Experiment 108594 PARAMETER Experiment Name: At_Ler-rhl_Root_cDNA_P Parameter: Plant Line Value: null
  misc_feature: MA Experiment ID: 108595 Result: Down-regulated in Transcription
  misc_feature: MA Experiment 108595 PARAMETER Experiment Name: At_Ler-pi_Ovule_cDNA_P Parameter: Plant Line Value: null
  misc_feature: MA Experiment ID: 108605 Result: Down-regulated in Transcription
  misc_feature: MA Experiment 108605 PARAMETER Experiment Name: At_100uM_ABA_cDNA_P Parameter: Timepoint (hr) Value: 6
  misc_feature: MA Experiment 108605 PARAMETER Experiment Name: At_100uM_ABA_cDNA_P Parameter: Tissue Value: Aerial
  misc_feature: MA Experiment 108605 PARAMETER Experiment Name: At_100uM_ABA_cDNA_P Parameter: Treatment Value: 100uM ABA vs. No Treatment
  misc_feature: MA Experiment ID: 108607 Result: Down-regulated in Transcription
  misc_feature: MA Experiment 108607 PARAMETER Experiment Name: At_100uM_ABA_cDNA_P Parameter: Timepoint (hr) Value: 4
  misc_feature: MA Experiment 108607 PARAMETER Experiment Name: At_100uM_ABA_cDNA_P Parameter: Tissue Value: Aerial
  misc_feature: MA Experiment 108607 PARAMETER Experiment Name: At_100uM_ABA_cDNA_P Parameter: Treatment Value: 100uM ABA vs. No Treatment
  misc_feature: MA Experiment ID: 20000070 Result: Up-regulated in Transcription
  misc_feature: MA Experiment 20000070 PARAMETER Experiment Name: At_100uM_ABA_Mutants_cDNA_P Parameter: Plant Line Value: CS24
  misc_feature: MA Experiment 20000070 PARAMETER Experiment Name: At_100uM_ABA_Mutants_cDNA_P Parameter: Timepoint (hr) Value: 6
  misc_feature: MA Experiment 20000070 PARAMETER Experiment Name: At_100uM_ABA_Mutants_cDNA_P Parameter: Tissue Value: Aerial
  misc_feature: MA Experiment 20000070 PARAMETER Experiment Name: At_100uM_ABA_Mutants_cDNA_P Parameter: Treatment Value: 100uM ABA vs. No Treatment
  misc_feature: MA Experiment ID: 20000090 Result: Up-regulated in Transcription
  misc_feature: MA Experiment ID: 20000112 Result: Down-regulated in Transcription
  misc_feature: MA Experiment 20000112 PARAMETER Experiment Name: At_42deg_Heat_cDNA_P Parameter: Temperature (deg C) Value: 42 vs. 22
  misc_feature: MA Experiment 20000112 PARAMETER Experiment Name: At_42deg_Heat_cDNA_P Parameter: Timepoint (hr) Value: 2
  misc_feature: MA Experiment 20000112 PARAMETER Experiment Name: At_42deg_Heat_cDNA_P Parameter: Tissue Value: Aerial
  misc_feature: MA Experiment ID: 20000144 Result: Down-regulated in Transcription
  misc_feature: MA Experiment 20000144 PARAMETER Experiment Name: At_42deg_Heat_cDNA_P Parameter: Temperature (deg C) Value: 42 vs. 22
  misc_feature: MA Experiment 20000144 PARAMETER Experiment Name: At_42deg_Heat_cDNA_P Parameter: Timepoint (hr) Value: 1
  misc_feature: MA Experiment 20000144 PARAMETER Experiment Name: At_42deg_Heat_cDNA_P Parameter: Tissue Value: Aerial
  misc_feature: MA Experiment ID: 20000169 Result: Down-regulated in Transcription
  misc_feature: MA Experiment 20000169 PARAMETER Experiment Name: At_100uM_ABA_P Parameter: Age (day) Value: 14
  misc_feature: MA Experiment 20000169 PARAMETER Experiment Name: At_100uM_ABA_P Parameter: Organism Value: A. thaliana
  misc_feature: MA Experiment 20000169 PARAMETER Experiment Name: At_100uM_ABA_P Parameter: Plant Line Value: WS
  misc_feature: MA Experiment 20000169 PARAMETER Experiment Name: At_100uM_ABA_P Parameter: Timepoint (hr) Value: 6
  misc_feature: MA Experiment 20000169 PARAMETER Experiment Name: At_100uM_ABA_P Parameter: Tissue Value: Aerial
  misc_feature: MA Experiment 20000169 PARAMETER Experiment Name: At_100uM_ABA_P Parameter: Treatment Value: 100uM ABA vs. No Treatment
  misc_feature: MA Experiment ID: 20000171 Result: Down-regulated in Transcription
  misc_feature: MA Experiment 20000171 PARAMETER Experiment Name: At_42deg_Heat_P Parameter: Age (day) Value: 14
  misc_feature: MA Experiment 20000171 PARAMETER Experiment Name: At_42deg_Heat_P Parameter: Organism Value: A. thaliana
  misc_feature: MA Experiment 20000171 PARAMETER Experiment Name: At_42deg_Heat_P Parameter: Plant Line Value: WS
  misc_feature: MA Experiment 20000171 PARAMETER Experiment Name: At_42deg_Heat_P Parameter: Temperature (deg C) Value: 42 vs. 22
  misc_feature: MA Experiment 20000171 PARAMETER Experiment Name: At_42deg_Heat_P Parameter: Timepoint (hr) Value: 1
  misc_feature: MA Experiment 20000171 PARAMETER Experiment Name: At_42deg_Heat_P Parameter: Tissue Value: Aerial
  misc_feature: MA Experiment ID: 20000173 Result: Down-regulated in Transcription
  misc_feature: MA Experiment 20000173 PARAMETER Experiment Name: At_42deg_Heat_P Parameter: Age (day) Value: 14
  misc_feature: MA Experiment 20000173 PARAMETER Experiment Name: At_42deg_Heat_P Parameter: Organism Value: A. thaliana
  misc_feature: MA Experiment 20000173 PARAMETER Experiment Name: At_42deg_Heat_P Parameter: Plant Line Value: WS
  misc_feature: MA Experiment 20000173 PARAMETER Experiment Name: At_42deg_Heat_P Parameter: Temperature (deg C) Value: 42 vs. 22
  misc_feature: MA Experiment 20000173 PARAMETER Experiment Name: At_42deg_Heat_P Parameter: Timepoint (hr) Value: 6
  misc_feature: MA Experiment 20000173 PARAMETER Experiment Name: At_42deg_Heat_P Parameter: Tissue Value: Aerial
  misc_feature: MA Experiment ID: 20000184 Result: Down-regulated in Transcription
  misc_feature: MA Experiment 20000184 PARAMETER Experiment Name: At_Shoots__P Parameter: Age (day) Value: 7
  misc_feature: MA Experiment 20000184 PARAMETER Experiment Name: At_Shoots__P Parameter: Tissue Value: Shoots vs. Whole Plant
  misc_feature: MA Experiment ID: 20000213 Result: Down-regulated in Transcription
  misc_feature: MA Experiment 20000213 PARAMETER Experiment Name: At_4deg_Cold_P Parameter: Timepoint (hr) Value: 2
  misc_feature: MA Experiment ID: 20000227 Result: Down-regulated in Transcription
  misc_feature: MA Experiment 20000227 PARAMETER Experiment Name: At_Root-Tips-vs-Tops_P Parameter: Tissue Value: Root Tips vs. Root Tops
  misc_feature: MA Experiment ID: 20000234 Result: Down-regulated in Transcription
  misc_feature: MA Experiment 20000234 PARAMETER Experiment Name: At_Siliques_P Parameter: Age (day) Value: 21
  misc_feature: MA Experiment 20000234 PARAMETER Experiment Name: At_Siliques_P Parameter: Organism Value: A. thaliana
  misc_feature: MA Experiment 20000234 PARAMETER Experiment Name: At_Siliques_P Parameter: Plant Line Value: WS
  misc_feature: MA Experiment 20000234 PARAMETER Experiment Name: At_Siliques_P Parameter: Tissue Value: Less Than 5mm Siliques vs. Whole Plant
  misc_feature: MA Experiment ID: 20000264 Result: Down-regulated in Transcription
  misc_feature: MA Experiment 20000264 PARAMETER Experiment Name: At_Open_Flower_P Parameter: Age (day) Value: 21
  misc_feature: MA Experiment 20000264 PARAMETER Experiment Name: At_Open_Flower_P Parameter: Plant Line Value: WS
  misc_feature: MA Experiment 20000264 PARAMETER Experiment Name: At_Open_Flower_P Parameter: Tissue Value: Open Flower vs. Whole Plant
  misc_feature: MA Experiment ID: 20000265 Result: Down-regulated in Transcription
  misc_feature: MA Experiment 20000265 PARAMETER Experiment Name: At_Open_Flower_P Parameter: Age (day) Value: 21
  misc_feature: MA Experiment 20000265 PARAMETER Experiment Name: At_Open_Flower_P Parameter: Plant Line Value: WS
  misc_feature: MA Experiment 20000265 PARAMETER Experiment Name: At_Open_Flower_P Parameter: Tissue Value: Closed Flower vs. Whole Plant
  misc_feature: MA Experiment ID: 20000269 Result: Down-regulated in Transcription
  misc_feature: MA Experiment 20000269 PARAMETER Experiment Name: At_1mM_KNO3_L-vs-H_Roots_P Parameter: Age (day) Value: 7,10,12
  misc_feature: MA Experiment 20000269 PARAMETER Experiment Name: At_1mM_KNO3_L-vs-H_Roots_P Parameter: Organism Value: A. thaliana
  misc_feature: MA Experiment 20000269 PARAMETER Experiment Name: At_1mM_KNO3_L-vs-H_Roots_P Parameter: Plant Line Value: WS
  misc_feature: MA Experiment 20000269 PARAMETER Experiment Name: At_1mM_KNO3_L-vs-H_Roots_P Parameter: Timepoint (day) Value: 7,10,12
  misc_feature: MA Experiment 20000269 PARAMETER Experiment Name: At_1mM_KNO3_L-vs-H_Roots_P Parameter: Tissue Value: Roots
  misc_feature: MA Experiment 20000269 PARAMETER Experiment Name: At_1mM_KNO3_L-vs-H_Roots_P Parameter: Treatment Value: 1mM KNO3 vs. 50mM KNO3
  misc_feature: MA Experiment ID: 20000286 Result: Down-regulated in Transcription
  misc_feature: MA Experiment 20000286 PARAMETER Experiment Name: At_Open_Flower_P Parameter: Age (day) Value: 21
  misc_feature: MA Experiment 20000286 PARAMETER Experiment Name: At_Open_Flower_P Parameter: Plant Line Value: WS
  misc_feature: MA Experiment 20000286 PARAMETER Experiment Name: At_Open_Flower_P Parameter: Tissue Value: Half Open vs. Whole Plant
  misc_feature: MA Experiment ID: 20000308 Result: Up-regulated in Transcription
  misc_feature: MA Experiment 20000308 PARAMETER Experiment Name: At_100mM_NaCl__P Parameter: Age (day) Value: 17
  misc_feature: MA Experiment 20000308 PARAMETER Experiment Name: At_100mM_NaCl__P Parameter: Organism Value: A. thaliana
  misc_feature: MA Experiment 20000308 PARAMETER Experiment Name: At_100mM_NaCl__P Parameter: Plant Line Value: WS
  misc_feature: MA Experiment 20000308 PARAMETER Experiment Name: At_100mM_NaCl__P Parameter: Timepoint (hr) Value: 72
  misc_feature: MA Experiment 20000308 PARAMETER Experiment Name: At_100mM_NaCl__P Parameter: Tissue Value: Whole Plant
  misc_feature: MA Experiment 20000308 PARAMETER Experiment Name: At_100mM_NaCl__P Parameter: Treatment Value: 100mM NaCl vs. No Treatment
  misc_feature: MA Experiment ID: 20000438 Result: Down-regulated in Transcription
  misc_feature: MA Experiment 20000438 PARAMETER Experiment Name: At_Shoots__P Parameter: Age (day) Value: 14
  misc_feature: MA Experiment 20000438 PARAMETER Experiment Name: At_Shoots__P Parameter: Tissue Value: Shoots vs. Whole Plant
  misc_feature: MA Experiment ID: 20000441 Result: Up-regulated in Transcription
  misc_feature: MA Experiment 20000441 PARAMETER Experiment Name: At_1uM_BR-BRZ__P Parameter: Tissue Value: Shoot Apices
  misc_feature: MA Experiment 20000441 PARAMETER Experiment Name: At_1uM_BR-BRZ__P Parameter: Treatment Value: 1uM BR vs. No Treatment
  misc_feature: MA Experiment ID: 20000443 Result: Up-regulated in Transcription
  misc_feature: MA Experiment 20000443 PARAMETER Experiment Name: At_1uM_BR-BRZ__P Parameter: Tissue Value: Shoot Apices
  misc_feature: MA Experiment 20000443 PARAMETER Experiment Name: At_1uM_BR-BRZ__P Parameter: Treatment Value: 1uM BRZ vs. No Treatment
  misc_feature: MA Experiment ID: 20000452 Result: Up-regulated in Transcription
  misc_feature: MA Experiment 20000452 PARAMETER Experiment Name: At_CS6879_Shoots-Roots_P Parameter: Age (day) Value: 14
  misc_feature: MA Experiment 20000452 PARAMETER Experiment Name: At_CS6879_Shoots-Roots_P Parameter: Organism Value: A. thaliana
  misc_feature: MA Experiment 20000452 PARAMETER Experiment Name: At_CS6879_Shoots-Roots_P Parameter: Plant Line Value: CS6879 vs. WS
  misc_feature: MA Experiment 20000452 PARAMETER Experiment Name: At_CS6879_Shoots-Roots_P Parameter: Tissue Value: Shoots
  misc_feature: MA Experiment ID: 20000456 Result: Down-regulated in Transcription
  misc_feature: MA Experiment 20000456 PARAMETER Experiment Name: At_100uM_BA_P Parameter: Age (day) Value: 14
  misc_feature: MA Experiment 20000456 PARAMETER Experiment Name: At_100uM_BA_P Parameter: Organism Value: A. thaliana
  misc_feature: MA Experiment 20000456 PARAMETER Experiment Name: At_100uM_BA_P Parameter: Plant Line Value: WS
  misc_feature: MA Experiment 20000456 PARAMETER Experiment Name: At_100uM_BA_P Parameter: Timepoint (hr) Value: 6
  misc_feature: MA Experiment 20000456 PARAMETER Experiment Name: At_100uM_BA_P Parameter: Tissue Value: Aerial
  misc_feature: MA Experiment 20000456 PARAMETER Experiment Name: At_100uM_BA_P Parameter: Treatment Value: 100uM BA vs. No Treatment
  misc_feature: MA Experiment ID: 20000527 Result: Down-regulated in Transcription
  misc_feature: MA Experiment 20000527 PARAMETER Experiment Name: At_10percent_PEG_P Parameter: Age (day) Value: 20
  misc_feature: MA Experiment 20000527 PARAMETER Experiment Name: At_10percent_PEG_P Parameter: Organism Value: A. thaliana
  misc_feature: MA Experiment 20000527 PARAMETER Experiment Name: At_10percent_PEG_P Parameter: Plant Line Value: WS
  misc_feature: MA Experiment 20000527 PARAMETER Experiment Name: At_10percent_PEG_P Parameter: Timepoint (day) Value: 20
  misc_feature: MA Experiment 20000527 PARAMETER Experiment Name: At_10percent_PEG_P Parameter: Tissue Value: Whole Plant
  misc_feature: MA Experiment 20000527 PARAMETER Experiment Name: At_10percent_PEG_P Parameter: Treatment Value: 10percent PEG vs. No Treatment
  misc_feature: MA Experiment ID: 20000575 Result: Down-regulated in Transcription
  misc_feature: MA Experiment 20000575 PARAMETER Experiment Name: At_100uM_ABA_Mutants__P Parameter: Organism Value: A. thaliana
  misc_feature: MA Experiment 20000575 PARAMETER Experiment Name: At_100uM_ABA_Mutants__P Parameter: Plant Line Value: CS22
  misc_feature: MA Experiment 20000575 PARAMETER Experiment Name: At_100uM_ABA_Mutants__P Parameter: Timepoint (hr) Value: 6
  misc_feature: MA Experiment 20000575 PARAMETER Experiment Name: At_100uM_ABA_Mutants__P Parameter: Tissue Value: Whole Plant
  misc_feature: MA Experiment 20000575 PARAMETER Experiment Name: At_100uM_ABA_Mutants__P Parameter: Treatment Value: 1uM ABA vs. No Treatment
  misc_feature: MA Experiment ID: 20000576 Result: Down-regulated in Transcription
  misc_feature: MA Experiment 20000576 PARAMETER Experiment Name: At_100uM_ABA_Mutants__P Parameter: Organism Value: A. thaliana
  misc_feature: MA Experiment 20000576 PARAMETER Experiment Name: At_100uM_ABA_Mutants__P Parameter: Plant Line Value: CS23
  misc_feature: MA Experiment 20000576 PARAMETER Experiment Name: At_100uM_ABA_Mutants__P Parameter: Timepoint (hr) Value: 6
  misc_feature: MA Experiment 20000576 PARAMETER Experiment Name: At_100uM_ABA_Mutants__P Parameter: Tissue Value: Whole Plant
  misc_feature: MA Experiment 20000576 PARAMETER Experiment Name: At_100uM_ABA_Mutants__P Parameter: Treatment Value: 1uM ABA vs. No Treatment
  misc_feature: MA Experiment ID: 20000794 Result: Down-regulated in Transcription
  misc_feature: MA Experiment 20000794 PARAMETER Experiment Name: At_Petals_P Parameter: Age (day) Value: 23-25 days
  misc_feature: MA Experiment 20000794 PARAMETER Experiment Name: At_Petals_P Parameter: Plant Line Value: WS
  misc_feature: MA Experiment 20000794 PARAMETER Experiment Name: At_Petals_P Parameter: Tissue Value: Petals vs. Whole plant
  misc_feature: MA Experiment ID: 20001451 Result: Down-regulated in Transcription
  misc_feature: MA Experiment 20001451 PARAMETER Experiment Name: At_Far-red-induction_P Parameter: Age (day) Value: 7
  misc_feature: MA Experiment 20001451 PARAMETER Experiment Name: At_Far-red-induction_P Parameter: Light Value: Far-red vs. White
  misc_feature: MA Experiment 20001451 PARAMETER Experiment Name: At_Far-red-induction_P Parameter: Organism Value: A. thaliana
  misc_feature: MA Experiment 20001451 PARAMETER Experiment Name: At_Far-red-induction_P Parameter: Plant Line Value: Columbia
  misc_feature: MA Experiment 20001451 PARAMETER Experiment Name: At_Far-red-induction_P Parameter: Timepoint (hr) Value: 24
  misc_feature: MA Experiment 20001451 PARAMETER Experiment Name: At_Far-red-induction_P Parameter: Tissue Value: Whole Plant
  misc_feature: MA Experiment ID: 20001554 Result: Down-regulated in Transcription
  misc_feature: MA Experiment 20001554 PARAMETER Experiment Name: At_Drought_Soil_Dry_P Parameter: Age (day) Value: 21
  misc_feature: MA Experiment 20001554 PARAMETER Experiment Name: At_Drought_Soil_Dry_P Parameter: Organism Value: A. thaliana
  misc_feature: MA Experiment 20001554 PARAMETER Experiment Name: At_Drought_Soil_Dry_P Parameter: Plant Line Value: WS
  misc_feature: MA Experiment 20001554 PARAMETER Experiment Name: At_Drought_Soil_Dry_P Parameter: Post Timepoint (hr) Value: None
  misc_feature: MA Experiment 20001554 PARAMETER Experiment Name: At_Drought_Soil_Dry_P Parameter: Post-Treatment Value: None
  misc_feature: MA Experiment 20001554 PARAMETER Experiment Name: At_Drought_Soil_Dry_P Parameter: Timepoint (day) Value: 7
  misc_feature: MA Experiment 20001554 PARAMETER Experiment Name: At_Drought_Soil_Dry_P Parameter: Treatment Value: Drought vs. No Drought
  misc_feature: MA Experiment ID: 20001555 Result: Down-regulated in Transcription
  misc_feature: MA Experiment 20001555 PARAMETER Experiment Name: At_Drought_Soil_Dry_P Parameter: Age (day) Value: 24
  misc_feature: MA Experiment 20001555 PARAMETER Experiment Name: At_Drought_Soil_Dry_P Parameter: Organism Value: A. thaliana
  misc_feature: MA Experiment 20001555 PARAMETER Experiment Name: At_Drought_Soil_Dry_P Parameter: Plant Line Value: WS
  misc_feature: MA Experiment 20001555 PARAMETER Experiment Name: At_Drought_Soil_Dry_P Parameter: Post Timepoint (hr) Value: None
  misc_feature: MA Experiment 20001555 PARAMETER Experiment Name: At_Drought_Soil_Dry_P Parameter: Post-Treatment Value: None
  misc_feature: MA Experiment 20001555 PARAMETER Experiment Name: At_Drought_Soil_Dry_P Parameter: Timepoint (day) Value: 10
  misc_feature: MA Experiment 20001555 PARAMETER Experiment Name: At_Drought_Soil_Dry_P Parameter: Treatment Value: Drought vs. No Drought
  misc_feature: MA Experiment ID: 20001556 Result: Down-regulated in Transcription
  misc_feature: MA Experiment 20001556 PARAMETER Experiment Name: At_Drought_Soil_Dry_P Parameter: Age (day) Value: 26
  misc_feature: MA Experiment 20001556 PARAMETER Experiment Name: At_Drought_Soil_Dry_P Parameter: Organism Value: A. thaliana
  misc_feature: MA Experiment 20001556 PARAMETER Experiment Name: At_Drought_Soil_Dry_P Parameter: Plant Line Value: WS
  misc_feature: MA Experiment 20001556 PARAMETER Experiment Name: At_Drought_Soil_Dry_P Parameter: Post Timepoint (hr) Value: None
  misc_feature: MA Experiment 20001556 PARAMETER Experiment Name: At_Drought_Soil_Dry_P Parameter: Post-Treatment Value: None
  misc_feature: MA Experiment 20001556 PARAMETER Experiment Name: At_Drought_Soil_Dry_P Parameter: Timepoint (day) Value: 12
  misc_feature: MA Experiment 20001556 PARAMETER Experiment Name: At_Drought_Soil_Dry_P Parameter: Treatment Value: Drought vs. No Drought
  misc_feature: MA Experiment ID: 20001557 Result: Down-regulated in Transcription
  misc_feature: MA Experiment 20001557 PARAMETER Experiment Name: At_Drought_Soil_Dry_P Parameter: Age (day) Value: 27
  misc_feature: MA Experiment 20001557 PARAMETER Experiment Name: At_Drought_Soil_Dry_P Parameter: Organism Value: A. thaliana
  misc_feature: MA Experiment 20001557 PARAMETER Experiment Name: At_Drought_Soil_Dry_P Parameter: Plant Line Value: WS
  misc_feature: MA Experiment 20001557 PARAMETER Experiment Name: At_Drought_Soil_Dry_P Parameter: Post Timepoint (hr) Value: 3
  misc_feature: MA Experiment 20001557 PARAMETER Experiment Name: At_Drought_Soil_Dry_P Parameter: Post-Treatment Value: Re-Water vs. No Drought
  misc_feature: MA Experiment 20001557 PARAMETER Experiment Name: At_Drought_Soil_Dry_P Parameter: Timepoint (day) Value: 13
  misc_feature: MA Experiment 20001557 PARAMETER Experiment Name: At_Drought_Soil_Dry_P Parameter: Treatment Value: Drought vs. No Drought
  misc_feature: MA Experiment ID: 20001558 Result: Down-regulated in Transcription
  misc_feature: MA Experiment 20001558 PARAMETER Experiment Name: At_Drought_Soil_Dry_P Parameter: Age (day) Value: 27
  misc_feature: MA Experiment 20001558 PARAMETER Experiment Name: At_Drought_Soil_Dry_P Parameter: Organism Value: A. thaliana
  misc_feature: MA Experiment 20001558 PARAMETER Experiment Name: At_Drought_Soil_Dry_P Parameter: Plant Line Value: WS
  misc_feature: MA Experiment 20001558 PARAMETER Experiment Name: At_Drought_Soil_Dry_P Parameter: Post Timepoint (hr) Value: 6
  misc_feature: MA Experiment 20001558 PARAMETER Experiment Name: At_Drought_Soil_Dry_P Parameter: Post-Treatment Value: Re-Water vs. No Drought
  misc_feature: MA Experiment 20001558 PARAMETER Experiment Name: At_Drought_Soil_Dry_P Parameter: Timepoint (day) Value: 13
  misc_feature: MA Experiment 20001558 PARAMETER Experiment Name: At_Drought_Soil_Dry_P Parameter: Treatment Value: Drought vs. No Drought
  misc_feature: MA Experiment ID: 20001559 Result: Down-regulated in Transcription
  misc_feature: MA Experiment 20001559 PARAMETER Experiment Name: At_Drought_Soil_Dry_P Parameter: Age (day) Value: 28
  misc_feature: MA Experiment 20001559 PARAMETER Experiment Name: At_Drought_Soil_Dry_P Parameter: Organism Value: A. thaliana
  misc_feature: MA Experiment 20001559 PARAMETER Experiment Name: At_Drought_Soil_Dry_P Parameter: Plant Line Value: WS
  misc_feature: MA Experiment 20001559 PARAMETER Experiment Name: At_Drought_Soil_Dry_P Parameter: Post Timepoint (hr) Value: 29
  misc_feature: MA Experiment 20001559 PARAMETER Experiment Name: At_Drought_Soil_Dry_P Parameter: Post-Treatment Value: Re-Water vs. No Drought
  misc_feature: MA Experiment 20001559 PARAMETER Experiment Name: At_Drought_Soil_Dry_P Parameter: Timepoint (day) Value: 14
  misc_feature: MA Experiment 20001559 PARAMETER Experiment Name: At_Drought_Soil_Dry_P Parameter: Treatment Value: Drought vs. No Drought
  misc_feature: MA Experiment ID: 20001560 Result: Down-regulated in Transcription
  misc_feature: MA Experiment 20001560 PARAMETER Experiment Name: At_Drought_Soil_Dry_P Parameter: Age (day) Value: 28
  misc_feature: MA Experiment 20001560 PARAMETER Experiment Name: At_Drought_Soil_Dry_P Parameter: Organism Value: A. thaliana
  misc_feature: MA Experiment 20001560 PARAMETER Experiment Name: At_Drought_Soil_Dry_P Parameter: Plant Line Value: WS
  misc_feature: MA Experiment 20001560 PARAMETER Experiment Name: At_Drought_Soil_Dry_P Parameter: Post Timepoint (hr) Value: None
  misc_feature: MA Experiment 20001560 PARAMETER Experiment Name: At_Drought_Soil_Dry_P Parameter: Post-Treatment Value: None
  misc_feature: MA Experiment 20001560 PARAMETER Experiment Name: At_Drought_Soil_Dry_P Parameter: Timepoint (day) Value: 14
  misc_feature: MA Experiment 20001560 PARAMETER Experiment Name: At_Drought_Soil_Dry_P Parameter: Treatment Value: Drought vs. No Drought
  misc_feature: MA Experiment ID: 20001757 Result: Up-regulated in Transcription
  misc_feature: MA Experiment 20001757 PARAMETER Experiment Name: At_50mM_NH4NO3_L-to-H_P Parameter: Timepoint (hr) Value: 6
  misc_feature: MA Experiment 20001757 PARAMETER Experiment Name: At_50mM_NH4NO3_L-to-H_P Parameter: Tissue Value: Leaf
  misc_feature: MA Experiment 20001757 PARAMETER Experiment Name: At_50mM_NH4NO3_L-to-H_P Parameter: Treatment Value: 50mM NH4NO3 vs 100mM Mannitol
  misc_feature: MA Experiment ID: 20001760 Result: Down-regulated in Transcription
  misc_feature: MA Experiment 20001760 PARAMETER Experiment Name: At_50mM_NH4NO3_L-to-H_P Parameter: Timepoint (hr) Value: 2
  misc_feature: MA Experiment 20001760 PARAMETER Experiment Name: At_50mM_NH4NO3_L-to-H_P Parameter: Tissue Value: Siliques
  misc_feature: MA Experiment 20001760 PARAMETER Experiment Name: At_50mM_NH4NO3_L-to-H_P Parameter: Treatment Value: 50mM NH4NO3 vs 100mM Mannitol
  misc_feature: MA Experiment ID: 20001771 Result: Down-regulated in Transcription
  misc_feature: MA Experiment 20001771 PARAMETER Experiment Name: At_Far-red-enriched-adult_P Parameter: Age (day) Value: 28
  misc_feature: MA Experiment 20001771 PARAMETER Experiment Name: At_Far-red-enriched-adult_P Parameter: Light Value: Far-red enriched vs. White
  misc_feature: MA Experiment 20001771 PARAMETER Experiment Name: At_Far-red-enriched-adult_P Parameter: Organism Value: A. thaliana
  misc_feature: MA Experiment 20001771 PARAMETER Experiment Name: At_Far-red-enriched-adult_P Parameter: Plant Line Value: Columbia
  misc_feature: MA Experiment 20001771 PARAMETER Experiment Name: At_Far-red-enriched-adult_P Parameter: Timepoint (hr) Value: 16
  misc_feature: MA Experiment 20001771 PARAMETER Experiment Name: At_Far-red-enriched-adult_P Parameter: Tissue Value: Aerial
  misc_feature: MA Experiment ID: 20001774 Result: Up-regulated in Transcription
  misc_feature: MA Experiment 20001774 PARAMETER Experiment Name: At_Far-red-enriched-adult_P Parameter: Age (day) Value: 31
  misc_feature: MA Experiment 20001774 PARAMETER Experiment Name: At_Far-red-enriched-adult_P Parameter: Light Value: Far-red enriched vs. White
  misc_feature: MA Experiment 20001774 PARAMETER Experiment Name: At_Far-red-enriched-adult_P Parameter: Organism Value: A. thaliana
  misc_feature: MA Experiment 20001774 PARAMETER Experiment Name: At_Far-red-enriched-adult_P Parameter: Plant Line Value: Columbia
  misc_feature: MA Experiment 20001774 PARAMETER Experiment Name: At_Far-red-enriched-adult_P Parameter: Timepoint (hr) Value: 72
  misc_feature: MA Experiment 20001774 PARAMETER Experiment Name: At_Far-red-enriched-adult_P Parameter: Tissue Value: Aerial
  misc_feature: MA Experiment ID: 20001906 Result: Down-regulated in Transcription
  misc_feature: MA Experiment 20001906 PARAMETER Experiment Name: At_Drought_Reproduction_P Parameter: Age (day) Value: 35
  misc_feature: MA Experiment 20001906 PARAMETER Experiment Name: At_Drought_Reproduction_P Parameter: Organism Value: A. thaliana
  misc_feature: MA Experiment 20001906 PARAMETER Experiment Name: At_Drought_Reproduction_P Parameter: Plant Line Value: WS
  misc_feature: MA Experiment 20001906 PARAMETER Experiment Name: At_Drought_Reproduction_P Parameter: Timepoint (day) Value: 5
  misc_feature: MA Experiment 20001906 PARAMETER Experiment Name: At_Drought_Reproduction_P Parameter: Tissue Value: Siliques
  misc_feature: MA Experiment 20001906 PARAMETER Experiment Name: At_Drought_Reproduction_P Parameter: Treatment Value: Drought vs. No Drought
agaccaccaagaaaacaaagacttatcgatcatgaagatcagacttagcataaccatcatacttttatcatacacagtggctacggtggccggacaacaatgcggtcgtcaaggcggtggtcgaacttgtcccggtaacatctgctgcagtcagtacggttactgtggtaccaccgcggactactgttctccgaccaacaactgtcagagcaattgttggggaagtgggcctagcggaccaggggagagcgcgtcgaacgtacgcgccacctaccatttctataatccggcgcagaataattgggatttgagagccgtgagtgcttattgctccacgtgggatgctgataagccgtacgcatggcggagcaagtatggctggaccgccttctgcgggccggcaggacctcgtggtcaagcttcttgcggcaagtgtttaagggtgaagaacacaagaacaaatgctgcagtaactgtgagaatagtggaccaatgcagcaacggaggcttggatttggatgtagcaatgttcaatcaaatagacaccgatggttttggctatcaacaaggccatctcattgttgactaccaatttgtcgactgtggcaatgagctcattgggcagcctgattccagaaacatgcttgtttcggccattgatcgcgtttgatattatgtaatgattttgaggtcaatatcgatcggtctacataaaaataataaagaccgctatatatgtattgtcgagggatatatgtttcgtatcaataaggaaattttaaatattattatc

SEQ ID NO: 28151 - protein, 222 aa, Arabidopsis thaliana
  peptide (1)..(222): Ceres Seq. ID no. 12423233
  misc_feature (83)..(201): Pfam Name: Barwin family Pfam Description: Barwin family
  misc_feature (16)..(221): Homolog of NCBI NO: 7442144 NR Description: CBP20 preproprotein - common tobacco
  misc_feature (32)..(203): Homolog of NCBI NO: 2832430 NR Description: prohevein [Hevea brasiliensis]
  misc_feature (16)..(221): Homolog of NCBI NO: 632736 NR Description: CBP20 [Nicotiana tabacum]
  misc_feature (19)..(203): Homolog of NCBI NO: 123062 NR Description: Hevein precursor (Major hevein)
  misc_feature (16)..(203): Homolog of NCBI NO: 139698 NR Description: Wound-induced protein WIN1 precursor
  misc_feature (19)..(221): Homolog of NCBI NO: 7442143 NR Description: wound-induced protein (clone TAB7) - tomato
  misc_feature (20)..(221): Homolog of NCBI NO: 139699 NR Description: Wound-induced protein WIN2 precursor
  misc_feature (32)..(220): Homolog of NCBI NO: 6562381 NR Description: pseudo-hevein [Hevea brasiliensis]
  misc_feature (11)..(180): Homolog of NCBI NO: 24417288 NR Description: unknown [Arabidopsis thaliana]
  misc_feature (11)..(222): Homolog of NCBI NO: 15229342 NR Description: hevein-like protein precursor (PR-4)
DHQENKDLSIMKIRLSITIILLSYTVATVAGQQCGRQGGGRTCPGNICCSQYGYCGTTADYCSPTNNCQSNCWGSGPSGPGESASNVRATYHFYNPAQNNWDLRAVSAYCSTWDADKPYAWRSKYGWTAFCGPAGPRGQASCGKCLRVKNTRTNAAVTVRIVDQCSNGGLDLDVAMFNQIDTDGFGYQQGHLIVDYQFVDCGNELIGQPDSRNMLVSAIDRV

SEQ ID NO: 28152 - protein, 212 aa, Arabidopsis thaliana
  peptide (1)..(212): Ceres Seq. ID no. 12423234
  misc_feature (73)..(191): Pfam Name: Barwin family Pfam Description: Barwin family
  misc_feature (6)..(211): Homolog of NCBI NO: 7442144 NR Description: CBP20 preproprotein - common tobacco
  misc_feature (22)..(193): Homolog of NCBI NO: 2832430 NR Description: prohevein [Hevea brasiliensis]
  misc_feature (6)..(211): Homolog of NCBI NO: 632736 NR Description: CBP20 [Nicotiana tabacum]
  misc_feature (9)..(193): Homolog of NCBI NO: 123062 NR Description: Hevein precursor (Major hevein)
  misc_feature (6)..(193): Homolog of NCBI NO: 139698 NR Description: Wound-induced protein WIN1 precursor
  misc_feature (9)..(211): Homolog of NCBI NO: 7442143 NR Description: wound-induced protein (clone TAB7) - tomato
  misc_feature (10)..(211): Homolog of NCBI NO: 139699 NR Description: Wound-induced protein WIN2 precursor
  misc_feature (22)..(210): Homolog of NCBI NO: 6562381 NR Description: pseudo-hevein [Hevea brasiliensis]
  misc_feature (1)..(170): Homolog of NCBI NO: 24417288 NR Description: unknown [Arabidopsis thaliana]
  misc_feature (1)..(212): Homolog of NCBI NO: 15229342 NR Description: hevein-like protein precursor (PR-4)
MKIRLSITIILLSYTVATVAGQQCGRQGGGRTCPGNICCSQYGYCGTTADYCSPTNNCQSNCWGSGPSGPGESASNVRATYHFYNPAQNNWDLRAVSAYCSTWDADKPYAWRSKYGWTAFCGPAGPRGQASCGKCLRVKNTRTNAAVTVRIVDQCSNGGLDLDVAMFNQIDTDGFGYQQGHLIVDYQFVDCGNELIGQPDSRNMLVSAIDRV

SEQ ID NO: 28153 - DNA, 1879 bp, Arabidopsis thaliana
  misc_feature (1)..(1879): Ceres Seq. ID no. 13487772
  misc_feature: MA Experiment ID: 108462 Result: Down-regulated in Transcription
  misc_feature: MA Experiment 108462 PARAMETER Experiment Name: At_Germinating_Seeds_cDNA_P Parameter: Age (day) Value: 2 vs. 0
  misc_feature: MA Experiment 108462 PARAMETER Experiment Name: At_Germinating_Seeds_cDNA_P Parameter: Tissue Value: Germinating Seeds
  misc_feature: MA Experiment ID: 108463 Result: Down-regulated in Transcription
  misc_feature: MA Experiment 108463 PARAMETER Experiment Name: At_Germinating_Seeds_cDNA_P Parameter: Age (day) Value: 3 vs. 0
  misc_feature: MA Experiment 108463 PARAMETER Experiment Name: At_Germinating_Seeds_cDNA_P Parameter: Tissue Value: Germinating Seeds
  misc_feature: MA Experiment ID: 108464 Result: Down-regulated in Transcription
  misc_feature: MA Experiment 108464 PARAMETER Experiment Name: At_Germinating_Seeds_cDNA_P Parameter: Age (day) Value: 4 vs. 0
  misc_feature: MA Experiment 108464 PARAMETER Experiment Name: At_Germinating_Seeds_cDNA_P Parameter: Tissue Value: Germinating Seeds
  misc_feature: MA Experiment ID: 108572 Result: Down-regulated in Transcription
  misc_feature: MA Experiment 108572 PARAMETER Experiment Name: At_Drought_cDNA_P Parameter: Timepoint (hr) Value: 1
  misc_feature: MA Experiment 108572 PARAMETER Experiment Name: At_Drought_cDNA_P Parameter: Tissue Value: Aerial
  misc_feature: MA Experiment 108572 PARAMETER Experiment Name: At_Drought_cDNA_P Parameter: Treatment Value: Drought vs. No Drought
  misc_feature: MA Experiment ID: 108573 Result: Down-regulated in Transcription
  misc_feature: MA Experiment 108573 PARAMETER Experiment Name: At_Drought_cDNA_P Parameter: Timepoint (hr) Value: 6
  misc_feature: MA Experiment 108573 PARAMETER Experiment Name: At_Drought_cDNA_P Parameter: Tissue Value: Aerial
  misc_feature: MA Experiment 108573 PARAMETER Experiment Name: At_Drought_cDNA_P Parameter: Treatment Value: Drought vs. No Drought
  misc_feature: MA Experiment ID: 108585 Result: Down-regulated in Transcription
  misc_feature: MA Experiment 108585 PARAMETER Experiment Name: At_5mM_NaNP_cDNA_P Parameter: Timepoint (hr) Value: 6
  misc_feature: MA Experiment 108585 PARAMETER Experiment Name: At_5mM_NaNP_cDNA_P Parameter: Tissue Value: Aerial
  misc_feature: MA Experiment 108585 PARAMETER Experiment Name: At_5mM_NaNP_cDNA_P Parameter: Treatment Value: null
  misc_feature: MA Experiment ID: 20000087 Result: Down-regulated in Transcription
  misc_feature: MA Experiment 20000087 PARAMETER Experiment Name: At_100uM_ABA_Mutants_cDNA_P Parameter: Plant Line Value: WS
  misc_feature: MA Experiment 20000087 PARAMETER Experiment Name: At_100uM_ABA_Mutants_cDNA_P Parameter: Timepoint (hr) Value: 6
  misc_feature: MA Experiment 20000087 PARAMETER Experiment Name: At_100uM_ABA_Mutants_cDNA_P Parameter: Tissue Value: Aerial
  misc_feature: MA Experiment 20000087 PARAMETER Experiment Name: At_100uM_ABA_Mutants_cDNA_P Parameter: Treatment Value: 100uM ABA vs. No Treatment
  misc_feature: MA Experiment ID: 20000088 Result: Up-regulated in Transcription
  misc_feature: MA Experiment 20000088 PARAMETER Experiment Name: At_100uM_ABA_Mutants_cDNA_P Parameter: Plant Line Value: Landsberg
  misc_feature: MA Experiment 20000088 PARAMETER Experiment Name: At_100uM_ABA_Mutants_cDNA_P Parameter: Timepoint (hr) Value: 6
  misc_feature: MA Experiment 20000088 PARAMETER Experiment Name: At_100uM_ABA_Mutants_cDNA_P Parameter: Tissue Value: Aerial
  misc_feature: MA Experiment 20000088 PARAMETER Experiment Name: At_100uM_ABA_Mutants_cDNA_P Parameter: Treatment Value: 100uM ABA vs. No Treatment
  misc_feature: MA Experiment ID: 20000089 Result: Up-regulated in Transcription
  misc_feature: MA Experiment ID: 20000090 Result: Up-regulated in Transcription
  misc_feature: MA Experiment ID: 20000093 Result: Up-regulated in Transcription
  misc_feature: MA Experiment 20000093 PARAMETER Experiment Name: At_42deg_Heat_cDNA_P Parameter: Temperature (deg C) Value: 42 vs. 22
  misc_feature: MA Experiment 20000093 PARAMETER Experiment Name: At_42deg_Heat_cDNA_P Parameter: Timepoint (hr) Value: 0.5
  misc_feature: MA Experiment 20000093 PARAMETER Experiment Name: At_42deg_Heat_cDNA_P Parameter: Tissue Value: Aerial
  misc_feature: MA Experiment ID: 20001556 Result: Up-regulated in Transcription
  misc_feature: MA Experiment 20001556 PARAMETER Experiment Name: At_Drought_Soil_Dry_P Parameter: Age (day) Value: 26
  misc_feature: MA Experiment 20001556 PARAMETER Experiment Name: At_Drought_Soil_Dry_P Parameter: Organism Value: A. thaliana
  misc_feature: MA Experiment 20001556 PARAMETER Experiment Name: At_Drought_Soil_Dry_P Parameter: Plant Line Value: WS
  misc_feature: MA Experiment 20001556 PARAMETER Experiment Name: At_Drought_Soil_Dry_P Parameter: Post Timepoint (hr) Value: None
  misc_feature: MA Experiment 20001556 PARAMETER Experiment Name: At_Drought_Soil_Dry_P Parameter: Post-Treatment Value: None
  misc_feature: MA Experiment 20001556 PARAMETER Experiment Name: At_Drought_Soil_Dry_P Parameter: Timepoint (day) Value: 12
  misc_feature: MA Experiment 20001556 PARAMETER Experiment Name: At_Drought_Soil_Dry_P Parameter: Treatment Value: Drought vs. No Drought
tggatctacttagtacttacttagtagttacttctctgtcttatttgattttgagtctctgttttgtctcttctcttgagattgcgataatgagagaacggattattacattcgtttcgctgcttcttgtagctttgctttcgtttcccagtgttagctactgtgacgaccaaacgatcctgtatgaatcgtttgacgagccttttgatggtcgctgggtcgtttcagagaaagctgaataccaaggtgtgtggaagcacgagaagagtgaagggcatgatgattatggacttctagtgagtgagaaagctaagaagtacggaatagttaaagagcttgatgttgatgagcctctaaaccttaacgaaggaactgttgttcttcaatacgaggctcgtttccaagaagggcttgagtgtggtggtgcttacttaaagtatcttcgtcctcaagaagctggatgggttcctcaagggtttgataatgattctccttactctatcatgtttggacctgataagtgtggtgctaccaacaaggttcatttcatcttgaagcataagaatcccaagagtggcgagtttgttgagcaccatctcaagttccctccttctgttccgtttgacatgctttctcatgtctacactgcggtcttgaaatctgataatgaggtgaggattttggtcgatggtgaggagaagaagaagggtaatttactgtctgctgaagactttgagcctccgttgattccttccaagaccatccctgatccagaggacaagaagccagaagactgggatgagagagccaagattcctgatcctaatgctgtgaagcctgatgactgggatgaggatgcacccatggagattgaagatgaggaagctgagaaacccgaaggatggttggatgatgagcctgtagaggttgaagaccccgaggcaagcaagccagaagattgggatgacgaggaagatggtgagtgggaggctcctaaggtttccaacaccaagtgtgaggcagcacccggatgtggcgaatggaagagaccgatgaagaggaaccctgcttacaagggcaaatggagctcacctctcatagataacccagcttacaagggaatctggaaaccaagagacattccaaatcctgattattttgagcttgagaggccgaatttggagcccattgctgccattggtattgagatatggacaatgcaagacggtatcttatttgacaacatcttgatatctaaagacgagaaggttgctgaaacttacagacaaagcacttggaagcccaagtttgatgtggagaaagagaaacaaaaggcagaggatgaagctgctggtgaggcagatggtctcaagagttaccagaagaaggtgttcgacctcttgtacaaggttgcagacatttctttccttagtgcgtacaagtcaaagattatggaacttattgagaaagctgaaacacagccaaacttaaccatcggtgtgctcatttccatcgtgatcgtcttcctctctctcttcttcaagctcatatttggtggtgcaaaggctaaggtagaaaagaagaaaccggaaacagctgcagagacctcgacaagcgaggcaaagacagaggagaaagcagaagcggtggctgcaccacgaaagaggcagacgaggcgtgagagttagataaaaagaggattagattttgatttttggggctttttgttttgatttatcaccgtatagacaaacagtagtggacctgatattaagacgattattgtaacatgttttttttgtatgcttttagtttcacatgaatctgaatgtggatcacaacatttatgagttgaaatttgataagtaatgggttgtgt

SEQ ID NO: 28154 - protein, 561 aa, Arabidopsis thaliana
  peptide (1)..(561): Ceres Seq. ID no. 13487773
  misc_feature (62)..(558): Homolog of NCBI NO: 40740610 NR Description: hypothetical protein AN3592.2 [Aspergillus
  misc_feature (143)..(558): Homolog of NCBI NO: 7441503 NR Description: calnexin - maize (fragment)
  misc_feature (29)..(561): Homolog of NCBI NO: 11131766 NR Description: Calnexin homolog precursor
  misc_feature (38)..(561): Homolog of NCBI NO: 11131469 NR Description: Calnexin homolog precursor
  misc_feature (39)..(561): Homolog of NCBI NO: 21740628 NR Description: OSJNBb0012E08.10 [Oryza sativa (japonica
  misc_feature (56)..(561): Homolog of NCBI NO: 3334138 NR Description: CALNEXIN HOMOLOG PRECURSOR
  misc_feature (30)..(561): Homolog of NCBI NO: 31321896 NR Description: putative papillar cell-specific calnexin
  misc_feature (30)..(561): Homolog of NCBI NO: 15240353 NR Description: calnexin 1 (CNX1) [Arabidopsis thaliana]
  misc_feature (30)..(561): Homolog of NCBI NO: 473878 NR Description: calnexin homolog
  misc_feature (30)..(561): Homolog of NCBI NO: 15240773 NR Description: calnexin, putative [Arabidopsis thaliana]
  misc_feature (62)..(558): Homolog of NCBI NO: 40740610 NR Description: hypothetical protein AN3592.2 [Aspergillus
  misc_feature (143)..(558): Homolog of NCBI NO: 7441503 NR Description: calnexin - maize (fragment)
  misc_feature (29)..(561): Homolog of NCBI NO: 11131766 NR Description: Calnexin homolog precursor
  misc_feature (38)..(561): Homolog of NCBI NO: 11131469 NR Description: Calnexin homolog precursor
  misc_feature (39)..(561): Homolog of NCBI NO: 21740628 NR Description: OSJNBb0012E08.10 [Oryza sativa (japonica
  misc_feature (56)..(561): Homolog of NCBI NO: 3334138 NR Description: CALNEXIN HOMOLOG PRECURSOR
  misc_feature (30)..(561): Homolog of NCBI NO: 31321896 NR Description: putative papillar cell-specific calnexin
  misc_feature (30)..(561): Homolog of NCBI NO: 15240353 NR Description: calnexin 1 (CNX1) [Arabidopsis thaliana]
  misc_feature (30)..(561): Homolog of NCBI NO: 473878 NR Description: calnexin homolog
  misc_feature (30)..(561): Homolog of NCBI NO: 15240773 NR Description: calnexin, putative [Arabidopsis thaliana]
DLLSTYLVVTSLSYLILSLCFVSSLEIAIMRERIITFVSLLLVALLSFPSVSYCDDQTILYESFDEPFDGRWVVSEKAEYQGVWKHEKSEGHDDYGLLVSEKAKKYGIVKELDVDEPLNLNEGTVVLQYEARFQEGLECGGAYLKYLRPQEAGWVPQGFDNDSPYSIMFGPDKCGATNKVHFILKHKNPKSGEFVEHHLKFPPSVPFDMLSHVYTAVLKSDNEVRILVDGEEKKKGNLLSAEDFEPPLIPSKTIPDPEDKKPEDWDERAKIPDPNAVKPDDWDEDAPMEIEDEEAEKPEGWLDDEPVEVEDPEASKPEDWDDEEDGEWEAPKVSNTKCEAAPGCGEWKRPMKRNPAYKGKWSSPLIDNPAYKGIWKPRDIPNPDYFELERPNLEPIAAIGIEIWTMQDGILFDNILISKDEKVAETYRQSTWKPKFDVEKEKQKAEDEAAGEADGLKSYQKKVFDLLYKVADISFLSAYKSKIMELIEKAETQPNLTIGVLISIVIVFLSLFFKLIFGGAKAKVEKKKPETAAETSTSEAKTEEKAEAVAAPRKRQTRRES

SEQ ID NO: 28155 - protein, 532 aa, Arabidopsis thaliana
  peptide (1)..(532): Ceres Seq. ID no. 13487774
  misc_feature (33)..(529): Homolog of NCBI NO: 40740610 NR Description: hypothetical protein AN3592.2 [Aspergillus
  misc_feature (114)..(529): Homolog of NCBI NO: 7441503 NR Description: calnexin - maize (fragment)
  misc_feature (1)..(532): Homolog of NCBI NO: 11131766 NR Description: Calnexin homolog precursor
  misc_feature (9)..(532): Homolog of NCBI NO: 11131469 NR Description: Calnexin homolog precursor
  misc_feature (10)..(532): Homolog of NCBI NO: 21740628 NR Description: OSJNBb0012E08.10 [Oryza sativa (japonica
  misc_feature (27)..(532): Homolog of NCBI NO: 3334138 NR Description: CALNEXIN HOMOLOG PRECURSOR
  misc_feature (1)..(532): Homolog of NCBI NO: 31321896 NR Description: putative papillar cell-specific calnexin
  misc_feature (1)..(532): Homolog of NCBI NO: 15240353 NR Description: calnexin 1 (CNX1) [Arabidopsis thaliana]
  misc_feature (1)..(532): Homolog of NCBI NO: 473878 NR Description: calnexin homolog
  misc_feature (1)..(532): Homolog of NCBI NO: 15240773 NR Description: calnexin, putative [Arabidopsis thaliana]
  misc_feature (33)..(529): Homolog of NCBI NO: 40740610 NR Description: hypothetical protein AN3592.2 [Aspergillus
  misc_feature (114)..(529): Homolog of NCBI NO: 7441503 NR Description: calnexin - maize (fragment)
  misc_feature (1)..(532): Homolog of NCBI NO: 11131766 NR Description: Calnexin homolog precursor
  misc_feature (9)..(532): Homolog of NCBI NO: 11131469 NR Description: Calnexin homolog precursor
  misc_feature (10)..(532): Homolog of NCBI NO: 21740628 NR Description: OSJNBb0012E08.10 [Oryza sativa (japonica
  misc_feature (27)..(532): Homolog of NCBI NO: 3334138 NR Description: CALNEXIN HOMOLOG PRECURSOR
  misc_feature (1)..(532): Homolog of NCBI NO: 31321896 NR Description: putative papillar cell-specific calnexin
  misc_feature (1)..(532): Homolog of NCBI NO: 15240353 NR Description: calnexin 1 (CNX1) [Arabidopsis thaliana]
  misc_feature (1)..(532): Homolog of NCBI NO: 473878 NR Description: calnexin homolog
  misc_feature (1)..(532): Homolog of NCBI NO: 15240773 NR Description: calnexin, putative [Arabidopsis thaliana]
MRERIITFVSLLLVALLSFPSVSYCDDQTILYESFDEPFDGRWVVSEKAEYQGVWKHEKSEGHDDYGLLVSEKAKKYGIVKELDVDEPLNLNEGTVVLQYEARFQEGLECGGAYLKYLRPQEAGWVPQGFDNDSPYSIMFGPDKCGATNKVHFILKHKNPKSGEFVEHHLKFPPSVPFDMLSHVYTAVLKSDNEVRILVDGEEKKKGNLLSAEDFEPPLIPSKTIPDPEDKKPEDWDERAKIPDPNAVKPDDWDEDAPMEIEDEEAEKPEGWLDDEPVEVEDPEASKPEDWDDEEDGEWEAPKVSNTKCEAAPGCGEWKRPMKRNPAYKGKWSSPLIDNPAYKGIWKPRDIPNPDYFELERPNLEPIAAIGIEIWTMQDGILFDNILISKDEKVAETYRQSTWKPKFDVEKEKQKAEDEAAGEADGLKSYQKKVFDLLYKVADISFLSAYKSKIMELIEKAETQPNLTIGVLISIVIVFLSLFFKLIFGGAKAKVEKKKPETAAETSTSEAKTEEKAEAVAAPRKRQTRRES

SEQ ID NO: 28156 - protein, 394 aa, Arabidopsis thaliana
  peptide (1)..(394): Ceres Seq. ID no. 13487775
  misc_feature (1)..(391): Homolog of NCBI NO: 40740610 NR Description: hypothetical protein AN3592.2 [Aspergillus
  misc_feature (1)..(391): Homolog of NCBI NO: 7441503 NR Description: calnexin - maize (fragment)
  misc_feature (1)..(394): Homolog of NCBI NO: 11131766 NR Description: Calnexin homolog precursor
  misc_feature (1)..(394): Homolog of NCBI NO: 11131469 NR Description: Calnexin homolog precursor
  misc_feature (1)..(394): Homolog of NCBI NO: 21740628 NR Description: OSJNBb0012E08.10 [Oryza sativa (japonica
  misc_feature (1)..(394): Homolog of NCBI NO: 3334138 NR Description: CALNEXIN HOMOLOG PRECURSOR
  misc_feature (1)..(394): Homolog of NCBI NO: 31321896 NR Description: putative papillar cell-specific calnexin
  misc_feature (1)..(394): Homolog of NCBI NO: 15240353 NR Description: calnexin 1 (CNX1) [Arabidopsis thaliana]
  misc_feature (1)..(394): Homolog of NCBI NO: 473878 NR Description: calnexin homolog
  misc_feature (1)..(394): Homolog of NCBI NO: 15240773 NR Description: calnexin, putative [Arabidopsis thaliana]
  misc_feature (1)..(391): Homolog of NCBI NO: 40740610 NR Description: hypothetical protein AN3592.2 [Aspergillus
  misc_feature (1)..(391): Homolog of NCBI NO: 7441503 NR Description: calnexin - maize (fragment)
  misc_feature (1)..(394): Homolog of NCBI NO: 11131766 NR Description: Calnexin homolog precursor
  misc_feature (1)..(394): Homolog of NCBI NO: 11131469 NR Description: Calnexin homolog precursor
  misc_feature (1)..(394): Homolog of NCBI NO: 21740628 NR Description: OSJNBb0012E08.10 [Oryza sativa (japonica
  misc_feature (1)..(394): Homolog of NCBI NO: 3334138 NR Description: CALNEXIN HOMOLOG PRECURSOR
  misc_feature (1)..(394): Homolog of NCBI NO: 31321896 NR Description: putative papillar cell-specific calnexin
  misc_feature (1)..(394): Homolog of NCBI NO: 15240353 NR Description: calnexin 1 (CNX1) [Arabidopsis thaliana]
  misc_feature (1)..(394): Homolog of NCBI NO: 473878 NR Description: calnexin homolog
  misc_feature (1)..(394): Homolog of NCBI NO: 15240773 NR Description: calnexin, putative [Arabidopsis thaliana]
MFGPDKCGATNKVHFILKHKNPKSGEFVEHHLKFPPSVPFDMLSHVYTAVLKSDNEVRILVDGEEKKKGNLLSAEDFEPPLIPSKTIPDPEDKKPEDWDERAKIPDPNAVKPDDWDEDAPMEIEDEEAEKPEGWLDDEPVEVEDPEASKPEDWDDEEDGEWEAPKVSNTKCEAAPGCGEWKRPMKRNPAYKGKWSSPLIDNPAYKGIWKPRDIPNPDYFELERPNLEPIAAIGIEIWTMQDGILFDNILISKDEKVAETYRQSTWKPKFDVEKEKQKAEDEAAGEADGLKSYQKKVFDLLYKVADISFLSAYKSKIMELIEKAETQPNLTIGVLISIVIVFLSLFFKLIFGGAKAKVEKKKPETAAETSTSEAKTEEKAEAVAAPRKRQTRRES

SEQ ID NO: 28157 - DNA, 912 bp, Arabidopsis thaliana
  misc_feature (1)..(912): Ceres Seq. ID no. 12340195
  misc_feature: MA Experiment ID: 20000227 Result: Down-regulated in Transcription
  misc_feature: MA Experiment 20000227 PARAMETER Experiment Name: At_Root-Tips-vs-Tops_P Parameter: Tissue Value: Root Tips vs. Root Tops
  misc_feature: MA Experiment ID: 20000264 Result: Up-regulated in Transcription
  misc_feature: MA Experiment 20000264 PARAMETER Experiment Name: At_Open_Flower_P Parameter: Age (day) Value: 21
  misc_feature: MA Experiment 20000264 PARAMETER Experiment Name: At_Open_Flower_P Parameter: Plant Line Value: WS
  misc_feature: MA Experiment 20000264 PARAMETER Experiment Name: At_Open_Flower_P Parameter: Tissue Value: Open Flower vs. Whole Plant
  misc_feature: MA Experiment ID: 20000286 Result: Up-regulated in Transcription
  misc_feature: MA Experiment 20000286 PARAMETER Experiment Name: At_Open_Flower_P Parameter: Age (day) Value: 21
  misc_feature: MA Experiment 20000286 PARAMETER Experiment Name: At_Open_Flower_P Parameter: Plant Line Value: WS
  misc_feature: MA Experiment 20000286 PARAMETER Experiment Name: At_Open_Flower_P Parameter: Tissue Value: Half Open vs. Whole Plant
  misc_feature: MA Experiment ID: 20000794 Result: Up-regulated in Transcription
  misc_feature: MA Experiment 20000794 PARAMETER Experiment Name: At_Petals_P Parameter: Age (day) Value: 23-25 days
  misc_feature: MA Experiment 20000794 PARAMETER Experiment Name: At_Petals_P Parameter: Plant Line Value: WS
  misc_feature: MA Experiment 20000794 PARAMETER Experiment Name: At_Petals_P Parameter: Tissue Value: Petals vs. Whole plant
  misc_feature: MA Experiment ID: 20001557 Result: Up-regulated in Transcription
  misc_feature: MA Experiment 20001557 PARAMETER Experiment Name: At_Drought_Soil_Dry_P Parameter: Age (day) Value: 27
  misc_feature: MA Experiment 20001557 PARAMETER Experiment Name: At_Drought_Soil_Dry_P Parameter: Organism Value: A. thaliana
  misc_feature: MA Experiment 20001557 PARAMETER Experiment Name: At_Drought_Soil_Dry_P Parameter: Plant Line Value: WS
  misc_feature: MA Experiment 20001557 PARAMETER Experiment Name: At_Drought_Soil_Dry_P Parameter: Post Timepoint (hr) Value: 3
  misc_feature: MA Experiment 20001557 PARAMETER Experiment Name: At_Drought_Soil_Dry_P Parameter: Post-Treatment Value: Re-Water vs. No Drought
  misc_feature: MA Experiment 20001557 PARAMETER Experiment Name: At_Drought_Soil_Dry_P Parameter: Timepoint (day) Value: 13
  misc_feature: MA Experiment 20001557 PARAMETER Experiment Name: At_Drought_Soil_Dry_P Parameter: Treatment Value: Drought vs. No Drought
cagagaagtggattactctgataaatctgttacagagaacacacgtgctgcctacccaattgagttcattccaaatgcgaaaataccatgtgttggtccacacccgacaaatgtgatacttctggcttgtgatgcctttggtgttctcccacctgtgagcaagctgaatctggcacaaaccatgtaccacttcatcagtggttacactgctcttgttgctggcacagaggatggtatcaaggagccaacagcaacattctcagcttgctttggtgcagctttcataatgttgcatcccacaaagtatgcagctatgttagctgagaagatgaagtcacaaggtgctactggttggctcgtcaacactggttggtctggtggcagttatggtgttggaaacagaatcaagctggcatacactagaaagatcatcgatgcaatccattcgggcagtctcttgaaggcaaactacaagaaaaccgaaatctttggatttgaaatcccaactgagatcgaagggataccttcagagatcttggaccccgtcaactcctggtctgataagaaggcacacaaagatactctggtgaaactgggaggtctgttcaagaagaacttcgaggtttttgctaaccataagattggtgtggatggtaagcttacgaaggagattctcgctgctggtcctatcttttagaaaaaccaaactctgaatgatgttgtcgaaaagaaagaaagatctactattattaagaagaataaaatgagactttgtgtttttctttgctgtgataatctctctgaataatagagagaatttaatgttccaaatgtggtgcgatatggataatgatgatgactatatgtaatttattactatccatcgtcatatatttttgttgggcctttgcc

SEQ ID NO: 28158 - protein, 231 aa, Arabidopsis thaliana
  peptide (1)..(231): Ceres Seq. ID no. 12340196
  misc_feature (1)..(178): Pfam Name: Phosphoenolpyruvate carboxykinase Pfam Description: Phosphoenolpyruvate carboxykinase
  misc_feature (1)..(231): Homolog of NCBI NO: 1346771 NR Description: Phosphoenolpyruvate carboxykinase [ATP] 1
  misc_feature (1)..(231): Homolog of NCBI NO: 13785469 NR Description: phosphoenolpyruvate carboxykinase [Flaveria
  misc_feature (1)..(231): Homolog of NCBI NO: 13785467 NR Description: phosphoenolpyruvate carboxykinase [Flaveria
  misc_feature (1)..(231): Homolog of NCBI NO: 22328084 NR Description: similar to phosphoenolpyruvate carboxykinase
  misc_feature (1)..(231): Homolog of NCBI NO: 13785471 NR Description: phosphoenolpyruvate carboxykinase [Flaveria
  misc_feature (1)..(231): Homolog of NCBI NO: 17225488 NR Description: phosphoenolpyruvate carboxykinase [Lycopersicon
  misc_feature (1)..(231): Homolog of NCBI NO: 16950587 NR Description: phosphoenolpyruvate carboxykinase [Lycopersicon
  misc_feature (1)..(231): Homolog of NCBI NO: 7449799 NR Description: probable phosphoenolpyruvate carboxykinase (ATP)
  misc_feature (1)..(231): Homolog of NCBI NO: 15235730 NR Description: phosphoenolpyruvate carboxykinase (ATP) -like
REVDYSDKSVTENTRAAYPIEFIPNAKIPCVGPHPTNVILLACDAFGVLPPVSKLNLAQTMYHFISGYTALVAGTEDGIKEPTATFSACFGAAFIMLHPTKYAAMLAEKMKSQGATGWLVNTGWSGGSYGVGNRIKLAYTRKIIDAIHSGSLLKANYKKTEIFGFEIPTEIEGIPSEILDPVNSWSDKKAHKDTLVKLGGLFKKNFEVFANHKIGVDGKLTKEILAAGPIF

SEQ ID NO: 28159 - protein, 171 aa, Arabidopsis thaliana
  peptide (1)..(171): Ceres Seq. ID no. 12340197
  misc_feature (1)..(118): Pfam Name: Phosphoenolpyruvate carboxykinase Pfam Description: Phosphoenolpyruvate carboxykinase
  misc_feature (1)..(171): Homolog of NCBI NO: 1346771 NR Description: Phosphoenolpyruvate carboxykinase [ATP] 1
  misc_feature (1)..(171): Homolog of NCBI NO: 13785469 NR Description: phosphoenolpyruvate carboxykinase [Flaveria
  misc_feature (1)..(171): Homolog of NCBI NO: 13785467 NR Description: phosphoenolpyruvate carboxykinase [Flaveria
  misc_feature (1)..(171): Homolog of NCBI NO: 22328084 NR Description: similar to phosphoenolpyruvate carboxykinase
  misc_feature (1)..(171): Homolog of NCBI NO: 13785471 NR Description: phosphoenolpyruvate carboxykinase [Flaveria
  misc_feature (1)..(171): Homolog of NCBI NO: 17225488 NR Description: phosphoenolpyruvate carboxykinase [Lycopersicon
  misc_feature (1)..(171): Homolog of NCBI NO: 16950587 NR Description: phosphoenolpyruvate carboxykinase [Lycopersicon
  misc_feature (1)..(171): Homolog of NCBI NO: 7449799 NR Description: probable phosphoenolpyruvate carboxykinase (ATP)
  misc_feature (1)..(171): Homolog of NCBI NO: 15235730 NR Description: phosphoenolpyruvate carboxykinase (ATP) -like
MYHFISGYTALVAGTEDGIKEPTATFSACFGAAFIMLHPTKYAAMLAEKMKSQGATGWLVNTGWSGGSYGVGNRIKLAYTRKIIDAIHSGSLLKANYKKTEIFGFEIPTEIEGIPSEILDPVNSWSDKKAHKDTLVKLGGLFKKNFEVFANHKIGVDGKLTKEILAAGPIF

SEQ ID NO: 28160 - protein, 136 aa, Arabidopsis thaliana
  peptide (1)..(136): Ceres Seq. ID no. 12340198
  misc_feature (1)..(83): Pfam Name: Phosphoenolpyruvate carboxykinase Pfam Description: Phosphoenolpyruvate carboxykinase
  misc_feature (1)..(136): Homolog of NCBI NO: 1346771 NR Description: Phosphoenolpyruvate carboxykinase [ATP] 1
  misc_feature (1)..(136): Homolog of NCBI NO: 13785469 NR Description: phosphoenolpyruvate carboxykinase [Flaveria
  misc_feature (1)..(136): Homolog of NCBI NO: 13785467 NR Description: phosphoenolpyruvate carboxykinase [Flaveria
  misc_feature (1)..(136): Homolog of NCBI NO: 22328084 NR Description: similar to phosphoenolpyruvate carboxykinase
  misc_feature (1)..(136): Homolog of NCBI NO: 13785471 NR Description: phosphoenolpyruvate carboxykinase [Flaveria
  misc_feature (1)..(136): Homolog of NCBI NO: 17225488 NR Description: phosphoenolpyruvate carboxykinase [Lycopersicon
  misc_feature (1)..(136): Homolog of NCBI NO: 16950587 NR Description: phosphoenolpyruvate carboxykinase [Lycopersicon
  misc_feature (1)..(136): Homolog of NCBI NO: 7449799 NR Description: probable phosphoenolpyruvate carboxykinase (ATP)
  misc_feature (1)..(136): Homolog of NCBI NO: 15235730 NR Description: phosphoenolpyruvate carboxykinase (ATP) -like
MLHPTKYAAMLAEKMKSQGATGWLVNTGWSGGSYGVGNRIKLAYTRKIIDAIHSGSLLKANYKKTEIFGFEIPTEIEGIPSEILDPVNSWSDKKAHKDTLVKLGGLFKKNFEVFANHKIGVDGKLTKEILAAGPIF

SEQ ID NO: 28161 - DNA, 828 bp, Arabidopsis thaliana
  misc_feature (1)..(828): Ceres Seq. ID no. 12340170
  misc_feature: MA Experiment ID: 20000166 Result: Up-regulated in Transcription
  misc_feature: MA Experiment 20000166 PARAMETER Experiment Name: At_100uM_ABA_P Parameter: Age (day) Value: 14
  misc_feature: MA Experiment 20000166 PARAMETER Experiment Name: At_100uM_ABA_P Parameter: Organism Value: A. thaliana
  misc_feature: MA Experiment 20000166 PARAMETER Experiment Name: At_100uM_ABA_P Parameter: Plant Line Value: WS
  misc_feature: MA Experiment 20000166 PARAMETER Experiment Name: At_100uM_ABA_P Parameter: Timepoint (hr) Value: 1
  misc_feature: MA Experiment 20000166 PARAMETER Experiment Name: At_100uM_ABA_P Parameter: Tissue Value: Aerial
  misc_feature: MA Experiment 20000166 PARAMETER Experiment Name: At_100uM_ABA_P Parameter: Treatment Value: 100uM ABA vs. No Treatment
  misc_feature: MA Experiment ID: 20000182 Result: Up-regulated in Transcription
  misc_feature: MA Experiment 20000182 PARAMETER Experiment Name: At_2mM_SA_P Parameter: Age (day) Value: 14
  misc_feature: MA Experiment 20000182 PARAMETER Experiment Name: At_2mM_SA_P Parameter: Organism Value: A. thaliana
  misc_feature: MA Experiment 20000182 PARAMETER Experiment Name: At_2mM_SA_P Parameter: Plant Line Value: WS
  misc_feature: MA Experiment 20000182 PARAMETER Experiment Name: At_2mM_SA_P Parameter: Timepoint (hr) Value: 6
  misc_feature: MA Experiment 20000182 PARAMETER Experiment Name: At_2mM_SA_P Parameter: Tissue Value: Aerial
  misc_feature: MA Experiment 20000182 PARAMETER Experiment Name: At_2mM_SA_P Parameter: Treatment Value: 2mM SA vs. No Treatment
  misc_feature: MA Experiment ID: 20000184 Result: Down-regulated in Transcription
  misc_feature: MA Experiment 20000184 PARAMETER Experiment Name: At_Shoots__P Parameter: Age (day) Value: 7
  misc_feature: MA Experiment 20000184 PARAMETER Experiment Name: At_Shoots__P Parameter: Tissue Value: Shoots vs. Whole Plant
  misc_feature: MA Experiment ID: 20000213 Result: Up-regulated in Transcription
  misc_feature: MA Experiment 20000213 PARAMETER Experiment Name: At_4deg_Cold_P Parameter: Timepoint (hr) Value: 2
  misc_feature: MA Experiment ID: 20000264 Result: Up-regulated in Transcription
  misc_feature: MA Experiment 20000264 PARAMETER Experiment Name: At_Open_Flower_P Parameter: Age (day) Value: 21
  misc_feature: MA Experiment 20000264 PARAMETER Experiment Name: At_Open_Flower_P Parameter: Plant Line Value: WS
  misc_feature: MA Experiment 20000264 PARAMETER Experiment Name: At_Open_Flower_P Parameter: Tissue Value: Open Flower vs. Whole Plant
  misc_feature: MA Experiment ID: 20000437 Result: Up-regulated in Transcription
  misc_feature: MA Experiment 20000437 PARAMETER Experiment Name: At_Drought_P Parameter: Age (day) Value: 8
  misc_feature: MA Experiment 20000437 PARAMETER Experiment Name: At_Drought_P Parameter: Organism Value: A. thaliana
  misc_feature: MA Experiment 20000437 PARAMETER Experiment Name: At_Drought_P Parameter: Plant Line Value: WS
  misc_feature: MA Experiment 20000437 PARAMETER Experiment Name: At_Drought_P Parameter: Timepoint (hr) Value: 24
  misc_feature: MA Experiment 20000437 PARAMETER Experiment Name: At_Drought_P Parameter: Tissue Value: Whole Plant
  misc_feature: MA Experiment 20000437 PARAMETER Experiment Name: At_Drought_P Parameter: Treatment Value: Drought vs. No Drought
  misc_feature: MA Experiment ID: 20000439 Result: Up-regulated in Transcription
  misc_feature: MA Experiment 20000439 PARAMETER Experiment Name: At_Roots__P Parameter: Age (day) Value: 14 vs. 21
  misc_feature: MA Experiment 20000439 PARAMETER Experiment Name: At_Roots__P Parameter: Organism Value: A. thaliana
  misc_feature: MA Experiment 20000439 PARAMETER Experiment Name: At_Roots__P Parameter: Tissue Value: Roots vs. Whole Plant
  misc_feature: MA Experiment ID: 20000794 Result: Up-regulated in Transcription
  misc_feature: MA Experiment 20000794 PARAMETER Experiment Name: At_Petals_P Parameter: Age (day) Value: 23-25 days
  misc_feature: MA Experiment 20000794 PARAMETER Experiment Name: At_Petals_P Parameter: Plant Line Value: WS
  misc_feature: MA Experiment 20000794 PARAMETER Experiment Name: At_Petals_P Parameter: Tissue Value: Petals vs. Whole plant
  misc_feature: MA Experiment ID: 20001450 Result: Down-regulated in Transcription
  misc_feature: MA Experiment 20001450 PARAMETER Experiment Name: At_Far-red-induction_P Parameter: Age (day) Value: 7
  misc_feature: MA Experiment 20001450 PARAMETER Experiment Name: At_Far-red-induction_P Parameter: Light Value: Far-red vs. White
  misc_feature: MA Experiment 20001450 PARAMETER Experiment Name: At_Far-red-induction_P Parameter: Organism Value: A. thaliana
  misc_feature: MA Experiment 20001450 PARAMETER Experiment Name: At_Far-red-induction_P Parameter: Plant Line Value: Columbia
  misc_feature: MA Experiment 20001450 PARAMETER Experiment Name: At_Far-red-induction_P Parameter: Timepoint (hr) Value: 8
  misc_feature: MA Experiment 20001450 PARAMETER Experiment Name: At_Far-red-induction_P Parameter: Tissue Value: Whole Plant
  misc_feature: MA Experiment ID: 20001451 Result: Down-regulated in Transcription
  misc_feature: MA Experiment 20001451 PARAMETER Experiment Name: At_Far-red-induction_P Parameter: Age (day) Value: 7
  misc_feature: MA Experiment 20001451 PARAMETER Experiment Name: At_Far-red-induction_P Parameter: Light Value: Far-red vs. White
  misc_feature: MA Experiment 20001451 PARAMETER Experiment Name: At_Far-red-induction_P Parameter: Organism Value: A. thaliana
  misc_feature: MA Experiment 20001451 PARAMETER Experiment Name: At_Far-red-induction_P Parameter: Plant Line Value: Columbia
  misc_feature: MA Experiment 20001451 PARAMETER Experiment Name: At_Far-red-induction_P Parameter: Timepoint (hr) Value: 24
  misc_feature: MA Experiment 20001451 PARAMETER Experiment Name: At_Far-red-induction_P Parameter: Tissue Value: Whole Plant
atcgaaaatcatcatcatcatcatcatcatcatcatcaaaacgattcgattctgcgaaaccacttttcaattctcatcggattatttctcttccaatttatacaacgggagctaaactttctagatcggagcattcaatggctgcttcttccgaacccaaatctctttacgatttcaccgtcaaggatgctaagggaaatgatgttgatctaagcatctacaaagggaaggttcttttgattgtgaacgttgcttctcaatgtggcttgactaattcgaattatactgagcttgcgcagctgtatgagaagtacaaaggccatggtttcgagattcttgcgtttccgtgtaaccagtttgggaatcaagagcctggtactaatgaagagattgttcagtttgcttgtactcgtttcaaggctgagtacccgattttcgacaaggttgatgttaacggtgacaaagctgccccagtctacaagtttctgaaatcaagcaaaggcgggctctttggagacggcattaagtggaacttcgcaaagttcttggttgacaaagatggaaatgttgtcgatcgtttcgcaccaactacctcacctctcagcattgagaaggatgtgaagaagttgctgggagttactgcttaagcaaggcaagattgcataattagacaaataaaagctcattagtattgtattaccaatactgtgtagtaagctgagttcgcgagtgtgtgtgcctttgggaccgcgtacaattataatccgttttttagcggccaaactatgtaataatcgtagatctaaatatcagatttcccgttaccct

SEQ ID NO: 28162 - protein, 214 aa, Arabidopsis thaliana
  peptide (1)..(214): Ceres Seq. ID no. 12340171
  misc_feature (54)..(163): Pfam Name: Glutathione peroxidase Pfam Description: Glutathione peroxidase
  misc_feature (46)..(213): Homolog of NCBI NO: 20138384 NR Description: Probable phospholipid hydroperoxide glutathione
  misc_feature (46)..(210): Homolog of NCBI NO: 6179604 NR Description: glutathione peroxidase-like protein GPX54Hv
  misc_feature (46)..(211): Homolog of NCBI NO: 21360380 NR Description: glutathione peroxidase 1 [Oryza sativa]
  misc_feature (46)..(211): Homolog of NCBI NO: 34334012 NR Description: cytosolic glutathione peroxidase [Triticum
  misc_feature (48)..(212): Homolog of NCBI NO: 20138151 NR Description: Probable phospholipid hydroperoxide glutathione
  misc_feature (46)..(211): Homolog of NCBI NO: 22268405 NR Description: putative glutathione peroxidase [Zea mays]
  misc_feature (47)..(210): Homolog of NCBI NO: 27544804 NR Description: phospholipid hydroperoxide glutathione
  misc_feature (36)..(210): Homolog of NCBI NO: 6179600 NR Description: GPX12Hv, glutathione peroxidase-like protein
  misc_feature (46)..(214): Homolog of NCBI NO: 20138157 NR Description: Probable phospholipid hydroperoxide glutathione
  misc_feature (1)..(214): Homolog of NCBI NO: 30681827 NR Description: glutathione peroxidase, putative [Arabidopsis
RKSSSSSSSSSSKRFDSAKPLFNSHRIISLPIYTTGAKLSRSEHSMAASSEPKSLYDFTVKDAKGNDVDLSIYKGKVLLIVNVASQCGLTNSNYTELAQLYEKYKGHGFEILAFPCNQFGNQEPGTNEEIVQFACTRFKAEYPIFDKVDVNGDKAAPVYKFLKSSKGGLFGDGIKWNFAKFLVDKDGNVVDRFAPTTSPLSIEKDVKKLLGVTA

SEQ ID NO: 28163 - protein, 169 aa, Arabidopsis thaliana
  peptide (1)..(169): Ceres Seq. ID no. 12340172
  misc_feature (9)..(118): Pfam Name: Glutathione peroxidase Pfam Description: Glutathione peroxidase
  misc_feature (1)..(168): Homolog of NCBI NO: 20138384 NR Description: Probable phospholipid hydroperoxide glutathione
  misc_feature (1)..(165): Homolog of NCBI NO: 6179604 NR Description: glutathione peroxidase-like protein GPX54Hv
  misc_feature (1)..(166): Homolog of NCBI NO: 21360380 NR Description: glutathione peroxidase 1 [Oryza sativa]
  misc_feature (1)..(166): Homolog of NCBI NO: 34334012 NR Description: cytosolic glutathione peroxidase [Triticum
  misc_feature (3)..(167): Homolog of NCBI NO: 20138151 NR Description: Probable phospholipid hydroperoxide glutathione
  misc_feature (1)..(166): Homolog of NCBI NO: 22268405 NR Description: putative glutathione peroxidase [Zea mays]
  misc_feature (2)..(165): Homolog of NCBI NO: 27544804 NR Description: phospholipid hydroperoxide glutathione
  misc_feature (1)..(165): Homolog of NCBI NO: 6179600 NR Description: GPX12Hv, glutathione peroxidase-like protein
  misc_feature (1)..(169): Homolog of NCBI NO: 20138157 NR Description: Probable phospholipid hydroperoxide glutathione
  misc_feature (1)..(169): Homolog of NCBI NO: 30681827 NR Description: glutathione peroxidase, putative [Arabidopsis
MAASSEPKSLYDFTVKDAKGNDVDLSIYKGKVLLIVNVASQCGLTNSNYTELAQLYEKYKGHGFEILAFPCNQFGNQEPGTNEEIVQFACTRFKAEYPIFDKVDVNGDKAAPVYKFLKSSKGGLFGDGIKWNFAKFLVDKDGNVVDRFAPTTSPLSIEKDVKKLLGVTA

SEQ ID NO: 28164 - DNA, 1206 bp, Arabidopsis thaliana
  misc_feature (1)..(1206): Ceres Seq. ID no. 12377569
  misc_feature: MA Experiment ID: 108595 Result: Down-regulated in Transcription
  misc_feature: MA Experiment 108595 PARAMETER Experiment Name: At_Ler-pi_Ovule_cDNA_P Parameter: Plant Line Value: null
  misc_feature: MA Experiment ID: 108668 Result: Down-regulated in Transcription
  misc_feature: MA Experiment 108668 PARAMETER Experiment Name: At_2mM_SA_cDNA_P Parameter: Plant Line Value: WS
  misc_feature: MA Experiment 108668 PARAMETER Experiment Name: At_2mM_SA_cDNA_P Parameter: Timepoint (hr) Value: 6
  misc_feature: MA Experiment 108668 PARAMETER Experiment Name: At_2mM_SA_cDNA_P Parameter: Treatment Value: 2mM SA vs. No Treatment
  misc_feature: MA Experiment ID: 20000184 Result: Up-regulated in Transcription
  misc_feature: MA Experiment 20000184 PARAMETER Experiment Name: At_Shoots__P Parameter: Age (day) Value: 7
  misc_feature: MA Experiment 20000184 PARAMETER Experiment Name: At_Shoots__P Parameter: Tissue Value: Shoots vs. Whole Plant
  misc_feature: MA Experiment ID: 20000185 Result: Down-regulated in Transcription
  misc_feature: MA Experiment 20000185 PARAMETER Experiment Name: At_Roots__P Parameter: Age (day) Value: 7 vs. 21
  misc_feature: MA Experiment 20000185 PARAMETER Experiment Name: At_Roots__P Parameter: Organism Value: A. thaliana
  misc_feature: MA Experiment 20000185 PARAMETER Experiment Name: At_Roots__P Parameter: Tissue Value: Roots vs. Whole Plant
  misc_feature: MA Experiment ID: 20000234 Result: Up-regulated in Transcription
  misc_feature: MA Experiment 20000234 PARAMETER Experiment Name: At_Siliques_P Parameter: Age (day) Value: 21
  misc_feature: MA Experiment 20000234 PARAMETER Experiment Name: At_Siliques_P Parameter: Organism Value: A. thaliana
  misc_feature: MA Experiment 20000234 PARAMETER Experiment Name: At_Siliques_P Parameter: Plant Line Value: WS
  misc_feature: MA Experiment 20000234 PARAMETER Experiment Name: At_Siliques_P Parameter: Tissue Value: Less Than 5mm Siliques vs. Whole Plant
  misc_feature: MA Experiment ID: 20000437 Result: Down-regulated in Transcription
  misc_feature: MA Experiment 20000437 PARAMETER Experiment Name: At_Drought_P Parameter: Age (day) Value: 8
  misc_feature: MA Experiment 20000437 PARAMETER Experiment Name: At_Drought_P Parameter: Organism Value: A. thaliana
  misc_feature: MA Experiment 20000437 PARAMETER Experiment Name: At_Drought_P Parameter: Plant Line Value: WS
  misc_feature: MA Experiment 20000437 PARAMETER Experiment Name: At_Drought_P Parameter: Timepoint (hr) Value: 24
  misc_feature: MA Experiment 20000437 PARAMETER Experiment Name: At_Drought_P Parameter: Tissue Value: Whole Plant
  misc_feature: MA Experiment 20000437 PARAMETER Experiment Name: At_Drought_P Parameter: Treatment Value: Drought vs. No Drought
  misc_feature: MA Experiment ID: 20000438 Result: Up-regulated in Transcription
  misc_feature: MA Experiment 20000438 PARAMETER Experiment Name: At_Shoots__P Parameter: Age (day) Value: 14
  misc_feature: MA Experiment 20000438 PARAMETER Experiment Name: At_Shoots__P Parameter: Tissue Value: Shoots vs. Whole Plant
  misc_feature: MA Experiment ID: 20000439 Result: Down-regulated in Transcription
  misc_feature: MA Experiment 20000439 PARAMETER Experiment Name: At_Roots__P Parameter: Age (day) Value: 14 vs. 21
  misc_feature: MA Experiment 20000439 PARAMETER Experiment Name: At_Roots__P Parameter: Organism Value: A. thaliana
  misc_feature: MA Experiment 20000439 PARAMETER Experiment Name: At_Roots__P Parameter: Tissue Value: Roots vs. Whole Plant
  misc_feature: MA Experiment ID: 20000495 Result: Up-regulated in Transcription
  misc_feature: MA Experiment 20000495 PARAMETER Experiment Name: At_Guard_Cells_P Parameter: Harvest Date Value: 8/2/2002
  misc_feature: MA Experiment 20000495 PARAMETER Experiment Name: At_Guard_Cells_P Parameter: Organism Value: A. thaliana
  misc_feature: MA Experiment 20000495 PARAMETER Experiment Name: At_Guard_Cells_P Parameter: Tissue Value: Guard Cells vs. Leaves
  misc_feature: MA Experiment ID: 20001451 Result: Up-regulated in Transcription
  misc_feature: MA Experiment 20001451 PARAMETER Experiment Name: At_Far-red-induction_P Parameter: Age (day) Value: 7
  misc_feature: MA Experiment 20001451 PARAMETER Experiment Name: At_Far-red-induction_P Parameter: Light Value: Far-red vs. White
  misc_feature: MA Experiment 20001451 PARAMETER Experiment Name: At_Far-red-induction_P Parameter: Organism Value: A. thaliana
  misc_feature: MA Experiment 20001451 PARAMETER Experiment Name: At_Far-red-induction_P Parameter: Plant Line Value: Columbia
  misc_feature: MA Experiment 20001451 PARAMETER Experiment Name: At_Far-red-induction_P Parameter: Timepoint (hr) Value: 24
  misc_feature: MA Experiment 20001451 PARAMETER Experiment Name: At_Far-red-induction_P Parameter: Tissue Value: Whole Plant
  misc_feature: MA Experiment ID: 20001757 Result: Up-regulated in Transcription
  misc_feature: MA Experiment 20001757 PARAMETER Experiment Name: At_50mM_NH4NO3_L-to-H_P Parameter: Timepoint (hr) Value: 6
  misc_feature: MA Experiment 20001757 PARAMETER Experiment Name: At_50mM_NH4NO3_L-to-H_P Parameter: Tissue Value: Leaf
  misc_feature: MA Experiment 20001757 PARAMETER Experiment Name: At_50mM_NH4NO3_L-to-H_P Parameter: Treatment Value: 50mM NH4NO3 vs 100mM Mannitol
actctcaaaatcatcttcttcacccaaaaacccctaaaagccttatcccttcttcttcccatggctgcttcagcttcgtctctcgctctctcttccttcaaccctaaatctcttcctttcggcgtctccagacctgcctccgtttccctcttatctccttccctctcctttaaactcaattccgactccgtttccttctccatcgccgccaaatggaactctcccgcttctcgcttcgtccgtaacgttgcgattacctcagagttcgaggtggaagaagatggtttcgctgacgtcgctccgccaaaagagcaatctttctctgctgaccttaaactcttcgttggtaaccttcctttcaacgttgacagtgctcagctcgctcagctctttgagagtgccggaaatgttgagatggttgaggtaatctatgacaaaattacaggaagaagcagaggttttggattcgtgactatgtcttcagtttctgaagttgaggcagctgctcagcagttcaatggctatgagttggatggtagacctttgagagtcaatgctggtcccccaccaccaaagagggaagatggtttctccagaggacctaggagcagctttggaagctcaggttctggatatggaggaggtggtggttctggtgctggttcaggaaaccgtgtttatgtgggtaacctctcttggggagttgatgacatggctcttgagagtttgttctcggagcaaggaaaggttgttgaggccagagtcatctacgacagggacagtggtcgatccaagggttttggatttgtgacatacgactcttctcaagaggtccaaaatgccatcaagtccttggatggtgctgatttggacggtagacaaattagagtctcggaagctgaggctaggcctccaaggcgccaatattgagcaccaatctatgacttcctattctcaaaaacgcatattctggagggcgcttcgaagtaaagagggtttgtgagatgatggcagtttcagacggtactaagctcttagcttcgcctatgtttgttgccttggatgcaagaaggtcgtaaaggaatggtctttttttttttgagaaacgtataattaagatagaaactggagagaccatgttcttgtctgtctgaatgctgccattgactgcttcgctttggttttgattcaatttttttttctctc

SEQ ID NO: 28165 - protein, 309 aa, Arabidopsis thaliana
  peptide (1)..(309): Ceres Seq. ID no. 12377570
  misc_feature (226)..(297): Pfam Name: RNA recognition motif. (a.k.a. RRM, RBD, or RNP domain) Pfam Description: RNA recognition motif. (a.k.a. RRM, RBD, or RNP
  misc_feature (21)..(309): Homolog of NCBI NO: 1350820 NR Description: 30 kDa ribonucleoprotein, chloroplast precursor
  misc_feature (21)..(309): Homolog of NCBI NO: 12230584 NR Description: 29 kDa ribonucleoprotein A, chloroplast precursor
  misc_feature (196)..(309): Homolog of NCBI NO: 681904 NR Description: cp29 [Arabidopsis thaliana]
  misc_feature (31)..(222): Homolog of NCBI NO: 681904 NR Description: cp29 [Arabidopsis thaliana]
  misc_feature (196)..(309): Homolog of NCBI NO: 30693824 NR Description: 29 kDa ribonucleoprotein, chloroplast
  misc_feature (21)..(222): Homolog of NCBI NO: 30693824 NR Description: 29 kDa ribonucleoprotein, chloroplast
  misc_feature (196)..(309): Homolog of NCBI NO: 15231817 NR Description: 29 kDa ribonucleoprotein, chloroplast precursor
  misc_feature (21)..(222): Homolog of NCBI NO: 15231817 NR Description: 29 kDa ribonucleoprotein, chloroplast precursor
  misc_feature (21)..(309): Homolog of NCBI NO: 15228102 NR Description: chloroplast RNA-binding protein cp29, putative
  misc_feature (21)..(309): Homolog of NCBI NO: 21617920 NR Description: putative RNA-binding protein [Arabidopsis
TLKIIFFTQKPLKALSLLLPMAASASSLALSSFNPKSLPFGVSRPASVSLLSPSLSFKLNSDSVSFSIAAKWNSPASRFVRNVAITSEFEVEEDGFADVAPPKEQSFSADLKLFVGNLPFNVDSAQLAQLFESAGNVEMVEVIYDKITGRSRGFGFVTMSSVSEVEAAAQQFNGYELDGRPLRVNAGPPPPKREDGFSRGPRSSFGSSGSGYGGGGGSGAGSGNRVYVGNLSWGVDDMALESLFSEQGKVVEARVIYDRDSGRSKGFGFVTYDSSQEVQNAIKSLDGADLDGRQIRVSEAEARPPRRQY

SEQ ID NO: 28166 - protein, 289 aa, Arabidopsis thaliana
  peptide (1)..(289): Ceres Seq. ID no. 12377571
  misc_feature (206)..(277): Pfam Name: RNA recognition motif. (a.k.a. RRM, RBD, or RNP domain) Pfam Description: RNA recognition motif. (a.k.a. RRM, RBD, or RNP
  misc_feature (1)..(289): Homolog of NCBI NO: 1350820 NR Description: 30 kDa ribonucleoprotein, chloroplast precursor
  misc_feature (1)..(289): Homolog of NCBI NO: 12230584 NR Description: 29 kDa ribonucleoprotein A, chloroplast precursor
  misc_feature (176)..(289): Homolog of NCBI NO: 681904 NR Description: cp29 [Arabidopsis thaliana]
  misc_feature (11)..(202): Homolog of NCBI NO: 681904 NR Description: cp29 [Arabidopsis thaliana]
  misc_feature (176)..(289): Homolog of NCBI NO: 30693824 NR Description: 29 kDa ribonucleoprotein, chloroplast
  misc_feature (1)..(202): Homolog of NCBI NO: 30693824 NR Description: 29 kDa ribonucleoprotein, chloroplast
  misc_feature (176)..(289): Homolog of NCBI NO: 15231817 NR Description: 29 kDa ribonucleoprotein, chloroplast precursor
  misc_feature (1)..(202): Homolog of NCBI NO: 15231817 NR Description: 29 kDa ribonucleoprotein, chloroplast precursor
  misc_feature (1)..(289): Homolog of NCBI NO: 15228102 NR Description: chloroplast RNA-binding protein cp29, putative
  misc_feature (1)..(289): Homolog of NCBI NO: 21617920 NR Description: putative RNA-binding protein [Arabidopsis
MAASASSLALSSFNPKSLPFGVSRPASVSLLSPSLSFKLNSDSVSFSIAAKWNSPASRFVRNVAITSEFEVEEDGFADVAPPKEQSFSADLKLFVGNLPFNVDSAQLAQLFESAGNVEMVEVIYDKITGRSRGFGFVTMSSVSEVEAAAQQFNGYELDGRPLRVNAGPPPPKREDGFSRGPRSSFGSSGSGYGGGGGSGAGSGNRVYVGNLSWGVDDMALESLFSEQGKVVEARVIYDRDSGRSKGFGFVTYDSSQEVQNAIKSLDGADLDGRQIRVSEAEARPPRRQY

SEQ ID NO: 28167 - protein, 171 aa, Arabidopsis thaliana
  peptide (1)..(171): Ceres Seq. ID no. 12377572
  misc_feature (88)..(159): Pfam Name: RNA recognition motif. (a.k.a. RRM, RBD, or RNP domain) Pfam Description: RNA recognition motif. (a.k.a. RRM, RBD, or RNP
  misc_feature (1)..(171): Homolog of NCBI NO: 1350820 NR Description: 30 kDa ribonucleoprotein, chloroplast precursor
  misc_feature (1)..(171): Homolog of NCBI NO: 12230584 NR Description: 29 kDa ribonucleoprotein A, chloroplast precursor
  misc_feature (58)..(171): Homolog of NCBI NO: 681904 NR Description: cp29 [Arabidopsis thaliana]
  misc_feature (1)..(84): Homolog of NCBI NO: 681904 NR Description: cp29 [Arabidopsis thaliana]
  misc_feature (58)..(171): Homolog of NCBI NO: 30693824 NR Description: 29 kDa ribonucleoprotein, chloroplast
  misc_feature (1)..(84): Homolog of NCBI NO: 30693824 NR Description: 29 kDa ribonucleoprotein, chloroplast
  misc_feature (58)..(171): Homolog of NCBI NO: 15231817 NR Description: 29 kDa ribonucleoprotein, chloroplast precursor
  misc_feature (1)..(84): Homolog of NCBI NO: 15231817 NR Description: 29 kDa ribonucleoprotein, chloroplast precursor
  misc_feature (1)..(171): Homolog of NCBI NO: 15228102 NR Description: chloroplast RNA-binding protein cp29, putative
  misc_feature (1)..(171): Homolog of NCBI NO: 21617920 NR Description: putative RNA-binding protein [Arabidopsis
MVEVIYDKITGRSRGFGFVTMSSVSEVEAAAQQFNGYELDGRPLRVNAGPPPPKREDGFSRGPRSSFGSSGSGYGGGGGSGAGSGNRVYVGNLSWGVDDMALESLFSEQGKVVEARVIYDRDSGRSKGFGFVTYDSSQEVQNAIKSLDGADLDGRQIRVSEAEARPPRRQY

SEQ ID NO: 28168 - DNA, 1037 bp, Arabidopsis thaliana
  misc_feature (1)..(1037): Ceres Seq. ID no. 12396853
  misc_feature: MA Experiment ID: 108461 Result: Down-regulated in Transcription
  misc_feature: MA Experiment 108461 PARAMETER Experiment Name: At_Germinating_Seeds_cDNA_P Parameter: Age (day) Value: 1 vs. 0
  misc_feature: MA Experiment 108461 PARAMETER Experiment Name: At_Germinating_Seeds_cDNA_P Parameter: Tissue Value: Germinating Seeds
  misc_feature: MA Experiment ID: 108462 Result: Down-regulated in Transcription
  misc_feature: MA Experiment 108462 PARAMETER Experiment Name: At_Germinating_Seeds_cDNA_P Parameter: Age (day) Value: 2 vs. 0
  misc_feature: MA Experiment 108462 PARAMETER Experiment Name: At_Germinating_Seeds_cDNA_P Parameter: Tissue Value: Germinating Seeds
  misc_feature: MA Experiment ID: 108463 Result: Down-regulated in Transcription
  misc_feature: MA Experiment 108463 PARAMETER Experiment Name: At_Germinating_Seeds_cDNA_P Parameter: Age (day) Value: 3 vs. 0
  misc_feature: MA Experiment 108463 PARAMETER Experiment Name: At_Germinating_Seeds_cDNA_P Parameter: Tissue Value: Germinating Seeds
  misc_feature: MA Experiment ID: 108488 Result: Down-regulated in Transcription
  misc_feature: MA Experiment ID: 108501 Result: Up-regulated in Transcription
  misc_feature: MA Experiment 108501 PARAMETER Experiment Name: At_ap2_floral_buds_cDNA_P Parameter: Plant Line Value: ap2 (Ler.)
  misc_feature: MA Experiment 108501 PARAMETER Experiment Name: At_ap2_floral_buds_cDNA_P Parameter: Tissue Value: Closed Flower
  misc_feature: MA Experiment ID: 108595 Result: Up-regulated in Transcription
  misc_feature: MA Experiment 108595 PARAMETER Experiment Name: At_Ler-pi_Ovule_cDNA_P Parameter: Plant Line Value: null
  misc_feature: MA Experiment ID: 20000070 Result: Up-regulated in Transcription
  misc_feature: MA Experiment 20000070 PARAMETER Experiment Name: At_100uM_ABA_Mutants_cDNA_P Parameter: Plant Line Value: CS24
  misc_feature: MA Experiment 20000070 PARAMETER Experiment Name: At_100uM_ABA_Mutants_cDNA_P Parameter: Timepoint (hr) Value: 6
  misc_feature: MA Experiment 20000070 PARAMETER Experiment Name: At_100uM_ABA_Mutants_cDNA_P Parameter: Tissue Value: Aerial
  misc_feature: MA Experiment 20000070 PARAMETER Experiment Name: At_100uM_ABA_Mutants_cDNA_P Parameter: Treatment Value: 100uM ABA vs. No Treatment
  misc_feature: MA Experiment ID: 20000071 Result: Up-regulated in Transcription
  misc_feature: MA Experiment 20000071 PARAMETER Experiment Name: At_100uM_ABA_Mutants_cDNA_P Parameter: Plant Line Value: CS8104
  misc_feature: MA Experiment 20000071 PARAMETER Experiment Name: At_100uM_ABA_Mutants_cDNA_P Parameter: Timepoint (hr) Value: 6
  misc_feature: MA Experiment 20000071 PARAMETER Experiment Name: At_100uM_ABA_Mutants_cDNA_P Parameter: Tissue Value: Aerial
  misc_feature: MA Experiment 20000071 PARAMETER Experiment Name: At_100uM_ABA_Mutants_cDNA_P Parameter: Treatment Value: 100uM ABA vs. No Treatment
  misc_feature: MA Experiment ID: 20000072 Result: Up-regulated in Transcription
  misc_feature: MA Experiment 20000072 PARAMETER Experiment Name: At_100uM_ABA_Mutants_cDNA_P Parameter: Plant Line Value: CS8105
  misc_feature: MA Experiment 20000072 PARAMETER Experiment Name: At_100uM_ABA_Mutants_cDNA_P Parameter: Timepoint (hr) Value: 6
  misc_feature: MA Experiment 20000072 PARAMETER Experiment Name: At_100uM_ABA_Mutants_cDNA_P Parameter: Tissue Value: Aerial
  misc_feature: MA Experiment 20000072 PARAMETER Experiment Name: At_100uM_ABA_Mutants_cDNA_P Parameter: Treatment Value: 100uM ABA vs. No Treatment
  misc_feature: MA Experiment ID: 20000086 Result: Up-regulated in Transcription
  misc_feature: MA Experiment 20000086 PARAMETER Experiment Name: At_100uM_ABA_Mutants_cDNA_P Parameter: Plant Line Value: CS22
  misc_feature: MA Experiment 20000086 PARAMETER Experiment Name: At_100uM_ABA_Mutants_cDNA_P Parameter: Timepoint (hr) Value: 6
  misc_feature: MA Experiment 20000086 PARAMETER Experiment Name: At_100uM_ABA_Mutants_cDNA_P Parameter: Tissue Value: Aerial
  misc_feature: MA Experiment 20000086 PARAMETER Experiment Name: At_100uM_ABA_Mutants_cDNA_P Parameter: Treatment Value: 100uM ABA vs. No Treatment
  misc_feature: MA Experiment ID: 20000087 Result: Up-regulated in Transcription
  misc_feature: MA Experiment 20000087 PARAMETER Experiment Name: At_100uM_ABA_Mutants_cDNA_P Parameter: Plant Line Value: WS
  misc_feature: MA Experiment 20000087 PARAMETER Experiment Name: At_100uM_ABA_Mutants_cDNA_P Parameter: Timepoint (hr) Value: 6
  misc_feature: MA Experiment 20000087 PARAMETER Experiment Name: At_100uM_ABA_Mutants_cDNA_P Parameter: Tissue Value: Aerial
  misc_feature: MA Experiment 20000087 PARAMETER Experiment Name: At_100uM_ABA_Mutants_cDNA_P Parameter: Treatment Value: 100uM ABA vs. No Treatment
  misc_feature: MA Experiment ID: 20000112 Result: Up-regulated in Transcription
  misc_feature: MA Experiment 20000112 PARAMETER Experiment Name: At_42deg_Heat_cDNA_P Parameter: Temperature (deg C) Value: 42 vs. 22
  misc_feature: MA Experiment 20000112 PARAMETER Experiment Name: At_42deg_Heat_cDNA_P Parameter: Timepoint (hr) Value: 2
  misc_feature: MA Experiment 20000112 PARAMETER Experiment Name: At_42deg_Heat_cDNA_P Parameter: Tissue Value: Aerial
  misc_feature: MA Experiment ID: 20000117 Result: Up-regulated in Transcription
  misc_feature: MA Experiment 20000117 PARAMETER Experiment Name: At_100uM_ABA_Mutants_cDNA_P Parameter: Plant Line Value: Columbia
  misc_feature: MA Experiment 20000117 PARAMETER Experiment Name: At_100uM_ABA_Mutants_cDNA_P Parameter: Timepoint (hr) Value: 6
  misc_feature: MA Experiment 20000117 PARAMETER Experiment Name: At_100uM_ABA_Mutants_cDNA_P Parameter: Tissue Value: Aerial
  misc_feature: MA Experiment 20000117 PARAMETER Experiment Name: At_100uM_ABA_Mutants_cDNA_P Parameter: Treatment Value: 100uM ABA vs. No Treatment
  misc_feature: MA Experiment ID: 20000180 Result: Down-regulated in Transcription
  misc_feature: MA Experiment 20000180 PARAMETER Experiment Name: At_Germinating_Seeds_P Parameter: Age (hr) Value: 24 vs. 0
  misc_feature: MA Experiment 20000180 PARAMETER Experiment Name: At_Germinating_Seeds_P Parameter: Tissue Value: Germinating Seeds
  misc_feature: MA Experiment ID: 20000234 Result: Up-regulated in Transcription
  misc_feature: MA Experiment 20000234 PARAMETER Experiment Name: At_Siliques_P Parameter: Age (day) Value: 21
  misc_feature: MA Experiment 20000234 PARAMETER Experiment Name: At_Siliques_P Parameter: Organism Value: A. thaliana
  misc_feature: MA Experiment 20000234 PARAMETER Experiment Name: At_Siliques_P Parameter: Plant Line Value: WS
  misc_feature: MA Experiment 20000234 PARAMETER Experiment Name: At_Siliques_P Parameter: Tissue Value: Less Than 5mm Siliques vs. Whole Plant
  misc_feature: MA Experiment ID: 20000235 Result: Up-regulated in Transcription
  misc_feature: MA Experiment 20000235 PARAMETER Experiment Name: At_Siliques_P Parameter: Age (day) Value: 21
  misc_feature: MA Experiment 20000235 PARAMETER Experiment Name: At_Siliques_P Parameter: Organism Value: A. thaliana
  misc_feature: MA Experiment 20000235 PARAMETER Experiment Name: At_Siliques_P Parameter: Plant Line Value: WS
  misc_feature: MA Experiment 20000235 PARAMETER Experiment Name: At_Siliques_P Parameter: Tissue Value: 5-10mm Siliques vs. Whole Plant
  misc_feature: MA Experiment ID: 20000264 Result: Up-regulated in Transcription
  misc_feature: MA Experiment 20000264 PARAMETER Experiment Name: At_Open_Flower_P Parameter: Age (day) Value: 21
  misc_feature: MA Experiment 20000264 PARAMETER Experiment Name: At_Open_Flower_P Parameter: Plant Line Value: WS
  misc_feature: MA Experiment 20000264 PARAMETER Experiment Name: At_Open_Flower_P Parameter: Tissue Value: Open Flower vs. Whole Plant
  misc_feature: MA Experiment ID: 20000286 Result: Up-regulated in Transcription
  misc_feature: MA Experiment 20000286 PARAMETER Experiment Name: At_Open_Flower_P Parameter: Age (day) Value: 21
  misc_feature: MA Experiment 20000286 PARAMETER Experiment Name: At_Open_Flower_P Parameter: Plant Line Value: WS
  misc_feature: MA Experiment 20000286 PARAMETER Experiment Name: At_Open_Flower_P Parameter: Tissue Value: Half Open vs. Whole Plant
  misc_feature: MA Experiment ID: 20000437 Result: Up-regulated in Transcription
  misc_feature: MA Experiment 20000437 PARAMETER Experiment Name: At_Drought_P Parameter: Age (day) Value: 8
  misc_feature: MA Experiment 20000437 PARAMETER Experiment Name: At_Drought_P Parameter: Organism Value: A. thaliana
  misc_feature: MA Experiment 20000437 PARAMETER Experiment Name: At_Drought_P Parameter: Plant Line Value: WS
  misc_feature: MA Experiment 20000437 PARAMETER Experiment Name: At_Drought_P Parameter: Timepoint (hr) Value: 24
  misc_feature: MA Experiment 20000437 PARAMETER Experiment Name: At_Drought_P Parameter: Tissue Value: Whole Plant
  misc_feature: MA Experiment 20000437 PARAMETER Experiment Name: At_Drought_P Parameter: Treatment Value: Drought vs. No Drought
  misc_feature: MA Experiment ID: 20000527 Result: Down-regulated in Transcription
  misc_feature: MA Experiment 20000527 PARAMETER Experiment Name: At_10percent_PEG_P Parameter: Age (day) Value: 20
  misc_feature: MA Experiment 20000527 PARAMETER Experiment Name: At_10percent_PEG_P Parameter: Organism Value: A. thaliana
  misc_feature: MA Experiment 20000527 PARAMETER Experiment Name: At_10percent_PEG_P Parameter: Plant Line Value: WS
  misc_feature: MA Experiment 20000527 PARAMETER Experiment Name: At_10percent_PEG_P Parameter: Timepoint (day) Value: 20
  misc_feature: MA Experiment 20000527 PARAMETER Experiment Name: At_10percent_PEG_P Parameter: Tissue Value: Whole Plant
  misc_feature: MA Experiment 20000527 PARAMETER Experiment Name: At_10percent_PEG_P Parameter: Treatment Value: 10percent PEG vs. No Treatment
  misc_feature: MA Experiment ID: 20000794 Result: Up-regulated in Transcription
  misc_feature: MA Experiment 20000794 PARAMETER Experiment Name: At_Petals_P Parameter: Age (day) Value: 23-25 days
  misc_feature: MA Experiment 20000794 PARAMETER Experiment Name: At_Petals_P Parameter: Plant Line Value: WS
  misc_feature: MA Experiment 20000794 PARAMETER Experiment Name: At_Petals_P Parameter: Tissue Value: Petals vs. Whole plant
  misc_feature: MA Experiment ID: 20001556 Result: Up-regulated in Transcription
  misc_feature: MA Experiment 20001556 PARAMETER Experiment Name: At_Drought_Soil_Dry_P Parameter: Age (day) Value: 26
  misc_feature: MA Experiment 20001556 PARAMETER Experiment Name: At_Drought_Soil_Dry_P Parameter: Organism Value: A. thaliana
  misc_feature: MA Experiment 20001556 PARAMETER Experiment Name: At_Drought_Soil_Dry_P Parameter: Plant Line Value: WS
  misc_feature: MA Experiment 20001556 PARAMETER Experiment Name: At_Drought_Soil_Dry_P Parameter: Post Timepoint (hr) Value: None
  misc_feature: MA Experiment 20001556 PARAMETER Experiment Name: At_Drought_Soil_Dry_P Parameter: Post-Treatment Value: None
  misc_feature: MA Experiment 20001556 PARAMETER Experiment Name: At_Drought_Soil_Dry_P Parameter: Timepoint (day) Value: 12
  misc_feature: MA Experiment 20001556 PARAMETER Experiment Name: At_Drought_Soil_Dry_P Parameter: Treatment Value: Drought vs. No Drought
  misc_feature: MA Experiment ID: 20001904 Result: Up-regulated in Transcription
  misc_feature: MA Experiment 20001904 PARAMETER Experiment Name: At_Drought_Reproduction_P Parameter: Age (day) Value: 37
  misc_feature: MA Experiment 20001904 PARAMETER Experiment Name: At_Drought_Reproduction_P Parameter: Organism Value: A. thaliana
  misc_feature: MA Experiment 20001904 PARAMETER Experiment Name: At_Drought_Reproduction_P Parameter: Plant Line Value: WS
  misc_feature: MA Experiment 20001904 PARAMETER Experiment Name: At_Drought_Reproduction_P Parameter: Timepoint (day) Value: 7
  misc_feature: MA Experiment 20001904 PARAMETER Experiment Name: At_Drought_Reproduction_P Parameter: Tissue Value: Rosettes
  misc_feature: MA Experiment 20001904 PARAMETER Experiment Name: At_Drought_Reproduction_P Parameter: Treatment Value: Drought vs. No Drought
  misc_feature: MA Experiment ID: 20001905 Result: Up-regulated in Transcription
  misc_feature: MA Experiment 20001905 PARAMETER Experiment Name: At_Drought_Reproduction_P Parameter: Age (day) Value: 40
  misc_feature: MA Experiment 20001905 PARAMETER Experiment Name: At_Drought_Reproduction_P Parameter: Organism Value: A. thaliana
  misc_feature: MA Experiment 20001905 PARAMETER Experiment Name: At_Drought_Reproduction_P Parameter: Plant Line Value: WS
  misc_feature: MA Experiment 20001905 PARAMETER Experiment Name: At_Drought_Reproduction_P Parameter: Timepoint (day) Value: 10
  misc_feature: MA Experiment 20001905 PARAMETER Experiment Name: At_Drought_Reproduction_P Parameter: Tissue Value: Rosettes
  misc_feature: MA Experiment 20001905 PARAMETER Experiment Name: At_Drought_Reproduction_P Parameter: Treatment Value: Drought vs. No Drought
  misc_feature: MA Experiment ID: 20001911 Result: Up-regulated in Transcription
  misc_feature: MA Experiment 20001911 PARAMETER Experiment Name: At_Drought_Reproduction_P Parameter: Age (day) Value: 40
  misc_feature: MA Experiment 20001911 PARAMETER Experiment Name: At_Drought_Reproduction_P Parameter: Organism Value: A. thaliana
  misc_feature: MA Experiment 20001911 PARAMETER Experiment Name: At_Drought_Reproduction_P Parameter: Plant Line Value: WS
  misc_feature: MA Experiment 20001911 PARAMETER Experiment Name: At_Drought_Reproduction_P Parameter: Timepoint (day) Value: 10
  misc_feature: MA Experiment 20001911 PARAMETER Experiment Name: At_Drought_Reproduction_P Parameter: Tissue Value: Flowers
  misc_feature: MA Experiment 20001911 PARAMETER Experiment Name: At_Drought_Reproduction_P Parameter: Treatment Value: Drought vs. No Drought
aatgtgattaagtaaagtgagggagaagcaacgagagatagagatagagagatcaagatgagaggatctgatcagaagattctactgatggttatggtggttgtagcagttgtagctgcggctcaaggccaagaagagactactggattcgtgacatggggtaacaattactaccagacatggggacatcaagctttggttattaataaaacctctgagctccagctcaccctcgataaaaactctgggtccgggtttgaatcccaattgatttacggatcaggatacttcaacgtaagaatcaaggcacctcaaactacgtctacgggagtcattacttccttctatttaatctcccgttcaagccgccatgatgagctctgtttccagatcttgggaaagaatgggccaccgtatttgctgaatacgaatatgtatctgtacggtgaaggaggcaaagatcagaggtttcgtctctggtttgatccaacaaaagattaccattcctacagttttctttggaaccctaatcaacttgtgttttatgttgacgatacaccgatcagggtgtacagcaagaatccagatgtttactacccatcggtgcagacaatgttcctaatgggaagtgtgcaaaacggatcgataattgacccgaagcagatgccttacattgctaagttccaggcatcaaagattgaagggtgtaagactgagttcatgggaatagataaatgcactgatcctaagttctggtggaatcgcaaacagctaagctctaaagagaagacactgtacctaaacgcaaggaagacgtacctggattatgactattgttctgacagacagcgatatccaaaggtgcctcaagaatgtggaagttacacttagagaaagatcaatacctgtcacagggttaagcctacaaaacaaatatcttgaaaaaataacttatgttactgtaagatgctttatgataagccttttctatcaaataacaacattattgtcatcaatgctagatacattactatgcc

SEQ ID NO: 28169 - protein, 277 aa, Arabidopsis thaliana
  peptide (1)..(277): Ceres Seq. ID no. 12396854
  misc_feature (34)..(218): Pfam Name: Glycosyl hydrolases family 16 Pfam Description: Glycosyl hydrolases family 16
  misc_feature (32)..(273): Homolog of NCBI NO: 3986172 NR Description: EXGT1 [Pisum sativum]
  misc_feature (7)..(273): Homolog of NCBI NO: 7447416 NR Description: xyloglucan endo-1,4-beta-D-glucanase (EC 3.2.1.-)
  misc_feature (32)..(273): Homolog of NCBI NO: 11138242 NR Description: xyloglucan endotransglycosylase [Pisum sativum]
  misc_feature (9)..(273): Homolog of NCBI NO: 15240733 NR Description: xyloglucan endotransglycosylase (EXGT-A4)
  misc_feature (8)..(273): Homolog of NCBI NO: 38605518 NR Description: Putative xyloglucan
  misc_feature (8)..(273): Homolog of NCBI NO: 22328589 NR Description: xyloglucan endotransglycosylase, putative
  misc_feature (15)..(273): Homolog of NCBI NO: 15235587 NR Description: xyloglucan endotransglycosylase, putative
  misc_feature (8)..(273): Homolog of NCBI NO: 15230246 NR Description: xyloglucan endotransglycosylase, putative
  misc_feature (11)..(277): Homolog of NCBI NO: 38605515 NR Description: Probable xyloglucan
  misc_feature (1)..(277): Homolog of NCBI NO: 18408662 NR Description: xyloglucan endotransglycosylase, putative
MRGSDQKILLMVMVVVAVVAAAQGQEETTGFVTWGNNYYQTWGHQALVINKTSELQLTLDKNSGSGFESQLIYGSGYFNVRIKAPQTTSTGVITSFYLISRSSRHDELCFQILGKNGPPYLLNTNMYLYGEGGKDQRFRLWFDPTKDYHSYSFLWNPNQLVFYVDDTPIRVYSKNPDVYYPSVQTMFLMGSVQNGSIIDPKQMPYIAKFQASKIEGCKTEFMGIDKCTDPKFWWNRKQLSSKEKTLYLNARKTYLDYDYCSDRQRYPKVPQECGSYT

SEQ ID NO: 28170 - protein, 267 aa, Arabidopsis thaliana
  peptide (1)..(267): Ceres Seq. ID no. 12396855
  misc_feature (24)..(208): Pfam Name: Glycosyl hydrolases family 16 Pfam Description: Glycosyl hydrolases family 16
  misc_feature (22)..(263): Homolog of NCBI NO: 3986172 NR Description: EXGT1 [Pisum sativum]
  misc_feature (1)..(263): Homolog of NCBI NO: 7447416 NR Description: xyloglucan endo-1,4-beta-D-glucanase (EC 3.2.1.-)
  misc_feature (22)..(263): Homolog of NCBI NO: 11138242 NR Description: xyloglucan endotransglycosylase [Pisum sativum]
  misc_feature (1)..(263): Homolog of NCBI NO: 15240733 NR Description: xyloglucan endotransglycosylase (EXGT-A4)
  misc_feature (1)..(263): Homolog of NCBI NO: 38605518 NR Description: Putative xyloglucan
  misc_feature (1)..(263): Homolog of NCBI NO: 22328589 NR Description: xyloglucan endotransglycosylase, putative
  misc_feature (5)..(263): Homolog of NCBI NO: 15235587 NR Description: xyloglucan endotransglycosylase, putative
  misc_feature (1)..(263): Homolog of NCBI NO: 15230246 NR Description: xyloglucan endotransglycosylase, putative
  misc_feature (1)..(267): Homolog of NCBI NO: 38605515 NR Description: Probable xyloglucan
  misc_feature (1)..(267): Homolog of NCBI NO: 18408662 NR Description: xyloglucan endotransglycosylase, putative
MVMVVVAVVAAAQGQEETTGFVTWGNNYYQTWGHQALVINKTSELQLTLDKNSGSGFESQLIYGSGYFNVRIKAPQTTSTGVITSFYLISRSSRHDELCFQILGKNGPPYLLNTNMYLYGEGGKDQRFRLWFDPTKDYHSYSFLWNPNQLVFYVDDTPIRVYSKNPDVYYPSVQTMFLMGSVQNGSIIDPKQMPYIAKFQASKIEGCKTEFMGIDKCTDPKFWWNRKQLSSKEKTLYLNARKTYLDYDYCSDRQRYPKVPQECGSYT

SEQ ID NO: 28171 - protein, 265 aa, Arabidopsis thaliana
  peptide (1)..(265): Ceres Seq. ID no. 12396856
  misc_feature (22)..(206): Pfam Name: Glycosyl hydrolases family 16 Pfam Description: Glycosyl hydrolases family 16
  misc_feature (20)..(261): Homolog of NCBI NO: 3986172 NR Description: EXGT1 [Pisum sativum]
  misc_feature (1)..(261): Homolog of NCBI NO: 7447416 NR Description: xyloglucan endo-1,4-beta-D-glucanase (EC 3.2.1.-)
  misc_feature (20)..(261): Homolog of NCBI NO: 11138242 NR Description: xyloglucan endotransglycosylase [Pisum sativum]
  misc_feature (1)..(261): Homolog of NCBI NO: 15240733 NR Description: xyloglucan endotransglycosylase (EXGT-A4)
  misc_feature (1)..(261): Homolog of NCBI NO: 38605518 NR Description: Putative xyloglucan
  misc_feature (1)..(261): Homolog of NCBI NO: 22328589 NR Description: xyloglucan endotransglycosylase, putative
  misc_feature (3)..(261): Homolog of NCBI NO: 15235587 NR Description: xyloglucan endotransglycosylase, putative
  misc_feature (1)..(261): Homolog of NCBI NO: 15230246 NR Description: xyloglucan endotransglycosylase, putative
  misc_feature (1)..(265): Homolog of NCBI NO: 38605515 NR Description: Probable xyloglucan
  misc_feature (1)..(265): Homolog of NCBI NO: 18408662 NR Description: xyloglucan endotransglycosylase, putative
MVVVAVVAAAQGQEETTGFVTWGNNYYQTWGHQALVINKTSELQLTLDKNSGSGFESQLIYGSGYFNVRIKAPQTTSTGVITSFYLISRSSRHDELCFQILGKNGPPYLLNTNMYLYGEGGKDQRFRLWFDPTKDYHSYSFLWNPNQLVFYVDDTPIRVYSKNPDVYYPSVQTMFLMGSVQNGSIIDPKQMPYIAKFQASKIEGCKTEFMGIDKCTDPKFWWNRKQLSSKEKTLYLNARKTYLDYDYCSDRQRYPKVPQECGSYT

SEQ ID NO: 28172 - DNA, 1297 bp, Arabidopsis thaliana
  misc_feature (1)..(1297): Ceres Seq. ID no. 12422819
  misc_feature: MA Experiment ID: 108462 Result: Down-regulated in Transcription
  misc_feature: MA Experiment 108462 PARAMETER Experiment Name: At_Germinating_Seeds_cDNA_P Parameter: Age (day) Value: 2 vs. 0
  misc_feature: MA Experiment 108462 PARAMETER Experiment Name: At_Germinating_Seeds_cDNA_P Parameter: Tissue Value: Germinating Seeds
  misc_feature: MA Experiment ID: 108463 Result: Down-regulated in Transcription
  misc_feature: MA Experiment 108463 PARAMETER Experiment Name: At_Germinating_Seeds_cDNA_P Parameter: Age (day) Value: 3 vs. 0
  misc_feature: MA Experiment 108463 PARAMETER Experiment Name: At_Germinating_Seeds_cDNA_P Parameter: Tissue Value: Germinating Seeds
  misc_feature: MA Experiment ID: 108464 Result: Down-regulated in Transcription
  misc_feature: MA Experiment 108464 PARAMETER Experiment Name: At_Germinating_Seeds_cDNA_P Parameter: Age (day) Value: 4 vs. 0
  misc_feature: MA Experiment 108464 PARAMETER Experiment Name: At_Germinating_Seeds_cDNA_P Parameter: Tissue Value: Germinating Seeds
  misc_feature: MA Experiment ID: 108488 Result: Up-regulated in Transcription
  misc_feature: MA Experiment ID: 108569 Result: Up-regulated in Transcription
  misc_feature: MA Experiment 108569 PARAMETER Experiment Name: At_0.001%_MeJA__cDNA_P Parameter: Timepoint (hr) Value: 6
  misc_feature: MA Experiment 108569 PARAMETER Experiment Name: At_0.001%_MeJA__cDNA_P Parameter: Tissue Value: Aerial
  misc_feature: MA Experiment 108569 PARAMETER Experiment Name: At_0.001%_MeJA__cDNA_P Parameter: Treatment Value: 0.001% MeJA vs. No Treatment
  misc_feature: MA Experiment ID: 108572 Result: Down-regulated in Transcription
  misc_feature: MA Experiment 108572 PARAMETER Experiment Name: At_Drought_cDNA_P Parameter: Timepoint (hr) Value: 1
  misc_feature: MA Experiment 108572 PARAMETER Experiment Name: At_Drought_cDNA_P Parameter: Tissue Value: Aerial
  misc_feature: MA Experiment 108572 PARAMETER Experiment Name: At_Drought_cDNA_P Parameter: Treatment Value: Drought vs. No Drought
  misc_feature: MA Experiment ID: 108577 Result: Up-regulated in Transcription
  misc_feature: MA Experiment 108577 PARAMETER Experiment Name: At_42deg_Heat_cDNA_P Parameter: Temperature (deg C) Value: 42 vs. 22
  misc_feature: MA Experiment 108577 PARAMETER Experiment Name: At_42deg_Heat_cDNA_P Parameter: Timepoint (hr) Value: 6
  misc_feature: MA Experiment 108577 PARAMETER Experiment Name: At_42deg_Heat_cDNA_P Parameter: Tissue Value: Aerial
  misc_feature: MA Experiment ID: 108579 Result: Up-regulated in Transcription
  misc_feature: MA Experiment 108579 PARAMETER Experiment Name: At_4deg_Cold_cDNA_P Parameter: Temperature (deg C) Value: 4 vs. 22
  misc_feature: MA Experiment 108579 PARAMETER Experiment Name: At_4deg_Cold_cDNA_P Parameter: Timepoint (hr) Value: 6
  misc_feature: MA Experiment 108579 PARAMETER Experiment Name: At_4deg_Cold_cDNA_P Parameter: Tissue Value: Aerial
  misc_feature: MA Experiment ID: 108595 Result: Down-regulated in Transcription
  misc_feature: MA Experiment 108595 PARAMETER Experiment Name: At_Ler-pi_Ovule_cDNA_P Parameter: Plant Line Value: null
  misc_feature: MA Experiment ID: 108605 Result: Down-regulated in Transcription
  misc_feature: MA Experiment 108605 PARAMETER Experiment Name: At_100uM_ABA_cDNA_P Parameter: Timepoint (hr) Value: 6
  misc_feature: MA Experiment 108605 PARAMETER Experiment Name: At_100uM_ABA_cDNA_P Parameter: Tissue Value: Aerial
  misc_feature: MA Experiment 108605 PARAMETER Experiment Name: At_100uM_ABA_cDNA_P Parameter: Treatment Value: 100uM ABA vs. No Treatment
  misc_feature: MA Experiment ID: 20000069 Result: Down-regulated in Transcription
  misc_feature: MA Experiment 20000069 PARAMETER Experiment Name: At_100uM_ABA_Mutants_cDNA_P Parameter: Plant Line Value: CS23
  misc_feature: MA Experiment 20000069 PARAMETER Experiment Name: At_100uM_ABA_Mutants_cDNA_P Parameter: Timepoint (hr) Value: 6
  misc_feature: MA Experiment 20000069 PARAMETER Experiment Name: At_100uM_ABA_Mutants_cDNA_P Parameter: Tissue Value: Aerial
  misc_feature: MA Experiment 20000069 PARAMETER Experiment Name: At_100uM_ABA_Mutants_cDNA_P Parameter: Treatment Value: 100uM ABA vs. No Treatment
  misc_feature: MA Experiment ID: 20000070 Result: Down-regulated in Transcription
  misc_feature: MA Experiment 20000070 PARAMETER Experiment Name: At_100uM_ABA_Mutants_cDNA_P Parameter: Plant Line Value: CS24
  misc_feature: MA Experiment 20000070 PARAMETER Experiment Name: At_100uM_ABA_Mutants_cDNA_P Parameter: Timepoint (hr) Value: 6
  misc_feature: MA Experiment 20000070 PARAMETER Experiment Name: At_100uM_ABA_Mutants_cDNA_P Parameter: Tissue Value: Aerial
  misc_feature: MA Experiment 20000070 PARAMETER Experiment Name: At_100uM_ABA_Mutants_cDNA_P Parameter: Treatment Value: 100uM ABA vs. No Treatment
  misc_feature: MA Experiment ID: 20000071 Result: Down-regulated in Transcription
  misc_feature: MA Experiment 20000071 PARAMETER Experiment Name: At_100uM_ABA_Mutants_cDNA_P Parameter: Plant Line Value: CS8104
  misc_feature: MA Experiment 20000071 PARAMETER Experiment Name: At_100uM_ABA_Mutants_cDNA_P Parameter: Timepoint (hr) Value: 6
  misc_feature: MA Experiment 20000071 PARAMETER Experiment Name: At_100uM_ABA_Mutants_cDNA_P Parameter: Tissue Value: Aerial
  misc_feature: MA Experiment 20000071 PARAMETER Experiment Name: At_100uM_ABA_Mutants_cDNA_P Parameter: Treatment Value: 100uM ABA vs. No Treatment
  misc_feature: MA Experiment ID: 20000086 Result: Down-regulated in Transcription
  misc_feature: MA Experiment 20000086 PARAMETER Experiment Name: At_100uM_ABA_Mutants_cDNA_P Parameter: Plant Line Value: CS22
  misc_feature: MA Experiment 20000086 PARAMETER Experiment Name: At_100uM_ABA_Mutants_cDNA_P Parameter: Timepoint (hr) Value: 6
  misc_feature: MA Experiment 20000086 PARAMETER Experiment Name: At_100uM_ABA_Mutants_cDNA_P Parameter: Tissue Value: Aerial
  misc_feature: MA Experiment 20000086 PARAMETER Experiment Name: At_100uM_ABA_Mutants_cDNA_P Parameter: Treatment Value: 100uM ABA vs. No Treatment
  misc_feature: MA Experiment ID: 20000087 Result: Down-regulated in Transcription
  misc_feature: MA Experiment 20000087 PARAMETER Experiment Name: At_100uM_ABA_Mutants_cDNA_P Parameter: Plant Line Value: WS
  misc_feature: MA Experiment 20000087 PARAMETER Experiment Name: At_100uM_ABA_Mutants_cDNA_P Parameter: Timepoint (hr) Value: 6
  misc_feature: MA Experiment 20000087 PARAMETER Experiment Name: At_100uM_ABA_Mutants_cDNA_P Parameter: Tissue Value: Aerial
  misc_feature: MA Experiment 20000087 PARAMETER Experiment Name: At_100uM_ABA_Mutants_cDNA_P Parameter: Treatment Value: 100uM ABA vs. No Treatment
  misc_feature: MA Experiment ID: 20000088 Result: Down-regulated in Transcription
  misc_feature: MA Experiment 20000088 PARAMETER Experiment Name: At_100uM_ABA_Mutants_cDNA_P Parameter: Plant Line Value: Landsberg
  misc_feature: MA Experiment 20000088 PARAMETER Experiment Name: At_100uM_ABA_Mutants_cDNA_P Parameter: Timepoint (hr) Value: 6
  misc_feature: MA Experiment 20000088 PARAMETER Experiment Name: At_100uM_ABA_Mutants_cDNA_P Parameter: Tissue Value: Aerial
  misc_feature: MA Experiment 20000088 PARAMETER Experiment Name: At_100uM_ABA_Mutants_cDNA_P Parameter: Treatment Value: 100uM ABA vs. No Treatment
  misc_feature: MA Experiment ID: 20000089 Result: Down-regulated in Transcription
  misc_feature: MA Experiment ID: 20000090 Result: Down-regulated in Transcription
  misc_feature: MA Experiment ID: 20000111 Result: Up-regulated in Transcription
  misc_feature: MA Experiment 20000111 PARAMETER Experiment Name: At_42deg_Heat_cDNA_P Parameter: Temperature (deg C) Value: 42 vs. 22
  misc_feature: MA Experiment 20000111 PARAMETER Experiment Name: At_42deg_Heat_cDNA_P Parameter: Timepoint (hr) Value: 6
  misc_feature: MA Experiment 20000111 PARAMETER Experiment Name: At_42deg_Heat_cDNA_P Parameter: Tissue Value: Aerial
  misc_feature: MA Experiment ID: 20000112 Result: Up-regulated in Transcription
  misc_feature: MA Experiment 20000112 PARAMETER Experiment Name: At_42deg_Heat_cDNA_P Parameter: Temperature (deg C) Value: 42 vs. 22
  misc_feature: MA Experiment 20000112 PARAMETER Experiment Name: At_42deg_Heat_cDNA_P Parameter: Timepoint (hr) Value: 2
  misc_feature: MA Experiment 20000112 PARAMETER Experiment Name: At_42deg_Heat_cDNA_P Parameter: Tissue Value: Aerial
  misc_feature: MA Experiment ID: 20000113 Result: Up-regulated in Transcription
  misc_feature: MA Experiment 20000113 PARAMETER Experiment Name: At_42deg_Heat_cDNA_P Parameter: Temperature (deg C) Value: 42 vs. 22
  misc_feature: MA Experiment 20000113 PARAMETER Experiment Name: At_42deg_Heat_cDNA_P Parameter: Timepoint (hr) Value: 8
  misc_feature: MA Experiment 20000113 PARAMETER Experiment Name: At_42deg_Heat_cDNA_P Parameter: Tissue Value: Aerial
  misc_feature: MA Experiment ID: 20000117 Result: Down-regulated in Transcription
  misc_feature: MA Experiment 20000117 PARAMETER Experiment Name: At_100uM_ABA_Mutants_cDNA_P Parameter: Plant Line Value: Columbia
  misc_feature: MA Experiment 20000117 PARAMETER Experiment Name: At_100uM_ABA_Mutants_cDNA_P Parameter: Timepoint (hr) Value: 6
  misc_feature: MA Experiment 20000117 PARAMETER Experiment Name: At_100uM_ABA_Mutants_cDNA_P Parameter: Tissue Value: Aerial
  misc_feature: MA Experiment 20000117 PARAMETER Experiment Name: At_100uM_ABA_Mutants_cDNA_P Parameter: Treatment Value: 100uM ABA vs. No Treatment
  misc_feature: MA Experiment ID: 20000169 Result: Down-regulated in Transcription
  misc_feature: MA Experiment 20000169 PARAMETER Experiment Name: At_100uM_ABA_P Parameter: Age (day) Value: 14
  misc_feature: MA Experiment 20000169 PARAMETER Experiment Name: At_100uM_ABA_P Parameter: Organism Value: A. thaliana
  misc_feature: MA Experiment 20000169 PARAMETER Experiment Name: At_100uM_ABA_P Parameter: Plant Line Value: WS
  misc_feature: MA Experiment 20000169 PARAMETER Experiment Name: At_100uM_ABA_P Parameter: Timepoint (hr) Value: 6
  misc_feature: MA Experiment 20000169 PARAMETER Experiment Name: At_100uM_ABA_P Parameter: Tissue Value: Aerial
  misc_feature: MA Experiment 20000169 PARAMETER Experiment Name: At_100uM_ABA_P Parameter: Treatment Value: 100uM ABA vs. No Treatment
  misc_feature: MA Experiment ID: 20000173 Result: Up-regulated in Transcription
  misc_feature: MA Experiment 20000173 PARAMETER Experiment Name: At_42deg_Heat_P Parameter: Age (day) Value: 14
  misc_feature: MA Experiment 20000173 PARAMETER Experiment Name: At_42deg_Heat_P Parameter: Organism Value: A. thaliana
  misc_feature: MA Experiment 20000173 PARAMETER Experiment Name: At_42deg_Heat_P Parameter: Plant Line Value: WS
  misc_feature: MA Experiment 20000173 PARAMETER Experiment Name: At_42deg_Heat_P Parameter: Temperature (deg C) Value: 42 vs. 22
  misc_feature: MA Experiment 20000173 PARAMETER Experiment Name: At_42deg_Heat_P Parameter: Timepoint (hr) Value: 6
  misc_feature: MA Experiment 20000173 PARAMETER Experiment Name: At_42deg_Heat_P Parameter: Tissue Value: Aerial
  misc_feature: MA Experiment ID: 20000184 Result: Up-regulated in Transcription
  misc_feature: MA Experiment 20000184 PARAMETER Experiment Name: At_Shoots__P Parameter: Age (day) Value: 7
  misc_feature: MA Experiment 20000184 PARAMETER Experiment Name: At_Shoots__P Parameter: Tissue Value: Shoots vs. Whole Plant
  misc_feature: MA Experiment ID: 20000437 Result: Down-regulated in Transcription
  misc_feature: MA Experiment 20000437 PARAMETER Experiment Name: At_Drought_P Parameter: Age (day) Value: 8
  misc_feature: MA Experiment 20000437 PARAMETER Experiment Name: At_Drought_P Parameter: Organism Value: A. thaliana
  misc_feature: MA Experiment 20000437 PARAMETER Experiment Name: At_Drought_P Parameter: Plant Line Value: WS
  misc_feature: MA Experiment 20000437 PARAMETER Experiment Name: At_Drought_P Parameter: Timepoint (hr) Value: 24
  misc_feature: MA Experiment 20000437 PARAMETER Experiment Name: At_Drought_P Parameter: Tissue Value: Whole Plant
  misc_feature: MA Experiment 20000437 PARAMETER Experiment Name: At_Drought_P Parameter: Treatment Value: Drought vs. No Drought
  misc_feature: MA Experiment ID: 20001248 Result: Down-regulated in Transcription
  misc_feature: MA Experiment 20001248 PARAMETER Experiment Name: At_Far-red-induction_P Parameter: Age (day) Value: 7
  misc_feature: MA Experiment 20001248 PARAMETER Experiment Name: At_Far-red-induction_P Parameter: Light Value: Far-red vs. White
  misc_feature: MA Experiment 20001248 PARAMETER Experiment Name: At_Far-red-induction_P Parameter: Organism Value: A. thaliana
  misc_feature: MA Experiment 20001248 PARAMETER Experiment Name: At_Far-red-induction_P Parameter: Plant Line Value: Columbia
  misc_feature: MA Experiment 20001248 PARAMETER Experiment Name: At_Far-red-induction_P Parameter: Timepoint (hr) Value: 4
  misc_feature: MA Experiment 20001248 PARAMETER Experiment Name: At_Far-red-induction_P Parameter: Tissue Value: Whole Plant
  misc_feature: MA Experiment ID: 20001450 Result: Down-regulated in Transcription
  misc_feature: MA Experiment 20001450 PARAMETER Experiment Name: At_Far-red-induction_P Parameter: Age (day) Value: 7
  misc_feature: MA Experiment 20001450 PARAMETER Experiment Name: At_Far-red-induction_P Parameter: Light Value: Far-red vs. White
  misc_feature: MA Experiment 20001450 PARAMETER Experiment Name: At_Far-red-induction_P Parameter: Organism Value: A. thaliana
  misc_feature: MA Experiment 20001450 PARAMETER Experiment Name: At_Far-red-induction_P Parameter: Plant Line Value: Columbia
  misc_feature: MA Experiment 20001450 PARAMETER Experiment Name: At_Far-red-induction_P Parameter: Timepoint (hr) Value: 8
  misc_feature: MA Experiment 20001450 PARAMETER Experiment Name: At_Far-red-induction_P Parameter: Tissue Value: Whole Plant
  misc_feature: Phenotype: ROSETTE LEAVES Curled-Cup-shaped
  misc_feature: Phenotype: ROSETTE LEAVES Curled-Cup-shaped
  misc_feature: Phenotype: ROSETTE LEAVES Curled-Curled 3
  misc_feature: Phenotype: ROSETTE LEAVES Other
  misc_feature: Phenotype: INFLORESCENCE Height-Short
  misc_feature: Phenotype: ROSETTE LEAVES Shape-Serrate
  misc_feature: Phenotype: ROSETTE LEAVES Shape-Serrate
  misc_feature: Phenotype: WHOLE PLANT Color-Dark Green
  misc_feature: Phenotype: WHOLE PLANT Color-Dark Green
  misc_feature: Phenotype: INFLORESCENCE Height-Short
tcactataaagccgatccatagataaacgaggaccggccagaaatcgcttcaccattcccaaatctctcttccattttctccacacaaatttctcttcaatctccgataatggaaggaaccggcgttgtggcggtgtacggtaacggtgcgataacggaggcgaagaaatctcccttctccgtgaaggtcggtttggctcagatgctccgtggtggtgttatcatggatgtcgtcaacgccgagcaagctcgtatcgccgaggaggctggtgcttgcgccgtcatggctttggagcgtgttcctgctgatatccgcgctcaaggaggcgtcgctcgtatgagcgatccacaaatgattaaagaaatcaaacaagccgttacgattccggtgatggctaaggctaggattggtcatttcgttgaagctcagatccttgaagcaattggaatcgattacatcgatgagagcgaggttttgactcttgctgatgaagatcatcacatcaacaagcataatttccggatcccgttcgtttgcggttgccggaatctcggcgaggctctgaggaggatccgtgaaggtgcggcgatgattaggaccaaaggtgaagctggaaccggtaacattattgaagctgtgaggcatgtgaggtctgttaatggtgacattagggttttgcgaaacatggatgatgatgaggttttcactttcgctaagaaattagccgctccgtacgatctcgtgatgcagactaagcagcttggtcgtcttcctgtagtccaattcgccgccggtggagtggctactccggctgatgcagctctcatgatgcagcttggatgtgatggtgtctttgttggttctggtatcttcaagagcggtgacccagctcgtcgtgcacgtgccattgttcaggctgtgactcattacagtgaccctgagatgcttgtggaggtgagctgtgggcttggagaagccatggttgggatcaatctcaacgatgagaaggttgagaggttcgctaatcgctccgagtgatcaaagaaataaaaggtaaaatatctcagacgaaatggtttcagaattttctcagaccattttgcagtaatctctttgaaaagaagaagatgatgatattgttggtagtttgtatcctttgtgttttccttataatctttgatagtcttttgttattgtaactcgtaatccctttgcaagaacaagtttgtcagttataataatgtactactctcttgatcgatcagttggttttgaatctgatatattcttcgattc

SEQ ID NO: 28173 - protein, 309 aa, Arabidopsis thaliana
  peptide (1)..(309): Ceres Seq. ID no. 12422820
  misc_feature (22)..(228): Pfam Name: SOR/SNZ family Pfam Description: SOR/SNZ family
  misc_feature (14)..(307): Homolog of NCBI NO: 11359355 NR Description: pyridoxine biosynthesis protein pyroA
  misc_feature (19)..(307): Homolog of NCBI NO: 22970419 NR Description: hypothetical protein [Chloroflexus aurantiacus]
  misc_feature (2)..(309): Homolog of NCBI NO: 37530308 NR Description: putative pyridoxine/pyridoxal 5-phosphate
  misc_feature (1)..(309): Homolog of NCBI NO: 13310484 NR Description: Sor-like protein [Ginkgo biloba]
  misc_feature (2)..(309): Homolog of NCBI NO: 34394152 NR Description: putative ethylene-inducible protein
  misc_feature (1)..(309): Homolog of NCBI NO: 15224470 NR Description: similar to SOR1 from the fungus Cercospora
  misc_feature (2)..(309): Homolog of NCBI NO: 10719739 NR Description: putative pyridoxine biosynthetic enzyme
  misc_feature (1)..(309): Homolog of NCBI NO: 2501578 NR Description: ETHYLENE-INDUCIBLE PROTEIN HEVER
  misc_feature (1)..(309): Homolog of NCBI NO: 21617922 NR Description: pyridoxine biosynthesis protein-like [Arabidopsis
  misc_feature (1)..(309): Homolog of NCBI NO: 15240972 NR Description: pyridoxine biosynthesis protein - like
MEGTGVVAVYGNGAITEAKKSPFSVKVGLAQMLRGGVIMDVVNAEQARIAEEAGACAVMALERVPADIRAQGGVARMSDPQMIKEIKQAVTIPVMAKARIGHFVEAQILEAIGIDYIDESEVLTLADEDHHINKHNFRIPFVCGCRNLGEALRRIREGAAMIRTKGEAGTGNIIEAVRHVRSVNGDIRVLRNMDDDEVFTFAKKLAAPYDLVMQTKQLGRLPVVQFAAGGVATPADAALMMQLGCDGVFVGSGIFKSGDPARRARAIVQAVTHYSDPEMLVEVSCGLGEAMVGINLNDEKVERFANRSE

SEQ ID NO: 28174 - protein, 278 aa, Arabidopsis thaliana
  peptide (1)..(278): Ceres Seq. ID no. 12422821
  misc_feature (1)..(197): Pfam Name: SOR/SNZ family Pfam Description: SOR/SNZ family
  misc_feature (1)..(276): Homolog of NCBI NO: 11359355 NR Description: pyridoxine biosynthesis protein pyroA
  misc_feature (1)..(276): Homolog of NCBI NO: 22970419 NR Description: hypothetical protein [Chloroflexus aurantiacus]
  misc_feature (1)..(278): Homolog of NCBI NO: 37530308 NR Description: putative pyridoxine/pyridoxal 5-phosphate
  misc_feature (1)..(278): Homolog of NCBI NO: 13310484 NR Description: Sor-like protein [Ginkgo biloba]
  misc_feature (1)..(278): Homolog of NCBI NO: 34394152 NR Description: putative ethylene-inducible protein
  misc_feature (1)..(278): Homolog of NCBI NO: 15224470 NR Description: similar to SOR1 from the fungus Cercospora
  misc_feature (1)..(278): Homolog of NCBI NO: 10719739 NR Description: putative pyridoxine biosynthetic enzyme
  misc_feature (1)..(278): Homolog of NCBI NO: 2501578 NR Description: ETHYLENE-INDUCIBLE PROTEIN HEVER
  misc_feature (1)..(278): Homolog of NCBI NO: 21617922 NR Description: pyridoxine biosynthesis protein-like [Arabidopsis
  misc_feature (1)..(278): Homolog of NCBI NO: 15240972 NR Description: pyridoxine biosynthesis protein - like
MLRGGVIMDVVNAEQARIAEEAGACAVMALERVPADIRAQGGVARMSDPQMIKEIKQAVTIPVMAKARIGHFVEAQILEAIGIDYIDESEVLTLADEDHHINKHNFRIPFVCGCRNLGEALRRIREGAAMIRTKGEAGTGNIIEAVRHVRSVNGDIRVLRNMDDDEVFTFAKKLAAPYDLVMQTKQLGRLPVVQFAAGGVATPADAALMMQLGCDGVFVGSGIFKSGDPARRARAIVQAVTHYSDPEMLVEVSCGLGEAMVGINLNDEKVERFANRSE

SEQ ID NO: 28175 - protein, 271 aa, Arabidopsis thaliana
  peptide (1)..(271): Ceres Seq. ID no. 12422822
  misc_feature (1)..(190): Pfam Name: SOR/SNZ family Pfam Description: SOR/SNZ family
  misc_feature (1)..(269): Homolog of NCBI NO: 11359355 NR Description: pyridoxine biosynthesis protein pyroA
  misc_feature (1)..(269): Homolog of NCBI NO: 22970419 NR Description: hypothetical protein [Chloroflexus aurantiacus]
  misc_feature (1)..(271): Homolog of NCBI NO: 37530308 NR Description: putative pyridoxine/pyridoxal 5-phosphate
  misc_feature (1)..(271): Homolog of NCBI NO: 13310484 NR Description: Sor-like protein [Ginkgo biloba]
  misc_feature (1)..(271): Homolog of NCBI NO: 34394152 NR Description: putative ethylene-inducible protein
  misc_feature (1)..(271): Homolog of NCBI NO: 15224470 NR Description: similar to SOR1 from the fungus Cercospora
  misc_feature (1)..(271): Homolog of NCBI NO: 10719739 NR Description: putative pyridoxine biosynthetic enzyme
  misc_feature (1)..(271): Homolog of NCBI NO: 2501578 NR Description: ETHYLENE-INDUCIBLE PROTEIN HEVER
  misc_feature (1)..(271): Homolog of NCBI NO: 21617922 NR Description: pyridoxine biosynthesis protein-like [Arabidopsis
  misc_feature (1)..(271): Homolog of NCBI NO: 15240972 NR Description: pyridoxine biosynthesis protein - like
MDVVNAEQARIAEEAGACAVMALERVPADIRAQGGVARMSDPQMIKEIKQAVTIPVMAKARIGHFVEAQILEAIGIDYIDESEVLTLADEDHHINKHNFRIPFVCGCRNLGEALRRIREGAAMIRTKGEAGTGNIIEAVRHVRSVNGDIRVLRNMDDDEVFTFAKKLAAPYDLVMQTKQLGRLPVVQFAAGGVATPADAALMMQLGCDGVFVGSGIFKSGDPARRARAIVQAVTHYSDPEMLVEVSCGLGEAMVGINLNDEKVERFANRSE

SEQ ID NO: 28176 - DNA, 2308 bp, Arabidopsis thaliana
  misc_feature (1)..(2308): Ceres Seq. ID no. 12325938
  misc_feature: MA Experiment ID: 108434 Result: Up-regulated in Transcription
  misc_feature: MA Experiment 108434 PARAMETER Experiment Name: At_Root_Tips_cDNA_P Parameter: Tissue Value: Root Tips
  misc_feature: MA Experiment ID: 20000113 Result: Down-regulated in Transcription
  misc_feature: MA Experiment 20000113 PARAMETER Experiment Name: At_42deg_Heat_cDNA_P Parameter: Temperature (deg C) Value: 42 vs. 22
  misc_feature: MA Experiment 20000113 PARAMETER Experiment Name: At_42deg_Heat_cDNA_P Parameter: Timepoint (hr) Value: 8
  misc_feature: MA Experiment 20000113 PARAMETER Experiment Name: At_42deg_Heat_cDNA_P Parameter: Tissue Value: Aerial
  misc_feature: MA Experiment ID: 20000117 Result: Down-regulated in Transcription
  misc_feature: MA Experiment 20000117 PARAMETER Experiment Name: At_100uM_ABA_Mutants_cDNA_P Parameter: Plant Line Value: Columbia
  misc_feature: MA Experiment 20000117 PARAMETER Experiment Name: At_100uM_ABA_Mutants_cDNA_P Parameter: Timepoint (hr) Value: 6
  misc_feature: MA Experiment 20000117 PARAMETER Experiment Name: At_100uM_ABA_Mutants_cDNA_P Parameter: Tissue Value: Aerial
  misc_feature: MA Experiment 20000117 PARAMETER Experiment Name: At_100uM_ABA_Mutants_cDNA_P Parameter: Treatment Value: 100uM ABA vs. No Treatment
  misc_feature: MA Experiment ID: 20000179 Result: Up-regulated in Transcription
  misc_feature: MA Experiment 20000179 PARAMETER Experiment Name: At_Germinating_Seeds_P Parameter: Age (hr) Value: 6 vs. 0
  misc_feature: MA Experiment 20000179 PARAMETER Experiment Name: At_Germinating_Seeds_P Parameter: Tissue Value: Germinating Seeds
  misc_feature: MA Experiment ID: 20000180 Result: Up-regulated in Transcription
  misc_feature: MA Experiment 20000180 PARAMETER Experiment Name: At_Germinating_Seeds_P Parameter: Age (hr) Value: 24 vs. 0
  misc_feature: MA Experiment 20000180 PARAMETER Experiment Name: At_Germinating_Seeds_P Parameter: Tissue Value: Germinating Seeds
  misc_feature: MA Experiment ID: 20000227 Result: Up-regulated in Transcription
  misc_feature: MA Experiment 20000227 PARAMETER Experiment Name: At_Root-Tips-vs-Tops_P Parameter: Tissue Value: Root Tips vs. Root Tops
  misc_feature: MA Experiment ID: 20000234 Result: Up-regulated in Transcription
  misc_feature: MA Experiment 20000234 PARAMETER Experiment Name: At_Siliques_P Parameter: Age (day) Value: 21
  misc_feature: MA Experiment 20000234 PARAMETER Experiment Name: At_Siliques_P Parameter: Organism Value: A. thaliana
  misc_feature: MA Experiment 20000234 PARAMETER Experiment Name: At_Siliques_P Parameter: Plant Line Value: WS
  misc_feature: MA Experiment 20000234 PARAMETER Experiment Name: At_Siliques_P Parameter: Tissue Value: Less Than 5mm Siliques vs. Whole Plant
  misc_feature: MA Experiment ID: 20000495 Result: Up-regulated in Transcription
  misc_feature: MA Experiment 20000495 PARAMETER Experiment Name: At_Guard_Cells_P Parameter: Harvest Date Value: 8/2/2002
  misc_feature: MA Experiment 20000495 PARAMETER Experiment Name: At_Guard_Cells_P Parameter: Organism Value: A. thaliana
  misc_feature: MA Experiment 20000495 PARAMETER Experiment Name: At_Guard_Cells_P Parameter: Tissue Value: Guard Cells vs. Leaves
  misc_feature: MA Experiment ID: 20001557 Result: Up-regulated in Transcription
  misc_feature: MA Experiment 20001557 PARAMETER Experiment Name: At_Drought_Soil_Dry_P Parameter: Age (day) Value: 27
  misc_feature: MA Experiment 20001557 PARAMETER Experiment Name: At_Drought_Soil_Dry_P Parameter: Organism Value: A. thaliana
  misc_feature: MA Experiment 20001557 PARAMETER Experiment Name: At_Drought_Soil_Dry_P Parameter: Plant Line Value: WS
  misc_feature: MA Experiment 20001557 PARAMETER Experiment Name: At_Drought_Soil_Dry_P Parameter: Post Timepoint (hr) Value: 3
  misc_feature: MA Experiment 20001557 PARAMETER Experiment Name: At_Drought_Soil_Dry_P Parameter: Post-Treatment Value: Re-Water vs. No Drought
  misc_feature: MA Experiment 20001557 PARAMETER Experiment Name: At_Drought_Soil_Dry_P Parameter: Timepoint (day) Value: 13
  misc_feature: MA Experiment 20001557 PARAMETER Experiment Name: At_Drought_Soil_Dry_P Parameter: Treatment Value: Drought vs. No Drought
  misc_feature: MA Experiment ID: 20001560 Result: Up-regulated in Transcription
  misc_feature: MA Experiment 20001560 PARAMETER Experiment Name: At_Drought_Soil_Dry_P Parameter: Age (day) Value: 28
  misc_feature: MA Experiment 20001560 PARAMETER Experiment Name: At_Drought_Soil_Dry_P Parameter: Organism Value: A. thaliana
  misc_feature: MA Experiment 20001560 PARAMETER Experiment Name: At_Drought_Soil_Dry_P Parameter: Plant Line Value: WS
  misc_feature: MA Experiment 20001560 PARAMETER Experiment Name: At_Drought_Soil_Dry_P Parameter: Post Timepoint (hr) Value: None
  misc_feature: MA Experiment 20001560 PARAMETER Experiment Name: At_Drought_Soil_Dry_P Parameter: Post-Treatment Value: None
  misc_feature: MA Experiment 20001560 PARAMETER Experiment Name: At_Drought_Soil_Dry_P Parameter: Timepoint (day) Value: 14
  misc_feature: MA Experiment 20001560 PARAMETER Experiment Name: At_Drought_Soil_Dry_P Parameter: Treatment Value: Drought vs. No Drought
ccggggaaataaagaaacttgactgctaattgctaaaggtaatgcttctgagaattggaagctaatgaagctcttcctcaatagcaatctgctcagaaactctattttcttcaagatctccgcctttgttttgatctccgttgcttgtttcttcctcggtaagcattggtctgaggatggcttccgccgtctcatcttcttctccgccgagccttcccgatctcccattgtcgcactctcacctgatttcggaaaaacctataacatctctggtttgatctatgagagtcacccgattttgcctccgtctttgtcaccaccgccgccgccagattctgttgagttgaaggtgtttggaatcgttaatgagaacggaacaatgtctgatgagtttcagattggtgattacgacgttgagtcggcggagacgttggggaatcagacggaattcgagagtagcgacgacgatgatattaaatccaccacagctagagttagtgtgaggaaatttgagatttgttcggagaatatgactgagtacattccttgtttggataatgtagaagccatcaaaaggcttaattcaacggcgcgtggtgagcgattcgaacggaattgtcctaacgatggaatgggattgaattgcaccgttccgattcctcaaggataccgtagtccgattccgtggccgagaagccgtgatgaggtgtggttcaacaatgttccacatactaaacttgttgaagacaaaggtggtcaaaattggatttataaagagaatgacaaatttaagtttcctggtggtggtactcagtttatacacggagctgatcagtacttggatcagatctctcagatgattcctgatattagctttggtaaccatacacgagttgttcttgacattggatgtggtgtggcaagttttggtgcctacttaatgtcacgaaatgtcttgactatgtctatagctccaaaagatgttcacgagaaccagatacagtttgctcttgagcgtggtgttcctgcaatggtggcagcattcacaacacggagattgttgtatccaagccaagcttttgatttggtacattgttcaagatgtagaatcaactggactcgtgaagatgggatcctgctccttgaagttaataggatgcttcgtgccggaggatattttgtttgggcagcacaacctgtatataagcatgaaaaggccttggaagaacagtgggaagagatgctaaacctgaccactaggctgtgctgggttcttgtaaagaaggaaggatatatagctatctggcagaagcctgtaaataacacttgttacctaagtcgtggtgctggagtcagtcctcctttgtgcaattctgaagatgacccagataatgtttggtacgtggatctgaaggcatgcatcactagaattgaagaaaatggatatggagcaaatcttgctccttggccagctcgtttactgaccccaccggataggctgcagacaatacaaattgattcatacatagcccgaaaagagctatttgtagccgaatcaaagtactggaaagaaataatatcaaactatgtaaatgccctacactggaagcagataggactcagaaatgtcttggacatgagagctggatttggcggatttgcagctgcattagctgagctaaaggttgactgctgggttcttaacgtcatcccagtgagtggtcccaacacattgcctgttatatatgaccgtggactgcttggagttatgcacgattggtgtgaaccttttgatacttacccaagaacctacgatttgctgcatgctgcgggtctgttttccattgaaagaaaaagatgcaacatgacaacaatgatgctagagatggaccggattttaagacctggaggacgtgtatacatacgggacacaatcaatgtaacgagtgagcttcaagagattggaaacgcaatgaggtggcacacgagcttacgtgaaactgctgaaggacctcactcaagttacagggttctcttatgtgagaagcggtttgaatcgtctgagaagcgtcgtaccaagaagaggaggaagactaaaggaaaaagagcttgacattttcatagaatacaagtgctgggctagaattttctggggatctttggatcaatggacaatggttagtttagttgggaggctttttggaattttagaaaaattagggacctgaaacagtgaaactgtttgtgaggttttggcgtttaaccctctttaaagttgattgaaaccggattaaactcacttagccct

SEQ ID NO: 28177 - protein, 682 aa, Arabidopsis thaliana
  peptide (1)..(682): Ceres Seq. ID no. 12325939
  misc_feature (158)..(661): Pfam Name: Putative methyltransferase Pfam Description: Putative methyltransferase
  misc_feature (108)..(649): Homolog of NCBI NO: 25403070 NR Description: unknown protein, 55790-52851 [imported] -
  misc_feature (101)..(649): Homolog of NCBI NO: 15230391 NR Description: putative protein; protein id: At3g51070.1
  misc_feature (89)..(646): Homolog of NCBI NO: 20161455 NR Description: ankyrin-like protein [Oryza sativa (japonica
  misc_feature (599)..(649): Homolog of NCBI NO: 38567836 NR Description: OSJNBb0020J19.14 [Oryza sativa (japonica
  misc_feature (77)..(601): Homolog of NCBI NO: 38567836 NR Description: OSJNBb0020J19.14 [Oryza sativa (japonica
  misc_feature (47)..(661): Homolog of NCBI NO: 34908262 NR Description: ankyrin-like protein [Oryza sativa (japonica
  misc_feature (1)..(653): Homolog of NCBI NO: 7486995 NR Description: hypothetical protein T14N5.11 - Arabidopsis
  misc_feature (1)..(662): Homolog of NCBI NO: 18411424 NR Description: expressed protein
  misc_feature (1)..(96): Homolog of NCBI NO: 18405149 NR Description: expressed protein
  misc_feature (77)..(662): Homolog of NCBI NO: 18405149 NR Description: expressed protein
MKLFLNSNLLRNSIFFKISAFVLISVACFFLGKHWSEDGFRRLIFFSAEPSRSPIVALSPDFGKTYNISGLIYESHPILPPSLSPPPPPDSVELKVFGIVNENGTMSDEFQIGDYDVESAETLGNQTEFESSDDDDIKSTTARVSVRKFEICSENMTEYIPCLDNVEAIKRLNSTARGERFERNCPNDGMGLNCTVPIPQGYRSPIPWPRSRDEVWFNNVPHTKLVEDKGGQNWIYKENDKFKFPGGGTQFIHGADQYLDQISQMIPDISFGNHTRVVLDIGCGVASFGAYLMSRNVLTMSIAPKDVHENQIQFALERGVPAMVAAFTTRRLLYPSQAFDLVHCSRCRINWTREDGILLLEVNRMLRAGGYFVWAAQPVYKHEKALEEQWEEMLNLTTRLCWVLVKKEGYIAIWQKPVNNTCYLSRGAGVSPPLCNSEDDPDNVWYVDLKACITRIEENGYGANLAPWPARLLTPPDRLQTIQIDSYIARKELFVAESKYWKEIISNYVNALHWKQIGLRNVLDMRAGFGGFAAALAELKVDCWVLNVIPVSGPNTLPVIYDRGLLGVMHDWCEPFDTYPRTYDLLHAAGLFSIERKRCNMTTMMLEMDRILRPGGRVYIRDTINVTSELQEIGNAMRWHTSLRETAEGPHSSYRVLLCEKRFESSEKRRTKKRRKTKGKRA

SEQ ID NO: 28178 - protein, 577 aa, Arabidopsis thaliana
  peptide (1)..(577): Ceres Seq. ID no. 12325940
  misc_feature (53)..(556): Pfam Name: Putative methyltransferase Pfam Description: Putative methyltransferase
  misc_feature (3)..(544): Homolog of NCBI NO: 30690755 NR Description: dehydration-induced protein-related [Arabidopsis
  misc_feature (3)..(544): Homolog of NCBI NO: 25403070 NR Description: unknown protein, 55790-52851 [imported] -
  misc_feature (1)..(544): Homolog of NCBI NO: 15230391 NR Description: putative protein; protein id: At3g51070.1
  misc_feature (1)..(541): Homolog of NCBI NO: 20161455 NR Description: ankyrin-like protein [Oryza sativa (japonica
  misc_feature (494)..(544): Homolog of NCBI NO: 38567836 NR Description: OSJNBb0020J19.14 [Oryza sativa (japonica
  misc_feature (1)..(496): Homolog of NCBI NO: 38567836 NR Description: OSJNBb0020J19.14 [Oryza sativa (japonica
  misc_feature (1)..(556): Homolog of NCBI NO: 34908262 NR Description: ankyrin-like protein [Oryza sativa (japonica
  misc_feature (1)..(548): Homolog of NCBI NO: 7486995 NR Description: hypothetical protein T14N5.11 - Arabidopsis
  misc_feature (1)..(557): Homolog of NCBI NO: 18411424 NR Description: expressed protein
  misc_feature (1)..(557): Homolog of NCBI NO: 18405149 NR Description: expressed protein
MSDEFQIGDYDVESAETLGNQTEFESSDDDDIKSTTARVSVRKFEICSENMTEYIPCLDNVEAIKRLNSTARGERFERNCPNDGMGLNCTVPIPQGYRSPIPWPRSRDEVWFNNVPHTKLVEDKGGQNWIYKENDKFKFPGGGTQFIHGADQYLDQISQMIPDISFGNHTRVVLDIGCGVASFGAYLMSRNVLTMSIAPKDVHENQIQFALERGVPAMVAAFTTRRLLYPSQAFDLVHCSRCRINWTREDGILLLEVNRMLRAGGYFVWAAQPVYKHEKALEEQWEEMLNLTTRLCWVLVKKEGYIAIWQKPVNNTCYLSRGAGVSPPLCNSEDDPDNVWYVDLKACITRIEENGYGANLAPWPARLLTPPDRLQTIQIDSYIARKELFVAESKYWKEIISNYVNALHWKQIGLRNVLDMRAGFGGFAAALAELKVDCWVLNVIPVSGPNTLPVIYDRGLLGVMHDWCEPFDTYPRTYDLLHAAGLFSIERKRCNMTTMMLEMDRILRPGGRVYIRDTINVTSELQEIGNAMRWHTSLRETAEGPHSSYRVLLCEKRFESSEKRRTKKRRKTKGKRA

SEQ ID NO: 28179 - protein, 527 aa, Arabidopsis thaliana
  peptide (1)..(527): Ceres Seq. ID no. 12325941
  misc_feature (3)..(506): Pfam Name: Putative methyltransferase Pfam Description: Putative methyltransferase
  misc_feature (1)..(494): Homolog of NCBI NO: 30690755 NR Description: dehydration-induced protein-related [Arabidopsis
  misc_feature (1)..(494): Homolog of NCBI NO: 25403070 NR Description: unknown protein, 55790-52851 [imported] -
  misc_feature (1)..(494): Homolog of NCBI NO: 15230391 NR Description: putative protein; protein id: At3g51070.1
  misc_feature (1)..(491): Homolog of NCBI NO: 20161455 NR Description: ankyrin-like protein [Oryza sativa (japonica
  misc_feature (444)..(494): Homolog of NCBI NO: 38567836 NR Description: OSJNBb0020J19.14 [Oryza sativa (japonica
  misc_feature (1)..(446): Homolog of NCBI NO: 38567836 NR Description: OSJNBb0020J19.14 [Oryza sativa (japonica
  misc_feature (1)..(506): Homolog of NCBI NO: 34908262 NR Description: ankyrin-like protein [Oryza sativa (japonica
  misc_feature (1)..(498): Homolog of NCBI NO: 7486995 NR Description: hypothetical protein T14N5.11 - Arabidopsis
  misc_feature (1)..(507): Homolog of NCBI NO: 18411424 NR Description: expressed protein
  misc_feature (1)..(507): Homolog of NCBI NO: 18405149 NR Description: expressed protein
MTEYIPCLDNVEAIKRLNSTARGERFERNCPNDGMGLNCTVPIPQGYRSPIPWPRSRDEVWFNNVPHTKLVEDKGGQNWIYKENDKFKFPGGGTQFIHGADQYLDQISQMIPDISFGNHTRVVLDIGCGVASFGAYLMSRNVLTMSIAPKDVHENQIQFALERGVPAMVAAFTTRRLLYPSQAFDLVHCSRCRINWTREDGILLLEVNRMLRAGGYFVWAAQPVYKHEKALEEQWEEMLNLTTRLCWVLVKKEGYIAIWQKPVNNTCYLSRGAGVSPPLCNSEDDPDNVWYVDLKACITRIEENGYGANLAPWPARLLTPPDRLQTIQIDSYIARKELFVAESKYWKEIISNYVNALHWKQIGLRNVLDMRAGFGGFAAALAELKVDCWVLNVIPVSGPNTLPVIYDRGLLGVMHDWCEPFDTYPRTYDLLHAAGLFSIERKRCNMTTMMLEMDRILRPGGRVYIRDTINVTSELQEIGNAMRWHTSLRETAEGPHSSYRVLLCEKRFESSEKRRTKKRRKTKGKRA

SEQ ID NO: 28180 - DNA, 1210 bp, Arabidopsis thaliana
  misc_feature (1)..(1210): Ceres Seq. ID no. 12482200
  misc_feature: MA Experiment ID: 108434 Result: Down-regulated in Transcription
  misc_feature: MA Experiment 108434 PARAMETER Experiment Name: At_Root_Tips_cDNA_P Parameter: Tissue Value: Root Tips
  misc_feature: MA Experiment ID: 108461 Result: Up-regulated in Transcription
  misc_feature: MA Experiment 108461 PARAMETER Experiment Name: At_Germinating_Seeds_cDNA_P Parameter: Age (day) Value: 1 vs. 0
  misc_feature: MA Experiment 108461 PARAMETER Experiment Name: At_Germinating_Seeds_cDNA_P Parameter: Tissue Value: Germinating Seeds
  misc_feature: MA Experiment ID: 108464 Result: Up-regulated in Transcription
  misc_feature: MA Experiment 108464 PARAMETER Experiment Name: At_Germinating_Seeds_cDNA_P Parameter: Age (day) Value: 4 vs. 0
  misc_feature: MA Experiment 108464 PARAMETER Experiment Name: At_Germinating_Seeds_cDNA_P Parameter: Tissue Value: Germinating Seeds
  misc_feature: MA Experiment ID: 108585 Result: Up-regulated in Transcription
  misc_feature: MA Experiment 108585 PARAMETER Experiment Name: At_5mM_NaNP_cDNA_P Parameter: Timepoint (hr) Value: 6
  misc_feature: MA Experiment 108585 PARAMETER Experiment Name: At_5mM_NaNP_cDNA_P Parameter: Tissue Value: Aerial
  misc_feature: MA Experiment 108585 PARAMETER Experiment Name: At_5mM_NaNP_cDNA_P Parameter: Treatment Value: null
  misc_feature: MA Experiment ID: 108607 Result: Down-regulated in Transcription
  misc_feature: MA Experiment 108607 PARAMETER Experiment Name: At_100uM_ABA_cDNA_P Parameter: Timepoint (hr) Value: 4
  misc_feature: MA Experiment 108607 PARAMETER Experiment Name: At_100uM_ABA_cDNA_P Parameter: Tissue Value: Aerial
  misc_feature: MA Experiment 108607 PARAMETER Experiment Name: At_100uM_ABA_cDNA_P Parameter: Treatment Value: 100uM ABA vs. No Treatment
  misc_feature: MA Experiment ID: 108609 Result: Down-regulated in Transcription
  misc_feature: MA Experiment 108609 PARAMETER Experiment Name: At_100uM_ABA_cDNA_P Parameter: Timepoint (hr) Value: 24
  misc_feature: MA Experiment 108609 PARAMETER Experiment Name: At_100uM_ABA_cDNA_P Parameter: Tissue Value: Aerial
  misc_feature: MA Experiment 108609 PARAMETER Experiment Name: At_100uM_ABA_cDNA_P Parameter: Treatment Value: 100uM ABA vs. No Treatment
  misc_feature: MA Experiment ID: 108668 Result: Up-regulated in Transcription
  misc_feature: MA Experiment 108668 PARAMETER Experiment Name: At_2mM_SA_cDNA_P Parameter: Plant Line Value: WS
  misc_feature: MA Experiment 108668 PARAMETER Experiment Name: At_2mM_SA_cDNA_P Parameter: Timepoint (hr) Value: 6
  misc_feature: MA Experiment 108668 PARAMETER Experiment Name: At_2mM_SA_cDNA_P Parameter: Treatment Value: 2mM SA vs. No Treatment
  misc_feature: MA Experiment ID: 20000030 Result: Down-regulated in Transcription
  misc_feature: MA Experiment 20000030 PARAMETER Experiment Name: At_CS6630_Roots_cDNA_P Parameter: Plant Line Value: CS6630 vs. WS
  misc_feature: MA Experiment 20000030 PARAMETER Experiment Name: At_CS6630_Roots_cDNA_P Parameter: Tissue Value: Roots
  misc_feature: MA Experiment ID: 20000111 Result: Down-regulated in Transcription
  misc_feature: MA Experiment 20000111 PARAMETER Experiment Name: At_42deg_Heat_cDNA_P Parameter: Temperature (deg C) Value: 42 vs. 22
  misc_feature: MA Experiment 20000111 PARAMETER Experiment Name: At_42deg_Heat_cDNA_P Parameter: Timepoint (hr) Value: 6
  misc_feature: MA Experiment 20000111 PARAMETER Experiment Name: At_42deg_Heat_cDNA_P Parameter: Tissue Value: Aerial
  misc_feature: MA Experiment ID: 20000144 Result: Down-regulated in Transcription
  misc_feature: MA Experiment 20000144 PARAMETER Experiment Name: At_42deg_Heat_cDNA_P Parameter: Temperature (deg C) Value: 42 vs. 22
  misc_feature: MA Experiment 20000144 PARAMETER Experiment Name: At_42deg_Heat_cDNA_P Parameter: Timepoint (hr) Value: 1
  misc_feature: MA Experiment 20000144 PARAMETER Experiment Name: At_42deg_Heat_cDNA_P Parameter: Tissue Value: Aerial
  misc_feature: MA Experiment ID: 20000173 Result: Down-regulated in Transcription
  misc_feature: MA Experiment 20000173 PARAMETER Experiment Name: At_42deg_Heat_P Parameter: Age (day) Value: 14
  misc_feature: MA Experiment 20000173 PARAMETER Experiment Name: At_42deg_Heat_P Parameter: Organism Value: A. thaliana
  misc_feature: MA Experiment 20000173 PARAMETER Experiment Name: At_42deg_Heat_P Parameter: Plant Line Value: WS
  misc_feature: MA Experiment 20000173 PARAMETER Experiment Name: At_42deg_Heat_P Parameter: Temperature (deg C) Value: 42 vs. 22
  misc_feature: MA Experiment 20000173 PARAMETER Experiment Name: At_42deg_Heat_P Parameter: Timepoint (hr) Value: 6
  misc_feature: MA Experiment 20000173 PARAMETER Experiment Name: At_42deg_Heat_P Parameter: Tissue Value: Aerial
  misc_feature: MA Experiment ID: 20000265 Result: Down-regulated in Transcription
  misc_feature: MA Experiment 20000265 PARAMETER Experiment Name: At_Open_Flower_P Parameter: Age (day) Value: 21
  misc_feature: MA Experiment 20000265 PARAMETER Experiment Name: At_Open_Flower_P Parameter: Plant Line Value: WS
  misc_feature: MA Experiment 20000265 PARAMETER Experiment Name: At_Open_Flower_P Parameter: Tissue Value: Closed Flower vs. Whole Plant
  misc_feature: MA Experiment ID: 20000438 Result: Down-regulated in Transcription
  misc_feature: MA Experiment 20000438 PARAMETER Experiment Name: At_Shoots__P Parameter: Age (day) Value: 14
  misc_feature: MA Experiment 20000438 PARAMETER Experiment Name: At_Shoots__P Parameter: Tissue Value: Shoots vs. Whole Plant
  misc_feature: MA Experiment ID: 20000460 Result: Down-regulated in Transcription
  misc_feature: MA Experiment 20000460 PARAMETER Experiment Name: At_10percent_PEG_P Parameter: Age (day) Value: 12
  misc_feature: MA Experiment 20000460 PARAMETER Experiment Name: At_10percent_PEG_P Parameter: Organism Value: A. thaliana
  misc_feature: MA Experiment 20000460 PARAMETER Experiment Name: At_10percent_PEG_P Parameter: Plant Line Value: WS
  misc_feature: MA Experiment 20000460 PARAMETER Experiment Name: At_10percent_PEG_P Parameter: Timepoint (day) Value: 12
  misc_feature: MA Experiment 20000460 PARAMETER Experiment Name: At_10percent_PEG_P Parameter: Tissue Value: Whole Plant
  misc_feature: MA Experiment 20000460 PARAMETER Experiment Name: At_10percent_PEG_P Parameter: Treatment Value: 10percent PEG vs. No Treatment
  misc_feature: MA Experiment ID: 20000495 Result: Down-regulated in Transcription
  misc_feature: MA Experiment 20000495 PARAMETER Experiment Name: At_Guard_Cells_P Parameter: Harvest Date Value: 8/2/2002
  misc_feature: MA Experiment 20000495 PARAMETER Experiment Name: At_Guard_Cells_P Parameter: Organism Value: A. thaliana
  misc_feature: MA Experiment 20000495 PARAMETER Experiment Name: At_Guard_Cells_P Parameter: Tissue Value: Guard Cells vs. Leaves
  misc_feature: MA Experiment ID: 20000527 Result: Down-regulated in Transcription
  misc_feature: MA Experiment 20000527 PARAMETER Experiment Name: At_10percent_PEG_P Parameter: Age (day) Value: 20
  misc_feature: MA Experiment 20000527 PARAMETER Experiment Name: At_10percent_PEG_P Parameter: Organism Value: A. thaliana
  misc_feature: MA Experiment 20000527 PARAMETER Experiment Name: At_10percent_PEG_P Parameter: Plant Line Value: WS
  misc_feature: MA Experiment 20000527 PARAMETER Experiment Name: At_10percent_PEG_P Parameter: Timepoint (day) Value: 20
  misc_feature: MA Experiment 20000527 PARAMETER Experiment Name: At_10percent_PEG_P Parameter: Tissue Value: Whole Plant
  misc_feature: MA Experiment 20000527 PARAMETER Experiment Name: At_10percent_PEG_P Parameter: Treatment Value: 10percent PEG vs. No Treatment
  misc_feature: MA Experiment ID: 20000575 Result: Down-regulated in Transcription
  misc_feature: MA Experiment 20000575 PARAMETER Experiment Name: At_100uM_ABA_Mutants__P Parameter: Organism Value: A. thaliana
  misc_feature: MA Experiment 20000575 PARAMETER Experiment Name: At_100uM_ABA_Mutants__P Parameter: Plant Line Value: CS22
  misc_feature: MA Experiment 20000575 PARAMETER Experiment Name: At_100uM_ABA_Mutants__P Parameter: Timepoint (hr) Value: 6
  misc_feature: MA Experiment 20000575 PARAMETER Experiment Name: At_100uM_ABA_Mutants__P Parameter: Tissue Value: Whole Plant
  misc_feature: MA Experiment 20000575 PARAMETER Experiment Name: At_100uM_ABA_Mutants__P Parameter: Treatment Value: 1uM ABA vs. No Treatment
  misc_feature: MA Experiment ID: 20000576 Result: Down-regulated in Transcription
  misc_feature: MA Experiment 20000576 PARAMETER Experiment Name: At_100uM_ABA_Mutants__P Parameter: Organism Value: A. thaliana
  misc_feature: MA Experiment 20000576 PARAMETER Experiment Name: At_100uM_ABA_Mutants__P Parameter: Plant Line Value: CS23
  misc_feature: MA Experiment 20000576 PARAMETER Experiment Name: At_100uM_ABA_Mutants__P Parameter: Timepoint (hr) Value: 6
  misc_feature: MA Experiment 20000576 PARAMETER Experiment Name: At_100uM_ABA_Mutants__P Parameter: Tissue Value: Whole Plant
  misc_feature: MA Experiment 20000576 PARAMETER Experiment Name: At_100uM_ABA_Mutants__P Parameter: Treatment Value: 1uM ABA vs. No Treatment
  misc_feature: MA Experiment ID: 20000794 Result: Down-regulated in Transcription
  misc_feature: MA Experiment 20000794 PARAMETER Experiment Name: At_Petals_P Parameter: Age (day) Value: 23-25 days
  misc_feature: MA Experiment 20000794 PARAMETER Experiment Name: At_Petals_P Parameter: Plant Line Value: WS
  misc_feature: MA Experiment 20000794 PARAMETER Experiment Name: At_Petals_P Parameter: Tissue Value: Petals vs. Whole plant
  misc_feature: MA Experiment ID: 20001451 Result: Down-regulated in Transcription
  misc_feature: MA Experiment 20001451 PARAMETER Experiment Name: At_Far-red-induction_P Parameter: Age (day) Value: 7
  misc_feature: MA Experiment 20001451 PARAMETER Experiment Name: At_Far-red-induction_P Parameter: Light Value: Far-red vs. White
  misc_feature: MA Experiment 20001451 PARAMETER Experiment Name: At_Far-red-induction_P Parameter: Organism Value: A. thaliana
  misc_feature: MA Experiment 20001451 PARAMETER Experiment Name: At_Far-red-induction_P Parameter: Plant Line Value: Columbia
  misc_feature: MA Experiment 20001451 PARAMETER Experiment Name: At_Far-red-induction_P Parameter: Timepoint (hr) Value: 24
  misc_feature: MA Experiment 20001451 PARAMETER Experiment Name: At_Far-red-induction_P Parameter: Tissue Value: Whole Plant
  misc_feature: MA Experiment ID: 20001560 Result: Down-regulated in Transcription
  misc_feature: MA Experiment 20001560 PARAMETER Experiment Name: At_Drought_Soil_Dry_P Parameter: Age (day) Value: 28
  misc_feature: MA Experiment 20001560 PARAMETER Experiment Name: At_Drought_Soil_Dry_P Parameter: Organism Value: A. thaliana
  misc_feature: MA Experiment 20001560 PARAMETER Experiment Name: At_Drought_Soil_Dry_P Parameter: Plant Line Value: WS
  misc_feature: MA Experiment 20001560 PARAMETER Experiment Name: At_Drought_Soil_Dry_P Parameter: Post Timepoint (hr) Value: None
  misc_feature: MA Experiment 20001560 PARAMETER Experiment Name: At_Drought_Soil_Dry_P Parameter: Post-Treatment Value: None
  misc_feature: MA Experiment 20001560 PARAMETER Experiment Name: At_Drought_Soil_Dry_P Parameter: Timepoint (day) Value: 14
  misc_feature: MA Experiment 20001560 PARAMETER Experiment Name: At_Drought_Soil_Dry_P Parameter: Treatment Value: Drought vs. No Drought
  misc_feature: MA Experiment ID: 20001757 Result: Up-regulated in Transcription
  misc_feature: MA Experiment 20001757 PARAMETER Experiment Name: At_50mM_NH4NO3_L-to-H_P Parameter: Timepoint (hr) Value: 6
  misc_feature: MA Experiment 20001757 PARAMETER Experiment Name: At_50mM_NH4NO3_L-to-H_P Parameter: Tissue Value: Leaf
  misc_feature: MA Experiment 20001757 PARAMETER Experiment Name: At_50mM_NH4NO3_L-to-H_P Parameter: Treatment Value: 50mM NH4NO3 vs 100mM Mannitol
  misc_feature: MA Experiment ID: 20001904 Result: Up-regulated in Transcription
  misc_feature: MA Experiment 20001904 PARAMETER Experiment Name: At_Drought_Reproduction_P Parameter: Age (day) Value: 37
  misc_feature: MA Experiment 20001904 PARAMETER Experiment Name: At_Drought_Reproduction_P Parameter: Organism Value: A. thaliana
  misc_feature: MA Experiment 20001904 PARAMETER Experiment Name: At_Drought_Reproduction_P Parameter: Plant Line Value: WS
  misc_feature: MA Experiment 20001904 PARAMETER Experiment Name: At_Drought_Reproduction_P Parameter: Timepoint (day) Value: 7
  misc_feature: MA Experiment 20001904 PARAMETER Experiment Name: At_Drought_Reproduction_P Parameter: Tissue Value: Rosettes
  misc_feature: MA Experiment 20001904 PARAMETER Experiment Name: At_Drought_Reproduction_P Parameter: Treatment Value: Drought vs. No Drought
tcactcaaattaaaccataaccaaataattctcttaaaagagctaagaaaatgcattcctctttgataaaattgggatttcttcttcttcttattcaggtatcattgtctcatgctcaactaagcccttccttttacgataaaacatgtccgcaagtctttgacattgcaaccactaccattgtcaatgctctaagatcggaccctcgcatcgctgcaagcatccttcgtcttcatttccacgactgctttgttaatggatgtgatgcatcgatattgttagacaacaccacatcgtttaggacggagaaagatgcgtttgggaacgctaattccgctcgaggtttcgatgtgatcgacaaaatgaaggctgccgtggagaaagcatgtcctaaaactgtttcatgtgctgatttgctcgccatcgcggctcaagaatctgtcgttttggcgggaggtccttcatggagggttccaaatggaagaagagacagcttaagagggttcatggatcttgctaatgataaccttccagctccattctttacccttaaccaacttaaggatagattcaaaaacgtcggactcgaccgtgcttctgatctcgttgctctttctggtggtcacacctttggcaaaaaccaatgtcaattcataatggatcggctttataacttcagtaacactggtttacccgacccaacccttgataaatcttacctctccacactcagaaaacaatgtccacgtaatggaaaccagagtgtattggtagattttgatttacgtacgccaacactctttgacaacaagtattatgtgaacctcaaggagaacaaaggacttatccagagcgaccaagagttattctctagccctgatgcttcagacactcttcctttagtccgagaatacgctgatggtcaagggaaatttttcgatgcgttcgcgaaggcaatgataaggatgagtagtctttcacctttaacagggaaacaaggagaaataagattgaactgtagagtggtgaattcgaaatctaaaatcatggatgtggtagaagatgctcttgaatttgcaagctcaatgtgaggaaatgtttttctttaacaataaataaattatcaatgttgtcaagatgttatctttttttcttacttccttgtttgttttgtgttacttatttaaattctatataactattaaacctt

SEQ ID NO: 28181 - protein, 346 aa, Arabidopsis thaliana
  peptide (1)..(346): Ceres Seq. ID no. 12482201
  misc_feature (40)..(291): Pfam Name: Peroxidase Pfam Description: Peroxidase
  misc_feature (1)..(328): Homolog of NCBI NO: 2129514 NR Description: peroxidase (EC 1.11.1.7) A4a precursor - Japanese
  misc_feature (5)..(346): Homolog of NCBI NO: 480907 NR Description: peroxidase (EC 1.11.1.7) Cb - Arabidopsis
  misc_feature (5)..(346): Homolog of NCBI NO: 15229084 NR Description: peroxidase
  misc_feature (3)..(346): Homolog of NCBI NO: 21592888 NR Description: peroxidase [Arabidopsis thaliana]
  misc_feature (5)..(346): Homolog of NCBI NO: 15229095 NR Description: peroxidase, putative
  misc_feature (3)..(346): Homolog of NCBI NO: 25453209 NR Description: Peroxidase 32 precursor (Atperox P32) (PRXR3)
  misc_feature (1)..(346): Homolog of NCBI NO: 129809 NR Description: Peroxidase C2 precursor
  misc_feature (1)..(346): Homolog of NCBI NO: 15236608 NR Description: peroxidase, putative; protein id: At4g08780.1
  misc_feature (1)..(346): Homolog of NCBI NO: 22531052 NR Description: peroxidase C2 precursor-like protein [Arabidopsis
  misc_feature (1)..(346): Homolog of NCBI NO: 15236606 NR Description: peroxidase, putative
MHSSLIKLGFLLLLIQVSLSHAQLSPSFYDKTCPQVFDIATTTIVNALRSDPRIAASILRLHFHDCFVNGCDASILLDNTTSFRTEKDAFGNANSARGFDVIDKMKAAVEKACPKTVSCADLLAIAAQESVVLAGGPSWRVPNGRRDSLRGFMDLANDNLPAPFFTLNQLKDRFKNVGLDRASDLVALSGGHTFGKNQCQFIMDRLYNFSNTGLPDPTLDKSYLSTLRKQCPRNGNQSVLVDFDLRTPTLFDNKYYVNLKENKGLIQSDQELFSSPDASDTLPLVREYADGQGKFFDAFAKAMIRMSSLSPLTGKQGEIRLNCRVVNSKSKIMDVVEDALEFASSM

SEQ ID NO: 28182 - protein, 242 aa, Arabidopsis thaliana
  peptide (1)..(242): Ceres Seq. ID no. 12482202
  misc_feature (1)..(187): Pfam Name: Peroxidase Pfam Description: Peroxidase
  misc_feature (1)..(224): Homolog of NCBI NO: 2129514 NR Description: peroxidase (EC 1.11.1.7) A4a precursor - Japanese
  misc_feature (1)..(242): Homolog of NCBI NO: 480907 NR Description: peroxidase (EC 1.11.1.7) Cb - Arabidopsis
  misc_feature (1)..(242): Homolog of NCBI NO: 15229084 NR Description: peroxidase
  misc_feature (1)..(242): Homolog of NCBI NO: 21592888 NR Description: peroxidase [Arabidopsis thaliana]
  misc_feature (1)..(242): Homolog of NCBI NO: 15229095 NR Description: peroxidase, putative
  misc_feature (1)..(242): Homolog of NCBI NO: 25453209 NR Description: Peroxidase 32 precursor (Atperox P32) (PRXR3)
  misc_feature (1)..(242): Homolog of NCBI NO: 129809 NR Description: Peroxidase C2 precursor
  misc_feature (1)..(242): Homolog of NCBI NO: 15236608 NR Description: peroxidase, putative; protein id: At4g08780.1
  misc_feature (1)..(242): Homolog of NCBI NO: 22531052 NR Description: peroxidase C2 precursor-like protein [Arabidopsis
  misc_feature (1)..(242): Homolog of NCBI NO: 15236606 NR Description: peroxidase, putative
MKAAVEKACPKTVSCADLLAIAAQESVVLAGGPSWRVPNGRRDSLRGFMDLANDNLPAPFFTLNQLKDRFKNVGLDRASDLVALSGGHTFGKNQCQFIMDRLYNFSNTGLPDPTLDKSYLSTLRKQCPRNGNQSVLVDFDLRTPTLFDNKYYVNLKENKGLIQSDQELFSSPDASDTLPLVREYADGQGKFFDAFAKAMIRMSSLSPLTGKQGEIRLNCRVVNSKSKIMDVVEDALEFASSM

SEQ ID NO: 28183 - protein, 194 aa, Arabidopsis thaliana
  peptide (1)..(194): Ceres Seq. ID no. 12482203
  misc_feature (1)..(139): Pfam Name: Peroxidase Pfam Description: Peroxidase
  misc_feature (1)..(176): Homolog of NCBI NO: 2129514 NR Description: peroxidase (EC 1.11.1.7) A4a precursor - Japanese
  misc_feature (1)..(194): Homolog of NCBI NO: 480907 NR Description: peroxidase (EC 1.11.1.7) Cb - Arabidopsis
  misc_feature (1)..(194): Homolog of NCBI NO: 15229084 NR Description: peroxidase
  misc_feature (1)..(194): Homolog of NCBI NO: 21592888 NR Description: peroxidase [Arabidopsis thaliana]
  misc_feature (1)..(194): Homolog of NCBI NO: 15229095 NR Description: peroxidase, putative
  misc_feature (1)..(194): Homolog of NCBI NO: 25453209 NR Description: Peroxidase 32 precursor (Atperox P32) (PRXR3)
  misc_feature (1)..(194): Homolog of NCBI NO: 129809 NR Description: Peroxidase C2 precursor
  misc_feature (1)..(194): Homolog of NCBI NO: 15236608 NR Description: peroxidase, putative; protein id: At4g08780.1
  misc_feature (1)..(194): Homolog of NCBI NO: 22531052 NR Description: peroxidase C2 precursor-like protein [Arabidopsis
  misc_feature (1)..(194): Homolog of NCBI NO: 15236606 NR Description: peroxidase, putative
MDLANDNLPAPFFTLNQLKDRFKNVGLDRASDLVALSGGHTFGKNQCQFIMDRLYNFSNTGLPDPTLDKSYLSTLRKQCPRNGNQSVLVDFDLRTPTLFDNKYYVNLKENKGLIQSDQELFSSPDASDTLPLVREYADGQGKFFDAFAKAMIRMSSLSPLTGKQGEIRLNCRVVNSKSKIMDVVEDALEFASSM

SEQ ID NO: 28184 - DNA, 2332 bp, Arabidopsis thaliana
  misc_feature (1)..(2332): Ceres Seq. ID no. 12372009
  misc_feature: MA Experiment ID: 108434 Result: Up-regulated in Transcription
  misc_feature: MA Experiment 108434 PARAMETER Experiment Name: At_Root_Tips_cDNA_P Parameter: Tissue Value: Root Tips
  misc_feature: MA Experiment ID: 108462 Result: Down-regulated in Transcription
  misc_feature: MA Experiment 108462 PARAMETER Experiment Name: At_Germinating_Seeds_cDNA_P Parameter: Age (day) Value: 2 vs. 0
  misc_feature: MA Experiment 108462 PARAMETER Experiment Name: At_Germinating_Seeds_cDNA_P Parameter: Tissue Value: Germinating Seeds
  misc_feature: MA Experiment ID: 108463 Result: Down-regulated in Transcription
  misc_feature: MA Experiment 108463 PARAMETER Experiment Name: At_Germinating_Seeds_cDNA_P Parameter: Age (day) Value: 3 vs. 0
  misc_feature: MA Experiment 108463 PARAMETER Experiment Name: At_Germinating_Seeds_cDNA_P Parameter: Tissue Value: Germinating Seeds
  misc_feature: MA Experiment ID: 108464 Result: Down-regulated in Transcription
  misc_feature: MA Experiment 108464 PARAMETER Experiment Name: At_Germinating_Seeds_cDNA_P Parameter: Age (day) Value: 4 vs. 0
  misc_feature: MA Experiment 108464 PARAMETER Experiment Name: At_Germinating_Seeds_cDNA_P Parameter: Tissue Value: Germinating Seeds
  misc_feature: MA Experiment ID: 20000086 Result: Up-regulated in Transcription
  misc_feature: MA Experiment 20000086 PARAMETER Experiment Name: At_100uM_ABA_Mutants_cDNA_P Parameter: Plant Line Value: CS22
  misc_feature: MA Experiment 20000086 PARAMETER Experiment Name: At_100uM_ABA_Mutants_cDNA_P Parameter: Timepoint (hr) Value: 6
  misc_feature: MA Experiment 20000086 PARAMETER Experiment Name: At_100uM_ABA_Mutants_cDNA_P Parameter: Tissue Value: Aerial
  misc_feature: MA Experiment 20000086 PARAMETER Experiment Name: At_100uM_ABA_Mutants_cDNA_P Parameter: Treatment Value: 100uM ABA vs. No Treatment
  misc_feature: MA Experiment ID: 20000088 Result: Up-regulated in Transcription
  misc_feature: MA Experiment 20000088 PARAMETER Experiment Name: At_100uM_ABA_Mutants_cDNA_P Parameter: Plant Line Value: Landsberg
  misc_feature: MA Experiment 20000088 PARAMETER Experiment Name: At_100uM_ABA_Mutants_cDNA_P Parameter: Timepoint (hr) Value: 6
  misc_feature: MA Experiment 20000088 PARAMETER Experiment Name: At_100uM_ABA_Mutants_cDNA_P Parameter: Tissue Value: Aerial
  misc_feature: MA Experiment 20000088 PARAMETER Experiment Name: At_100uM_ABA_Mutants_cDNA_P Parameter: Treatment Value: 100uM ABA vs. No Treatment
  misc_feature: MA Experiment ID: 20000179 Result: Down-regulated in Transcription
  misc_feature: MA Experiment 20000179 PARAMETER Experiment Name: At_Germinating_Seeds_P Parameter: Age (hr) Value: 6 vs. 0
  misc_feature: MA Experiment 20000179 PARAMETER Experiment Name: At_Germinating_Seeds_P Parameter: Tissue Value: Germinating Seeds
  misc_feature: MA Experiment ID: 20000180 Result: Down-regulated in Transcription
  misc_feature: MA Experiment 20000180 PARAMETER Experiment Name: At_Germinating_Seeds_P Parameter: Age (hr) Value: 24 vs. 0
  misc_feature: MA Experiment 20000180 PARAMETER Experiment Name: At_Germinating_Seeds_P Parameter: Tissue Value: Germinating Seeds
  misc_feature: MA Experiment ID: 20001248 Result: Up-regulated in Transcription
  misc_feature: MA Experiment 20001248 PARAMETER Experiment Name: At_Far-red-induction_P Parameter: Age (day) Value: 7
  misc_feature: MA Experiment 20001248 PARAMETER Experiment Name: At_Far-red-induction_P Parameter: Light Value: Far-red vs. White
  misc_feature: MA Experiment 20001248 PARAMETER Experiment Name: At_Far-red-induction_P Parameter: Organism Value: A. thaliana
  misc_feature: MA Experiment 20001248 PARAMETER Experiment Name: At_Far-red-induction_P Parameter: Plant Line Value: Columbia
  misc_feature: MA Experiment 20001248 PARAMETER Experiment Name: At_Far-red-induction_P Parameter: Timepoint (hr) Value: 4
  misc_feature: MA Experiment 20001248 PARAMETER Experiment Name: At_Far-red-induction_P Parameter: Tissue Value: Whole Plant
  misc_feature: MA Experiment ID: 20001458 Result: Up-regulated in Transcription
  misc_feature: MA Experiment 20001458 PARAMETER Experiment Name: At_50mM_NH4NO3_L-to-H_P Parameter: Age (day) Value: Undefined
  misc_feature: MA Experiment 20001458 PARAMETER Experiment Name: At_50mM_NH4NO3_L-to-H_P Parameter: Organism Value: Undefined
  misc_feature: MA Experiment 20001458 PARAMETER Experiment Name: At_50mM_NH4NO3_L-to-H_P Parameter: Plant Line Value: Undefined
  misc_feature: MA Experiment 20001458 PARAMETER Experiment Name: At_50mM_NH4NO3_L-to-H_P Parameter: Timepoint (hr) Value: 2
  misc_feature: MA Experiment 20001458 PARAMETER Experiment Name: At_50mM_NH4NO3_L-to-H_P Parameter: Tissue Value: Siliques
  misc_feature: MA Experiment 20001458 PARAMETER Experiment Name: At_50mM_NH4NO3_L-to-H_P Parameter: Treatment Value: 50mM NH4NO3 vs. 100mM Manitol
  misc_feature: MA Experiment ID: 20001555 Result: Up-regulated in Transcription
  misc_feature: MA Experiment 20001555 PARAMETER Experiment Name: At_Drought_Soil_Dry_P Parameter: Age (day) Value: 24
  misc_feature: MA Experiment 20001555 PARAMETER Experiment Name: At_Drought_Soil_Dry_P Parameter: Organism Value: A. thaliana
  misc_feature: MA Experiment 20001555 PARAMETER Experiment Name: At_Drought_Soil_Dry_P Parameter: Plant Line Value: WS
  misc_feature: MA Experiment 20001555 PARAMETER Experiment Name: At_Drought_Soil_Dry_P Parameter: Post Timepoint (hr) Value: None
  misc_feature: MA Experiment 20001555 PARAMETER Experiment Name: At_Drought_Soil_Dry_P Parameter: Post-Treatment Value: None
  misc_feature: MA Experiment 20001555 PARAMETER Experiment Name: At_Drought_Soil_Dry_P Parameter: Timepoint (day) Value: 10
  misc_feature: MA Experiment 20001555 PARAMETER Experiment Name: At_Drought_Soil_Dry_P Parameter: Treatment Value: Drought vs. No Drought
  misc_feature: MA Experiment ID: 20001556 Result: Up-regulated in Transcription
  misc_feature: MA Experiment 20001556 PARAMETER Experiment Name: At_Drought_Soil_Dry_P Parameter: Age (day) Value: 26
  misc_feature: MA Experiment 20001556 PARAMETER Experiment Name: At_Drought_Soil_Dry_P Parameter: Organism Value: A. thaliana
  misc_feature: MA Experiment 20001556 PARAMETER Experiment Name: At_Drought_Soil_Dry_P Parameter: Plant Line Value: WS
  misc_feature: MA Experiment 20001556 PARAMETER Experiment Name: At_Drought_Soil_Dry_P Parameter: Post Timepoint (hr) Value: None
  misc_feature: MA Experiment 20001556 PARAMETER Experiment Name: At_Drought_Soil_Dry_P Parameter: Post-Treatment Value: None
  misc_feature: MA Experiment 20001556 PARAMETER Experiment Name: At_Drought_Soil_Dry_P Parameter: Timepoint (day) Value: 12
  misc_feature: MA Experiment 20001556 PARAMETER Experiment Name: At_Drought_Soil_Dry_P Parameter: Treatment Value: Drought vs. No Drought
  misc_feature: MA Experiment ID: 20001557 Result: Up-regulated in Transcription
  misc_feature: MA Experiment 20001557 PARAMETER Experiment Name: At_Drought_Soil_Dry_P Parameter: Age (day) Value: 27
  misc_feature: MA Experiment 20001557 PARAMETER Experiment Name: At_Drought_Soil_Dry_P Parameter: Organism Value: A. thaliana
  misc_feature: MA Experiment 20001557 PARAMETER Experiment Name: At_Drought_Soil_Dry_P Parameter: Plant Line Value: WS
  misc_feature: MA Experiment 20001557 PARAMETER Experiment Name: At_Drought_Soil_Dry_P Parameter: Post Timepoint (hr) Value: 3
  misc_feature: MA Experiment 20001557 PARAMETER Experiment Name: At_Drought_Soil_Dry_P Parameter: Post-Treatment Value: Re-Water vs. No Drought
  misc_feature: MA Experiment 20001557 PARAMETER Experiment Name: At_Drought_Soil_Dry_P Parameter: Timepoint (day) Value: 13
  misc_feature: MA Experiment 20001557 PARAMETER Experiment Name: At_Drought_Soil_Dry_P Parameter: Treatment Value: Drought vs. No Drought
  misc_feature: MA Experiment ID: 20001558 Result: Up-regulated in Transcription
  misc_feature: MA Experiment 20001558 PARAMETER Experiment Name: At_Drought_Soil_Dry_P Parameter: Age (day) Value: 27
  misc_feature: MA Experiment 20001558 PARAMETER Experiment Name: At_Drought_Soil_Dry_P Parameter: Organism Value: A. thaliana
  misc_feature: MA Experiment 20001558 PARAMETER Experiment Name: At_Drought_Soil_Dry_P Parameter: Plant Line Value: WS
  misc_feature: MA Experiment 20001558 PARAMETER Experiment Name: At_Drought_Soil_Dry_P Parameter: Post Timepoint (hr) Value: 6
  misc_feature: MA Experiment 20001558 PARAMETER Experiment Name: At_Drought_Soil_Dry_P Parameter: Post-Treatment Value: Re-Water vs. No Drought
  misc_feature: MA Experiment 20001558 PARAMETER Experiment Name: At_Drought_Soil_Dry_P Parameter: Timepoint (day) Value: 13
  misc_feature: MA Experiment 20001558 PARAMETER Experiment Name: At_Drought_Soil_Dry_P Parameter: Treatment Value: Drought vs. No Drought
  misc_feature: MA Experiment ID: 20001559 Result: Up-regulated in Transcription
  misc_feature: MA Experiment 20001559 PARAMETER Experiment Name: At_Drought_Soil_Dry_P Parameter: Age (day) Value: 28
  misc_feature: MA Experiment 20001559 PARAMETER Experiment Name: At_Drought_Soil_Dry_P Parameter: Organism Value: A. thaliana
  misc_feature: MA Experiment 20001559 PARAMETER Experiment Name: At_Drought_Soil_Dry_P Parameter: Plant Line Value: WS
  misc_feature: MA Experiment 20001559 PARAMETER Experiment Name: At_Drought_Soil_Dry_P Parameter: Post Timepoint (hr) Value: 29
  misc_feature: MA Experiment 20001559 PARAMETER Experiment Name: At_Drought_Soil_Dry_P Parameter: Post-Treatment Value: Re-Water vs. No Drought
  misc_feature: MA Experiment 20001559 PARAMETER Experiment Name: At_Drought_Soil_Dry_P Parameter: Timepoint (day) Value: 14
  misc_feature: MA Experiment 20001559 PARAMETER Experiment Name: At_Drought_Soil_Dry_P Parameter: Treatment Value: Drought vs. No Drought
ctcttttgtcgtctctccctgctttcgcacttcatagcctcaatctctcaacaagcagaagagattcgattctccattatcttccttctaaatgccttccctaatgttatctgataagaaagaggagaagaagatgaagaagaagatggctttggataccccagagcttgattctaagaaggggaagaaggagcagaagctgaaactatctgattcggatgaagaagagtcggagaagaagaagagtaagaagaaggataagaagcgtaaggcttccgaggaggaggatgaagtgaagagcgattcaagctcggagaagaagaagagcagcaagaaggttaagttgggcgttgaggatgttgaagttgataaccctaatgctgtttctaagtttcggatttctgcgccgttgagggagaagcttaaggcgaatggtattgaagctcttttcccgattcaggcttccacgtttgatatggttctcgatggtgctgatttagttggacgggctcgtactggtcagggtaaaacattggcttttgtgttgcctatattggaatctttggttaatggacctgccaaaagcaaaaggaagatgggatatggcaggtcaccaagtgttttggtccttttaccgaccagagaattggccaagcaggtggctgctgactttgatgcatatggaggatcacttgggttaagttcatgttgtctctatggaggtgatagctatccagttcaggagggtaaattaaagagaggtgttgacattgtagttggaacccctggtcgtattaaggatcatattgaaagacaaaaccttgatttcagctatctacaattccgtgttcttgatgaagctgatgaaatgttgaggatgggatttgttgaggatgttgaacttattttagggaaagtggaggattctactaaagtccagactcttctcttcagtgctactttgccatcatgggtgaaaaatatctctaacaggtttcttaaaagagaccagaagactattgatcttgttggtaatgataaaatgaaggccagtaatagtgttcgacacattgctattccttgtaataaggcagccatggctcggttgattcctgatattatcagttgctatagcagtggaggccaaactattattttcgctgagactaaagttcaagtttctgagctttctggtttgttggatggatcaagagccttgcatggtgaaatacctcaatcacaacgtgaggttactcttgctggatttaggaatggcaagtttgcaacattggtggctacaaatgttgctgctcgtggtctagatatcaatgatgtgcagttaattatccagtgtgagcctccacgtgaagttgaagcatatattcatcgttcaggccgaacaggaagagctggcaacacaggagttgcggttacactctacgattctagaaagtcgagtgtatccaggatcgaaaaagaagctggtatcaaatttgagcaccttgctgcacctcaacctgatgaaattgccagatctggtggtatggaagctgctgagaaagttaaacaagtgtgtgacagtgtggttcctgcattccttgaagctgccaaggaattattagaaacttctggtttatcagctgaagtactcctcgcaaaagctcttgcaaaaactgcgggcttcactgagataaagaaaaggtcacttcttacatcaatggagaactatgtgacactacatcttgaagcagggaaaccaatatactcgccatcatttgtttatggactgctaaggagagttttaccggatgacaaggtggaaatgattgaagggttatctctaacagcagataaaacaggagctgtgttcgatgttaagcaatcagatctagacttgttcattgcaggagcacaaaagagtgctggaagtatgagtttggaagtggttaaggtgatgcctaaactccaggagagagaaccattgccacaaaaaagattcggtggtggtggcagaggaaatcggtttggtggtggtggaggaaatcggtttggcggtggtggtggcagaggaagaggaggcagtggtggtagaggccagagatattgaaaactggaacccaacttctcctttctatataaaaagaaactaaactccgtcttataatttcattactatcttcttacgctgatgttttctacactataataggtggcttttctgtgttttcctttttctttccttgaacaaacttatggaggctctcttgtaccctcttatcaattttgtgtaatgttggatgataatgatgattaaattattacttcgtcactc

SEQ ID NO: 28185 - protein, 671 aa, Arabidopsis thaliana; identical to SEQ ID NO: 27774
  peptide (1)..(671): Ceres Seq. ID no. 12372010
  misc_feature (109)..(327): Pfam Name: DEAD/DEAH box helicase Pfam Description: DEAD/DEAH box helicase
  misc_feature (1)..(669): Homolog of NCBI NO: 16975508 NR Description: RNA helicase II/Gu [Xenopus laevis]
  misc_feature (23)..(669): Homolog of NCBI NO: 10764780 NR Description: RNA helicase II/Gu [Xenopus laevis]
  misc_feature (1)..(670): Homolog of NCBI NO: 31455230 NR Description: DDX21 protein [Homo sapiens]
  misc_feature (1)..(670): Homolog of NCBI NO: 2135315 NR Description: RNA helicase Gu - human (fragment)
  misc_feature (12)..(670): Homolog of NCBI NO: 26368308 NR Description: unnamed protein product [Mus musculus]
  misc_feature (12)..(670): Homolog of NCBI NO: 21410145 NR Description: Similar to DEAD/H (Asp-Glu-Ala-Asp/His) box
  misc_feature (12)..(670): Homolog of NCBI NO: 10092595 NR Description: DEAD/H (Asp-Glu-Ala-Asp/His) box polypeptide 21
  misc_feature (12)..(670): Homolog of NCBI NO: 13959325 NR Description: Nucleolar RNA helicase II (Nucleolar RNA helicase
  misc_feature (1)..(671): Homolog of NCBI NO: 7484683 NR Description: RNA helicase prh75 - spinach
  misc_feature (6)..(667): Homolog of NCBI NO: 7211427 NR Description: RNA helicase [Vigna radiata]

SEQ ID NO: 28186 - protein, 667 aa, Arabidopsis thaliana; identical to SEQ ID NO: 27775
  peptide (1)..(667): Ceres Seq. ID no. 12372011
  misc_feature (105)..(323): Pfam Name: DEAD/DEAH box helicase Pfam Description: DEAD/DEAH box helicase
  misc_feature (1)..(665): Homolog of NCBI NO: 16975508 NR Description: RNA helicase II/Gu [Xenopus laevis]
  misc_feature (19)..(665): Homolog of NCBI NO: 10764780 NR Description: RNA helicase II/Gu [Xenopus laevis]
  misc_feature (1)..(666): Homolog of NCBI NO: 31455230 NR Description: DDX21 protein [Homo sapiens]
  misc_feature (1)..(666): Homolog of NCBI NO: 2135315 NR Description: RNA helicase Gu - human (fragment)
  misc_feature (8)..(666): Homolog of NCBI NO: 21410145 NR Description: Similar to DEAD/H (Asp-Glu-Ala-Asp/His) box
  misc_feature (8)..(666): Homolog of NCBI NO: 26368308 NR Description: unnamed protein product [Mus musculus]
  misc_feature (8)..(666): Homolog of NCBI NO: 10092595 NR Description: DEAD/H (Asp-Glu-Ala-Asp/His) box polypeptide 21
  misc_feature (8)..(666): Homolog of NCBI NO: 13959325 NR Description: Nucleolar RNA helicase II (Nucleolar RNA helicase
  misc_feature (1)..(667): Homolog of NCBI NO: 7484683 NR Description: RNA helicase prh75 - spinach
  misc_feature (2)..(663): Homolog of NCBI NO: 7211427 NR Description: RNA helicase [Vigna radiata]

SEQ ID NO: 28187 - protein, 657 aa, Arabidopsis thaliana; identical to SEQ ID NO: 27776
  peptide (1)..(657): Ceres Seq. ID no. 12372012
  misc_feature (95)..(313): Pfam Name: DEAD/DEAH box helicase Pfam Description: DEAD/DEAH box helicase
  misc_feature (1)..(655): Homolog of NCBI NO: 16975508 NR Description: RNA helicase II/Gu [Xenopus laevis]
  misc_feature (9)..(655): Homolog of NCBI NO: 10764780 NR Description: RNA helicase II/Gu [Xenopus laevis]
  misc_feature (1)..(656): Homolog of NCBI NO: 31455230 NR Description: DDX21 protein [Homo sapiens]
  misc_feature (1)..(656): Homolog of NCBI NO: 2135315 NR Description: RNA helicase Gu - human (fragment)
  misc_feature (1)..(656): Homolog of NCBI NO: 26368308 NR Description: unnamed protein product [Mus musculus]
  misc_feature (1)..(656): Homolog of NCBI NO: 21410145 NR Description: Similar to DEAD/H (Asp-Glu-Ala-Asp/His) box
  misc_feature (1)..(656): Homolog of NCBI NO: 10092595 NR Description: DEAD/H (Asp-Glu-Ala-Asp/His) box polypeptide 21
  misc_feature (1)..(656): Homolog of NCBI NO: 13959325 NR Description: Nucleolar RNA helicase II (Nucleolar RNA helicase
  misc_feature (1)..(657): Homolog of NCBI NO: 7484683 NR Description: RNA helicase prh75 - spinach
  misc_feature (1)..(653): Homolog of NCBI NO: 7211427 NR Description: RNA helicase [Vigna radiata]

SEQ ID NO: 28188 - DNA, 1591 bp, Arabidopsis thaliana
  misc_feature (1)..(1591): Ceres Seq. ID no. 12324793
  misc_feature: MA Experiment ID: 108464 Result: Up-regulated in Transcription
  misc_feature: MA Experiment 108464 PARAMETER Experiment Name: At_Germinating_Seeds_cDNA_P Parameter: Age (day) Value: 4 vs. 0
  misc_feature: MA Experiment 108464 PARAMETER Experiment Name: At_Germinating_Seeds_cDNA_P Parameter: Tissue Value: Germinating Seeds
  misc_feature: MA Experiment ID: 108573 Result: Up-regulated in Transcription
  misc_feature: MA Experiment 108573 PARAMETER Experiment Name: At_Drought_cDNA_P Parameter: Timepoint (hr) Value: 6
  misc_feature: MA Experiment 108573 PARAMETER Experiment Name: At_Drought_cDNA_P Parameter: Tissue Value: Aerial
  misc_feature: MA Experiment 108573 PARAMETER Experiment Name: At_Drought_cDNA_P Parameter: Treatment Value: Drought vs. No Drought
  misc_feature: MA Experiment ID: 108585 Result: Up-regulated in Transcription
  misc_feature: MA Experiment 108585 PARAMETER Experiment Name: At_5mM_NaNP_cDNA_P Parameter: Timepoint (hr) Value: 6
  misc_feature: MA Experiment 108585 PARAMETER Experiment Name: At_5mM_NaNP_cDNA_P Parameter: Tissue Value: Aerial
  misc_feature: MA Experiment 108585 PARAMETER Experiment Name: At_5mM_NaNP_cDNA_P Parameter: Treatment Value: null
  misc_feature: MA Experiment ID: 20000087 Result: Down-regulated in Transcription
  misc_feature: MA Experiment 20000087 PARAMETER Experiment Name: At_100uM_ABA_Mutants_cDNA_P Parameter: Plant Line Value: WS
  misc_feature: MA Experiment 20000087 PARAMETER Experiment Name: At_100uM_ABA_Mutants_cDNA_P Parameter: Timepoint (hr) Value: 6
  misc_feature: MA Experiment 20000087 PARAMETER Experiment Name: At_100uM_ABA_Mutants_cDNA_P Parameter: Tissue Value: Aerial
  misc_feature: MA Experiment 20000087 PARAMETER Experiment Name: At_100uM_ABA_Mutants_cDNA_P Parameter: Treatment Value: 100uM ABA vs. No Treatment
  misc_feature: MA Experiment ID: 20000089 Result: Down-regulated in Transcription
  misc_feature: MA Experiment ID: 20000111 Result: Down-regulated in Transcription
  misc_feature: MA Experiment 20000111 PARAMETER Experiment Name: At_42deg_Heat_cDNA_P Parameter: Temperature (deg C) Value: 42 vs. 22
  misc_feature: MA Experiment 20000111 PARAMETER Experiment Name: At_42deg_Heat_cDNA_P Parameter: Timepoint (hr) Value: 6
  misc_feature: MA Experiment 20000111 PARAMETER Experiment Name: At_42deg_Heat_cDNA_P Parameter: Tissue Value: Aerial
  misc_feature: MA Experiment ID: 20000113 Result: Down-regulated in Transcription
  misc_feature: MA Experiment 20000113 PARAMETER Experiment Name: At_42deg_Heat_cDNA_P Parameter: Temperature (deg C) Value: 42 vs. 22
  misc_feature: MA Experiment 20000113 PARAMETER Experiment Name: At_42deg_Heat_cDNA_P Parameter: Timepoint (hr) Value: 8
  misc_feature: MA Experiment 20000113 PARAMETER Experiment Name: At_42deg_Heat_cDNA_P Parameter: Tissue Value: Aerial
  misc_feature: MA Experiment ID: 20000173 Result: Down-regulated in Transcription
  misc_feature: MA Experiment 20000173 PARAMETER Experiment Name: At_42deg_Heat_P Parameter: Age (day) Value: 14
  misc_feature: MA Experiment 20000173 PARAMETER Experiment Name: At_42deg_Heat_P Parameter: Organism Value: A. thaliana
  misc_feature: MA Experiment 20000173 PARAMETER Experiment Name: At_42deg_Heat_P Parameter: Plant Line Value: WS
  misc_feature: MA Experiment 20000173 PARAMETER Experiment Name: At_42deg_Heat_P Parameter: Temperature (deg C) Value: 42 vs. 22
  misc_feature: MA Experiment 20000173 PARAMETER Experiment Name: At_42deg_Heat_P Parameter: Timepoint (hr) Value: 6
  misc_feature: MA Experiment 20000173 PARAMETER Experiment Name: At_42deg_Heat_P Parameter: Tissue Value: Aerial
  misc_feature: MA Experiment ID: 20000184 Result: Up-regulated in Transcription
  misc_feature: MA Experiment 20000184 PARAMETER Experiment Name: At_Shoots__P Parameter: Age (day) Value: 7
  misc_feature: MA Experiment 20000184 PARAMETER Experiment Name: At_Shoots__P Parameter: Tissue Value: Shoots vs. Whole Plant
  misc_feature: MA Experiment ID: 20000437 Result: Down-regulated in Transcription
  misc_feature: MA Experiment 20000437 PARAMETER Experiment Name: At_Drought_P Parameter: Age (day) Value: 8
  misc_feature: MA Experiment 20000437 PARAMETER Experiment Name: At_Drought_P Parameter: Organism Value: A. thaliana
  misc_feature: MA Experiment 20000437 PARAMETER Experiment Name: At_Drought_P Parameter: Plant Line Value: WS
  misc_feature: MA Experiment 20000437 PARAMETER Experiment Name: At_Drought_P Parameter: Timepoint (hr) Value: 24
  misc_feature: MA Experiment 20000437 PARAMETER Experiment Name: At_Drought_P Parameter: Tissue Value: Whole Plant
  misc_feature: MA Experiment 20000437 PARAMETER Experiment Name: At_Drought_P Parameter: Treatment Value: Drought vs. No Drought
  misc_feature: MA Experiment ID: 20000439 Result: Up-regulated in Transcription
  misc_feature: MA Experiment 20000439 PARAMETER Experiment Name: At_Roots__P Parameter: Age (day) Value: 14 vs. 21
  misc_feature: MA Experiment 20000439 PARAMETER Experiment Name: At_Roots__P Parameter: Organism Value: A. thaliana
  misc_feature: MA Experiment 20000439 PARAMETER Experiment Name: At_Roots__P Parameter: Tissue Value: Roots vs. Whole Plant
  misc_feature: MA Experiment ID: 20001558 Result: Down-regulated in Transcription
  misc_feature: MA Experiment 20001558 PARAMETER Experiment Name: At_Drought_Soil_Dry_P Parameter: Age (day) Value: 27
  misc_feature: MA Experiment 20001558 PARAMETER Experiment Name: At_Drought_Soil_Dry_P Parameter: Organism Value: A. thaliana
  misc_feature: MA Experiment 20001558 PARAMETER Experiment Name: At_Drought_Soil_Dry_P Parameter: Plant Line Value: WS
  misc_feature: MA Experiment 20001558 PARAMETER Experiment Name: At_Drought_Soil_Dry_P Parameter: Post Timepoint (hr) Value: 6
  misc_feature: MA Experiment 20001558 PARAMETER Experiment Name: At_Drought_Soil_Dry_P Parameter: Post-Treatment Value: Re-Water vs. No Drought
  misc_feature: MA Experiment 20001558 PARAMETER Experiment Name: At_Drought_Soil_Dry_P Parameter: Timepoint (day) Value: 13
  misc_feature: MA Experiment 20001558 PARAMETER Experiment Name: At_Drought_Soil_Dry_P Parameter: Treatment Value: Drought vs. No Drought
ctttttttgaaattaccaaatctctctccgtttcagcgaatctcttcttcagattttcctcttccactaatcttttgcctgtttaatcggagcttagatatcatcagaaggtttttgttctatcaattctccttcattcgatccatttttacccctttctttggaatctccgattcgaccaagcttcttcgccgtctcatcggagacaaacacatattcacgctaaatcaactaaattaagcttagatagatatatagatatataggtaaaaactcaactacgactactcggagatgttgggtgctggatttcagttgacgagaggcagacacggcgacgatcctttctacacttccgcaaaaactcgcagggccaatcagcgcatcgatcagctccgtagagctcagagcgacgtctctaacgttccatcatcagctccttctccgcataaacaacaactcgagccgtccgatttatcttccagtaatcagatcggtttttagagtcggtcacaccatccgtaccggctcagtttttatccaagacatcgctacgagaaagaagagcagatgatgattataataaacttgtgccttattttgtgcttggtgatatatgggactcatttgcagagtggagtgcttacggcaccggtgtgcctcttgttttgaataacaacaaggatcgtgttatccaatactatgtcccttctttgtcagccattcaaatctatgctcattctcatgccttggattcatctcttaaatctaggcgtcctggtgatagtagcgacagtgatttccgggattcaagtagcgatgttagcagcgatagtgattccgagcgggtttctgctagagtagactgtatctcattgagggatcaacatcaggaagactcttccagtgatgatggcgaacctttaggctctcaaggtcgtttgatgtttgagtatcttgaaagagaccttccatacatccgtgaaccttttgctgataaggtcttggacctcgcagctcagtttcccgagctaatgacgctgagaagctgtgacttacttcggtcaagctggttttctgttgcatggtacccaatttacagaatacccacaggaccgacactgaaggacctggatgcttgtttcttgacgtatcattccctacacacatcttttggaggtgaaggcagtgaacaatcaatgagccttacgcaaccaagggagagcgagaagatgtcattgcctgtgtttgggcttgcttcatacaagttcagaggttcattatggacacccattgggggttcggagcaccagctcgtgaaatctctgttccaagccgctgacaaatggctgcattcttgtcatgtcagccaccctgatttcctcttcttctgccgtcgttgagtagggtatgaagttgtgacgcactttgagagagtttcaaaaagaaactcaaaactgttgatatggagggttgttgtcagattcaggtttaaaaacgagttgatttttatgtttgtaagttatagataaaacgaattttgtttggtcagataatgtatgtgaaccgtgggcttacctcgtgttgttgt

SEQ ID NO: 28189 - protein, 152 aa, Arabidopsis thaliana
  peptide (1)..(152): Ceres Seq. ID no. 12324794
  misc_feature (1)..(149): Pfam Name: Protein of unknown function (DUF789) Pfam Description: Protein of unknown function (DUF789)
  misc_feature (1)..(152): Homolog of NCBI NO: 34914654 NR Description: P0504D03.18 [Oryza sativa (japonica
  misc_feature (1)..(149): Homolog of NCBI NO: 15450996 NR Description: Unknown protein [Arabidopsis thaliana]
  misc_feature (1)..(149): Homolog of NCBI NO: 22327664 NR Description: putative protein
  misc_feature (1)..(149): Homolog of NCBI NO: 10177151 NR Description: gb|AAF31026.1~gene_id:K21P3.10~similar to unknown
  misc_feature (50)..(152): Homolog of NCBI NO: 25373432 NR Description: hypothetical protein At2g01260 [imported] -
  misc_feature (1)..(152): Homolog of NCBI NO: 34897254 NR Description: hypothetical protein [Oryza sativa (japonica
  misc_feature (1)..(152): Homolog of NCBI NO: 31249743 NR Description: hypothetical protein [Oryza sativa (japonica
  misc_feature (1)..(152): Homolog of NCBI NO: 22329567 NR Description: hypothetical protein
  misc_feature (1)..(47): Homolog of NCBI NO: 25373432 NR Description: hypothetical protein At2g01260 [imported] -
  misc_feature (1)..(152): Homolog of NCBI NO: 18379188 NR Description: predicted by genscan and genefinder
MFEYLERDLPYIREPFADKVLDLAAQFPELMTLRSCDLLRSSWFSVAWYPIYRIPTGPTLKDLDACFLTYHSLHTSFGGEGSEQSMSLTQPRESEKMSLPVFGLASYKFRGSLWTPIGGSEHQLVKSLFQAADKWLHSCHVSHPDFLFFCRR

SEQ ID NO: 28190 - protein, 122 aa, Arabidopsis thaliana
  peptide (1)..(122): Ceres Seq. ID no. 12324795
  misc_feature (1)..(119): Pfam Name: Protein of unknown function (DUF789) Pfam Description: Protein of unknown function (DUF789)
  misc_feature (1)..(122): Homolog of NCBI NO: 34914654 NR Description: P0504D03.18 [Oryza sativa (japonica
  misc_feature (1)..(119): Homolog of NCBI NO: 15450996 NR Description: Unknown protein [Arabidopsis thaliana]
  misc_feature (1)..(119): Homolog of NCBI NO: 22327664 NR Description: putative protein
  misc_feature (1)..(119): Homolog of NCBI NO: 10177151 NR Description: gb|AAF31026.1~gene_id:K21P3.10~similar to unknown
  misc_feature (20)..(122): Homolog of NCBI NO: 25373432 NR Description: hypothetical protein At2g01260 [imported] -
  misc_feature (1)..(122): Homolog of NCBI NO: 34897254 NR Description: hypothetical protein [Oryza sativa (japonica
  misc_feature (1)..(122): Homolog of NCBI NO: 31249743 NR Description: hypothetical protein [Oryza sativa (japonica
  misc_feature (1)..(122): Homolog of NCBI NO: 22329567 NR Description: hypothetical protein
  misc_feature (1)..(17): Homolog of NCBI NO: 25373432 NR Description: hypothetical protein At2g01260 [imported] -
  misc_feature (1)..(122): Homolog of NCBI NO: 18379188 NR Description: predicted by genscan and genefinder
MTLRSCDLLRSSWFSVAWYPIYRIPTGPTLKDLDACFLTYHSLHTSFGGEGSEQSMSLTQPRESEKMSLPVFGLASYKFRGSLWTPIGGSEHQLVKSLFQAADKWLHSCHVSHPDFLFFCRR

SEQ ID NO: 28191 - protein, 79 aa, Arabidopsis thaliana
  peptide (1)..(79): Ceres Seq. ID no. 12324796
LFLKLPNLSPFQRISSSDFPLPLIFCLFNRSLDIIRRFLFYQFSFIRSIFTPFFGISDSTKLLRRLIGDKHIFTLNQLN

SEQ ID NO: 28192 - DNA, 1108 bp, Arabidopsis thaliana
  misc_feature (1)..(1108): Ceres Seq. ID no. 13486907
  misc_feature: MA Experiment ID: 108434 Result: Up-regulated in Transcription
  misc_feature: MA Experiment 108434 PARAMETER Experiment Name: At_Root_Tips_cDNA_P Parameter: Tissue Value: Root Tips
  misc_feature: MA Experiment ID: 108461 Result: Up-regulated in Transcription
  misc_feature: MA Experiment 108461 PARAMETER Experiment Name: At_Germinating_Seeds_cDNA_P Parameter: Age (day) Value: 1 vs. 0
  misc_feature: MA Experiment 108461 PARAMETER Experiment Name: At_Germinating_Seeds_cDNA_P Parameter: Tissue Value: Germinating Seeds
  misc_feature: MA Experiment ID: 108462 Result: Up-regulated in Transcription
  misc_feature: MA Experiment 108462 PARAMETER Experiment Name: At_Germinating_Seeds_cDNA_P Parameter: Age (day) Value: 2 vs. 0
  misc_feature: MA Experiment 108462 PARAMETER Experiment Name: At_Germinating_Seeds_cDNA_P Parameter: Tissue Value: Germinating Seeds
  misc_feature: MA Experiment ID: 108463 Result: Up-regulated in Transcription
  misc_feature: MA Experiment 108463 PARAMETER Experiment Name: At_Germinating_Seeds_cDNA_P Parameter: Age (day) Value: 3 vs. 0
  misc_feature: MA Experiment 108463 PARAMETER Experiment Name: At_Germinating_Seeds_cDNA_P Parameter: Tissue Value: Germinating Seeds
  misc_feature: MA Experiment ID: 108464 Result: Up-regulated in Transcription
  misc_feature: MA Experiment 108464 PARAMETER Experiment Name: At_Germinating_Seeds_cDNA_P Parameter: Age (day) Value: 4 vs. 0
  misc_feature: MA Experiment 108464 PARAMETER Experiment Name: At_Germinating_Seeds_cDNA_P Parameter: Tissue Value: Germinating Seeds
  misc_feature: MA Experiment ID: 108595 Result: Down-regulated in Transcription
  misc_feature: MA Experiment 108595 PARAMETER Experiment Name: At_Ler-pi_Ovule_cDNA_P Parameter: Plant Line Value: null
  misc_feature: MA Experiment ID: 20000069 Result: Down-regulated in Transcription
  misc_feature: MA Experiment 20000069 PARAMETER Experiment Name: At_100uM_ABA_Mutants_cDNA_P Parameter: Plant Line Value: CS23
  misc_feature: MA Experiment 20000069 PARAMETER Experiment Name: At_100uM_ABA_Mutants_cDNA_P Parameter: Timepoint (hr) Value: 6
  misc_feature: MA Experiment 20000069 PARAMETER Experiment Name: At_100uM_ABA_Mutants_cDNA_P Parameter: Tissue Value: Aerial
  misc_feature: MA Experiment 20000069 PARAMETER Experiment Name: At_100uM_ABA_Mutants_cDNA_P Parameter: Treatment Value: 100uM ABA vs. No Treatment
  misc_feature: MA Experiment ID: 20000070 Result: Down-regulated in Transcription
  misc_feature: MA Experiment 20000070 PARAMETER Experiment Name: At_100uM_ABA_Mutants_cDNA_P Parameter: Plant Line Value: CS24
  misc_feature: MA Experiment 20000070 PARAMETER Experiment Name: At_100uM_ABA_Mutants_cDNA_P Parameter: Timepoint (hr) Value: 6
  misc_feature: MA Experiment 20000070 PARAMETER Experiment Name: At_100uM_ABA_Mutants_cDNA_P Parameter: Tissue Value: Aerial
  misc_feature: MA Experiment 20000070 PARAMETER Experiment Name: At_100uM_ABA_Mutants_cDNA_P Parameter: Treatment Value: 100uM ABA vs. No Treatment
  misc_feature: MA Experiment ID: 20000071 Result: Down-regulated in Transcription
  misc_feature: MA Experiment 20000071 PARAMETER Experiment Name: At_100uM_ABA_Mutants_cDNA_P Parameter: Plant Line Value: CS8104
  misc_feature: MA Experiment 20000071 PARAMETER Experiment Name: At_100uM_ABA_Mutants_cDNA_P Parameter: Timepoint (hr) Value: 6
  misc_feature: MA Experiment 20000071 PARAMETER Experiment Name: At_100uM_ABA_Mutants_cDNA_P Parameter: Tissue Value: Aerial
  misc_feature: MA Experiment 20000071 PARAMETER Experiment Name: At_100uM_ABA_Mutants_cDNA_P Parameter: Treatment Value: 100uM ABA vs. No Treatment
  misc_feature: MA Experiment ID: 20000072 Result: Down-regulated in Transcription
  misc_feature: MA Experiment 20000072 PARAMETER Experiment Name: At_100uM_ABA_Mutants_cDNA_P Parameter: Plant Line Value: CS8105
  misc_feature: MA Experiment 20000072 PARAMETER Experiment Name: At_100uM_ABA_Mutants_cDNA_P Parameter: Timepoint (hr) Value: 6
  misc_feature: MA Experiment 20000072 PARAMETER Experiment Name: At_100uM_ABA_Mutants_cDNA_P Parameter: Tissue Value: Aerial
  misc_feature: MA Experiment 20000072 PARAMETER Experiment Name: At_100uM_ABA_Mutants_cDNA_P Parameter: Treatment Value: 100uM ABA vs. No Treatment
  misc_feature: MA Experiment ID: 20000086 Result: Down-regulated in Transcription
  misc_feature: MA Experiment 20000086 PARAMETER Experiment Name: At_100uM_ABA_Mutants_cDNA_P Parameter: Plant Line Value: CS22
  misc_feature: MA Experiment 20000086 PARAMETER Experiment Name: At_100uM_ABA_Mutants_cDNA_P Parameter: Timepoint (hr) Value: 6
  misc_feature: MA Experiment 20000086 PARAMETER Experiment Name: At_100uM_ABA_Mutants_cDNA_P Parameter: Tissue Value: Aerial
  misc_feature: MA Experiment 20000086 PARAMETER Experiment Name: At_100uM_ABA_Mutants_cDNA_P Parameter: Treatment Value: 100uM ABA vs. No Treatment
  misc_feature: MA Experiment ID: 20000087 Result: Down-regulated in Transcription
  misc_feature: MA Experiment 20000087 PARAMETER Experiment Name: At_100uM_ABA_Mutants_cDNA_P Parameter: Plant Line Value: WS
  misc_feature: MA Experiment 20000087 PARAMETER Experiment Name: At_100uM_ABA_Mutants_cDNA_P Parameter: Timepoint (hr) Value: 6
  misc_feature: MA Experiment 20000087 PARAMETER Experiment Name: At_100uM_ABA_Mutants_cDNA_P Parameter: Tissue Value: Aerial
  misc_feature: MA Experiment 20000087 PARAMETER Experiment Name: At_100uM_ABA_Mutants_cDNA_P Parameter: Treatment Value: 100uM ABA vs. No Treatment
  misc_feature: MA Experiment ID: 20000088 Result: Down-regulated in Transcription
  misc_feature: MA Experiment 20000088 PARAMETER Experiment Name: At_100uM_ABA_Mutants_cDNA_P Parameter: Plant Line Value: Landsberg
  misc_feature: MA Experiment 20000088 PARAMETER Experiment Name: At_100uM_ABA_Mutants_cDNA_P Parameter: Timepoint (hr) Value: 6
  misc_feature: MA Experiment 20000088 PARAMETER Experiment Name: At_100uM_ABA_Mutants_cDNA_P Parameter: Tissue Value: Aerial
  misc_feature: MA Experiment 20000088 PARAMETER Experiment Name: At_100uM_ABA_Mutants_cDNA_P Parameter: Treatment Value: 100uM ABA vs. No Treatment
  misc_feature: MA Experiment ID: 20000089 Result: Down-regulated in Transcription
  misc_feature: MA Experiment ID: 20000090 Result: Down-regulated in Transcription
  misc_feature: MA Experiment ID: 20000117 Result: Down-regulated in Transcription
  misc_feature: MA Experiment 20000117 PARAMETER Experiment Name: At_100uM_ABA_Mutants_cDNA_P Parameter: Plant Line Value: Columbia
  misc_feature: MA Experiment 20000117 PARAMETER Experiment Name: At_100uM_ABA_Mutants_cDNA_P Parameter: Timepoint (hr) Value: 6
  misc_feature: MA Experiment 20000117 PARAMETER Experiment Name: At_100uM_ABA_Mutants_cDNA_P Parameter: Tissue Value: Aerial
  misc_feature: MA Experiment 20000117 PARAMETER Experiment Name: At_100uM_ABA_Mutants_cDNA_P Parameter: Treatment Value: 100uM ABA vs. No Treatment
  misc_feature: MA Experiment ID: 20000180 Result: Up-regulated in Transcription
  misc_feature: MA Experiment 20000180 PARAMETER Experiment Name: At_Germinating_Seeds_P Parameter: Age (hr) Value: 24 vs. 0
  misc_feature: MA Experiment 20000180 PARAMETER Experiment Name: At_Germinating_Seeds_P Parameter: Tissue Value: Germinating Seeds
  misc_feature: MA Experiment ID: 20000184 Result: Up-regulated in Transcription
  misc_feature: MA Experiment 20000184 PARAMETER Experiment Name: At_Shoots__P Parameter: Age (day) Value: 7
  misc_feature: MA Experiment 20000184 PARAMETER Experiment Name: At_Shoots__P Parameter: Tissue Value: Shoots vs. Whole Plant
  misc_feature: MA Experiment ID: 20000185 Result: Down-regulated in Transcription
  misc_feature: MA Experiment 20000185 PARAMETER Experiment Name: At_Roots__P Parameter: Age (day) Value: 7 vs. 21
  misc_feature: MA Experiment 20000185 PARAMETER Experiment Name: At_Roots__P Parameter: Organism Value: A. thaliana
  misc_feature: MA Experiment 20000185 PARAMETER Experiment Name: At_Roots__P Parameter: Tissue Value: Roots vs. Whole Plant
  misc_feature: MA Experiment ID: 20000436 Result: Down-regulated in Transcription
  misc_feature: MA Experiment 20000436 PARAMETER Experiment Name: At_Drought_P Parameter: Age (day) Value: 7
  misc_feature: MA Experiment 20000436 PARAMETER Experiment Name: At_Drought_P Parameter: Organism Value: A. thaliana
  misc_feature: MA Experiment 20000436 PARAMETER Experiment Name: At_Drought_P Parameter: Plant Line Value: WS
  misc_feature: MA Experiment 20000436 PARAMETER Experiment Name: At_Drought_P Parameter: Timepoint (hr) Value: 12
  misc_feature: MA Experiment 20000436 PARAMETER Experiment Name: At_Drought_P Parameter: Tissue Value: Whole Plant
  misc_feature: MA Experiment 20000436 PARAMETER Experiment Name: At_Drought_P Parameter: Treatment Value: Drought vs. No Drought
  misc_feature: MA Experiment ID: 20000437 Result: Down-regulated in Transcription
  misc_feature: MA Experiment 20000437 PARAMETER Experiment Name: At_Drought_P Parameter: Age (day) Value: 8
  misc_feature: MA Experiment 20000437 PARAMETER Experiment Name: At_Drought_P Parameter: Organism Value: A. thaliana
  misc_feature: MA Experiment 20000437 PARAMETER Experiment Name: At_Drought_P Parameter: Plant Line Value: WS
  misc_feature: MA Experiment 20000437 PARAMETER Experiment Name: At_Drought_P Parameter: Timepoint (hr) Value: 24
  misc_feature: MA Experiment 20000437 PARAMETER Experiment Name: At_Drought_P Parameter: Tissue Value: Whole Plant
  misc_feature: MA Experiment 20000437 PARAMETER Experiment Name: At_Drought_P Parameter: Treatment Value: Drought vs. No Drought
  misc_feature: MA Experiment ID: 20000438 Result: Up-regulated in Transcription
  misc_feature: MA Experiment 20000438 PARAMETER Experiment Name: At_Shoots__P Parameter: Age (day) Value: 14
  misc_feature: MA Experiment 20000438 PARAMETER Experiment Name: At_Shoots__P Parameter: Tissue Value: Shoots vs. Whole Plant
  misc_feature: MA Experiment ID: 20000439 Result: Down-regulated in Transcription
  misc_feature: MA Experiment 20000439 PARAMETER Experiment Name: At_Roots__P Parameter: Age (day) Value: 14 vs. 21
  misc_feature: MA Experiment 20000439 PARAMETER Experiment Name: At_Roots__P Parameter: Organism Value: A. thaliana
  misc_feature: MA Experiment 20000439 PARAMETER Experiment Name: At_Roots__P Parameter: Tissue Value: Roots vs. Whole Plant
  misc_feature: MA Experiment ID: 20000573 Result: Down-regulated in Transcription
  misc_feature: MA Experiment 20000573 PARAMETER Experiment Name: At_100uM_ABA_Mutants__P Parameter: Organism Value: A. thaliana
  misc_feature: MA Experiment 20000573 PARAMETER Experiment Name: At_100uM_ABA_Mutants__P Parameter: Plant Line Value: CS22 vs. Ler wt
  misc_feature: MA Experiment 20000573 PARAMETER Experiment Name: At_100uM_ABA_Mutants__P Parameter: Timepoint (hr) Value: N/A
  misc_feature: MA Experiment 20000573 PARAMETER Experiment Name: At_100uM_ABA_Mutants__P Parameter: Tissue Value: Whole Plant
  misc_feature: MA Experiment 20000573 PARAMETER Experiment Name: At_100uM_ABA_Mutants__P Parameter: Treatment Value: None
  misc_feature: MA Experiment ID: 20000574 Result: Down-regulated in Transcription
  misc_feature: MA Experiment 20000574 PARAMETER Experiment Name: At_100uM_ABA_Mutants__P Parameter: Organism Value: A. thaliana
  misc_feature: MA Experiment 20000574 PARAMETER Experiment Name: At_100uM_ABA_Mutants__P Parameter: Plant Line Value: CS23 vs. Ler wt
  misc_feature: MA Experiment 20000574 PARAMETER Experiment Name: At_100uM_ABA_Mutants__P Parameter: Timepoint (hr) Value: N/A
  misc_feature: MA Experiment 20000574 PARAMETER Experiment Name: At_100uM_ABA_Mutants__P Parameter: Tissue Value: Whole Plant
  misc_feature: MA Experiment 20000574 PARAMETER Experiment Name: At_100uM_ABA_Mutants__P Parameter: Treatment Value: None
  misc_feature: MA Experiment ID: 20001248 Result: Down-regulated in Transcription
  misc_feature: MA Experiment 20001248 PARAMETER Experiment Name: At_Far-red-induction_P Parameter: Age (day) Value: 7
  misc_feature: MA Experiment 20001248 PARAMETER Experiment Name: At_Far-red-induction_P Parameter: Light Value: Far-red vs. White
  misc_feature: MA Experiment 20001248 PARAMETER Experiment Name: At_Far-red-induction_P Parameter: Organism Value: A. thaliana
  misc_feature: MA Experiment 20001248 PARAMETER Experiment Name: At_Far-red-induction_P Parameter: Plant Line Value: Columbia
  misc_feature: MA Experiment 20001248 PARAMETER Experiment Name: At_Far-red-induction_P Parameter: Timepoint (hr) Value: 4
  misc_feature: MA Experiment 20001248 PARAMETER Experiment Name: At_Far-red-induction_P Parameter: Tissue Value: Whole Plant
  misc_feature: MA Experiment ID: 20001450 Result: Down-regulated in Transcription
  misc_feature: MA Experiment 20001450 PARAMETER Experiment Name: At_Far-red-induction_P Parameter: Age (day) Value: 7
  misc_feature: MA Experiment 20001450 PARAMETER Experiment Name: At_Far-red-induction_P Parameter: Light Value: Far-red vs. White
  misc_feature: MA Experiment 20001450 PARAMETER Experiment Name: At_Far-red-induction_P Parameter: Organism Value: A. thaliana
  misc_feature: MA Experiment 20001450 PARAMETER Experiment Name: At_Far-red-induction_P Parameter: Plant Line Value: Columbia
  misc_feature: MA Experiment 20001450 PARAMETER Experiment Name: At_Far-red-induction_P Parameter: Timepoint (hr) Value: 8
  misc_feature: MA Experiment 20001450 PARAMETER Experiment Name: At_Far-red-induction_P Parameter: Tissue Value: Whole Plant
  misc_feature: MA Experiment ID: 20001559 Result: Down-regulated in Transcription
  misc_feature: MA Experiment 20001559 PARAMETER Experiment Name: At_Drought_Soil_Dry_P Parameter: Age (day) Value: 28
  misc_feature: MA Experiment 20001559 PARAMETER Experiment Name: At_Drought_Soil_Dry_P Parameter: Organism Value: A. thaliana
  misc_feature: MA Experiment 20001559 PARAMETER Experiment Name: At_Drought_Soil_Dry_P Parameter: Plant Line Value: WS
  misc_feature: MA Experiment 20001559 PARAMETER Experiment Name: At_Drought_Soil_Dry_P Parameter: Post Timepoint (hr) Value: 29
  misc_feature: MA Experiment 20001559 PARAMETER Experiment Name: At_Drought_Soil_Dry_P Parameter: Post-Treatment Value: Re-Water vs. No Drought
  misc_feature: MA Experiment 20001559 PARAMETER Experiment Name: At_Drought_Soil_Dry_P Parameter: Timepoint (day) Value: 14
  misc_feature: MA Experiment 20001559 PARAMETER Experiment Name: At_Drought_Soil_Dry_P Parameter: Treatment Value: Drought vs. No Drought
  misc_feature: MA Experiment ID: 20001905 Result: Down-regulated in Transcription
  misc_feature: MA Experiment 20001905 PARAMETER Experiment Name: At_Drought_Reproduction_P Parameter: Age (day) Value: 40
  misc_feature: MA Experiment 20001905 PARAMETER Experiment Name: At_Drought_Reproduction_P Parameter: Organism Value: A. thaliana
  misc_feature: MA Experiment 20001905 PARAMETER Experiment Name: At_Drought_Reproduction_P Parameter: Plant Line Value: WS
  misc_feature: MA Experiment 20001905 PARAMETER Experiment Name: At_Drought_Reproduction_P Parameter: Timepoint (day) Value: 10
  misc_feature: MA Experiment 20001905 PARAMETER Experiment Name: At_Drought_Reproduction_P Parameter: Tissue Value: Rosettes
  misc_feature: MA Experiment 20001905 PARAMETER Experiment Name: At_Drought_Reproduction_P Parameter: Treatment Value: Drought vs. No Drought
agaatttgcaaaatcgaatttgtgtggagaaagaagctcgtcaccaagactgaatttgtggctacgtctaaaacacattcttccacatctcttctctgtttctcaagacaaaaaaagaaaaaatggtggaagatgaacaatgacgaagaatcattgttattgttcatgcattaaccttgttgttatgttcctccatggcctgttacatcgttccttattaccaccatcctgttttgtctcatcccaatagagaaatcttcagtcaccgtcaccaccaccaccaccgtttctgcaacaatctcttgaatagaagaattagtgttcctcgaagctccgctattagtgacggtggtgtctcctacaatactctagtctccgaggcggtgaggcttttggttccacaagcaaactttgattcttcaaagcttaaagttgagttcttaggagagttattggagaacaagagtaacggaggaattattacgccgcggacttatattctttcgcattgtgacttcactgctaacttaacgttaacaatctcaaacgttatcaatctggatcaactagaaggctggtacaagaaagatgatgtggttgctgagtggaagaaggtgaatgatgagctgcgtttacatattcattgttgtgtgagtggtatgagtttattgcaggatgttgctgctgagcttaggtatcatattttctccaaggaattgcctttggtacttaaagctgtggtgcatggagattcagttatgtttagagagaatcctgagctaatggatgcttatgtatgggtttatttccattcaagcacacctaagtacaatcggatcgagtgttggggacctcttaaggatgctgcgaagggaaagcagcagggcaatcatcaaggcttcttgagttcgacgacttcgaggaaattgattcgacataagtctatcttccataccttatttacgtttcttctgtgagacaaagttgtacattctcctgtgtttttttttgcaaatgatgtagatttcttaatgagcatctgacacaagtgcaatttgccaacattcaaatgttcatacttgggaaatttatgagagcctagttttct

SEQ ID NO: 28193 - protein, 260 aa, Arabidopsis thaliana
  peptide (1)..(260): Ceres Seq. ID no. 13486908
  misc_feature (96)..(223): Homolog of NCBI NO: 15896657 NR Description: Uncharacterized protein, homolog of YYBI fused to uncharacterized domain similar to A.thaliana (gi:3292817
  misc_feature (73)..(230): Homolog of NCBI NO: 18311568 NR Description: hypothetical protein [Clostridium perfringens]
  misc_feature (36)..(215): Homolog of NCBI NO: 38567838 NR Description: OSJNBb0020J19.16 [Oryza sativa (japonica
  misc_feature (57)..(224): Homolog of NCBI NO: 21592527 NR Description: unknown [Arabidopsis thaliana]
  misc_feature (57)..(224): Homolog of NCBI NO: 18416035 NR Description: expressed protein [Arabidopsis thaliana]
  misc_feature (57)..(235): Homolog of NCBI NO: 15234348 NR Description: expressed protein [Arabidopsis thaliana]
  misc_feature (64)..(224): Homolog of NCBI NO: 15234348 NR Description: expressed protein [Arabidopsis thaliana]
  misc_feature (1)..(260): Homolog of NCBI NO: 18401163 NR Description: expressed protein [Arabidopsis thaliana]
  misc_feature (1)..(249): Homolog of NCBI NO: 8778672 NR Description: F9C16.20 [Arabidopsis thaliana]
MACYIVPYYHHPVLSHPNREIFSHRHHHHHRFCNNLLNRRISVPRSSAISDGGVSYNTLVSEAVRLLVPQANFDSSKLKVEFLGELLENKSNGGIITPRTYILSHCDFTANLTLTISNVINLDQLEGWYKKDDVVAEWKKVNDELRLHIHCCVSGMSLLQDVAAELRYHIFSKELPLVLKAVVHGDSVMFRENPELMDAYVWVYFHSSTPKYNRIECWGPLKDAAKGKQQGNHQGFLSSTTSRKLIRHKSIFHTLFTFLL

SEQ ID NO: 28194 - DNA, 1873 bp, Arabidopsis thaliana
  misc_feature (1)..(1873): Ceres Seq. ID no. 12680413
  misc_feature: MA Experiment ID: 108569 Result: Up-regulated in Transcription
  misc_feature: MA Experiment 108569 PARAMETER Experiment Name: At_0.001%_MeJA__cDNA_P Parameter: Timepoint (hr) Value: 6
  misc_feature: MA Experiment 108569 PARAMETER Experiment Name: At_0.001%_MeJA__cDNA_P Parameter: Tissue Value: Aerial
  misc_feature: MA Experiment 108569 PARAMETER Experiment Name: At_0.001%_MeJA__cDNA_P Parameter: Treatment Value: 0.001% MeJA vs. No Treatment
  misc_feature: MA Experiment ID: 108573 Result: Up-regulated in Transcription
  misc_feature: MA Experiment 108573 PARAMETER Experiment Name: At_Drought_cDNA_P Parameter: Timepoint (hr) Value: 6
  misc_feature: MA Experiment 108573 PARAMETER Experiment Name: At_Drought_cDNA_P Parameter: Tissue Value: Aerial
  misc_feature: MA Experiment 108573 PARAMETER Experiment Name: At_Drought_cDNA_P Parameter: Treatment Value: Drought vs. No Drought
  misc_feature: MA Experiment ID: 20000071 Result: Up-regulated in Transcription
  misc_feature: MA Experiment 20000071 PARAMETER Experiment Name: At_100uM_ABA_Mutants_cDNA_P Parameter: Plant Line Value: CS8104
  misc_feature: MA Experiment 20000071 PARAMETER Experiment Name: At_100uM_ABA_Mutants_cDNA_P Parameter: Timepoint (hr) Value: 6
  misc_feature: MA Experiment 20000071 PARAMETER Experiment Name: At_100uM_ABA_Mutants_cDNA_P Parameter: Tissue Value: Aerial
  misc_feature: MA Experiment 20000071 PARAMETER Experiment Name: At_100uM_ABA_Mutants_cDNA_P Parameter: Treatment Value: 100uM ABA vs. No Treatment
  misc_feature: MA Experiment ID: 20000086 Result: Up-regulated in Transcription
  misc_feature: MA Experiment 20000086 PARAMETER Experiment Name: At_100uM_ABA_Mutants_cDNA_P Parameter: Plant Line Value: CS22
  misc_feature: MA Experiment 20000086 PARAMETER Experiment Name: At_100uM_ABA_Mutants_cDNA_P Parameter: Timepoint (hr) Value: 6
  misc_feature: MA Experiment 20000086 PARAMETER Experiment Name: At_100uM_ABA_Mutants_cDNA_P Parameter: Tissue Value: Aerial
  misc_feature: MA Experiment 20000086 PARAMETER Experiment Name: At_100uM_ABA_Mutants_cDNA_P Parameter: Treatment Value: 100uM ABA vs. No Treatment
  misc_feature: MA Experiment ID: 20000171 Result: Down-regulated in Transcription
  misc_feature: MA Experiment 20000171 PARAMETER Experiment Name: At_42deg_Heat_P Parameter: Age (day) Value: 14
  misc_feature: MA Experiment 20000171 PARAMETER Experiment Name: At_42deg_Heat_P Parameter: Organism Value: A. thaliana
  misc_feature: MA Experiment 20000171 PARAMETER Experiment Name: At_42deg_Heat_P Parameter: Plant Line Value: WS
  misc_feature: MA Experiment 20000171 PARAMETER Experiment Name: At_42deg_Heat_P Parameter: Temperature (deg C) Value: 42 vs. 22
  misc_feature: MA Experiment 20000171 PARAMETER Experiment Name: At_42deg_Heat_P Parameter: Timepoint (hr) Value: 1
  misc_feature: MA Experiment 20000171 PARAMETER Experiment Name: At_42deg_Heat_P Parameter: Tissue Value: Aerial
  misc_feature: MA Experiment ID: 20000234 Result: Down-regulated in Transcription
  misc_feature: MA Experiment 20000234 PARAMETER Experiment Name: At_Siliques_P Parameter: Age (day) Value: 21
  misc_feature: MA Experiment 20000234 PARAMETER Experiment Name: At_Siliques_P Parameter: Organism Value: A. thaliana
  misc_feature: MA Experiment 20000234 PARAMETER Experiment Name: At_Siliques_P Parameter: Plant Line Value: WS
  misc_feature: MA Experiment 20000234 PARAMETER Experiment Name: At_Siliques_P Parameter: Tissue Value: Less Than 5mm Siliques vs. Whole Plant
  misc_feature: MA Experiment ID: 20000265 Result: Down-regulated in Transcription
  misc_feature: MA Experiment 20000265 PARAMETER Experiment Name: At_Open_Flower_P Parameter: Age (day) Value: 21
  misc_feature: MA Experiment 20000265 PARAMETER Experiment Name: At_Open_Flower_P Parameter: Plant Line Value: WS
  misc_feature: MA Experiment 20000265 PARAMETER Experiment Name: At_Open_Flower_P Parameter: Tissue Value: Closed Flower vs. Whole Plant
  misc_feature: MA Experiment ID: 20000794 Result: Up-regulated in Transcription
  misc_feature: MA Experiment 20000794 PARAMETER Experiment Name: At_Petals_P Parameter: Age (day) Value: 23-25 days
  misc_feature: MA Experiment 20000794 PARAMETER Experiment Name: At_Petals_P Parameter: Plant Line Value: WS
  misc_feature: MA Experiment 20000794 PARAMETER Experiment Name: At_Petals_P Parameter: Tissue Value: Petals vs. Whole plant
aacaaaaatcctcatttctctgagaatctggtgctttagctttggtaaaatgaagatatactctagaacggttgctgtttcactcattgtgtcattcctcctgtgtttctctgcctttgctgagcgcaatgacgggaccttcagagttggactgaaaaaactcaagttggattcgaaaaatcggcttgcagcacgcgtcgaatccaagcaagaaaagcccctgagagcttacagacttggagattctggagatgctgatgttgttgtgcttaagaattatctagatgctcagtactatggtgagatcgccattggtactccacctcagaagttcactgtggtttttgacactgggagctctaacctctgggtgccatcatcaaaatgctatttctcacttgcatgtctcttgcatcccaaatacaagtcgtctcgttcaagcacatatgagaagaatggaaaagctgccgcaattcattacggcactggagcaattgctggtttttttagtaatgatgctgtcacagttggcgatttagttgtcaaggatcaggagtttatcgaggcaaccaaggagcctggtataacatttgttgtagctaaatttgatggtatccttggtcttggattccaagagatctctgttggaaaagctgctcctgtttggtacaacatgctcaagcaaggccttatcaaggagccggttttttcattttggcttaaccgtaatgcagatgaagaagaaggtggtgaacttgtatttggaggtgttgatccaaatcatttcaagggcaaacatacatatgttcctgtgacacaaaagggctactggcagtttgacatgggtgatgttcttattggcggtgcacccactgggttctgtgaaagtggctgttctgcgatagcagattctggtacatctttgcttgccggtccaacgactataatcaccatgataaaccatgctattggagcagctggagttgttagccagcagtgcaagactgttgtggatcaatacgggcagaccattttggatttacttttgtctgagacccaaccgaagaaaatctgctcgcagattggtctgtgtacttttgatggtacccgtggtgtcagtatgggcattgagtcggtggtggacaaggaaaacgccaaattgtctaatggtgttggagatgctgcgtgttctgcatgtgagatggctgttgtgtggatccagagccagttgaggcaaaacatgactcaagagcgcatattgaactacgtcaacgagctatgtgaacgcctccccagcccaatgggagagtctgcagttgactgtgcacaactgtcaacaatgcccactgtttcacttaccattggaggcaaagtatttgatcttgctccagaagagtatgttctgaaagttggtgagggacctgtggcacagtgcatcagtggttttattgctcttgacgttgctccacctcgtggacctctctggatcttgggagatgtgttcatgggcaaataccacaccgtatttgactttggtaacgaacaggtcgggtttgcagaggcagcctaaacacgatcgggttggtgtcgcgtatggttttagtatgaacaatctgcgtctcaagtgttgtttgtatgttttctggagttgaggactttgagtcgtagtagaaatggtggcgcagttccttttaagttgtttcctaacgaaaaaaggcctttgtagttttgaaggcattggctttgtaaataccttctaagtaagttcgatggtgaaaaaactgaaaactttaataaagcctgcctcttttgtttatgcttagtaagttgtatcaaatggttcggtaaaaacggtgtagcataaaaaatttga

SEQ ID NO: 28195 - protein, 522 aa, Arabidopsis thaliana
  peptide (1)..(522): Ceres Seq. ID no. 12680414
  misc_feature (46)..(372): Pfam Name: Eukaryotic aspartyl protease Pfam Description: Eukaryotic aspartyl protease
  misc_feature (46)..(372): Pfam Name: Eukaryotic aspartyl protease Pfam Description: Eukaryotic aspartyl protease
  misc_feature (24)..(522): Homolog of NCBI NO: 7435837 NR Description: aspartic proteinase (EC 3.4.23.-) - cowpea
  misc_feature (24)..(522): Homolog of NCBI NO: 20800441 NR Description: aspartic proteinase [Vigna unguiculata]
  misc_feature (28)..(522): Homolog of NCBI NO: 2811025 NR Description: Aspartic proteinase precursor
  misc_feature (22)..(522): Homolog of NCBI NO: 21616053 NR Description: aspartic proteinase [Theobroma cacao]
  misc_feature (24)..(522): Homolog of NCBI NO: 7435837 NR Description: aspartic proteinase (EC 3.4.23.-) - cowpea
  misc_feature (28)..(522): Homolog of NCBI NO: 2811025 NR Description: Aspartic proteinase precursor
  misc_feature (17)..(521): Homolog of NCBI NO: 22330379 NR Description: aspartic protease, putative
  misc_feature (39)..(522): Homolog of NCBI NO: 1354272 NR Description: aspartic proteinase [Arabidopsis thaliana]
  misc_feature (17)..(522): Homolog of NCBI NO: 15221141 NR Description: putative aspartic proteinase
  misc_feature (17)..(522): Homolog of NCBI NO: 7435838 NR Description: probable aspartic proteinase (EC 3.4.23.-) 1 -
  misc_feature (22)..(522): Homolog of NCBI NO: 21616053 NR Description: aspartic proteinase [Theobroma cacao]
  misc_feature (24)..(522): Homolog of NCBI NO: 20800441 NR Description: aspartic proteinase [Vigna unguiculata]
  misc_feature (17)..(521): Homolog of NCBI NO: 22330379 NR Description: aspartic protease, putative
  misc_feature (17)..(522): Homolog of NCBI NO: 7435838 NR Description: probable aspartic proteinase (EC 3.4.23.-) 1 -
  misc_feature (39)..(522): Homolog of NCBI NO: 1354272 NR Description: aspartic proteinase [Arabidopsis thaliana]
  misc_feature (17)..(522): Homolog of NCBI NO: 15221141 NR Description: putative aspartic proteinase
TKILISLRIWCFSFGKMKIYSRTVAVSLIVSFLLCFSAFAERNDGTFRVGLKKLKLDSKNRLAARVESKQEKPLRAYRLGDSGDADVVVLKNYLDAQYYGEIAIGTPPQKFTVVFDTGSSNLWVPSSKCYFSLACLLHPKYKSSRSSTYEKNGKAAAIHYGTGAIAGFFSNDAVTVGDLVVKDQEFIEATKEPGITFVVAKFDGILGLGFQEISVGKAAPVWYNMLKQGLIKEPVFSFWLNRNADEEEGGELVFGGVDPNHFKGKHTYVPVTQKGYWQFDMGDVLIGGAPTGFCESGCSAIADSGTSLLAGPTTIITMINHAIGAAGVVSQQCKTVVDQYGQTILDLLLSETQPKKICSQIGLCTFDGTRGVSMGIESVVDKENAKLSNGVGDAACSACEMAVVWIQSQLRQNMTQERILNYVNELCERLPSPMGESAVDCAQLSTMPTVSLTIGGKVFDLAPEEYVLKVGEGPVAQCISGFIALDVAPPRGPLWILGDVFMGKYHTVFDFGNEQVGFAEAA

SEQ ID NO: 28196 - protein, 506 aa, Arabidopsis thaliana
  peptide (1)..(506): Ceres Seq. ID no. 12680415
  misc_feature (30)..(356): Pfam Name: Eukaryotic aspartyl protease Pfam Description: Eukaryotic aspartyl protease
  misc_feature (30)..(356): Pfam Name: Eukaryotic aspartyl protease Pfam Description: Eukaryotic aspartyl protease
  misc_feature (8)..(506): Homolog of NCBI NO: 7435837 NR Description: aspartic proteinase (EC 3.4.23.-) - cowpea
  misc_feature (8)..(506): Homolog of NCBI NO: 20800441 NR Description: aspartic proteinase [Vigna unguiculata]
  misc_feature (12)..(506): Homolog of NCBI NO: 2811025 NR Description: Aspartic proteinase precursor
  misc_feature (6)..(506): Homolog of NCBI NO: 21616053 NR Description: aspartic proteinase [Theobroma cacao]
  misc_feature (8)..(506): Homolog of NCBI NO: 7435837 NR Description: aspartic proteinase (EC 3.4.23.-) - cowpea
  misc_feature (12)..(506): Homolog of NCBI NO: 2811025 NR Description: Aspartic proteinase precursor
  misc_feature (1)..(505): Homolog of NCBI NO: 22330379 NR Description: aspartic protease, putative
  misc_feature (23)..(506): Homolog of NCBI NO: 1354272 NR Description: aspartic proteinase [Arabidopsis thaliana]
  misc_feature (1)..(506): Homolog of NCBI NO: 15221141 NR Description: putative aspartic proteinase
  misc_feature (1)..(506): Homolog of NCBI NO: 7435838 NR Description: probable aspartic proteinase (EC 3.4.23.-) 1 -
  misc_feature (6)..(506): Homolog of NCBI NO: 21616053 NR Description: aspartic proteinase [Theobroma cacao]
  misc_feature (8)..(506): Homolog of NCBI NO: 20800441 NR Description: aspartic proteinase [Vigna unguiculata]
  misc_feature (1)..(505): Homolog of NCBI NO: 22330379 NR Description: aspartic protease, putative
  misc_feature (1)..(506): Homolog of NCBI NO: 7435838 NR Description: probable aspartic proteinase (EC 3.4.23.-) 1 -
  misc_feature (23)..(506): Homolog of NCBI NO: 1354272 NR Description: aspartic proteinase [Arabidopsis thaliana]
  misc_feature (1)..(506): Homolog of NCBI NO: 15221141 NR Description: putative aspartic proteinase
MKIYSRTVAVSLIVSFLLCFSAFAERNDGTFRVGLKKLKLDSKNRLAARVESKQEKPLRAYRLGDSGDADVVVLKNYLDAQYYGEIAIGTPPQKFTVVFDTGSSNLWVPSSKCYFSLACLLHPKYKSSRSSTYEKNGKAAAIHYGTGAIAGFFSNDAVTVGDLVVKDQEFIEATKEPGITFVVAKFDGILGLGFQEISVGKAAPVWYNMLKQGLIKEPVFSFWLNRNADEEEGGELVFGGVDPNHFKGKHTYVPVTQKGYWQFDMGDVLIGGAPTGFCESGCSAIADSGTSLLAGPTTIITMINHAIGAAGVVSQQCKTVVDQYGQTILDLLLSETQPKKICSQIGLCTFDGTRGVSMGIESVVDKENAKLSNGVGDAACSACEMAVVWIQSQLRQNMTQERILNYVNELCERLPSPMGESAVDCAQLSTMPTVSLTIGGKVFDLAPEEYVLKVGEGPVAQCISGFIALDVAPPRGPLWILGDVFMGKYHTVFDFGNEQVGFAEAA

SEQ ID NO: 28197 - protein, 298 aa, Arabidopsis thaliana
  peptide (1)..(298): Ceres Seq. ID no. 12680416
  misc_feature (1)..(148): Pfam Name: Eukaryotic aspartyl protease Pfam Description: Eukaryotic aspartyl protease
  misc_feature (1)..(148): Pfam Name: Eukaryotic aspartyl protease Pfam Description: Eukaryotic aspartyl protease
  misc_feature (1)..(298): Homolog of NCBI NO: 7435837 NR Description: aspartic proteinase (EC 3.4.23.-) - cowpea
  misc_feature (1)..(298): Homolog of NCBI NO: 20800441 NR Description: aspartic proteinase [Vigna unguiculata]
  misc_feature (1)..(298): Homolog of NCBI NO: 2811025 NR Description: Aspartic proteinase precursor
  misc_feature (1)..(298): Homolog of NCBI NO: 21616053 NR Description: aspartic proteinase [Theobroma cacao]
  misc_feature (1)..(298): Homolog of NCBI NO: 7435837 NR Description: aspartic proteinase (EC 3.4.23.-) - cowpea
  misc_feature (1)..(298): Homolog of NCBI NO: 2811025 NR Description: Aspartic proteinase precursor
  misc_feature (1)..(297): Homolog of NCBI NO: 22330379 NR Description: aspartic protease, putative
  misc_feature (1)..(298): Homolog of NCBI NO: 1354272 NR Description: aspartic proteinase [Arabidopsis thaliana]
  misc_feature (1)..(298): Homolog of NCBI NO: 15221141 NR Description: putative aspartic proteinase
  misc_feature (1)..(298): Homolog of NCBI NO: 7435838 NR Description: probable aspartic proteinase (EC 3.4.23.-) 1 -
  misc_feature (1)..(298): Homolog of NCBI NO: 21616053 NR Description: aspartic proteinase [Theobroma cacao]
  misc_feature (1)..(298): Homolog of NCBI NO: 20800441 NR Description: aspartic proteinase [Vigna unguiculata]
  misc_feature (1)..(297): Homolog of NCBI NO: 22330379 NR Description: aspartic protease, putative
  misc_feature (1)..(298): Homolog of NCBI NO: 7435838 NR Description: probable aspartic proteinase (EC 3.4.23.-) 1 -
  misc_feature (1)..(298): Homolog of NCBI NO: 1354272 NR Description: aspartic proteinase [Arabidopsis thaliana]
  misc_feature (1)..(298): Homolog of NCBI NO: 15221141 NR Description: putative aspartic proteinase
MLKQGLIKEPVFSFWLNRNADEEEGGELVFGGVDPNHFKGKHTYVPVTQKGYWQFDMGDVLIGGAPTGFCESGCSAIADSGTSLLAGPTTIITMINHAIGAAGVVSQQCKTVVDQYGQTILDLLLSETQPKKICSQIGLCTFDGTRGVSMGIESVVDKENAKLSNGVGDAACSACEMAVVWIQSQLRQNMTQERILNYVNELCERLPSPMGESAVDCAQLSTMPTVSLTIGGKVFDLAPEEYVLKVGEGPVAQCISGFIALDVAPPRGPLWILGDVFMGKYHTVFDFGNEQVGFAEAA

SEQ ID NO: 28198 - DNA, 1114 bp, Arabidopsis thaliana
  misc_feature (1)..(1114): Ceres Seq. ID no. 12324072
  misc_feature: MA Experiment ID: 20000171 Result: Up-regulated in Transcription
  misc_feature: MA Experiment 20000171 PARAMETER Experiment Name: At_42deg_Heat_P Parameter: Age (day) Value: 14
  misc_feature: MA Experiment 20000171 PARAMETER Experiment Name: At_42deg_Heat_P Parameter: Organism Value: A. thaliana
  misc_feature: MA Experiment 20000171 PARAMETER Experiment Name: At_42deg_Heat_P Parameter: Plant Line Value: WS
  misc_feature: MA Experiment 20000171 PARAMETER Experiment Name: At_42deg_Heat_P Parameter: Temperature (deg C) Value: 42 vs. 22
  misc_feature: MA Experiment 20000171 PARAMETER Experiment Name: At_42deg_Heat_P Parameter: Timepoint (hr) Value: 1
  misc_feature: MA Experiment 20000171 PARAMETER Experiment Name: At_42deg_Heat_P Parameter: Tissue Value: Aerial
  misc_feature: MA Experiment ID: 20000180 Result: Up-regulated in Transcription
  misc_feature: MA Experiment 20000180 PARAMETER Experiment Name: At_Germinating_Seeds_P Parameter: Age (hr) Value: 24 vs. 0
  misc_feature: MA Experiment 20000180 PARAMETER Experiment Name: At_Germinating_Seeds_P Parameter: Tissue Value: Germinating Seeds
  misc_feature: MA Experiment ID: 20000227 Result: Up-regulated in Transcription
  misc_feature: MA Experiment 20000227 PARAMETER Experiment Name: At_Root-Tips-vs-Tops_P Parameter: Tissue Value: Root Tips vs. Root Tops
  misc_feature: MA Experiment ID: 20000234 Result: Up-regulated in Transcription
  misc_feature: MA Experiment 20000234 PARAMETER Experiment Name: At_Siliques_P Parameter: Age (day) Value: 21
  misc_feature: MA Experiment 20000234 PARAMETER Experiment Name: At_Siliques_P Parameter: Organism Value: A. thaliana
  misc_feature: MA Experiment 20000234 PARAMETER Experiment Name: At_Siliques_P Parameter: Plant Line Value: WS
  misc_feature: MA Experiment 20000234 PARAMETER Experiment Name: At_Siliques_P Parameter: Tissue Value: Less Than 5mm Siliques vs. Whole Plant
  misc_feature: MA Experiment ID: 20000235 Result: Up-regulated in Transcription
  misc_feature: MA Experiment 20000235 PARAMETER Experiment Name: At_Siliques_P Parameter: Age (day) Value: 21
  misc_feature: MA Experiment 20000235 PARAMETER Experiment Name: At_Siliques_P Parameter: Organism Value: A. thaliana
  misc_feature: MA Experiment 20000235 PARAMETER Experiment Name: At_Siliques_P Parameter: Plant Line Value: WS
  misc_feature: MA Experiment 20000235 PARAMETER Experiment Name: At_Siliques_P Parameter: Tissue Value: 5-10mm Siliques vs. Whole Plant
  misc_feature: MA Experiment ID: 20000265 Result: Up-regulated in Transcription
  misc_feature: MA Experiment 20000265 PARAMETER Experiment Name: At_Open_Flower_P Parameter: Age (day) Value: 21
  misc_feature: MA Experiment 20000265 PARAMETER Experiment Name: At_Open_Flower_P Parameter: Plant Line Value: WS
  misc_feature: MA Experiment 20000265 PARAMETER Experiment Name: At_Open_Flower_P Parameter: Tissue Value: Closed Flower vs. Whole Plant
  misc_feature: MA Experiment ID: 20000286 Result: Up-regulated in Transcription
  misc_feature: MA Experiment 20000286 PARAMETER Experiment Name: At_Open_Flower_P Parameter: Age (day) Value: 21
  misc_feature: MA Experiment 20000286 PARAMETER Experiment Name: At_Open_Flower_P Parameter: Plant Line Value: WS
  misc_feature: MA Experiment 20000286 PARAMETER Experiment Name: At_Open_Flower_P Parameter: Tissue Value: Half Open vs. Whole Plant
  misc_feature: MA Experiment ID: 20000441 Result: Down-regulated in Transcription
  misc_feature: MA Experiment 20000441 PARAMETER Experiment Name: At_1uM_BR-BRZ__P Parameter: Tissue Value: Shoot Apices
  misc_feature: MA Experiment 20000441 PARAMETER Experiment Name: At_1uM_BR-BRZ__P Parameter: Treatment Value: 1uM BR vs. No Treatment
  misc_feature: MA Experiment ID: 20000443 Result: Down-regulated in Transcription
  misc_feature: MA Experiment 20000443 PARAMETER Experiment Name: At_1uM_BR-BRZ__P Parameter: Tissue Value: Shoot Apices
  misc_feature: MA Experiment 20000443 PARAMETER Experiment Name: At_1uM_BR-BRZ__P Parameter: Treatment Value: 1uM BRZ vs. No Treatment
  misc_feature: MA Experiment ID: 20001247 Result: Down-regulated in Transcription
  misc_feature: MA Experiment 20001247 PARAMETER Experiment Name: At_Far-red-induction_P Parameter: Age (day) Value: 7
  misc_feature: MA Experiment 20001247 PARAMETER Experiment Name: At_Far-red-induction_P Parameter: Light Value: Far-red vs. White
  misc_feature: MA Experiment 20001247 PARAMETER Experiment Name: At_Far-red-induction_P Parameter: Organism Value: A. thaliana
  misc_feature: MA Experiment 20001247 PARAMETER Experiment Name: At_Far-red-induction_P Parameter: Plant Line Value: Columbia
  misc_feature: MA Experiment 20001247 PARAMETER Experiment Name: At_Far-red-induction_P Parameter: Timepoint (hr) Value: 1
  misc_feature: MA Experiment 20001247 PARAMETER Experiment Name: At_Far-red-induction_P Parameter: Tissue Value: Whole Plant
aaaaaaaagtccaccactagctcgaactctctcctctcttaaacttatagacaagaatcaatcagtcacacgtctataccacgatttgctcacaaaatctttggcttccaccaaagattataagcagagatcattcacttactcgtatcaatagatcaaatcttcatcacaatagaagaaatggttttagagacggtttcaaagacggaaccaccaccgttgcttggacctcgtatctccttctcatctgatttatctgacggtggagatttcatctgcatcacccccgtaatgtgtaaggaagatgtcgtcaaagggtcagtgaaagtctccgactttgagttcttgtcgtcagaaaatgtgagtccacagagaatgcttaccgccgatgaactcttctccgaaggtaagttgcttcctttttggcaagtaaagcactcagagaagcttaaaaacattactttgaagacgaacgaagaggaagaagcagagaaacgtaaagtggaagtgaagaagaaagatcaggagattaacaatagagataacagagtgacttggtttatagacgaagatccgtctcctcgtcctcccaagtgtaccgttctttggaaagagcttttgagattgaagaaacagaggaatccgtcttcttcgccggtgacggcgaggacagtgtcgtctttgtctccgtcgtcgtccacgtcatcatcaagttcacttgaggacgcagcgaagagagaggagaaagagaaagaagggaagagaggtaagaaaggattagagagaacgagatcggcgagtatgaggataaggccaatgattcatgttcctatttgcactccttctaaatcctctcttcctttgcctcctctgtttcctctttcgcttaagaaaaacagagtagagagacgcgcctagaagatttgatctatctttggattgaaaaaaacaattattggttgaatttgttcagattctcaagtgttaactcatgtggtctaatgcatgtggttaagtgatgtttttcagatgtattatgtgtatgctttatggcttgagatttaatgtgtgacagtgttaagaaattctagtaagaaccgttcctctgttcttc

SEQ ID NO: 28199 - protein, 245 aa, Arabidopsis thaliana
  peptide (1)..(245): Ceres Seq. ID no. 12324073
  misc_feature (50)..(236): Homolog of NCBI NO: 27311593 NR Description: unknown protein [Arabidopsis thaliana]
  misc_feature (1)..(243): Homolog of NCBI NO: 30687257 NR Description: expressed protein [Arabidopsis thaliana]
  misc_feature (1)..(245): Homolog of NCBI NO: 18397426 NR Description: expressed protein
MVLETVSKTEPPPLLGPRISFSSDLSDGGDFICITPVMCKEDVVKGSVKVSDFEFLSSENVSPQRMLTADELFSEGKLLPFWQVKHSEKLKNITLKTNEEEEAEKRKVEVKKKDQEINNRDNRVTWFIDEDPSPRPPKCTVLWKELLRLKKQRNPSSSPVTARTVSSLSPSSSTSSSSSLEDAAKREEKEKEGKRGKKGLERTRSASMRIRPMIHVPICTPSKSSLPLPPLFPLSLKKNRVERRA

SEQ ID NO: 28200 - protein, 208 aa, Arabidopsis thaliana
  peptide (1)..(208): Ceres Seq. ID no. 12324074
  misc_feature (13)..(199): Homolog of NCBI NO: 27311593 NR Description: unknown protein [Arabidopsis thaliana]
  misc_feature (1)..(206): Homolog of NCBI NO: 30687257 NR Description: expressed protein [Arabidopsis thaliana]
  misc_feature (1)..(208): Homolog of NCBI NO: 18397426 NR Description: expressed protein
MCKEDVVKGSVKVSDFEFLSSENVSPQRMLTADELFSEGKLLPFWQVKHSEKLKNITLKTNEEEEAEKRKVEVKKKDQEINNRDNRVTWFIDEDPSPRPPKCTVLWKELLRLKKQRNPSSSPVTARTVSSLSPSSSTSSSSSLEDAAKREEKEKEGKRGKKGLERTRSASMRIRPMIHVPICTPSKSSLPLPPLFPLSLKKNRVERRA

SEQ ID NO: 28201 - protein, 180 aa, Arabidopsis thaliana
  peptide (1)..(180): Ceres Seq. ID no. 12324075
  misc_feature (1)..(171): Homolog of NCBI NO: 27311593 NR Description: unknown protein [Arabidopsis thaliana]
  misc_feature (1)..(178): Homolog of NCBI NO: 30687257 NR Description: expressed protein [Arabidopsis thaliana]
  misc_feature (1)..(180): Homolog of NCBI NO: 18397426 NR Description: expressed protein
MLTADELFSEGKLLPFWQVKHSEKLKNITLKTNEEEEAEKRKVEVKKKDQEINNRDNRVTWFIDEDPSPRPPKCTVLWKELLRLKKQRNPSSSPVTARTVSSLSPSSSTSSSSSLEDAAKREEKEKEGKRGKKGLERTRSASMRIRPMIHVPICTPSKSSLPLPPLFPLSLKKNRVERRA

SEQ ID NO: 28202 - DNA, 1641 bp, Arabidopsis thaliana
  misc_feature (1)..(1641): Ceres Seq. ID no. 13490319
  misc_feature: MA Experiment ID: 20000166 Result: Up-regulated in Transcription
  misc_feature: MA Experiment 20000166 PARAMETER Experiment Name: At_100uM_ABA_P Parameter: Age (day) Value: 14
  misc_feature: MA Experiment 20000166 PARAMETER Experiment Name: At_100uM_ABA_P Parameter: Organism Value: A. thaliana
  misc_feature: MA Experiment 20000166 PARAMETER Experiment Name: At_100uM_ABA_P Parameter: Plant Line Value: WS
  misc_feature: MA Experiment 20000166 PARAMETER Experiment Name: At_100uM_ABA_P Parameter: Timepoint (hr) Value: 1
  misc_feature: MA Experiment 20000166 PARAMETER Experiment Name: At_100uM_ABA_P Parameter: Tissue Value: Aerial
  misc_feature: MA Experiment 20000166 PARAMETER Experiment Name: At_100uM_ABA_P Parameter: Treatment Value: 100uM ABA vs. No Treatment
  misc_feature: MA Experiment ID: 20000169 Result: Up-regulated in Transcription
  misc_feature: MA Experiment 20000169 PARAMETER Experiment Name: At_100uM_ABA_P Parameter: Age (day) Value: 14
  misc_feature: MA Experiment 20000169 PARAMETER Experiment Name: At_100uM_ABA_P Parameter: Organism Value: A. thaliana
  misc_feature: MA Experiment 20000169 PARAMETER Experiment Name: At_100uM_ABA_P Parameter: Plant Line Value: WS
  misc_feature: MA Experiment 20000169 PARAMETER Experiment Name: At_100uM_ABA_P Parameter: Timepoint (hr) Value: 6
  misc_feature: MA Experiment 20000169 PARAMETER Experiment Name: At_100uM_ABA_P Parameter: Tissue Value: Aerial
  misc_feature: MA Experiment 20000169 PARAMETER Experiment Name: At_100uM_ABA_P Parameter: Treatment Value: 100uM ABA vs. No Treatment
  misc_feature: MA Experiment ID: 20000171 Result: Down-regulated in Transcription
  misc_feature: MA Experiment 20000171 PARAMETER Experiment Name: At_42deg_Heat_P Parameter: Age (day) Value: 14
  misc_feature: MA Experiment 20000171 PARAMETER Experiment Name: At_42deg_Heat_P Parameter: Organism Value: A. thaliana
  misc_feature: MA Experiment 20000171 PARAMETER Experiment Name: At_42deg_Heat_P Parameter: Plant Line Value: WS
  misc_feature: MA Experiment 20000171 PARAMETER Experiment Name: At_42deg_Heat_P Parameter: Temperature (deg C) Value: 42 vs. 22
  misc_feature: MA Experiment 20000171 PARAMETER Experiment Name: At_42deg_Heat_P Parameter: Timepoint (hr) Value: 1
  misc_feature: MA Experiment 20000171 PARAMETER Experiment Name: At_42deg_Heat_P Parameter: Tissue Value: Aerial
  misc_feature: MA Experiment ID: 20000182 Result: Up-regulated in Transcription
  misc_feature: MA Experiment 20000182 PARAMETER Experiment Name: At_2mM_SA_P Parameter: Age (day) Value: 14
  misc_feature: MA Experiment 20000182 PARAMETER Experiment Name: At_2mM_SA_P Parameter: Organism Value: A. thaliana
  misc_feature: MA Experiment 20000182 PARAMETER Experiment Name: At_2mM_SA_P Parameter: Plant Line Value: WS
  misc_feature: MA Experiment 20000182 PARAMETER Experiment Name: At_2mM_SA_P Parameter: Timepoint (hr) Value: 6
  misc_feature: MA Experiment 20000182 PARAMETER Experiment Name: At_2mM_SA_P Parameter: Tissue Value: Aerial
  misc_feature: MA Experiment 20000182 PARAMETER Experiment Name: At_2mM_SA_P Parameter: Treatment Value: 2mM SA vs. No Treatment
  misc_feature: MA Experiment ID: 20000436 Result: Up-regulated in Transcription
  misc_feature: MA Experiment 20000436 PARAMETER Experiment Name: At_Drought_P Parameter: Age (day) Value: 7
  misc_feature: MA Experiment 20000436 PARAMETER Experiment Name: At_Drought_P Parameter: Organism Value: A. thaliana
  misc_feature: MA Experiment 20000436 PARAMETER Experiment Name: At_Drought_P Parameter: Plant Line Value: WS
  misc_feature: MA Experiment 20000436 PARAMETER Experiment Name: At_Drought_P Parameter: Timepoint (hr) Value: 12
  misc_feature: MA Experiment 20000436 PARAMETER Experiment Name: At_Drought_P Parameter: Tissue Value: Whole Plant
  misc_feature: MA Experiment 20000436 PARAMETER Experiment Name: At_Drought_P Parameter: Treatment Value: Drought vs. No Drought
  misc_feature: MA Experiment ID: 20000437 Result: Up-regulated in Transcription
  misc_feature: MA Experiment 20000437 PARAMETER Experiment Name: At_Drought_P Parameter: Age (day) Value: 8
  misc_feature: MA Experiment 20000437 PARAMETER Experiment Name: At_Drought_P Parameter: Organism Value: A. thaliana
  misc_feature: MA Experiment 20000437 PARAMETER Experiment Name: At_Drought_P Parameter: Plant Line Value: WS
  misc_feature: MA Experiment 20000437 PARAMETER Experiment Name: At_Drought_P Parameter: Timepoint (hr) Value: 24
  misc_feature: MA Experiment 20000437 PARAMETER Experiment Name: At_Drought_P Parameter: Tissue Value: Whole Plant
  misc_feature: MA Experiment 20000437 PARAMETER Experiment Name: At_Drought_P Parameter: Treatment Value: Drought vs. No Drought
  misc_feature: MA Experiment ID: 20000438 Result: Down-regulated in Transcription
  misc_feature: MA Experiment 20000438 PARAMETER Experiment Name: At_Shoots__P Parameter: Age (day) Value: 14
  misc_feature: MA Experiment 20000438 PARAMETER Experiment Name: At_Shoots__P Parameter: Tissue Value: Shoots vs. Whole Plant
  misc_feature: MA Experiment ID: 20000439 Result: Down-regulated in Transcription
  misc_feature: MA Experiment 20000439 PARAMETER Experiment Name: At_Roots__P Parameter: Age (day) Value: 14 vs. 21
  misc_feature: MA Experiment 20000439 PARAMETER Experiment Name: At_Roots__P Parameter: Organism Value: A. thaliana
  misc_feature: MA Experiment 20000439 PARAMETER Experiment Name: At_Roots__P Parameter: Tissue Value: Roots vs. Whole Plant
  misc_feature: MA Experiment ID: 20000453 Result: Up-regulated in Transcription
  misc_feature: MA Experiment 20000453 PARAMETER Experiment Name: At_100uM_ABA_P Parameter: Age (day) Value: 15
  misc_feature: MA Experiment 20000453 PARAMETER Experiment Name: At_100uM_ABA_P Parameter: Organism Value: A. thaliana
  misc_feature: MA Experiment 20000453 PARAMETER Experiment Name: At_100uM_ABA_P Parameter: Plant Line Value: WS
  misc_feature: MA Experiment 20000453 PARAMETER Experiment Name: At_100uM_ABA_P Parameter: Timepoint (hr) Value: 24
  misc_feature: MA Experiment 20000453 PARAMETER Experiment Name: At_100uM_ABA_P Parameter: Tissue Value: Aerial
  misc_feature: MA Experiment 20000453 PARAMETER Experiment Name: At_100uM_ABA_P Parameter: Treatment Value: 100uM ABA vs. No Treatment
  misc_feature: MA Experiment ID: 20000455 Result: Up-regulated in Transcription
  misc_feature: MA Experiment 20000455 PARAMETER Experiment Name: At_100uM_ABA_P Parameter: Age (day) Value: 16
  misc_feature: MA Experiment 20000455 PARAMETER Experiment Name: At_100uM_ABA_P Parameter: Organism Value: A. thaliana
  misc_feature: MA Experiment 20000455 PARAMETER Experiment Name: At_100uM_ABA_P Parameter: Plant Line Value: WS
  misc_feature: MA Experiment 20000455 PARAMETER Experiment Name: At_100uM_ABA_P Parameter: Timepoint (hr) Value: 48
  misc_feature: MA Experiment 20000455 PARAMETER Experiment Name: At_100uM_ABA_P Parameter: Tissue Value: Aerial
  misc_feature: MA Experiment 20000455 PARAMETER Experiment Name: At_100uM_ABA_P Parameter: Treatment Value: 100uM ABA vs. No Treatment
  misc_feature: MA Experiment ID: 20000709 Result: Up-regulated in Transcription
  misc_feature: MA Experiment 20000709 PARAMETER Experiment Name: At_15mM_NH4NO3_L-to-H_P Parameter: Age (hr) Value: 14
  misc_feature: MA Experiment 20000709 PARAMETER Experiment Name: At_15mM_NH4NO3_L-to-H_P Parameter: Organism Value: A. thaliana
  misc_feature: MA Experiment 20000709 PARAMETER Experiment Name: At_15mM_NH4NO3_L-to-H_P Parameter: Plant Line Value: WS
  misc_feature: MA Experiment 20000709 PARAMETER Experiment Name: At_15mM_NH4NO3_L-to-H_P Parameter: Timepoint (hr) Value: 4
  misc_feature: MA Experiment 20000709 PARAMETER Experiment Name: At_15mM_NH4NO3_L-to-H_P Parameter: Tissue Value: Aerial
  misc_feature: MA Experiment 20000709 PARAMETER Experiment Name: At_15mM_NH4NO3_L-to-H_P Parameter: Treatment Value: 15mM NH4NO3 vs. 30mM Mannitol
  misc_feature: MA Experiment ID: 20001247 Result: Up-regulated in Transcription
  misc_feature: MA Experiment 20001247 PARAMETER Experiment Name: At_Far-red-induction_P Parameter: Age (day) Value: 7
  misc_feature: MA Experiment 20001247 PARAMETER Experiment Name: At_Far-red-induction_P Parameter: Light Value: Far-red vs. White
  misc_feature: MA Experiment 20001247 PARAMETER Experiment Name: At_Far-red-induction_P Parameter: Organism Value: A. thaliana
  misc_feature: MA Experiment 20001247 PARAMETER Experiment Name: At_Far-red-induction_P Parameter: Plant Line Value: Columbia
  misc_feature: MA Experiment 20001247 PARAMETER Experiment Name: At_Far-red-induction_P Parameter: Timepoint (hr) Value: 1
  misc_feature: MA Experiment 20001247 PARAMETER Experiment Name: At_Far-red-induction_P Parameter: Tissue Value: Whole Plant
  misc_feature: MA Experiment ID: 20001557 Result: Up-regulated in Transcription
  misc_feature: MA Experiment 20001557 PARAMETER Experiment Name: At_Drought_Soil_Dry_P Parameter: Age (day) Value: 27
  misc_feature: MA Experiment 20001557 PARAMETER Experiment Name: At_Drought_Soil_Dry_P Parameter: Organism Value: A. thaliana
  misc_feature: MA Experiment 20001557 PARAMETER Experiment Name: At_Drought_Soil_Dry_P Parameter: Plant Line Value: WS
  misc_feature: MA Experiment 20001557 PARAMETER Experiment Name: At_Drought_Soil_Dry_P Parameter: Post Timepoint (hr) Value: 3
  misc_feature: MA Experiment 20001557 PARAMETER Experiment Name: At_Drought_Soil_Dry_P Parameter: Post-Treatment Value: Re-Water vs. No Drought
  misc_feature: MA Experiment 20001557 PARAMETER Experiment Name: At_Drought_Soil_Dry_P Parameter: Timepoint (day) Value: 13
  misc_feature: MA Experiment 20001557 PARAMETER Experiment Name: At_Drought_Soil_Dry_P Parameter: Treatment Value: Drought vs. No Drought
  misc_feature: MA Experiment ID: 20001905 Result: Up-regulated in Transcription
  misc_feature: MA Experiment 20001905 PARAMETER Experiment Name: At_Drought_Reproduction_P Parameter: Age (day) Value: 40
  misc_feature: MA Experiment 20001905 PARAMETER Experiment Name: At_Drought_Reproduction_P Parameter: Organism Value: A. thaliana
  misc_feature: MA Experiment 20001905 PARAMETER Experiment Name: At_Drought_Reproduction_P Parameter: Plant Line Value: WS
  misc_feature: MA Experiment 20001905 PARAMETER Experiment Name: At_Drought_Reproduction_P Parameter: Timepoint (day) Value: 10
  misc_feature: MA Experiment 20001905 PARAMETER Experiment Name: At_Drought_Reproduction_P Parameter: Tissue Value: Rosettes
  misc_feature: MA Experiment 20001905 PARAMETER Experiment Name: At_Drought_Reproduction_P Parameter: Treatment Value: Drought vs. No Drought
  misc_feature: MA Experiment ID: 20001910 Result: Up-regulated in Transcription
  misc_feature: MA Experiment 20001910 PARAMETER Experiment Name: At_Drought_Reproduction_P Parameter: Age (day) Value: 37
  misc_feature: MA Experiment 20001910 PARAMETER Experiment Name: At_Drought_Reproduction_P Parameter: Organism Value: A. thaliana
  misc_feature: MA Experiment 20001910 PARAMETER Experiment Name: At_Drought_Reproduction_P Parameter: Plant Line Value: WS
  misc_feature: MA Experiment 20001910 PARAMETER Experiment Name: At_Drought_Reproduction_P Parameter: Timepoint (day) Value: 7
  misc_feature: MA Experiment 20001910 PARAMETER Experiment Name: At_Drought_Reproduction_P Parameter: Tissue Value: Flowers
  misc_feature: MA Experiment 20001910 PARAMETER Experiment Name: At_Drought_Reproduction_P Parameter: Treatment Value: Drought vs. No Drought
tgattcgtcgtaataataaaaacacaactcaaacgattcacgggtttcacttggaatcgtttggttttctcatttccgaaatataaaaagatggccaaagcgccaccgtcaatctctcttctcctcctcctctgcgccgccgtattcctcaccatccccgccgtgatctccgccatcggtgttaactacggaactctcggaaacctcccaccaccgactcaggtggctaactttatcaagacacaaacttcgattgatagcgtcaagatcttcgatgtgaatcccgatatcctacgtgccttcgctggaactggtatctccgtcgttgtcaccgttcctaacggtgatattccggcgttggctaacggaagacaagctcgtcggtgggtttcggttaacattttgccgtttcatcctcagacgaagattaagtatatctcagtcggaaatgagattctgctcaccggagataataacatgatcaataatctcttaccggcgatgaggaatcttaacaacgctttggttcgtgctggtgtcagagatgttaaggttacaaccgcacactcacttaacatcatagcctatgacctgaccggtgcaccaagcagcggtagattcaggccgggttgggacaaaggcatattggctccaatcctagcttaccatcgccgaaccaagtcacctttcatggttaacccgtacccttactttggttttgaccccaaaaacgtcaacttcgcaattttccgaacaccgtacaaggcagtccgtgacccgttcacccgccacgtctacaccaacatgtttgatgcactcatggactcgacatactcagccatgaaagctcttggatacggtgatgttaacattgtcgttggcgagactggctggccatctgcttgtgacgcaccttggtgctcgcctgcgaatgctgcttggttcaacctcaacattatcaaacgtgcacaaggccaagggacacctctcatgcctaacagacggttcgagacatacattttcggtctcttcaacgaagaaggcaaacccggtccgaccgcagagcgtaactggggacttttccgagcagatttctccccggtttacgatgttggtcttctccgaaacggacaaggcggtggaggccgcccagcattgcccgcacctagtactgccggcggtaaatggtgtgtagcgaggtccggggcgacgaatactcagctgcaagacagtattaattgggtgtgtggtcagggtgttgactgtaaaccgatccaagctggtggttcgtgctttaacccgagcagtttgaggacgcacgcatcttttgttatgaatgcttatttccagagccacggccgcactgatggtgcttgtaacttcagtggaactggtatgatcgtagggaacaacccaagcaatggtgcatgtaagtactaaggagattgtctatgtagtagtatttgtctgaaaaatcctaacataatggttctgaggaactttggatttgagagatcatcagctttgtgtttaatttcggattatcctaattttaagatttttttgttaattattttttcgctgattccttttatttaaataaagtggaacttccataaaatttgcttcagcgttacgctt

SEQ ID NO: 28203 - protein, 449 aa, Arabidopsis thaliana
  peptide (1)..(449): Ceres Seq. ID no. 13490320
  misc_feature (29)..(343): Pfam Name: Glycosyl hydrolases family 17 Pfam Description: Glycosyl hydrolases family 17
  misc_feature (8)..(449): Homolog of NCBI NO: 31126737 NR Description: putative beta 1,3-glucanase
  misc_feature (7)..(443): Homolog of NCBI NO: 15226720 NR Description: glycosyl hydrolase family 17 [Arabidopsis
  misc_feature (1)..(449): Homolog of NCBI NO: 14279169 NR Description: beta-1,3-glucanase-like protein [Olea europaea]
  misc_feature (13)..(364): Homolog of NCBI NO: 13548679 NR Description: endo-1,3-beta-glucanase-like protein [Pyrus
  misc_feature (6)..(449): Homolog of NCBI NO: 1706551 NR Description: GLUCAN ENDO-1,3-BETA-GLUCOSIDASE PRECURSOR ((1-
  misc_feature (1)..(448): Homolog of NCBI NO: 11279328 NR Description: glucan endo-1,3-beta-D-glucosidase (EC 3.2.1.39)
  misc_feature (1)..(447): Homolog of NCBI NO: 15225516 NR Description: glycosyl hydrolase family 17 [Arabidopsis
  misc_feature (1)..(449): Homolog of NCBI NO: 15028379 NR Description: putative beta-1,3-glucanase [Arabidopsis thaliana]
  misc_feature (1)..(449): Homolog of NCBI NO: 21617932 NR Description: beta-1,3-glucanase-like protein [Arabidopsis
  misc_feature (1)..(449): Homolog of NCBI NO: 15233271 NR Description: glycosyl hydrolase family 17 (beta-1,3-glucanase)
MAKAPPSISLLLLLCAAVFLTIPAVISAIGVNYGTLGNLPPPTQVANFIKTQTSIDSVKIFDVNPDILRAFAGTGISVVVTVPNGDIPALANGRQARRWVSVNILPFHPQTKIKYISVGNEILLTGDNNMINNLLPAMRNLNNALVRAGVRDVKVTTAHSLNIIAYDLTGAPSSGRFRPGWDKGILAPILAYHRRTKSPFMVNPYPYFGFDPKNVNFAIFRTPYKAVRDPFTRHVYTNMFDALMDSTYSAMKALGYGDVNIVVGETGWPSACDAPWCSPANAAWFNLNIIKRAQGQGTPLMPNRRFETYIFGLFNEEGKPGPTAERNWGLFRADFSPVYDVGLLRNGQGGGGRPALPAPSTAGGKWCVARSGATNTQLQDSINWVCGQGVDCKPIQAGGSCFNPSSLRTHASFVMNAYFQSHGRTDGACNFSGTGMIVGNNPSNGACKY

SEQ ID NO: 28204 - protein, 320 aa, Arabidopsis thaliana
  peptide (1)..(320): Ceres Seq. ID no. 13490321
  misc_feature (1)..(214): Pfam Name: Glycosyl hydrolases family 17 Pfam Description: Glycosyl hydrolases family 17
  misc_feature (1)..(320): Homolog of NCBI NO: 31126737 NR Description: putative beta 1,3-glucanase
  misc_feature (1)..(314): Homolog of NCBI NO: 15226720 NR Description: glycosyl hydrolase family 17 [Arabidopsis
  misc_feature (1)..(320): Homolog of NCBI NO: 14279169 NR Description: beta-1,3-glucanase-like protein [Olea europaea]
  misc_feature (1)..(235): Homolog of NCBI NO: 13548679 NR Description: endo-1,3-beta-glucanase-like protein [Pyrus
  misc_feature (1)..(320): Homolog of NCBI NO: 1706551 NR Description: GLUCAN ENDO-1,3-BETA-GLUCOSIDASE PRECURSOR ((1-
  misc_feature (1)..(319): Homolog of NCBI NO: 11279328 NR Description: glucan endo-1,3-beta-D-glucosidase (EC 3.2.1.39)
  misc_feature (1)..(318): Homolog of NCBI NO: 15225516 NR Description: glycosyl hydrolase family 17 [Arabidopsis
  misc_feature (1)..(320): Homolog of NCBI NO: 15028379 NR Description: putative beta-1,3-glucanase [Arabidopsis thaliana]
  misc_feature (1)..(320): Homolog of NCBI NO: 21617932 NR Description: beta-1,3-glucanase-like protein [Arabidopsis
  misc_feature (1)..(320): Homolog of NCBI NO: 15233271 NR Description: glycosyl hydrolase family 17 (beta-1,3-glucanase)
MINNLLPAMRNLNNALVRAGVRDVKVTTAHSLNIIAYDLTGAPSSGRFRPGWDKGILAPILAYHRRTKSPFMVNPYPYFGFDPKNVNFAIFRTPYKAVRDPFTRHVYTNMFDALMDSTYSAMKALGYGDVNIVVGETGWPSACDAPWCSPANAAWFNLNIIKRAQGQGTPLMPNRRFETYIFGLFNEEGKPGPTAERNWGLFRADFSPVYDVGLLRNGQGGGGRPALPAPSTAGGKWCVARSGATNTQLQDSINWVCGQGVDCKPIQAGGSCFNPSSLRTHASFVMNAYFQSHGRTDGACNFSGTGMIVGNNPSNGACKY

SEQ ID NO: 28205 - protein, 312 aa, Arabidopsis thaliana
  peptide (1)..(312): Ceres Seq. ID no. 13490322
  misc_feature (1)..(206): Pfam Name: Glycosyl hydrolases family 17 Pfam Description: Glycosyl hydrolases family 17
  misc_feature (1)..(312): Homolog of NCBI NO: 31126737 NR Description: putative beta 1,3-glucanase
  misc_feature (1)..(306): Homolog of NCBI NO: 15226720 NR Description: glycosyl hydrolase family 17 [Arabidopsis
  misc_feature (1)..(312): Homolog of NCBI NO: 14279169 NR Description: beta-1,3-glucanase-like protein [Olea europaea]
  misc_feature (1)..(227): Homolog of NCBI NO: 13548679 NR Description: endo-1,3-beta-glucanase-like protein [Pyrus
  misc_feature (1)..(312): Homolog of NCBI NO: 1706551 NR Description: GLUCAN ENDO-1,3-BETA-GLUCOSIDASE PRECURSOR ((1-
  misc_feature (1)..(311): Homolog of NCBI NO: 11279328 NR Description: glucan endo-1,3-beta-D-glucosidase (EC 3.2.1.39)
  misc_feature (1)..(310): Homolog of NCBI NO: 15225516 NR Description: glycosyl hydrolase family 17 [Arabidopsis
  misc_feature (1)..(312): Homolog of NCBI NO: 15028379 NR Description: putative beta-1,3-glucanase [Arabidopsis thaliana]
  misc_feature (1)..(312): Homolog of NCBI NO: 21617932 NR Description: beta-1,3-glucanase-like protein [Arabidopsis
  misc_feature (1)..(312): Homolog of NCBI NO: 15233271 NR Description: glycosyl hydrolase family 17 (beta-1,3-glucanase)
MRNLNNALVRAGVRDVKVTTAHSLNIIAYDLTGAPSSGRFRPGWDKGILAPILAYHRRTKSPFMVNPYPYFGFDPKNVNFAIFRTPYKAVRDPFTRHVYTNMFDALMDSTYSAMKALGYGDVNIVVGETGWPSACDAPWCSPANAAWFNLNIIKRAQGQGTPLMPNRRFETYIFGLFNEEGKPGPTAERNWGLFRADFSPVYDVGLLRNGQGGGGRPALPAPSTAGGKWCVARSGATNTQLQDSINWVCGQGVDCKPIQAGGSCFNPSSLRTHASFVMNAYFQSHGRTDGACNFSGTGMIVGNNPSNGACKY

SEQ ID NO: 28206 - DNA, 1786 bp, Arabidopsis thaliana
  misc_feature (1)..(1786): Ceres Seq. ID no. 13487784
  misc_feature: MA Experiment ID: 108462 Result: Down-regulated in Transcription
  misc_feature: MA Experiment 108462 PARAMETER Experiment Name: At_Germinating_Seeds_cDNA_P Parameter: Age (day) Value: 2 vs. 0
  misc_feature: MA Experiment 108462 PARAMETER Experiment Name: At_Germinating_Seeds_cDNA_P Parameter: Tissue Value: Germinating Seeds
  misc_feature: MA Experiment ID: 108463 Result: Down-regulated in Transcription
  misc_feature: MA Experiment 108463 PARAMETER Experiment Name: At_Germinating_Seeds_cDNA_P Parameter: Age (day) Value: 3 vs. 0
  misc_feature: MA Experiment 108463 PARAMETER Experiment Name: At_Germinating_Seeds_cDNA_P Parameter: Tissue Value: Germinating Seeds
  misc_feature: MA Experiment ID: 108464 Result: Down-regulated in Transcription
  misc_feature: MA Experiment 108464 PARAMETER Experiment Name: At_Germinating_Seeds_cDNA_P Parameter: Age (day) Value: 4 vs. 0
  misc_feature: MA Experiment 108464 PARAMETER Experiment Name: At_Germinating_Seeds_cDNA_P Parameter: Tissue Value: Germinating Seeds
  misc_feature: MA Experiment ID: 108585 Result: Up-regulated in Transcription
  misc_feature: MA Experiment 108585 PARAMETER Experiment Name: At_5mM_NaNP_cDNA_P Parameter: Timepoint (hr) Value: 6
  misc_feature: MA Experiment 108585 PARAMETER Experiment Name: At_5mM_NaNP_cDNA_P Parameter: Tissue Value: Aerial
  misc_feature: MA Experiment 108585 PARAMETER Experiment Name: At_5mM_NaNP_cDNA_P Parameter: Treatment Value: null
  misc_feature: MA Experiment ID: 108595 Result: Down-regulated in Transcription
  misc_feature: MA Experiment 108595 PARAMETER Experiment Name: At_Ler-pi_Ovule_cDNA_P Parameter: Plant Line Value: null
  misc_feature: MA Experiment ID: 20000794 Result: Up-regulated in Transcription
  misc_feature: MA Experiment 20000794 PARAMETER Experiment Name: At_Petals_P Parameter: Age (day) Value: 23-25 days
  misc_feature: MA Experiment 20000794 PARAMETER Experiment Name: At_Petals_P Parameter: Plant Line Value: WS
  misc_feature: MA Experiment 20000794 PARAMETER Experiment Name: At_Petals_P Parameter: Tissue Value: Petals vs. Whole plant
  misc_feature: MA Experiment ID: 20001451 Result: Down-regulated in Transcription
  misc_feature: MA Experiment 20001451 PARAMETER Experiment Name: At_Far-red-induction_P Parameter: Age (day) Value: 7
  misc_feature: MA Experiment 20001451 PARAMETER Experiment Name: At_Far-red-induction_P Parameter: Light Value: Far-red vs. White
  misc_feature: MA Experiment 20001451 PARAMETER Experiment Name: At_Far-red-induction_P Parameter: Organism Value: A. thaliana
  misc_feature: MA Experiment 20001451 PARAMETER Experiment Name: At_Far-red-induction_P Parameter: Plant Line Value: Columbia
  misc_feature: MA Experiment 20001451 PARAMETER Experiment Name: At_Far-red-induction_P Parameter: Timepoint (hr) Value: 24
  misc_feature: MA Experiment 20001451 PARAMETER Experiment Name: At_Far-red-induction_P Parameter: Tissue Value: Whole Plant
aaaggtcatatgcttttctccagttcctctctctgtctatctctctcctccttcaataatttctgcaaaccctaactttctcattcggcgctcaagtttctctccacctcttcgagatttggtgcgatgatgttgcgtgctgtttttaggagagcttccattagaggctcttcttctgcttcgggattgggaaaatcattgcaatcctctcgtcttgttgcgtcttcccaatttcattctgtttcagcaacagagacgttggtgccgcgtggaaaccatgctcatagcttccatcaccgttcttgtccagggtgtccagactgttcaaggactgttatcaacggtttccaaggcacagccctgcaaagatgggtcaggcctttttcatctgatagtggggatgtcgtggaagctgttgtgccacacatgggtgaatcaatcactgatggcaccctagccgcctttctgaagaaacctggcgatagagtagaagctgatgaggctattgcacaaattgaaactgacaaggttacaatagatattgctagcccagcaagtggtgtgatccaagagtttctagtcaaggaaggagatactgttgaaccaggaaacaaggttgcaagaatttctacatctgcggatgctgtgtctcatgtggcaccctcagaaaaggcaccagagaaacctgctcccaagccttctcctcctgctgagaagcccaaagttgaaagtaccaaagttgcagagaaacccaaggcaccatcaccgccaccgccatccaaacagtcagctaaagaaccgcagcttccacctaaggatagggaaagacgggttcctatgacaagacttcgcaaacgggtggcaactaggttgaaagactctcaaaacacttttgcgttgctgacaactttcaatgaagttgatatgactaatctgatgaagctccgatctcagtacaaagatgcttttcttgaaaagcacggagtgaagttggggcttatgtctggtttcattaaggctgctgttagtgccctccagcaccaacctgtagtaaatgcagttatcgatggagatgatatcatttacagagactacgtggatatcagtatcgctgttggtacctccaagggtcttgtggttccagtcataagagatgctgacaaaatgaactttgctgacatagagaaaacaataaacggtcttgctaagaaggctactgaaggaaccatatcaatcgatgagatggcaggaggatcattcacagtatcaaatggtggtgtctatggaagtcttataagcactcctatcatcaaccctcctcagtctgctattcttggaatgcattcaattgtgcaacgtccaatggttgtgggaggaagcgtagttccgaggccaatgatgtatgtcgcgctgacttacgatcataggctaattgatggaagagaggctgtgtatttcttgcgccgtattaaggatgttgtggaagatcctcagaggcttcttctcgacatatgataaagatccacgacagaagagatcataagtttctgtctgtttaccagtttcctttcaggtaaaaccattacggatactgcaatctgcaaatgatgctttgaaaaaagaacgaaacttttttttggagtttcttaatagttttaagagtttttgccgggcgaggaaagcatcggtgtattgagttttcttttattttataatattcatacagtttgaacaaaatgttacaattttgactttcaaaaaataatgccactgataattattggtt

SEQ ID NO: 28207 - protein, 462 aa, Arabidopsis thaliana
  peptide (1)..(462): Ceres Seq. ID no. 15220490
  misc_feature (230)..(460): Pfam Name: 2-oxoacid dehydrogenases acyltransferase Pfam Description: 2-oxoacid dehydrogenases acyltransferase
  misc_feature (95)..(233): Homolog of NCBI NO: 22967670 NR Description: hypothetical protein [Rhodospirillum rubrum]
  misc_feature (211)..(461): Homolog of NCBI NO: 22967670 NR Description: hypothetical protein [Rhodospirillum rubrum]
  misc_feature (150)..(462): Homolog of NCBI NO: 7484908 NR Description: dihydrolipoamide S-succinyltransferase homolog
  misc_feature (27)..(462): Homolog of NCBI NO: 21740743 NR Description: OSJNBa0072K14.8 [Oryza sativa (japonica
  misc_feature (101)..(462): Homolog of NCBI NO: 30687411 NR Description: dihydrolipoamide succinyltransferase -related
  misc_feature (1)..(462): Homolog of NCBI NO: 18416889 NR Description: dihydrolipoamide succinyltransferase -related
  misc_feature (2)..(462): Homolog of NCBI NO: 21618217 NR Description: putative dihydrolipoamide succinyltransferase
  misc_feature (1)..(462): Homolog of NCBI NO: 30687405 NR Description: dihydrolipoamide succinyltransferase -related
  misc_feature (1)..(462): Homolog of NCBI NO: 15240454 NR Description: 2-oxoglutarate dehydrogenase E2 subunit
  misc_feature (1)..(462): Homolog of NCBI NO: 4210332 NR Description: 2-oxoglutarate dehydrogenase E2 subunit
MMLRAVFRRASIRGSSSASGLGKSLQSSRLVASSQFHSVSATETLVPRGNHAHSFHHRSCPGCPDCSRTVINGFQGTALQRWVRPFSSDSGDVVEAVVPHMGESITDGTLAAFLKKPGDRVEADEAIAQIETDKVTIDIASPASGVIQEFLVKEGDTVEPGNKVARISTSADAVSHVAPSEKAPEKPAPKPSPPAEKPKVESTKVAEKPKAPSPPPPSKQSAKEPQLPPKDRERRVPMTRLRKRVATRLKDSQNTFALLTTFNEVDMTNLMKLRSQYKDAFLEKHGVKLGLMSGFIKAAVSALQHQPVVNAVIDGDDIIYRDYVDISIAVGTSKGLVVPVIRDADKMNFADIEKTINGLAKKATEGTISIDEMAGGSFTVSNGGVYGSLISTPIINPPQSAILGMHSIVQRPMVVGGSVVPRPMMYVALTYDHRLIDGREAVYFLRRIKDVVEDPQRLLLDI

SEQ ID NO: 28208 - protein, 461 aa, Arabidopsis thaliana
  peptide (1)..(461): Ceres Seq. ID no. 15220491
  misc_feature (229)..(459): Pfam Name: 2-oxoacid dehydrogenases acyltransferase Pfam Description: 2-oxoacid dehydrogenases acyltransferase
  misc_feature (94)..(232): Homolog of NCBI NO: 22967670 NR Description: hypothetical protein [Rhodospirillum rubrum]
  misc_feature (210)..(460): Homolog of NCBI NO: 22967670 NR Description: hypothetical protein [Rhodospirillum rubrum]
  misc_feature (149)..(461): Homolog of NCBI NO: 7484908 NR Description: dihydrolipoamide S-succinyltransferase homolog
  misc_feature (26)..(461): Homolog of NCBI NO: 21740743 NR Description: OSJNBa0072K14.8 [Oryza sativa (japonica
  misc_feature (100)..(461): Homolog of NCBI NO: 30687411 NR Description: dihydrolipoamide succinyltransferase -related
  misc_feature (1)..(461): Homolog of NCBI NO: 18416889 NR Description: dihydrolipoamide succinyltransferase -related
  misc_feature (1)..(461): Homolog of NCBI NO: 21618217 NR Description: putative dihydrolipoamide succinyltransferase
  misc_feature (1)..(461): Homolog of NCBI NO: 30687405 NR Description: dihydrolipoamide succinyltransferase -related
  misc_feature (1)..(461): Homolog of NCBI NO: 15240454 NR Description: 2-oxoglutarate dehydrogenase E2 subunit
  misc_feature (1)..(461): Homolog of NCBI NO: 4210332 NR Description: 2-oxoglutarate dehydrogenase E2 subunit
MLRAVFRRASIRGSSSASGLGKSLQSSRLVASSQFHSVSATETLVPRGNHAHSFHHRSCPGCPDCSRTVINGFQGTALQRWVRPFSSDSGDVVEAVVPHMGESITDGTLAAFLKKPGDRVEADEAIAQIETDKVTIDIASPASGVIQEFLVKEGDTVEPGNKVARISTSADAVSHVAPSEKAPEKPAPKPSPPAEKPKVESTKVAEKPKAPSPPPPSKQSAKEPQLPPKDRERRVPMTRLRKRVATRLKDSQNTFALLTTFNEVDMTNLMKLRSQYKDAFLEKHGVKLGLMSGFIKAAVSALQHQPVVNAVIDGDDIIYRDYVDISIAVGTSKGLVVPVIRDADKMNFADIEKTINGLAKKATEGTISIDEMAGGSFTVSNGGVYGSLISTPIINPPQSAILGMHSIVQRPMVVGGSVVPRPMMYVALTYDHRLIDGREAVYFLRRIKDVVEDPQRLLLDI

SEQ ID NO: 28209 - protein, 362 aa, Arabidopsis thaliana
  peptide (1)..(362): Ceres Seq. ID no. 15220492
  misc_feature (130)..(360): Pfam Name: 2-oxoacid dehydrogenases acyltransferase Pfam Description: 2-oxoacid dehydrogenases acyltransferase
  misc_feature (1)..(133): Homolog of NCBI NO: 22967670 NR Description: hypothetical protein [Rhodospirillum rubrum]
  misc_feature (111)..(361): Homolog of NCBI NO: 22967670 NR Description: hypothetical protein [Rhodospirillum rubrum]
  misc_feature (50)..(362): Homolog of NCBI NO: 7484908 NR Description: dihydrolipoamide S-succinyltransferase homolog
  misc_feature (1)..(362): Homolog of NCBI NO: 21740743 NR Description: OSJNBa0072K14.8 [Oryza sativa (japonica
  misc_feature (1)..(362): Homolog of NCBI NO: 30687411 NR Description: dihydrolipoamide succinyltransferase -related
  misc_feature (1)..(362): Homolog of NCBI NO: 18416889 NR Description: dihydrolipoamide succinyltransferase -related
  misc_feature (1)..(362): Homolog of NCBI NO: 21618217 NR Description: putative dihydrolipoamide succinyltransferase
  misc_feature (1)..(362): Homolog of NCBI NO: 30687405 NR Description: dihydrolipoamide succinyltransferase -related
  misc_feature (1)..(362): Homolog of NCBI NO: 15240454 NR Description: 2-oxoglutarate dehydrogenase E2 subunit
  misc_feature (1)..(362): Homolog of NCBI NO: 4210332 NR Description: 2-oxoglutarate dehydrogenase E2 subunit
MGESITDGTLAAFLKKPGDRVEADEAIAQIETDKVTIDIASPASGVIQEFLVKEGDTVEPGNKVARISTSADAVSHVAPSEKAPEKPAPKPSPPAEKPKVESTKVAEKPKAPSPPPPSKQSAKEPQLPPKDRERRVPMTRLRKRVATRLKDSQNTFALLTTFNEVDMTNLMKLRSQYKDAFLEKHGVKLGLMSGFIKAAVSALQHQPVVNAVIDGDDIIYRDYVDISIAVGTSKGLVVPVIRDADKMNFADIEKTINGLAKKATEGTISIDEMAGGSFTVSNGGVYGSLISTPIINPPQSAILGMHSIVQRPMVVGGSVVPRPMMYVALTYDHRLIDGREAVYFLRRIKDVVEDPQRLLLDI

SEQ ID NO: 28210 - DNA, 1470 bp, Arabidopsis thaliana
  misc_feature (1)..(1470): Ceres Seq. ID no. 12326409
  misc_feature: MA Experiment ID: 20000171 Result: Down-regulated in Transcription
  misc_feature: MA Experiment 20000171 PARAMETER Experiment Name: At_42deg_Heat_P Parameter: Age (day) Value: 14
  misc_feature: MA Experiment 20000171 PARAMETER Experiment Name: At_42deg_Heat_P Parameter: Organism Value: A. thaliana
  misc_feature: MA Experiment 20000171 PARAMETER Experiment Name: At_42deg_Heat_P Parameter: Plant Line Value: WS
  misc_feature: MA Experiment 20000171 PARAMETER Experiment Name: At_42deg_Heat_P Parameter: Temperature (deg C) Value: 42 vs. 22
  misc_feature: MA Experiment 20000171 PARAMETER Experiment Name: At_42deg_Heat_P Parameter: Timepoint (hr) Value: 1
  misc_feature: MA Experiment 20000171 PARAMETER Experiment Name: At_42deg_Heat_P Parameter: Tissue Value: Aerial
  misc_feature: MA Experiment ID: 20000173 Result: Down-regulated in Transcription
  misc_feature: MA Experiment 20000173 PARAMETER Experiment Name: At_42deg_Heat_P Parameter: Age (day) Value: 14
  misc_feature: MA Experiment 20000173 PARAMETER Experiment Name: At_42deg_Heat_P Parameter: Organism Value: A. thaliana
  misc_feature: MA Experiment 20000173 PARAMETER Experiment Name: At_42deg_Heat_P Parameter: Plant Line Value: WS
  misc_feature: MA Experiment 20000173 PARAMETER Experiment Name: At_42deg_Heat_P Parameter: Temperature (deg C) Value: 42 vs. 22
  misc_feature: MA Experiment 20000173 PARAMETER Experiment Name: At_42deg_Heat_P Parameter: Timepoint (hr) Value: 6
  misc_feature: MA Experiment 20000173 PARAMETER Experiment Name: At_42deg_Heat_P Parameter: Tissue Value: Aerial
  misc_feature: MA Experiment ID: 20000180 Result: Up-regulated in Transcription
  misc_feature: MA Experiment 20000180 PARAMETER Experiment Name: At_Germinating_Seeds_P Parameter: Age (hr) Value: 24 vs. 0
  misc_feature: MA Experiment 20000180 PARAMETER Experiment Name: At_Germinating_Seeds_P Parameter: Tissue Value: Germinating Seeds
  misc_feature: MA Experiment ID: 20000182 Result: Down-regulated in Transcription
  misc_feature: MA Experiment 20000182 PARAMETER Experiment Name: At_2mM_SA_P Parameter: Age (day) Value: 14
  misc_feature: MA Experiment 20000182 PARAMETER Experiment Name: At_2mM_SA_P Parameter: Organism Value: A. thaliana
  misc_feature: MA Experiment 20000182 PARAMETER Experiment Name: At_2mM_SA_P Parameter: Plant Line Value: WS
  misc_feature: MA Experiment 20000182 PARAMETER Experiment Name: At_2mM_SA_P Parameter: Timepoint (hr) Value: 6
  misc_feature: MA Experiment 20000182 PARAMETER Experiment Name: At_2mM_SA_P Parameter: Tissue Value: Aerial
  misc_feature: MA Experiment 20000182 PARAMETER Experiment Name: At_2mM_SA_P Parameter: Treatment Value: 2mM SA vs. No Treatment
  misc_feature: MA Experiment ID: 20000184 Result: Up-regulated in Transcription
  misc_feature: MA Experiment 20000184 PARAMETER Experiment Name: At_Shoots__P Parameter: Age (day) Value: 7
  misc_feature: MA Experiment 20000184 PARAMETER Experiment Name: At_Shoots__P Parameter: Tissue Value: Shoots vs. Whole Plant
  misc_feature: MA Experiment ID: 20000234 Result: Up-regulated in Transcription
  misc_feature: MA Experiment 20000234 PARAMETER Experiment Name: At_Siliques_P Parameter: Age (day) Value: 21
  misc_feature: MA Experiment 20000234 PARAMETER Experiment Name: At_Siliques_P Parameter: Organism Value: A. thaliana
  misc_feature: MA Experiment 20000234 PARAMETER Experiment Name: At_Siliques_P Parameter: Plant Line Value: WS
  misc_feature: MA Experiment 20000234 PARAMETER Experiment Name: At_Siliques_P Parameter: Tissue Value: Less Than 5mm Siliques vs. Whole Plant
  misc_feature: MA Experiment ID: 20000264 Result: Up-regulated in Transcription
  misc_feature: MA Experiment 20000264 PARAMETER Experiment Name: At_Open_Flower_P Parameter: Age (day) Value: 21
  misc_feature: MA Experiment 20000264 PARAMETER Experiment Name: At_Open_Flower_P Parameter: Plant Line Value: WS
  misc_feature: MA Experiment 20000264 PARAMETER Experiment Name: At_Open_Flower_P Parameter: Tissue Value: Open Flower vs. Whole Plant
  misc_feature: MA Experiment ID: 20000265 Result: Up-regulated in Transcription
  misc_feature: MA Experiment 20000265 PARAMETER Experiment Name: At_Open_Flower_P Parameter: Age (day) Value: 21
  misc_feature: MA Experiment 20000265 PARAMETER Experiment Name: At_Open_Flower_P Parameter: Plant Line Value: WS
  misc_feature: MA Experiment 20000265 PARAMETER Experiment Name: At_Open_Flower_P Parameter: Tissue Value: Closed Flower vs. Whole Plant
  misc_feature: MA Experiment ID: 20000286 Result: Up-regulated in Transcription
  misc_feature: MA Experiment 20000286 PARAMETER Experiment Name: At_Open_Flower_P Parameter: Age (day) Value: 21
  misc_feature: MA Experiment 20000286 PARAMETER Experiment Name: At_Open_Flower_P Parameter: Plant Line Value: WS
  misc_feature: MA Experiment 20000286 PARAMETER Experiment Name: At_Open_Flower_P Parameter: Tissue Value: Half Open vs. Whole Plant
  misc_feature: MA Experiment ID: 20000436 Result: Down-regulated in Transcription
  misc_feature: MA Experiment 20000436 PARAMETER Experiment Name: At_Drought_P Parameter: Age (day) Value: 7
  misc_feature: MA Experiment 20000436 PARAMETER Experiment Name: At_Drought_P Parameter: Organism Value: A. thaliana
  misc_feature: MA Experiment 20000436 PARAMETER Experiment Name: At_Drought_P Parameter: Plant Line Value: WS
  misc_feature: MA Experiment 20000436 PARAMETER Experiment Name: At_Drought_P Parameter: Timepoint (hr) Value: 12
  misc_feature: MA Experiment 20000436 PARAMETER Experiment Name: At_Drought_P Parameter: Tissue Value: Whole Plant
  misc_feature: MA Experiment 20000436 PARAMETER Experiment Name: At_Drought_P Parameter: Treatment Value: Drought vs. No Drought
  misc_feature: MA Experiment ID: 20000437 Result: Down-regulated in Transcription
  misc_feature: MA Experiment 20000437 PARAMETER Experiment Name: At_Drought_P Parameter: Age (day) Value: 8
  misc_feature: MA Experiment 20000437 PARAMETER Experiment Name: At_Drought_P Parameter: Organism Value: A. thaliana
  misc_feature: MA Experiment 20000437 PARAMETER Experiment Name: At_Drought_P Parameter: Plant Line Value: WS
  misc_feature: MA Experiment 20000437 PARAMETER Experiment Name: At_Drought_P Parameter: Timepoint (hr) Value: 24
  misc_feature: MA Experiment 20000437 PARAMETER Experiment Name: At_Drought_P Parameter: Tissue Value: Whole Plant
  misc_feature: MA Experiment 20000437 PARAMETER Experiment Name: At_Drought_P Parameter: Treatment Value: Drought vs. No Drought
  misc_feature: MA Experiment ID: 20000438 Result: Up-regulated in Transcription
  misc_feature: MA Experiment 20000438 PARAMETER Experiment Name: At_Shoots__P Parameter: Age (day) Value: 14
  misc_feature: MA Experiment 20000438 PARAMETER Experiment Name: At_Shoots__P Parameter: Tissue Value: Shoots vs. Whole Plant
  misc_feature: MA Experiment ID: 20000495 Result: Up-regulated in Transcription
  misc_feature: MA Experiment 20000495 PARAMETER Experiment Name: At_Guard_Cells_P Parameter: Harvest Date Value: 8/2/2002
  misc_feature: MA Experiment 20000495 PARAMETER Experiment Name: At_Guard_Cells_P Parameter: Organism Value: A. thaliana
  misc_feature: MA Experiment 20000495 PARAMETER Experiment Name: At_Guard_Cells_P Parameter: Tissue Value: Guard Cells vs. Leaves
  misc_feature: MA Experiment ID: 20001248 Result: Down-regulated in Transcription
  misc_feature: MA Experiment 20001248 PARAMETER Experiment Name: At_Far-red-induction_P Parameter: Age (day) Value: 7
  misc_feature: MA Experiment 20001248 PARAMETER Experiment Name: At_Far-red-induction_P Parameter: Light Value: Far-red vs. White
  misc_feature: MA Experiment 20001248 PARAMETER Experiment Name: At_Far-red-induction_P Parameter: Organism Value: A. thaliana
  misc_feature: MA Experiment 20001248 PARAMETER Experiment Name: At_Far-red-induction_P Parameter: Plant Line Value: Columbia
  misc_feature: MA Experiment 20001248 PARAMETER Experiment Name: At_Far-red-induction_P Parameter: Timepoint (hr) Value: 4
  misc_feature: MA Experiment 20001248 PARAMETER Experiment Name: At_Far-red-induction_P Parameter: Tissue Value: Whole Plant
  misc_feature: MA Experiment ID: 20001554 Result: Down-regulated in Transcription
  misc_feature: MA Experiment 20001554 PARAMETER Experiment Name: At_Drought_Soil_Dry_P Parameter: Age (day) Value: 21
  misc_feature: MA Experiment 20001554 PARAMETER Experiment Name: At_Drought_Soil_Dry_P Parameter: Organism Value: A. thaliana
  misc_feature: MA Experiment 20001554 PARAMETER Experiment Name: At_Drought_Soil_Dry_P Parameter: Plant Line Value: WS
  misc_feature: MA Experiment 20001554 PARAMETER Experiment Name: At_Drought_Soil_Dry_P Parameter: Post Timepoint (hr) Value: None
  misc_feature: MA Experiment 20001554 PARAMETER Experiment Name: At_Drought_Soil_Dry_P Parameter: Post-Treatment Value: None
  misc_feature: MA Experiment 20001554 PARAMETER Experiment Name: At_Drought_Soil_Dry_P Parameter: Timepoint (day) Value: 7
  misc_feature: MA Experiment 20001554 PARAMETER Experiment Name: At_Drought_Soil_Dry_P Parameter: Treatment Value: Drought vs. No Drought
  misc_feature: MA Experiment ID: 20001555 Result: Down-regulated in Transcription
  misc_feature: MA Experiment 20001555 PARAMETER Experiment Name: At_Drought_Soil_Dry_P Parameter: Age (day) Value: 24
  misc_feature: MA Experiment 20001555 PARAMETER Experiment Name: At_Drought_Soil_Dry_P Parameter: Organism Value: A. thaliana
  misc_feature: MA Experiment 20001555 PARAMETER Experiment Name: At_Drought_Soil_Dry_P Parameter: Plant Line Value: WS
  misc_feature: MA Experiment 20001555 PARAMETER Experiment Name: At_Drought_Soil_Dry_P Parameter: Post Timepoint (hr) Value: None
  misc_feature: MA Experiment 20001555 PARAMETER Experiment Name: At_Drought_Soil_Dry_P Parameter: Post-Treatment Value: None
  misc_feature: MA Experiment 20001555 PARAMETER Experiment Name: At_Drought_Soil_Dry_P Parameter: Timepoint (day) Value: 10
  misc_feature: MA Experiment 20001555 PARAMETER Experiment Name: At_Drought_Soil_Dry_P Parameter: Treatment Value: Drought vs. No Drought
  misc_feature: MA Experiment ID: 20001556 Result: Down-regulated in Transcription
  misc_feature: MA Experiment 20001556 PARAMETER Experiment Name: At_Drought_Soil_Dry_P Parameter: Age (day) Value: 26
  misc_feature: MA Experiment 20001556 PARAMETER Experiment Name: At_Drought_Soil_Dry_P Parameter: Organism Value: A. thaliana
  misc_feature: MA Experiment 20001556 PARAMETER Experiment Name: At_Drought_Soil_Dry_P Parameter: Plant Line Value: WS
  misc_feature: MA Experiment 20001556 PARAMETER Experiment Name: At_Drought_Soil_Dry_P Parameter: Post Timepoint (hr) Value: None
  misc_feature: MA Experiment 20001556 PARAMETER Experiment Name: At_Drought_Soil_Dry_P Parameter: Post-Treatment Value: None
  misc_feature: MA Experiment 20001556 PARAMETER Experiment Name: At_Drought_Soil_Dry_P Parameter: Timepoint (day) Value: 12
  misc_feature: MA Experiment 20001556 PARAMETER Experiment Name: At_Drought_Soil_Dry_P Parameter: Treatment Value: Drought vs. No Drought
  misc_feature: MA Experiment ID: 20001558 Result: Up-regulated in Transcription
  misc_feature: MA Experiment 20001558 PARAMETER Experiment Name: At_Drought_Soil_Dry_P Parameter: Age (day) Value: 27
  misc_feature: MA Experiment 20001558 PARAMETER Experiment Name: At_Drought_Soil_Dry_P Parameter: Organism Value: A. thaliana
  misc_feature: MA Experiment 20001558 PARAMETER Experiment Name: At_Drought_Soil_Dry_P Parameter: Plant Line Value: WS
  misc_feature: MA Experiment 20001558 PARAMETER Experiment Name: At_Drought_Soil_Dry_P Parameter: Post Timepoint (hr) Value: 6
  misc_feature: MA Experiment 20001558 PARAMETER Experiment Name: At_Drought_Soil_Dry_P Parameter: Post-Treatment Value: Re-Water vs. No Drought
  misc_feature: MA Experiment 20001558 PARAMETER Experiment Name: At_Drought_Soil_Dry_P Parameter: Timepoint (day) Value: 13
  misc_feature: MA Experiment 20001558 PARAMETER Experiment Name: At_Drought_Soil_Dry_P Parameter: Treatment Value: Drought vs. No Drought
  misc_feature: MA Experiment ID: 20001559 Result: Down-regulated in Transcription
  misc_feature: MA Experiment 20001559 PARAMETER Experiment Name: At_Drought_Soil_Dry_P Parameter: Age (day) Value: 28
  misc_feature: MA Experiment 20001559 PARAMETER Experiment Name: At_Drought_Soil_Dry_P Parameter: Organism Value: A. thaliana
  misc_feature: MA Experiment 20001559 PARAMETER Experiment Name: At_Drought_Soil_Dry_P Parameter: Plant Line Value: WS
  misc_feature: MA Experiment 20001559 PARAMETER Experiment Name: At_Drought_Soil_Dry_P Parameter: Post Timepoint (hr) Value: 29
  misc_feature: MA Experiment 20001559 PARAMETER Experiment Name: At_Drought_Soil_Dry_P Parameter: Post-Treatment Value: Re-Water vs. No Drought
  misc_feature: MA Experiment 20001559 PARAMETER Experiment Name: At_Drought_Soil_Dry_P Parameter: Timepoint (day) Value: 14
  misc_feature: MA Experiment 20001559 PARAMETER Experiment Name: At_Drought_Soil_Dry_P Parameter: Treatment Value: Drought vs. No Drought
  misc_feature: MA Experiment ID: 20001560 Result: Up-regulated in Transcription
  misc_feature: MA Experiment 20001560 PARAMETER Experiment Name: At_Drought_Soil_Dry_P Parameter: Age (day) Value: 28
  misc_feature: MA Experiment 20001560 PARAMETER Experiment Name: At_Drought_Soil_Dry_P Parameter: Organism Value: A. thaliana
  misc_feature: MA Experiment 20001560 PARAMETER Experiment Name: At_Drought_Soil_Dry_P Parameter: Plant Line Value: WS
  misc_feature: MA Experiment 20001560 PARAMETER Experiment Name: At_Drought_Soil_Dry_P Parameter: Post Timepoint (hr) Value: None
  misc_feature: MA Experiment 20001560 PARAMETER Experiment Name: At_Drought_Soil_Dry_P Parameter: Post-Treatment Value: None
  misc_feature: MA Experiment 20001560 PARAMETER Experiment Name: At_Drought_Soil_Dry_P Parameter: Timepoint (day) Value: 14
  misc_feature: MA Experiment 20001560 PARAMETER Experiment Name: At_Drought_Soil_Dry_P Parameter: Treatment Value: Drought vs. No Drought
  misc_feature: MA Experiment ID: 20001770 Result: Up-regulated in Transcription
  misc_feature: MA Experiment 20001770 PARAMETER Experiment Name: At_Far-red-enriched-adult_P Parameter: Age (day) Value: 28
  misc_feature: MA Experiment 20001770 PARAMETER Experiment Name: At_Far-red-enriched-adult_P Parameter: Light Value: Far-red enriched vs. White
  misc_feature: MA Experiment 20001770 PARAMETER Experiment Name: At_Far-red-enriched-adult_P Parameter: Organism Value: A. thaliana
  misc_feature: MA Experiment 20001770 PARAMETER Experiment Name: At_Far-red-enriched-adult_P Parameter: Plant Line Value: Columbia
  misc_feature: MA Experiment 20001770 PARAMETER Experiment Name: At_Far-red-enriched-adult_P Parameter: Timepoint (hr) Value: 8
  misc_feature: MA Experiment 20001770 PARAMETER Experiment Name: At_Far-red-enriched-adult_P Parameter: Tissue Value: Aerial
  misc_feature: MA Experiment ID: 20001904 Result: Down-regulated in Transcription
  misc_feature: MA Experiment 20001904 PARAMETER Experiment Name: At_Drought_Reproduction_P Parameter: Age (day) Value: 37
  misc_feature: MA Experiment 20001904 PARAMETER Experiment Name: At_Drought_Reproduction_P Parameter: Organism Value: A. thaliana
  misc_feature: MA Experiment 20001904 PARAMETER Experiment Name: At_Drought_Reproduction_P Parameter: Plant Line Value: WS
  misc_feature: MA Experiment 20001904 PARAMETER Experiment Name: At_Drought_Reproduction_P Parameter: Timepoint (day) Value: 7
  misc_feature: MA Experiment 20001904 PARAMETER Experiment Name: At_Drought_Reproduction_P Parameter: Tissue Value: Rosettes
  misc_feature: MA Experiment 20001904 PARAMETER Experiment Name: At_Drought_Reproduction_P Parameter: Treatment Value: Drought vs. No Drought
  misc_feature: MA Experiment ID: 20001911 Result: Down-regulated in Transcription
  misc_feature: MA Experiment 20001911 PARAMETER Experiment Name: At_Drought_Reproduction_P Parameter: Age (day) Value: 40
  misc_feature: MA Experiment 20001911 PARAMETER Experiment Name: At_Drought_Reproduction_P Parameter: Organism Value: A. thaliana
  misc_feature: MA Experiment 20001911 PARAMETER Experiment Name: At_Drought_Reproduction_P Parameter: Plant Line Value: WS
  misc_feature: MA Experiment 20001911 PARAMETER Experiment Name: At_Drought_Reproduction_P Parameter: Timepoint (day) Value: 10
  misc_feature: MA Experiment 20001911 PARAMETER Experiment Name: At_Drought_Reproduction_P Parameter: Tissue Value: Flowers
  misc_feature: MA Experiment 20001911 PARAMETER Experiment Name: At_Drought_Reproduction_P Parameter: Treatment Value: Drought vs. No Drought
acaaacactagaaaccacaaagacaaaatcaaggtcttaaacaatgagatcccatctcttgattttgttaatctctctcttaatcttgaaatctgaatccataaactgcaatgaaaagagccattcctcagatctaagagtgttccacattaacagtctatgttctccattcaaaacttctgtttcatgggcagatacacttcttcaagataaggctcgtttcctatacttgtcaagcctcgctggcgttaggaaatcatcagttccaatcgcctctggtcgggccatcgttcagagcccgacttacatcgtgagggctaacatcgggacaccggctcagcccatgctcgtggctcttgacactagcaatgacgctgcttggattccttgttctggctgcgttggctgttcttcctctgttctctttgacccttccaagtcaagctcctctcgtactcttcaatgcgaagctcctcagtgtaaacaggctccaaatccaagttgcacagtaagcaaatcatgtggtttcaacatgacctacggtggttcaaccatcgaagcatatctgacacaagacacactaacattggccagtgacgtcatcccaaactacacctttgggtgcatcaacaaagctagtggaacatcgttgccagcgcaaggactcatgggcttaggtcgtggtccattgtctttaatctcacagtcacaaaatctttatcagtctacattctcgtattgcttgcctaatagtaagtccagcaatttctccggatcactaagattgggacctaagaaccaaccgatccggatcaagaccactccattgttaaagaaccctagaagatcatcgctttactatgttaacttggttgggattcgtgtcggaaacaaaattgtggatattcctacaagtgcactcgcctttgatccggccaccggagccggcaccatctttgactcggggacggtctacacaaggctagtcgaaccagcttacgtggcggtgagaaacgagttcaggagacgtgttaagaacgcaaacgcaacttcactaggaggtttcgacacatgctactccggctccgtcgtgttcccgtcggtgacgtttatgttcgccggaatgaacgtgactctgcctccagacaaccttctcatccacagctccgcaggtaacctcagctgcctcgccatggctgcagctccggtcaacgttaactctgtccttaacgtcatcgctagtatgcagcaacagaaccaccgagttctcatcgacgttccaaattccaggctcggaatttcccgtgaaacttgcacctaagttttatcgatttgtatttttgttttcggtcgatttcgtaatgcgttttgaacttttgaattttggaaactatataagttaatgatttttgttaattctcaaacgattgtaaaatctttcgtatgattttctttcgatgttctctgttc

SEQ ID NO: 28211 - protein, 425 aa, Arabidopsis thaliana
  peptide (1)..(425): Ceres Seq. ID no. 12326410
  misc_feature (46)..(422): Pfam Name: Eukaryotic aspartyl protease Pfam Description: Eukaryotic aspartyl protease
  misc_feature (11)..(424): Homolog of NCBI NO: 21594980 NR Description: chloroplast nucleoid DNA binding protein,
  misc_feature (75)..(424): Homolog of NCBI NO: 15290061 NR Description: nucleoid DNA-binding protein cnd41-like protein
  misc_feature (11)..(424): Homolog of NCBI NO: 15223368 NR Description: chloroplast nucleoid DNA binding protein, putative
  misc_feature (62)..(424): Homolog of NCBI NO: 21450872 NR Description: unknown protein [Arabidopsis thaliana]
  misc_feature (28)..(424): Homolog of NCBI NO: 18391062 NR Description: expressed protein
  misc_feature (74)..(425): Homolog of NCBI NO: 20161865 NR Description: putative nucleoid DNA-binding-like protein
  misc_feature (31)..(425): Homolog of NCBI NO: 34899068 NR Description: similar to nucleoid DNA-binding-like protein
  misc_feature (5)..(425): Homolog of NCBI NO: 15240680 NR Description: nucleoid DNA-binding-like protein
  misc_feature (1)..(425): Homolog of NCBI NO: 21617933 NR Description: nucleoid DNA-binding-like protein [Arabidopsis
  misc_feature (1)..(425): Homolog of NCBI NO: 15232503 NR Description: nucleoid DNA-binding - like protein
MRSHLLILLISLLILKSESINCNEKSHSSDLRVFHINSLCSPFKTSVSWADTLLQDKARFLYLSSLAGVRKSSVPIASGRAIVQSPTYIVRANIGTPAQPMLVALDTSNDAAWIPCSGCVGCSSSVLFDPSKSSSSRTLQCEAPQCKQAPNPSCTVSKSCGFNMTYGGSTIEAYLTQDTLTLASDVIPNYTFGCINKASGTSLPAQGLMGLGRGPLSLISQSQNLYQSTFSYCLPNSKSSNFSGSLRLGPKNQPIRIKTTPLLKNPRRSSLYYVNLVGIRVGNKIVDIPTSALAFDPATGAGTIFDSGTVYTRLVEPAYVAVRNEFRRRVKNANATSLGGFDTCYSGSVVFPSVTFMFAGMNVTLPPDNLLIHSSAGNLSCLAMAAAPVNVNSVLNVIASMQQQNHRVLIDVPNSRLGISRETCT

SEQ ID NO: 28212 - protein, 325 aa, Arabidopsis thaliana
  peptide (1)..(325): Ceres Seq. ID no. 12326411
  misc_feature (1)..(322): Pfam Name: Eukaryotic aspartyl protease Pfam Description: Eukaryotic aspartyl protease
  misc_feature (1)..(324): Homolog of NCBI NO: 21594980 NR Description: chloroplast nucleoid DNA binding protein,
  misc_feature (1)..(324): Homolog of NCBI NO: 15290061 NR Description: nucleoid DNA-binding protein cnd41-like protein
  misc_feature (1)..(324): Homolog of NCBI NO: 15223368 NR Description: chloroplast nucleoid DNA binding protein, putative
  misc_feature (1)..(324): Homolog of NCBI NO: 21450872 NR Description: unknown protein [Arabidopsis thaliana]
  misc_feature (1)..(324): Homolog of NCBI NO: 18391062 NR Description: expressed protein
  misc_feature (1)..(325): Homolog of NCBI NO: 20161865 NR Description: putative nucleoid DNA-binding-like protein
  misc_feature (1)..(325): Homolog of NCBI NO: 34899068 NR Description: similar to nucleoid DNA-binding-like protein
  misc_feature (1)..(325): Homolog of NCBI NO: 15240680 NR Description: nucleoid DNA-binding-like protein
  misc_feature (1)..(325): Homolog of NCBI NO: 21617933 NR Description: nucleoid DNA-binding-like protein [Arabidopsis
  misc_feature (1)..(325): Homolog of NCBI NO: 15232503 NR Description: nucleoid DNA-binding - like protein
MLVALDTSNDAAWIPCSGCVGCSSSVLFDPSKSSSSRTLQCEAPQCKQAPNPSCTVSKSCGFNMTYGGSTIEAYLTQDTLTLASDVIPNYTFGCINKASGTSLPAQGLMGLGRGPLSLISQSQNLYQSTFSYCLPNSKSSNFSGSLRLGPKNQPIRIKTTPLLKNPRRSSLYYVNLVGIRVGNKIVDIPTSALAFDPATGAGTIFDSGTVYTRLVEPAYVAVRNEFRRRVKNANATSLGGFDTCYSGSVVFPSVTFMFAGMNVTLPPDNLLIHSSAGNLSCLAMAAAPVNVNSVLNVIASMQQQNHRVLIDVPNSRLGISRETCT

SEQ ID NO: 28213 - protein, 262 aa, Arabidopsis thaliana
  peptide (1)..(262): Ceres Seq. ID no. 12326412
  misc_feature (1)..(259): Pfam Name: Eukaryotic aspartyl protease Pfam Description: Eukaryotic aspartyl protease
  misc_feature (1)..(261): Homolog of NCBI NO: 21594980 NR Description: chloroplast nucleoid DNA binding protein,
  misc_feature (1)..(261): Homolog of NCBI NO: 15290061 NR Description: nucleoid DNA-binding protein cnd41-like protein
  misc_feature (1)..(261): Homolog of NCBI NO: 15223368 NR Description: chloroplast nucleoid DNA binding protein, putative
  misc_feature (1)..(261): Homolog of NCBI NO: 21450872 NR Description: unknown protein [Arabidopsis thaliana]
  misc_feature (1)..(261): Homolog of NCBI NO: 18391062 NR Description: expressed protein
  misc_feature (1)..(262): Homolog of NCBI NO: 20161865 NR Description: putative nucleoid DNA-binding-like protein
  misc_feature (1)..(262): Homolog of NCBI NO: 34899068 NR Description: similar to nucleoid DNA-binding-like protein
  misc_feature (1)..(262): Homolog of NCBI NO: 15240680 NR Description: nucleoid DNA-binding-like protein
  misc_feature (1)..(262): Homolog of NCBI NO: 21617933 NR Description: nucleoid DNA-binding-like protein [Arabidopsis
  misc_feature (1)..(262): Homolog of NCBI NO: 15232503 NR Description: nucleoid DNA-binding - like protein
MTYGGSTIEAYLTQDTLTLASDVIPNYTFGCINKASGTSLPAQGLMGLGRGPLSLISQSQNLYQSTFSYCLPNSKSSNFSGSLRLGPKNQPIRIKTTPLLKNPRRSSLYYVNLVGIRVGNKIVDIPTSALAFDPATGAGTIFDSGTVYTRLVEPAYVAVRNEFRRRVKNANATSLGGFDTCYSGSVVFPSVTFMFAGMNVTLPPDNLLIHSSAGNLSCLAMAAAPVNVNSVLNVIASMQQQNHRVLIDVPNSRLGISRETCT

SEQ ID NO: 28214 - DNA, 1358 bp, Arabidopsis thaliana
  misc_feature (1)..(1358): Ceres Seq. ID no. 12482532
  misc_feature: MA Experiment ID: 20000169 Result: Up-regulated in Transcription
  misc_feature: MA Experiment 20000169 PARAMETER Experiment Name: At_100uM_ABA_P Parameter: Age (day) Value: 14
  misc_feature: MA Experiment 20000169 PARAMETER Experiment Name: At_100uM_ABA_P Parameter: Organism Value: A. thaliana
  misc_feature: MA Experiment 20000169 PARAMETER Experiment Name: At_100uM_ABA_P Parameter: Plant Line Value: WS
  misc_feature: MA Experiment 20000169 PARAMETER Experiment Name: At_100uM_ABA_P Parameter: Timepoint (hr) Value: 6
  misc_feature: MA Experiment 20000169 PARAMETER Experiment Name: At_100uM_ABA_P Parameter: Tissue Value: Aerial
  misc_feature: MA Experiment 20000169 PARAMETER Experiment Name: At_100uM_ABA_P Parameter: Treatment Value: 100uM ABA vs. No Treatment
  misc_feature: MA Experiment ID: 20000179 Result: Up-regulated in Transcription
  misc_feature: MA Experiment 20000179 PARAMETER Experiment Name: At_Germinating_Seeds_P Parameter: Age (hr) Value: 6 vs. 0
  misc_feature: MA Experiment 20000179 PARAMETER Experiment Name: At_Germinating_Seeds_P Parameter: Tissue Value: Germinating Seeds
  misc_feature: MA Experiment ID: 20000180 Result: Up-regulated in Transcription
  misc_feature: MA Experiment 20000180 PARAMETER Experiment Name: At_Germinating_Seeds_P Parameter: Age (hr) Value: 24 vs. 0
  misc_feature: MA Experiment 20000180 PARAMETER Experiment Name: At_Germinating_Seeds_P Parameter: Tissue Value: Germinating Seeds
  misc_feature: MA Experiment ID: 20000182 Result: Up-regulated in Transcription
  misc_feature: MA Experiment 20000182 PARAMETER Experiment Name: At_2mM_SA_P Parameter: Age (day) Value: 14
  misc_feature: MA Experiment 20000182 PARAMETER Experiment Name: At_2mM_SA_P Parameter: Organism Value: A. thaliana
  misc_feature: MA Experiment 20000182 PARAMETER Experiment Name: At_2mM_SA_P Parameter: Plant Line Value: WS
  misc_feature: MA Experiment 20000182 PARAMETER Experiment Name: At_2mM_SA_P Parameter: Timepoint (hr) Value: 6
  misc_feature: MA Experiment 20000182 PARAMETER Experiment Name: At_2mM_SA_P Parameter: Tissue Value: Aerial
  misc_feature: MA Experiment 20000182 PARAMETER Experiment Name: At_2mM_SA_P Parameter: Treatment Value: 2mM SA vs. No Treatment
  misc_feature: MA Experiment ID: 20000234 Result: Down-regulated in Transcription
  misc_feature: MA Experiment 20000234 PARAMETER Experiment Name: At_Siliques_P Parameter: Age (day) Value: 21
  misc_feature: MA Experiment 20000234 PARAMETER Experiment Name: At_Siliques_P Parameter: Organism Value: A. thaliana
  misc_feature: MA Experiment 20000234 PARAMETER Experiment Name: At_Siliques_P Parameter: Plant Line Value: WS
  misc_feature: MA Experiment 20000234 PARAMETER Experiment Name: At_Siliques_P Parameter: Tissue Value: Less Than 5mm Siliques vs. Whole Plant
  misc_feature: MA Experiment ID: 20000286 Result: Down-regulated in Transcription
  misc_feature: MA Experiment 20000286 PARAMETER Experiment Name: At_Open_Flower_P Parameter: Age (day) Value: 21
  misc_feature: MA Experiment 20000286 PARAMETER Experiment Name: At_Open_Flower_P Parameter: Plant Line Value: WS
  misc_feature: MA Experiment 20000286 PARAMETER Experiment Name: At_Open_Flower_P Parameter: Tissue Value: Half Open vs. Whole Plant
  misc_feature: MA Experiment ID: 20000453 Result: Up-regulated in Transcription
  misc_feature: MA Experiment 20000453 PARAMETER Experiment Name: At_100uM_ABA_P Parameter: Age (day) Value: 15
  misc_feature: MA Experiment 20000453 PARAMETER Experiment Name: At_100uM_ABA_P Parameter: Organism Value: A. thaliana
  misc_feature: MA Experiment 20000453 PARAMETER Experiment Name: At_100uM_ABA_P Parameter: Plant Line Value: WS
  misc_feature: MA Experiment 20000453 PARAMETER Experiment Name: At_100uM_ABA_P Parameter: Timepoint (hr) Value: 24
  misc_feature: MA Experiment 20000453 PARAMETER Experiment Name: At_100uM_ABA_P Parameter: Tissue Value: Aerial
  misc_feature: MA Experiment 20000453 PARAMETER Experiment Name: At_100uM_ABA_P Parameter: Treatment Value: 100uM ABA vs. No Treatment
  misc_feature: MA Experiment ID: 20000709 Result: Down-regulated in Transcription
  misc_feature: MA Experiment 20000709 PARAMETER Experiment Name: At_15mM_NH4NO3_L-to-H_P Parameter: Age (hr) Value: 14
  misc_feature: MA Experiment 20000709 PARAMETER Experiment Name: At_15mM_NH4NO3_L-to-H_P Parameter: Organism Value: A. thaliana
  misc_feature: MA Experiment 20000709 PARAMETER Experiment Name: At_15mM_NH4NO3_L-to-H_P Parameter: Plant Line Value: WS
  misc_feature: MA Experiment 20000709 PARAMETER Experiment Name: At_15mM_NH4NO3_L-to-H_P Parameter: Timepoint (hr) Value: 4
  misc_feature: MA Experiment 20000709 PARAMETER Experiment Name: At_15mM_NH4NO3_L-to-H_P Parameter: Tissue Value: Aerial
  misc_feature: MA Experiment 20000709 PARAMETER Experiment Name: At_15mM_NH4NO3_L-to-H_P Parameter: Treatment Value: 15mM NH4NO3 vs. 30mM Mannitol
  misc_feature: MA Experiment ID: 20000794 Result: Up-regulated in Transcription
  misc_feature: MA Experiment 20000794 PARAMETER Experiment Name: At_Petals_P Parameter: Age (day) Value: 23-25 days
  misc_feature: MA Experiment 20000794 PARAMETER Experiment Name: At_Petals_P Parameter: Plant Line Value: WS
  misc_feature: MA Experiment 20000794 PARAMETER Experiment Name: At_Petals_P Parameter: Tissue Value: Petals vs. Whole plant
  misc_feature: MA Experiment ID: 20001554 Result: Up-regulated in Transcription
  misc_feature: MA Experiment 20001554 PARAMETER Experiment Name: At_Drought_Soil_Dry_P Parameter: Age (day) Value: 21
  misc_feature: MA Experiment 20001554 PARAMETER Experiment Name: At_Drought_Soil_Dry_P Parameter: Organism Value: A. thaliana
  misc_feature: MA Experiment 20001554 PARAMETER Experiment Name: At_Drought_Soil_Dry_P Parameter: Plant Line Value: WS
  misc_feature: MA Experiment 20001554 PARAMETER Experiment Name: At_Drought_Soil_Dry_P Parameter: Post Timepoint (hr) Value: None
  misc_feature: MA Experiment 20001554 PARAMETER Experiment Name: At_Drought_Soil_Dry_P Parameter: Post-Treatment Value: None
  misc_feature: MA Experiment 20001554 PARAMETER Experiment Name: At_Drought_Soil_Dry_P Parameter: Timepoint (day) Value: 7
  misc_feature: MA Experiment 20001554 PARAMETER Experiment Name: At_Drought_Soil_Dry_P Parameter: Treatment Value: Drought vs. No Drought
  misc_feature: MA Experiment ID: 20001557 Result: Down-regulated in Transcription
  misc_feature: MA Experiment 20001557 PARAMETER Experiment Name: At_Drought_Soil_Dry_P Parameter: Age (day) Value: 27
  misc_feature: MA Experiment 20001557 PARAMETER Experiment Name: At_Drought_Soil_Dry_P Parameter: Organism Value: A. thaliana
  misc_feature: MA Experiment 20001557 PARAMETER Experiment Name: At_Drought_Soil_Dry_P Parameter: Plant Line Value: WS
  misc_feature: MA Experiment 20001557 PARAMETER Experiment Name: At_Drought_Soil_Dry_P Parameter: Post Timepoint (hr) Value: 3
  misc_feature: MA Experiment 20001557 PARAMETER Experiment Name: At_Drought_Soil_Dry_P Parameter: Post-Treatment Value: Re-Water vs. No Drought
  misc_feature: MA Experiment 20001557 PARAMETER Experiment Name: At_Drought_Soil_Dry_P Parameter: Timepoint (day) Value: 13
  misc_feature: MA Experiment 20001557 PARAMETER Experiment Name: At_Drought_Soil_Dry_P Parameter: Treatment Value: Drought vs. No Drought
  misc_feature: MA Experiment ID: 20001558 Result: Down-regulated in Transcription
  misc_feature: MA Experiment 20001558 PARAMETER Experiment Name: At_Drought_Soil_Dry_P Parameter: Age (day) Value: 27
  misc_feature: MA Experiment 20001558 PARAMETER Experiment Name: At_Drought_Soil_Dry_P Parameter: Organism Value: A. thaliana
  misc_feature: MA Experiment 20001558 PARAMETER Experiment Name: At_Drought_Soil_Dry_P Parameter: Plant Line Value: WS
  misc_feature: MA Experiment 20001558 PARAMETER Experiment Name: At_Drought_Soil_Dry_P Parameter: Post Timepoint (hr) Value: 6
  misc_feature: MA Experiment 20001558 PARAMETER Experiment Name: At_Drought_Soil_Dry_P Parameter: Post-Treatment Value: Re-Water vs. No Drought
  misc_feature: MA Experiment 20001558 PARAMETER Experiment Name: At_Drought_Soil_Dry_P Parameter: Timepoint (day) Value: 13
  misc_feature: MA Experiment 20001558 PARAMETER Experiment Name: At_Drought_Soil_Dry_P Parameter: Treatment Value: Drought vs. No Drought
  misc_feature: MA Experiment ID: 20001560 Result: Down-regulated in Transcription
  misc_feature: MA Experiment 20001560 PARAMETER Experiment Name: At_Drought_Soil_Dry_P Parameter: Age (day) Value: 28
  misc_feature: MA Experiment 20001560 PARAMETER Experiment Name: At_Drought_Soil_Dry_P Parameter: Organism Value: A. thaliana
  misc_feature: MA Experiment 20001560 PARAMETER Experiment Name: At_Drought_Soil_Dry_P Parameter: Plant Line Value: WS
  misc_feature: MA Experiment 20001560 PARAMETER Experiment Name: At_Drought_Soil_Dry_P Parameter: Post Timepoint (hr) Value: None
  misc_feature: MA Experiment 20001560 PARAMETER Experiment Name: At_Drought_Soil_Dry_P Parameter: Post-Treatment Value: None
  misc_feature: MA Experiment 20001560 PARAMETER Experiment Name: At_Drought_Soil_Dry_P Parameter: Timepoint (day) Value: 14
  misc_feature: MA Experiment 20001560 PARAMETER Experiment Name: At_Drought_Soil_Dry_P Parameter: Treatment Value: Drought vs. No Drought
acaatctatcgagctaaaacactgaagcagacattagcgttgagaaaaaaaaaaaaagtaagaacgagagagagaaagccatgtctgcgaaaacaatcctatcatcagtagttttggtggttctcgtcgccgcatcagcagcggctaatatcggattcgatgagtcaaacccgatccgaatggtctccgatggtctccgggaggtagaagaatctgtttcccagatcttaggtcaatctcgtcacgttctctctttcgctcgcttcactcaccgatatggtaaaaagtatcagaacgtggaggagatgaagcttcgattctcgattttcaaggagaatcttgatttgatcagatccaccaacaagaaaggcttatcttacaaactcggtgttaatcaatttgctgatttgacatggcaagagtttcaaaggaccaagcttggtgctgctcagaactgctctgccactttaaagggcagccacaaggtcacagaagcagctcttcctgaaacaaaagactggagagaagatggtatcgttagtccggtcaaagatcagggaggttgtggatcttgctggacattcagcacaactggagctcttgaggcagcttaccatcaggcatttggaaaaggaatatctctctctgagcaacagcttgtggattgtgctggagctttcaataactatggttgcaatggtggccttccttctcaagcctttgaatacataaaatccaacggtggcctcgacacagagaaagcttatccttataccggtaaagatgaaacctgcaaattttcagctgaaaacgttggtgtacaagtcctcaactcagtcaacattactctgggtgctgaagatgaactgaagcatgcggttggattggtacggccagtaagcatagcatttgaggttatacactcgttccggctttacaagagtggagtttacactgatagtcactgtggaagtactccaatggatgtgaaccacgcggttttggccgttggttatggagttgaagacggtgtaccatattggcttattaagaactcatggggagcggattggggcgacaaaggttacttcaagatggagatggggaagaacatgtgtggtattgctacatgtgcatcataccccgttgtggcttgagatgatcagcgaatgtggttggtcaattatcaaattacgaaatgttcacgtatttattggattaagacattacgtaaaagttgggacttgggaatgcatatggtttatgcttgttgtaacataaaaaggtctgttaatatgtacaaaataaagccaaaactatagacgacaaatttataatattttcatgttaaatcaaat

SEQ ID NO: 28215 - protein, 358 aa, Arabidopsis thaliana; identical to SEQ ID NO: 21554
  peptide (1)..(358): Ceres Seq. ID no. 12482533
  misc_feature (141)..(356): Pfam Name: Papain family cysteine protease Pfam Description: Papain family cysteine protease
  misc_feature (9)..(358): Homolog of NCBI NO: 14422331 NR Description: early leaf senescence abundant cysteine protease
  misc_feature (9)..(358): Homolog of NCBI NO: 7435779 NR Description: cysteine proteinase (EC 3.4.22.-) - garden pea
  misc_feature (6)..(358): Homolog of NCBI NO: 2677828 NR Description: cysteine protease [Prunus armeniaca]
  misc_feature (6)..(358): Homolog of NCBI NO: 28192371 NR Description: NTCP23-like cysteine proteinase [Nicotiana
  misc_feature (6)..(358): Homolog of NCBI NO: 8347420 NR Description: cysteine protease [Nicotiana tabacum]
  misc_feature (1)..(346): Homolog of NCBI NO: 11265612 NR Description: cysteine proteinase (EC 3.4.22.-) F18N11.70
  misc_feature (1)..(358): Homolog of NCBI NO: 18407961 NR Description: cysteine proteinase AALP, putative
  misc_feature (1)..(358): Homolog of NCBI NO: 18141289 NR Description: senescence-associated cysteine protease [Brassica
  misc_feature (1)..(358): Homolog of NCBI NO: 23397070 NR Description: putative cysteine proteinase AALP [Arabidopsis
  misc_feature (1)..(358): Homolog of NCBI NO: 18424347 NR Description: cysteine proteinase AALP

SEQ ID NO: 28216 - protein, 325 aa, Arabidopsis thaliana; identical to SEQ ID NO: 21555
  peptide (1)..(325): Ceres Seq. ID no. 12482534
  misc_feature (108)..(323): Pfam Name: Papain family cysteine protease Pfam Description: Papain family cysteine protease
  misc_feature (1)..(325): Homolog of NCBI NO: 14422331 NR Description: early leaf senescence abundant cysteine protease
  misc_feature (1)..(325): Homolog of NCBI NO: 7435779 NR Description: cysteine proteinase (EC 3.4.22.-) - garden pea
  misc_feature (1)..(325): Homolog of NCBI NO: 2677828 NR Description: cysteine protease [Prunus armeniaca]
  misc_feature (1)..(325): Homolog of NCBI NO: 28192371 NR Description: NTCP23-like cysteine proteinase [Nicotiana
  misc_feature (1)..(325): Homolog of NCBI NO: 8347420 NR Description: cysteine protease [Nicotiana tabacum]
  misc_feature (1)..(313): Homolog of NCBI NO: 11265612 NR Description: cysteine proteinase (EC 3.4.22.-) F18N11.70
  misc_feature (1)..(325): Homolog of NCBI NO: 18407961 NR Description: cysteine proteinase AALP, putative
  misc_feature (1)..(325): Homolog of NCBI NO: 18141289 NR Description: senescence-associated cysteine protease [Brassica
  misc_feature (1)..(325): Homolog of NCBI NO: 23397070 NR Description: putative cysteine proteinase AALP [Arabidopsis
  misc_feature (1)..(325): Homolog of NCBI NO: 18424347 NR Description: cysteine proteinase AALP

SEQ ID NO: 28217 - protein, 283 aa, Arabidopsis thaliana; identical to SEQ ID NO: 21556
  peptide (1)..(283): Ceres Seq. ID no. 12482535
  misc_feature (66)..(281): Pfam Name: Papain family cysteine protease Pfam Description: Papain family cysteine protease
  misc_feature (1)..(283): Homolog of NCBI NO: 14422331 NR Description: early leaf senescence abundant cysteine protease
  misc_feature (1)..(283): Homolog of NCBI NO: 7435779 NR Description: cysteine proteinase (EC 3.4.22.-) - garden pea
  misc_feature (1)..(283): Homolog of NCBI NO: 2677828 NR Description: cysteine protease [Prunus armeniaca]
  misc_feature (1)..(283): Homolog of NCBI NO: 28192371 NR Description: NTCP23-like cysteine proteinase [Nicotiana
  misc_feature (1)..(283): Homolog of NCBI NO: 8347420 NR Description: cysteine protease [Nicotiana tabacum]
  misc_feature (1)..(271): Homolog of NCBI NO: 11265612 NR Description: cysteine proteinase (EC 3.4.22.-) F18N11.70
  misc_feature (1)..(283): Homolog of NCBI NO: 18407961 NR Description: cysteine proteinase AALP, putative
  misc_feature (1)..(283): Homolog of NCBI NO: 18141289 NR Description: senescence-associated cysteine protease [Brassica
  misc_feature (1)..(283): Homolog of NCBI NO: 23397070 NR Description: putative cysteine proteinase AALP [Arabidopsis
  misc_feature (1)..(283): Homolog of NCBI NO: 18424347 NR Description: cysteine proteinase AALP

SEQ ID NO: 28218 - DNA, 1371 bp, Arabidopsis thaliana
  misc_feature (1)..(1371): Ceres Seq. ID no. 12333807
  misc_feature: MA Experiment ID: 20000171 Result: Down-regulated in Transcription
  misc_feature: MA Experiment 20000171 PARAMETER Experiment Name: At_42deg_Heat_P Parameter: Age (day) Value: 14
  misc_feature: MA Experiment 20000171 PARAMETER Experiment Name: At_42deg_Heat_P Parameter: Organism Value: A. thaliana
  misc_feature: MA Experiment 20000171 PARAMETER Experiment Name: At_42deg_Heat_P Parameter: Plant Line Value: WS
  misc_feature: MA Experiment 20000171 PARAMETER Experiment Name: At_42deg_Heat_P Parameter: Temperature (deg C) Value: 42 vs. 22
  misc_feature: MA Experiment 20000171 PARAMETER Experiment Name: At_42deg_Heat_P Parameter: Timepoint (hr) Value: 1
  misc_feature: MA Experiment 20000171 PARAMETER Experiment Name: At_42deg_Heat_P Parameter: Tissue Value: Aerial
  misc_feature: MA Experiment ID: 20000173 Result: Down-regulated in Transcription
  misc_feature: MA Experiment 20000173 PARAMETER Experiment Name: At_42deg_Heat_P Parameter: Age (day) Value: 14
  misc_feature: MA Experiment 20000173 PARAMETER Experiment Name: At_42deg_Heat_P Parameter: Organism Value: A. thaliana
  misc_feature: MA Experiment 20000173 PARAMETER Experiment Name: At_42deg_Heat_P Parameter: Plant Line Value: WS
  misc_feature: MA Experiment 20000173 PARAMETER Experiment Name: At_42deg_Heat_P Parameter: Temperature (deg C) Value: 42 vs. 22
  misc_feature: MA Experiment 20000173 PARAMETER Experiment Name: At_42deg_Heat_P Parameter: Timepoint (hr) Value: 6
  misc_feature: MA Experiment 20000173 PARAMETER Experiment Name: At_42deg_Heat_P Parameter: Tissue Value: Aerial
  misc_feature: MA Experiment ID: 20000234 Result: Up-regulated in Transcription
  misc_feature: MA Experiment 20000234 PARAMETER Experiment Name: At_Siliques_P Parameter: Age (day) Value: 21
  misc_feature: MA Experiment 20000234 PARAMETER Experiment Name: At_Siliques_P Parameter: Organism Value: A. thaliana
  misc_feature: MA Experiment 20000234 PARAMETER Experiment Name: At_Siliques_P Parameter: Plant Line Value: WS
  misc_feature: MA Experiment 20000234 PARAMETER Experiment Name: At_Siliques_P Parameter: Tissue Value: Less Than 5mm Siliques vs. Whole Plant
  misc_feature: MA Experiment ID: 20000264 Result: Up-regulated in Transcription
  misc_feature: MA Experiment 20000264 PARAMETER Experiment Name: At_Open_Flower_P Parameter: Age (day) Value: 21
  misc_feature: MA Experiment 20000264 PARAMETER Experiment Name: At_Open_Flower_P Parameter: Plant Line Value: WS
  misc_feature: MA Experiment 20000264 PARAMETER Experiment Name: At_Open_Flower_P Parameter: Tissue Value: Open Flower vs. Whole Plant
  misc_feature: MA Experiment ID: 20000286 Result: Up-regulated in Transcription
  misc_feature: MA Experiment 20000286 PARAMETER Experiment Name: At_Open_Flower_P Parameter: Age (day) Value: 21
  misc_feature: MA Experiment 20000286 PARAMETER Experiment Name: At_Open_Flower_P Parameter: Plant Line Value: WS
  misc_feature: MA Experiment 20000286 PARAMETER Experiment Name: At_Open_Flower_P Parameter: Tissue Value: Half Open vs. Whole Plant
  misc_feature: MA Experiment ID: 20000437 Result: Down-regulated in Transcription
  misc_feature: MA Experiment 20000437 PARAMETER Experiment Name: At_Drought_P Parameter: Age (day) Value: 8
  misc_feature: MA Experiment 20000437 PARAMETER Experiment Name: At_Drought_P Parameter: Organism Value: A. thaliana
  misc_feature: MA Experiment 20000437 PARAMETER Experiment Name: At_Drought_P Parameter: Plant Line Value: WS
  misc_feature: MA Experiment 20000437 PARAMETER Experiment Name: At_Drought_P Parameter: Timepoint (hr) Value: 24
  misc_feature: MA Experiment 20000437 PARAMETER Experiment Name: At_Drought_P Parameter: Tissue Value: Whole Plant
  misc_feature: MA Experiment 20000437 PARAMETER Experiment Name: At_Drought_P Parameter: Treatment Value: Drought vs. No Drought
  misc_feature: MA Experiment ID: 20001451 Result: Down-regulated in Transcription
  misc_feature: MA Experiment 20001451 PARAMETER Experiment Name: At_Far-red-induction_P Parameter: Age (day) Value: 7
  misc_feature: MA Experiment 20001451 PARAMETER Experiment Name: At_Far-red-induction_P Parameter: Light Value: Far-red vs. White
  misc_feature: MA Experiment 20001451 PARAMETER Experiment Name: At_Far-red-induction_P Parameter: Organism Value: A. thaliana
  misc_feature: MA Experiment 20001451 PARAMETER Experiment Name: At_Far-red-induction_P Parameter: Plant Line Value: Columbia
  misc_feature: MA Experiment 20001451 PARAMETER Experiment Name: At_Far-red-induction_P Parameter: Timepoint (hr) Value: 24
  misc_feature: MA Experiment 20001451 PARAMETER Experiment Name: At_Far-red-induction_P Parameter: Tissue Value: Whole Plant
  misc_feature: MA Experiment ID: 20001911 Result: Down-regulated in Transcription
  misc_feature: MA Experiment 20001911 PARAMETER Experiment Name: At_Drought_Reproduction_P Parameter: Age (day) Value: 40
  misc_feature: MA Experiment 20001911 PARAMETER Experiment Name: At_Drought_Reproduction_P Parameter: Organism Value: A. thaliana
  misc_feature: MA Experiment 20001911 PARAMETER Experiment Name: At_Drought_Reproduction_P Parameter: Plant Line Value: WS
  misc_feature: MA Experiment 20001911 PARAMETER Experiment Name: At_Drought_Reproduction_P Parameter: Timepoint (day) Value: 10
  misc_feature: MA Experiment 20001911 PARAMETER Experiment Name: At_Drought_Reproduction_P Parameter: Tissue Value: Flowers
  misc_feature: MA Experiment 20001911 PARAMETER Experiment Name: At_Drought_Reproduction_P Parameter: Treatment Value: Drought vs. No Drought
atccggatcattaccagacccgtcggtgagatagcgggtttgaaatacacggtattcggtttacgaatctcaggaggaggaagagaaaataaaaatgagttttttaatttcgctctcttcttagatcccgtttgttctctttctcactttggctgtttaagcaaaaaccatggcttctcgctgtgagctacttctgatctgcgtcttctctctcttaattgcttttgctcactccaagacattgaagcgagatgtgaaagctttgaatgaaatcaaagcctctttgggatggagagtggtgtattcatgggttggtgacgatccttgtggagatggagaccttccaccttggtctggtgtcacgtgttctacacaaggagactatagagttgtcacagaattagaagtttatgcggtttcgattgttggacctttccccattgcagtaacaaaccttctggatttgactagactggatctacataacaacaagttgactggtccaatccctccacaaattggacgactgaaacggctgaaagtactaaacctgaggtggaataaactacaagatgtgatccctcccgagattggggagctgaagagactaacccatttgtacttgagcttcaatagcttcaagggagaaattcccaaggaactagctgctcttcccgagcttcggtatctataccttcaagaaaaccgtctcattggtagaattcctgccgaactggggactctgcaaaaccttcgccacctagatgttggtaacaaccatttggtgggaactatacgggagctcatccgttttgatggaagtttcccagctcttcgcaacttgtacttgaataataactatttgagtggagggattcctgctcagctgtcaaatcttacaaacttagagattgtttacctgtcttacaacaaatttattggaaacattccttttgccattgctcatattcctaaactgacatacctgtaccttgatcacaaccaatttaccgggagaatcccagacgcattctacaagcatccattcctcaaagaaatgtacattgaaggcaacatgttcaagtcaggcgtgaacccaattggtacccacaaagttttagaagtttctgatgccgattttgccgtgtgaccggatagaagattccaggaaggttctcgagaaaacgtctcagaaccacctagagattgttccactttagccctcttcactattattattttttgtatggtctgtggatttgcaaatgaaagaaagcataagactacaagtttttatcttcatattgtatagttagacacattccactaatctatatttctccttaatcaaatgattatatatatttagat

SEQ ID NO: 28219 - protein, 326 aa, Arabidopsis thaliana
  peptide (1)..(326): Ceres Seq. ID no. 12333808
  misc_feature (269)..(292): Pfam Name: Leucine Rich Repeat Pfam Description: Leucine Rich Repeat
  misc_feature (70)..(308): Homolog of NCBI NO: 7488988 NR Description: disease resistance protein Hcr2-5D - tomato
  misc_feature (70)..(308): Homolog of NCBI NO: 7488988 NR Description: disease resistance protein Hcr2-5D - tomato
  misc_feature (70)..(308): Homolog of NCBI NO: 3894383 NR Description: disease resistance protein [Lycopersicon
  misc_feature (70)..(302): Homolog of NCBI NO: 3894387 NR Description: Hcr2-0B [Lycopersicon esculentum]
  misc_feature (1)..(304): Homolog of NCBI NO: 15240186 NR Description: Cf-5 disease resistance protein - like; protein
  misc_feature (127)..(326): Homolog of NCBI NO: 15240186 NR Description: Cf-5 disease resistance protein - like; protein
  misc_feature (8)..(326): Homolog of NCBI NO: 15222979 NR Description: disease resistance protein, putative; protein id:
  misc_feature (1)..(326): Homolog of NCBI NO: 25402771 NR Description: protein F16A14.12 [imported] - Arabidopsis
  misc_feature (7)..(326): Homolog of NCBI NO: 14626935 NR Description: leucine-rich repeat resistance protein-like
  misc_feature (1)..(326): Homolog of NCBI NO: 9757845 NR Description: leucine-rich repeat disease resistance
MASRCELLLICVFSLLIAFAHSKTLKRDVKALNEIKASLGWRVVYSWVGDDPCGDGDLPPWSGVTCSTQGDYRVVTELEVYAVSIVGPFPIAVTNLLDLTRLDLHNNKLTGPIPPQIGRLKRLKVLNLRWNKLQDVIPPEIGELKRLTHLYLSFNSFKGEIPKELAALPELRYLYLQENRLIGRIPAELGTLQNLRHLDVGNNHLVGTIRELIRFDGSFPALRNLYLNNNYLSGGIPAQLSNLTNLEIVYLSYNKFIGNIPFAIAHIPKLTYLYLDHNQFTGRIPDAFYKHPFLKEMYIEGNMFKSGVNPIGTHKVLEVSDADFAV

SEQ ID NO: 28220 - DNA, 498 bp, Arabidopsis thaliana
  misc_feature (1)..(498): Ceres Seq. ID no. 12333353
  misc_feature: MA Experiment ID: 108434 Result: Up-regulated in Transcription
  misc_feature: MA Experiment 108434 PARAMETER Experiment Name: At_Root_Tips_cDNA_P Parameter: Tissue Value: Root Tips
  misc_feature: MA Experiment ID: 108462 Result: Down-regulated in Transcription
  misc_feature: MA Experiment 108462 PARAMETER Experiment Name: At_Germinating_Seeds_cDNA_P Parameter: Age (day) Value: 2 vs. 0
  misc_feature: MA Experiment 108462 PARAMETER Experiment Name: At_Germinating_Seeds_cDNA_P Parameter: Tissue Value: Germinating Seeds
  misc_feature: MA Experiment ID: 108463 Result: Down-regulated in Transcription
  misc_feature: MA Experiment 108463 PARAMETER Experiment Name: At_Germinating_Seeds_cDNA_P Parameter: Age (day) Value: 3 vs. 0
  misc_feature: MA Experiment 108463 PARAMETER Experiment Name: At_Germinating_Seeds_cDNA_P Parameter: Tissue Value: Germinating Seeds
  misc_feature: MA Experiment ID: 108464 Result: Down-regulated in Transcription
  misc_feature: MA Experiment 108464 PARAMETER Experiment Name: At_Germinating_Seeds_cDNA_P Parameter: Age (day) Value: 4 vs. 0
  misc_feature: MA Experiment 108464 PARAMETER Experiment Name: At_Germinating_Seeds_cDNA_P Parameter: Tissue Value: Germinating Seeds
  misc_feature: MA Experiment ID: 108573 Result: Down-regulated in Transcription
  misc_feature: MA Experiment 108573 PARAMETER Experiment Name: At_Drought_cDNA_P Parameter: Timepoint (hr) Value: 6
  misc_feature: MA Experiment 108573 PARAMETER Experiment Name: At_Drought_cDNA_P Parameter: Tissue Value: Aerial
  misc_feature: MA Experiment 108573 PARAMETER Experiment Name: At_Drought_cDNA_P Parameter: Treatment Value: Drought vs. No Drought
  misc_feature: MA Experiment ID: 20000111 Result: Down-regulated in Transcription
  misc_feature: MA Experiment 20000111 PARAMETER Experiment Name: At_42deg_Heat_cDNA_P Parameter: Temperature (deg C) Value: 42 vs. 22
  misc_feature: MA Experiment 20000111 PARAMETER Experiment Name: At_42deg_Heat_cDNA_P Parameter: Timepoint (hr) Value: 6
  misc_feature: MA Experiment 20000111 PARAMETER Experiment Name: At_42deg_Heat_cDNA_P Parameter: Tissue Value: Aerial
  misc_feature: MA Experiment ID: 20000224 Result: Down-regulated in Transcription
  misc_feature: MA Experiment ID: 20000234 Result: Up-regulated in Transcription
  misc_feature: MA Experiment 20000234 PARAMETER Experiment Name: At_Siliques_P Parameter: Age (day) Value: 21
  misc_feature: MA Experiment 20000234 PARAMETER Experiment Name: At_Siliques_P Parameter: Organism Value: A. thaliana
  misc_feature: MA Experiment 20000234 PARAMETER Experiment Name: At_Siliques_P Parameter: Plant Line Value: WS
  misc_feature: MA Experiment 20000234 PARAMETER Experiment Name: At_Siliques_P Parameter: Tissue Value: Less Than 5mm Siliques vs. Whole Plant
  misc_feature: MA Experiment ID: 20000264 Result: Up-regulated in Transcription
  misc_feature: MA Experiment 20000264 PARAMETER Experiment Name: At_Open_Flower_P Parameter: Age (day) Value: 21
  misc_feature: MA Experiment 20000264 PARAMETER Experiment Name: At_Open_Flower_P Parameter: Plant Line Value: WS
  misc_feature: MA Experiment 20000264 PARAMETER Experiment Name: At_Open_Flower_P Parameter: Tissue Value: Open Flower vs. Whole Plant
  misc_feature: MA Experiment ID: 20000265 Result: Up-regulated in Transcription
  misc_feature: MA Experiment 20000265 PARAMETER Experiment Name: At_Open_Flower_P Parameter: Age (day) Value: 21
  misc_feature: MA Experiment 20000265 PARAMETER Experiment Name: At_Open_Flower_P Parameter: Plant Line Value: WS
  misc_feature: MA Experiment 20000265 PARAMETER Experiment Name: At_Open_Flower_P Parameter: Tissue Value: Closed Flower vs. Whole Plant
  misc_feature: MA Experiment ID: 20001247 Result: Down-regulated in Transcription
  misc_feature: MA Experiment 20001247 PARAMETER Experiment Name: At_Far-red-induction_P Parameter: Age (day) Value: 7
  misc_feature: MA Experiment 20001247 PARAMETER Experiment Name: At_Far-red-induction_P Parameter: Light Value: Far-red vs. White
  misc_feature: MA Experiment 20001247 PARAMETER Experiment Name: At_Far-red-induction_P Parameter: Organism Value: A. thaliana
  misc_feature: MA Experiment 20001247 PARAMETER Experiment Name: At_Far-red-induction_P Parameter: Plant Line Value: Columbia
  misc_feature: MA Experiment 20001247 PARAMETER Experiment Name: At_Far-red-induction_P Parameter: Timepoint (hr) Value: 1
  misc_feature: MA Experiment 20001247 PARAMETER Experiment Name: At_Far-red-induction_P Parameter: Tissue Value: Whole Plant
  misc_feature: MA Experiment ID: 20001560 Result: Up-regulated in Transcription
  misc_feature: MA Experiment 20001560 PARAMETER Experiment Name: At_Drought_Soil_Dry_P Parameter: Age (day) Value: 28
  misc_feature: MA Experiment 20001560 PARAMETER Experiment Name: At_Drought_Soil_Dry_P Parameter: Organism Value: A. thaliana
  misc_feature: MA Experiment 20001560 PARAMETER Experiment Name: At_Drought_Soil_Dry_P Parameter: Plant Line Value: WS
  misc_feature: MA Experiment 20001560 PARAMETER Experiment Name: At_Drought_Soil_Dry_P Parameter: Post Timepoint (hr) Value: None
  misc_feature: MA Experiment 20001560 PARAMETER Experiment Name: At_Drought_Soil_Dry_P Parameter: Post-Treatment Value: None
  misc_feature: MA Experiment 20001560 PARAMETER Experiment Name: At_Drought_Soil_Dry_P Parameter: Timepoint (day) Value: 14
  misc_feature: MA Experiment 20001560 PARAMETER Experiment Name: At_Drought_Soil_Dry_P Parameter: Treatment Value: Drought vs. No Drought
  misc_feature: MA Experiment ID: 20001911 Result: Down-regulated in Transcription
  misc_feature: MA Experiment 20001911 PARAMETER Experiment Name: At_Drought_Reproduction_P Parameter: Age (day) Value: 40
  misc_feature: MA Experiment 20001911 PARAMETER Experiment Name: At_Drought_Reproduction_P Parameter: Organism Value: A. thaliana
  misc_feature: MA Experiment 20001911 PARAMETER Experiment Name: At_Drought_Reproduction_P Parameter: Plant Line Value: WS
  misc_feature: MA Experiment 20001911 PARAMETER Experiment Name: At_Drought_Reproduction_P Parameter: Timepoint (day) Value: 10
  misc_feature: MA Experiment 20001911 PARAMETER Experiment Name: At_Drought_Reproduction_P Parameter: Tissue Value: Flowers
  misc_feature: MA Experiment 20001911 PARAMETER Experiment Name: At_Drought_Reproduction_P Parameter: Treatment Value: Drought vs. No Drought
atgaagaattgaatctgtagtcgaaagaaaagagttgggaaaaaaatggacgcaagcatgatggctggacttgatggtcttcctgaagaagacaaagccaaaatggcctccatgatcgatcagcttcagctccgtgatagtttgaggatgtacaattcattggtggagaggtgtttcgtggactgtgttgatagcttcacacgcaaatctctgcagaaacaagaggagacttgtgtgatgcgttgcgctgagaagttccttaagcatacgatgcgtgttggtatgcggtttgctgagctcaatcagaacgcaccaacccaagactgatatagtctgctttttctgtttggttttttcgtacggtttacgagtccgaaaccagaataaaccggttgttagttgttcaggttactactccgatactgttttttgaacatcttgtactgtgaaattattttgactgtatccagttctgatattgatattgacttgtattcc

SEQ ID NO: 28221 - protein, 93 aa, Arabidopsis thaliana
  peptide (1)..(93): Ceres Seq. ID no. 12333354
  misc_feature (20)..(85): Pfam Name: Tim10/DDP family zinc finger Pfam Description: Tim10/DDP family zinc finger
  misc_feature (9)..(86): Homolog of NCBI NO: 19075508 NR Description: similar to yeast Tim9p essential component of the
  misc_feature (9)..(86): Homolog of NCBI NO: 12230194 NR Description: Mitochondrial import inner membrane translocase
  misc_feature (9)..(86): Homolog of NCBI NO: 12230144 NR Description: Mitochondrial import inner membrane translocase
  misc_feature (9)..(86): Homolog of NCBI NO: 6320815 NR Description: Translocase in inner membrane of mitochondria
  misc_feature (1)..(93): Homolog of NCBI NO: 12230182 NR Description: Mitochondrial import inner membrane translocase
  misc_feature (1)..(93): Homolog of NCBI NO: 12230181 NR Description: Mitochondrial import inner membrane translocase
  misc_feature (1)..(92): Homolog of NCBI NO: 11358850 NR Description: small zinc finger-like protein [imported] -
  misc_feature (1)..(92): Homolog of NCBI NO: 5107210 NR Description: small zinc finger-like protein [Arabidopsis
  misc_feature (1)..(93): Homolog of NCBI NO: 21617942 NR Description: mitochondrial import inner membrane translocase
  misc_feature (1)..(93): Homolog of NCBI NO: 15231455 NR Description: small zinc finger-like protein TIM9
MDASMMAGLDGLPEEDKAKMASMIDQLQLRDSLRMYNSLVERCFVDCVDSFTRKSLQKQEETCVMRCAEKFLKHTMRVGMRFAELNQNAPTQD

SEQ ID NO: 28222 - protein, 89 aa, Arabidopsis thaliana
  peptide (1)..(89): Ceres Seq. ID no. 12333355
  misc_feature (16)..(81): Pfam Name: Tim10/DDP family zinc finger Pfam Description: Tim10/DDP family zinc finger
  misc_feature (5)..(82): Homolog of NCBI NO: 19075508 NR Description: similar to yeast Tim9p essential component of the
  misc_feature (5)..(82): Homolog of NCBI NO: 12230194 NR Description: Mitochondrial import inner membrane translocase
  misc_feature (5)..(82): Homolog of NCBI NO: 12230144 NR Description: Mitochondrial import inner membrane translocase
  misc_feature (5)..(82): Homolog of NCBI NO: 6320815 NR Description: Translocase in inner membrane of mitochondria
  misc_feature (1)..(89): Homolog of NCBI NO: 12230182 NR Description: Mitochondrial import inner membrane translocase
  misc_feature (1)..(89): Homolog of NCBI NO: 12230181 NR Description: Mitochondrial import inner membrane translocase
  misc_feature (1)..(88): Homolog of NCBI NO: 11358850 NR Description: small zinc finger-like protein [imported] -
  misc_feature (1)..(88): Homolog of NCBI NO: 5107210 NR Description: small zinc finger-like protein [Arabidopsis
  misc_feature (1)..(89): Homolog of NCBI NO: 21617942 NR Description: mitochondrial import inner membrane translocase
  misc_feature (1)..(89): Homolog of NCBI NO: 15231455 NR Description: small zinc finger-like protein TIM9
MMAGLDGLPEEDKAKMASMIDQLQLRDSLRMYNSLVERCFVDCVDSFTRKSLQKQEETCVMRCAEKFLKHTMRVGMRFAELNQNAPTQD

SEQ ID NO: 28223 - protein, 88 aa, Arabidopsis thaliana
  peptide (1)..(88): Ceres Seq. ID no. 12333356
  misc_feature (15)..(80): Pfam Name: Tim10/DDP family zinc finger Pfam Description: Tim10/DDP family zinc finger
  misc_feature (4)..(81): Homolog of NCBI NO: 19075508 NR Description: similar to yeast Tim9p essential component of the
  misc_feature (4)..(81): Homolog of NCBI NO: 12230194 NR Description: Mitochondrial import inner membrane translocase
  misc_feature (4)..(81): Homolog of NCBI NO: 12230144 NR Description: Mitochondrial import inner membrane translocase
  misc_feature (4)..(81): Homolog of NCBI NO: 6320815 NR Description: Translocase in inner membrane of mitochondria
  misc_feature (1)..(88): Homolog of NCBI NO: 12230182 NR Description: Mitochondrial import inner membrane translocase
  misc_feature (1)..(88): Homolog of NCBI NO: 12230181 NR Description: Mitochondrial import inner membrane translocase
  misc_feature (1)..(87): Homolog of NCBI NO: 11358850 NR Description: small zinc finger-like protein [imported] -
  misc_feature (1)..(87): Homolog of NCBI NO: 5107210 NR Description: small zinc finger-like protein [Arabidopsis
  misc_feature (1)..(88): Homolog of NCBI NO: 21617942 NR Description: mitochondrial import inner membrane translocase
  misc_feature (1)..(88): Homolog of NCBI NO: 15231455 NR Description: small zinc finger-like protein TIM9
MAGLDGLPEEDKAKMASMIDQLQLRDSLRMYNSLVERCFVDCVDSFTRKSLQKQEETCVMRCAEKFLKHTMRVGMRFAELNQNAPTQD

SEQ ID NO: 28224 - DNA, 636 bp, Arabidopsis thaliana
  misc_feature (1)..(636): Ceres Seq. ID no. 12560114
  misc_feature: MA Experiment ID: 20000355 Result: Up-regulated in Transcription
  misc_feature: MA Experiment 20000355 PARAMETER Experiment Name: At_Siliques_Sub_P Parameter: Age (day) Value: 21
  misc_feature: MA Experiment 20000355 PARAMETER Experiment Name: At_Siliques_Sub_P Parameter: Organism Value: A. thaliana
  misc_feature: MA Experiment 20000355 PARAMETER Experiment Name: At_Siliques_Sub_P Parameter: Plant Line Value: WS
  misc_feature: MA Experiment 20000355 PARAMETER Experiment Name: At_Siliques_Sub_P Parameter: Tissue Value: Less Than 5mm Siliques vs. Whole Plant
agctccggcgcccaccattaaaatctctcgatctctatctgcgaaatttcacggtatttgaaatggcgacagttccaggacaattgatctgggagatcgtgaaaaacaacaactgtttcttggtgaagcagttcggtagaggaaactctaaggttcaattcagcaaggagactaacaacctcaccaacgttcactcttacaagcactctggtcttgcaaacaaaaagactgtgaccatccaggccgctgacaaggaccaagctgttgtgctcgccaccaccaagaccaagaagcagaacaagcctaagctctctgtcaacaagtctatcctcaagaaggaattccccaggatgtcaaaggctgttgctaaccaggtggtggacaactactacaggccggacttgaagaaagctgcacttgctagactcagcgccatcagcaaaggtctcagggttgccaagtccggtgccaagcaaagaaacagacaagcttaagcttcttctttcacaatctgttttttttgaagtaaaagattttgttgaacaggttttatttaagtttgttgctttgaaagttgaaccataatgctattctccttttttcattatcccttattataaaggaggttagaagttt

SEQ ID NO: 28225 - protein, 163 aa, Arabidopsis thaliana
  peptide (1)..(163): Ceres Seq. ID no. 12560115
  misc_feature (25)..(156): Pfam Name: Ribosomal L28e protein family Pfam Description: Ribosomal L28e protein family
  misc_feature (28)..(161): Homolog of NCBI NO: 1362931 NR Description: ribosomal protein L28 - human
  misc_feature (28)..(161): Homolog of NCBI NO: 38112699 NR Description: 60S ribosomal protein L28 [Hippocampus comes]
  misc_feature (21)..(158): Homolog of NCBI NO: 38047791 NR Description: similar to Drosophila melanogaster CG12740
  misc_feature (23)..(156): Homolog of NCBI NO: 19114036 NR Description: 60s ribosomal protein L28/L44
  misc_feature (21)..(158): Homolog of NCBI NO: 24656625 NR Description: CG12740-PA [Drosophila melanogaster]
  misc_feature (13)..(158): Homolog of NCBI NO: 20976820 NR Description: GH04183p [Drosophila melanogaster]
  misc_feature (28)..(154): Homolog of NCBI NO: 24418650 NR Description: 60S ribosomal protein L28
  misc_feature (21)..(163): Homolog of NCBI NO: 34910390 NR Description: ribosomal protein L28-like
  misc_feature (21)..(163): Homolog of NCBI NO: 15233567 NR Description: putative protein
  misc_feature (21)..(163): Homolog of NCBI NO: 15224835 NR Description: putative ribosomal protein L28
LRRPPLKSLDLYLRNFTVFEMATVPGQLIWEIVKNNNCFLVKQFGRGNSKVQFSKETNNLTNVHSYKHSGLANKKTVTIQAADKDQAVVLATTKTKKQNKPKLSVNKSILKKEFPRMSKAVANQVVDNYYRPDLKKAALARLSAISKGLRVAKSGAKQRNRQA

SEQ ID NO: 28226 - protein, 143 aa, Arabidopsis thaliana [sequence omitted]

SEQ ID NO: 28227 - DNA, 874 bp, Arabidopsis thaliana
  misc_feature (1)..(874): Ceres Seq. ID no. 12329801
  misc_feature: MA Experiment ID: 108577 Result: Up-regulated in Transcription
  misc_feature: MA Experiment 108577 PARAMETER Experiment Name: At_42deg_Heat_cDNA_P Parameter: Temperature (deg C) Value: 42 vs. 22
  misc_feature: MA Experiment 108577 PARAMETER Experiment Name: At_42deg_Heat_cDNA_P Parameter: Timepoint (hr) Value: 6
  misc_feature: MA Experiment 108577 PARAMETER Experiment Name: At_42deg_Heat_cDNA_P Parameter: Tissue Value: Aerial
  misc_feature: MA Experiment ID: 108585 Result: Up-regulated in Transcription
  misc_feature: MA Experiment 108585 PARAMETER Experiment Name: At_5mM_NaNP_cDNA_P Parameter: Timepoint (hr) Value: 6
  misc_feature: MA Experiment 108585 PARAMETER Experiment Name: At_5mM_NaNP_cDNA_P Parameter: Tissue Value: Aerial
  misc_feature: MA Experiment 108585 PARAMETER Experiment Name: At_5mM_NaNP_cDNA_P Parameter: Treatment Value: null
  misc_feature: MA Experiment ID: 20000111 Result: Up-regulated in Transcription
  misc_feature: MA Experiment 20000111 PARAMETER Experiment Name: At_42deg_Heat_cDNA_P Parameter: Temperature (deg C) Value: 42 vs. 22
  misc_feature: MA Experiment 20000111 PARAMETER Experiment Name: At_42deg_Heat_cDNA_P Parameter: Timepoint (hr) Value: 6
  misc_feature: MA Experiment 20000111 PARAMETER Experiment Name: At_42deg_Heat_cDNA_P Parameter: Tissue Value: Aerial
  misc_feature: MA Experiment ID: 20000112 Result: Up-regulated in Transcription
  misc_feature: MA Experiment 20000112 PARAMETER Experiment Name: At_42deg_Heat_cDNA_P Parameter: Temperature (deg C) Value: 42 vs. 22
  misc_feature: MA Experiment 20000112 PARAMETER Experiment Name: At_42deg_Heat_cDNA_P Parameter: Timepoint (hr) Value: 2
  misc_feature: MA Experiment 20000112 PARAMETER Experiment Name: At_42deg_Heat_cDNA_P Parameter: Tissue Value: Aerial
  misc_feature: MA Experiment ID: 20000113 Result: Up-regulated in Transcription
  misc_feature: MA Experiment 20000113 PARAMETER Experiment Name: At_42deg_Heat_cDNA_P Parameter: Temperature (deg C) Value: 42 vs. 22
  misc_feature: MA Experiment 20000113 PARAMETER Experiment Name: At_42deg_Heat_cDNA_P Parameter: Timepoint (hr) Value: 8
  misc_feature: MA Experiment 20000113 PARAMETER Experiment Name: At_42deg_Heat_cDNA_P Parameter: Tissue Value: Aerial
  misc_feature: MA Experiment ID: 20000144 Result: Up-regulated in Transcription
  misc_feature: MA Experiment 20000144 PARAMETER Experiment Name: At_42deg_Heat_cDNA_P Parameter: Temperature (deg C) Value: 42 vs. 22
  misc_feature: MA Experiment 20000144 PARAMETER Experiment Name: At_42deg_Heat_cDNA_P Parameter: Timepoint (hr) Value: 1
  misc_feature: MA Experiment 20000144 PARAMETER Experiment Name: At_42deg_Heat_cDNA_P Parameter: Tissue Value: Aerial
  misc_feature: MA Experiment ID: 20000171 Result: Up-regulated in Transcription
  misc_feature: MA Experiment 20000171 PARAMETER Experiment Name: At_42deg_Heat_P Parameter: Age (day) Value: 14
  misc_feature: MA Experiment 20000171 PARAMETER Experiment Name: At_42deg_Heat_P Parameter: Organism Value: A. thaliana
  misc_feature: MA Experiment 20000171 PARAMETER Experiment Name: At_42deg_Heat_P Parameter: Plant Line Value: WS
  misc_feature: MA Experiment 20000171 PARAMETER Experiment Name: At_42deg_Heat_P Parameter: Temperature (deg C) Value: 42 vs. 22
  misc_feature: MA Experiment 20000171 PARAMETER Experiment Name: At_42deg_Heat_P Parameter: Timepoint (hr) Value: 1
  misc_feature: MA Experiment 20000171 PARAMETER Experiment Name: At_42deg_Heat_P Parameter: Tissue Value: Aerial
  misc_feature: MA Experiment ID: 20000173 Result: Up-regulated in Transcription
  misc_feature: MA Experiment 20000173 PARAMETER Experiment Name: At_42deg_Heat_P Parameter: Age (day) Value: 14
  misc_feature: MA Experiment 20000173 PARAMETER Experiment Name: At_42deg_Heat_P Parameter: Organism Value: A. thaliana
  misc_feature: MA Experiment 20000173 PARAMETER Experiment Name: At_42deg_Heat_P Parameter: Plant Line Value: WS
  misc_feature: MA Experiment 20000173 PARAMETER Experiment Name: At_42deg_Heat_P Parameter: Temperature (deg C) Value: 42 vs. 22
  misc_feature: MA Experiment 20000173 PARAMETER Experiment Name: At_42deg_Heat_P Parameter: Timepoint (hr) Value: 6
  misc_feature: MA Experiment 20000173 PARAMETER Experiment Name: At_42deg_Heat_P Parameter: Tissue Value: Aerial
accgccattgattagcttcctctctatttttactctcgtcacgtcctccacttttgggtcattattacttctcgaagctcaccaagatcttgaatttgccgacctctcaagattcttgatggtaaaagcatacagacaagagcatgtttacaagcatccgtgggagcgggtgagtgctgcttcatggaggaagtttgcggaccctgaaaacaaacgcatcctttctcacatccttgaagtcgataccttgaacaggaaactcgacactgagaccgggaaactccacaccacgcgtgctctcaccatccatgctcctggtccatggtttctccataggatcattggccaggacatctgtcactgtgttgaatcaacagttgtagatggcaaatcacgttctatgcagctaacaacaaagaacattagtctcaaaaagttcattgaagtggaggagaggataagatatgatccgcatccagataatccatcagcctggacggtttgtagccaggagacaagcattcggatcaaacccttgtcggctctggcctcaatggctgagaaggttgaacagaagtgcgcagagaaattcatgcagaatagcgctaaaggaagagaggttatggagaggatttgtaagtatatggaagcagaatccgctcggatctaaagatcaaaacttcttagattccagtatcttcttggtttgtgattcttgaatgttttgtaagtcaagagagctacgtttttggagcatggttataataagtttatgaaacagtttagatcaaattggtgtttgtttcagtaactcctgttttgtgttagcaactgaaagttgaattgtgaagcttttatccaaatttttgaatcc

SEQ ID NO: 28228 - protein, 222 aa, Arabidopsis thaliana
  peptide (1)..(222): Ceres Seq. ID no. 12329802
  misc_feature (59)..(219): Pfam Name: MSF1-like conserved region Pfam Description: MSF1-like conserved region
  misc_feature (41)..(217): Homolog of NCBI NO: 38678528 NR Description: erythroid differentiation and denucleation factor
  misc_feature (41)..(218): Homolog of NCBI NO: 12850407 NR Description: unnamed protein product [Mus musculus]
  misc_feature (41)..(218): Homolog of NCBI NO: 13384954 NR Description: RIKEN cDNA 2310042G06 [Mus musculus]
  misc_feature (41)..(211): Homolog of NCBI NO: 19112130 NR Description: conserved hypothetical protein
  misc_feature (41)..(218): Homolog of NCBI NO: 28279126 NR Description: Similar to chromosome 20 open reading frame 45
  misc_feature (41)..(218): Homolog of NCBI NO: 37577049 NR Description: BCR/ABL-regulated protein [Cricetulus griseus]
  misc_feature (41)..(218): Homolog of NCBI NO: 28422177 NR Description: Similar to chromosome 20 open reading frame 45
  misc_feature (41)..(218): Homolog of NCBI NO: 26392626 NR Description: Protein C20orf45 (CGI-107)
  misc_feature (41)..(218): Homolog of NCBI NO: 7705610 NR Description: CGI-107 protein [Homo sapiens]
  misc_feature (40)..(222): Homolog of NCBI NO: 15240002 NR Description: putative protein; protein id: At5g13070.1
PPLISFLSIFTLVTSSTFGSLLLLEAHQDLEFADLSRFLMVKAYRQEHVYKHPWERVSAASWRKFADPENKRILSHILEVDTLNRKLDTETGKLHTTRALTIHAPGPWFLHRIIGQDICHCVESTVVDGKSRSMQLTTKNISLKKFIEVEERIRYDPHPDNPSAWTVCSQETSIRIKPLSALASMAEKVEQKCAEKFMQNSAKGREVMERICKYMEAESARI

SEQ ID NO: 28229 - protein, 183 aa, Arabidopsis thaliana
  peptide (1)..(183): Ceres Seq. ID no. 12329803
  misc_feature (20)..(180): Pfam Name: MSF1-like conserved region Pfam Description: MSF1-like conserved region
  misc_feature (2)..(178): Homolog of NCBI NO: 38678528 NR Description: erythroid differentiation and denucleation factor
  misc_feature (2)..(179): Homolog of NCBI NO: 12850407 NR Description: unnamed protein product [Mus musculus]
  misc_feature (2)..(179): Homolog of NCBI NO: 13384954 NR Description: RIKEN cDNA 2310042G06 [Mus musculus]
  misc_feature (2)..(172): Homolog of NCBI NO: 19112130 NR Description: conserved hypothetical protein
  misc_feature (2)..(179): Homolog of NCBI NO: 28279126 NR Description: Similar to chromosome 20 open reading frame 45
  misc_feature (2)..(179): Homolog of NCBI NO: 37577049 NR Description: BCR/ABL-regulated protein [Cricetulus griseus]
  misc_feature (2)..(179): Homolog of NCBI NO: 28422177 NR Description: Similar to chromosome 20 open reading frame 45
  misc_feature (2)..(179): Homolog of NCBI NO: 26392626 NR Description: Protein C20orf45 (CGI-107)
  misc_feature (2)..(179): Homolog of NCBI NO: 7705610 NR Description: CGI-107 protein [Homo sapiens]
  misc_feature (1)..(183): Homolog of NCBI NO: 15240002 NR Description: putative protein; protein id: At5g13070.1
MVKAYRQEHVYKHPWERVSAASWRKFADPENKRILSHILEVDTLNRKLDTETGKLHTTRALTIHAPGPWFLHRIIGQDICHCVESTVVDGKSRSMQLTTKNISLKKFIEVEERIRYDPHPDNPSAWTVCSQETSIRIKPLSALASMAEKVEQKCAEKFMQNSAKGREVMERICKYMEAESARI

SEQ ID NO: 28230 - DNA, 935 bp, Arabidopsis thaliana
  misc_feature (1)..(935): Ceres Seq. ID no. 13489309
  misc_feature: MA Experiment ID: 20000235 Result: Down-regulated in Transcription
  misc_feature: MA Experiment 20000235 PARAMETER Experiment Name: At_Siliques_P Parameter: Age (day) Value: 21
  misc_feature: MA Experiment 20000235 PARAMETER Experiment Name: At_Siliques_P Parameter: Organism Value: A. thaliana
  misc_feature: MA Experiment 20000235 PARAMETER Experiment Name: At_Siliques_P Parameter: Plant Line Value: WS
  misc_feature: MA Experiment 20000235 PARAMETER Experiment Name: At_Siliques_P Parameter: Tissue Value: 5-10mm Siliques vs. Whole Plant
  misc_feature: MA Experiment ID: 20000264 Result: Up-regulated in Transcription
  misc_feature: MA Experiment 20000264 PARAMETER Experiment Name: At_Open_Flower_P Parameter: Age (day) Value: 21
  misc_feature: MA Experiment 20000264 PARAMETER Experiment Name: At_Open_Flower_P Parameter: Plant Line Value: WS
  misc_feature: MA Experiment 20000264 PARAMETER Experiment Name: At_Open_Flower_P Parameter: Tissue Value: Open Flower vs. Whole Plant
  misc_feature: MA Experiment ID: 20000265 Result: Up-regulated in Transcription
  misc_feature: MA Experiment 20000265 PARAMETER Experiment Name: At_Open_Flower_P Parameter: Age (day) Value: 21
  misc_feature: MA Experiment 20000265 PARAMETER Experiment Name: At_Open_Flower_P Parameter: Plant Line Value: WS
  misc_feature: MA Experiment 20000265 PARAMETER Experiment Name: At_Open_Flower_P Parameter: Tissue Value: Closed Flower vs. Whole Plant
  misc_feature: MA Experiment ID: 20000286 Result: Up-regulated in Transcription
  misc_feature: MA Experiment 20000286 PARAMETER Experiment Name: At_Open_Flower_P Parameter: Age (day) Value: 21
  misc_feature: MA Experiment 20000286 PARAMETER Experiment Name: At_Open_Flower_P Parameter: Plant Line Value: WS
  misc_feature: MA Experiment 20000286 PARAMETER Experiment Name: At_Open_Flower_P Parameter: Tissue Value: Half Open vs. Whole Plant
  misc_feature: MA Experiment ID: 20000438 Result: Down-regulated in Transcription
  misc_feature: MA Experiment 20000438 PARAMETER Experiment Name: At_Shoots__P Parameter: Age (day) Value: 14
  misc_feature: MA Experiment 20000438 PARAMETER Experiment Name: At_Shoots__P Parameter: Tissue Value: Shoots vs. Whole Plant
  misc_feature: MA Experiment ID: 20000794 Result: Up-regulated in Transcription
  misc_feature: MA Experiment 20000794 PARAMETER Experiment Name: At_Petals_P Parameter: Age (day) Value: 23-25 days
  misc_feature: MA Experiment 20000794 PARAMETER Experiment Name: At_Petals_P Parameter: Plant Line Value: WS
  misc_feature: MA Experiment 20000794 PARAMETER Experiment Name: At_Petals_P Parameter: Tissue Value: Petals vs. Whole plant
  misc_feature: MA Experiment ID: 20001911 Result: Down-regulated in Transcription
  misc_feature: MA Experiment 20001911 PARAMETER Experiment Name: At_Drought_Reproduction_P Parameter: Age (day) Value: 40
  misc_feature: MA Experiment 20001911 PARAMETER Experiment Name: At_Drought_Reproduction_P Parameter: Organism Value: A. thaliana
  misc_feature: MA Experiment 20001911 PARAMETER Experiment Name: At_Drought_Reproduction_P Parameter: Plant Line Value: WS
  misc_feature: MA Experiment 20001911 PARAMETER Experiment Name: At_Drought_Reproduction_P Parameter: Timepoint (day) Value: 10
  misc_feature: MA Experiment 20001911 PARAMETER Experiment Name: At_Drought_Reproduction_P Parameter: Tissue Value: Flowers
  misc_feature: MA Experiment 20001911 PARAMETER Experiment Name: At_Drought_Reproduction_P Parameter: Treatment Value: Drought vs. No Drought
  misc_feature: Phenotype: WHOLE PLANT Other
  misc_feature: Phenotype: CAULINE LEAVES Curled-Corkscrew
  misc_feature: Phenotype: FLOWERS Other
  misc_feature: Phenotype: INFLORESCENCE Branching-Reduced Apical Dominance
  misc_feature: Phenotype: INFLORESCENCE Flowering Time-Late Flowering
  misc_feature: Phenotype: INFLORESCENCE Height-Short
  misc_feature: Phenotype: INFLORESCENCE Height-Short
  misc_feature: Phenotype: INFLORESCENCE Internode Length-Short Internode
  misc_feature: Phenotype: INFLORESCENCE Other
  misc_feature: Phenotype: INFLORESCENCE Other
  misc_feature: Phenotype: FERTILITY Fertility-Reduced
  misc_feature: Phenotype: FERTILITY Fertility-Sterile
  misc_feature: Phenotype: WHOLE PLANT Other
  misc_feature: Phenotype: CAULINE LEAVES Curled-Corkscrew
  misc_feature: Phenotype: FLOWERS Other
  misc_feature: Phenotype: INFLORESCENCE Branching-Reduced Apical Dominance
  misc_feature: Phenotype: INFLORESCENCE Flowering Time-Late Flowering
  misc_feature: Phenotype: INFLORESCENCE Height-Short
  misc_feature: Phenotype: INFLORESCENCE Height-Short
  misc_feature: Phenotype: INFLORESCENCE Internode Length-Short Internode
  misc_feature: Phenotype: INFLORESCENCE Other
  misc_feature: Phenotype: INFLORESCENCE Other
  misc_feature: Phenotype: FERTILITY Fertility-Reduced
  misc_feature: Phenotype: FERTILITY Fertility-Sterile
  misc_feature: Phenotype: WHOLE PLANT Other
  misc_feature: Phenotype: CAULINE LEAVES Curled-Corkscrew
  misc_feature: Phenotype: FLOWERS Other
  misc_feature: Phenotype: INFLORESCENCE Branching-Reduced Apical Dominance
  misc_feature: Phenotype: INFLORESCENCE Flowering Time-Late Flowering
  misc_feature: Phenotype: INFLORESCENCE Height-Short
  misc_feature: Phenotype: INFLORESCENCE Height-Short
  misc_feature: Phenotype: INFLORESCENCE Internode Length-Short Internode
  misc_feature: Phenotype: INFLORESCENCE Other
  misc_feature: Phenotype: INFLORESCENCE Other
  misc_feature: Phenotype: FERTILITY Fertility-Reduced
  misc_feature: Phenotype: FERTILITY Fertility-Sterile
aataaatacaagcctcctaactcataaaataagcataaccctaactctacaaagttcttctgattctttctctctctctctttctttcaagagcggttttcaatccattcgctaaagaccatgaacctagaagagaaaccaaccatgacggcttcaagggcttcccctcaagccgaacatctctactacgtccggtgtagcatctgcaacaccatcctcgcggttgggataccattgaagagaatgcttgacacggtaacggtgaaatgcggccattgtggtaacctctcgtttctcaccacaactcctcctcttcaaggccatgttagcctcacccttcagatgcagagctttggtggaagtgactataagaagggaagctcttcttcttcctcttcctccacctccagcgaccagcccccatctccctcacctccctttgtcgtcaaacctcctgagaagaagcagaggctcccatctgcatacaaccgcttcatgagggatgagatccaacgcatcaaaagtgccaatccggaaataccacaccgtgaagctttcagtgctgctgccaaaaattgggctaagtacatacccaactctcctacttccattacttccggaggccacaacatgatccatggcttgggattcggtgagaagaagtgaacaaaactcaggggaaaagaagcctaaaaataacaaacgcatgcacgtgtgcgagtggctgcgtcgtttttctcatcttgtgttgttcttctgtgtaattttcttatgtatgtcatgttgcagaaaatgatgttgccttagtttttatgactttatatttctgtctgtctttagatttgaaagtaacgtcacttgctatgtccctttggacgtttatgtctggtctttatttgtcttaatcctatcaaaattttatatgcgtattcctg

SEQ ID NO: 28231 - protein, 181 aa, Arabidopsis thaliana
  peptide (1)..(181): Ceres Seq. ID no. 13489310
  misc_feature (12)..(164): Pfam Name: YABBY protein Pfam Description: YABBY protein
  misc_feature (87)..(156): Homolog of NCBI NO: 38605890 NR Description: OSJNBb0020O11.2 [Oryza sativa (japonica
  misc_feature (1)..(102): Homolog of NCBI NO: 38605890 NR Description: OSJNBb0020O11.2 [Oryza sativa (japonica
  misc_feature (1)..(75): Homolog of NCBI NO: 6730647 NR Description: F4N2.14 [Arabidopsis thaliana]
  misc_feature (15)..(56): Homolog of NCBI NO: 32330677 NR Description: yabby15 protein [Zea mays]
  misc_feature (65)..(156): Homolog of NCBI NO: 32330677 NR Description: yabby15 protein [Zea mays]
  misc_feature (15)..(166): Homolog of NCBI NO: 33333529 NR Description: CRC-related protein [Triticum aestivum]
  misc_feature (15)..(170): Homolog of NCBI NO: 40362873 NR Description: drooping leaf [Oryza sativa (japonica
  misc_feature (1)..(170): Homolog of NCBI NO: 37542843 NR Description: crabs claw [Nicotiana langsdorffii x Nicotiana
  misc_feature (9)..(181): Homolog of NCBI NO: 21617944 NR Description: transcription factor CRC [Arabidopsis thaliana]
  misc_feature (1)..(181): Homolog of NCBI NO: 15222228 NR Description: transcription factor CRC [Arabidopsis thaliana]
MNLEEKPTMTASRASPQAEHLYYVRCSICNTILAVGIPLKRMLDTVTVKCGHCGNLSFLTTTPPLQGHVSLTLQMQSFGGSDYKKGSSSSSSSSTSSDQPPSPSPPFVVKPPEKKQRLPSAYNRFMRDEIQRIKSANPEIPHREAFSAAAKNWAKYIPNSPTSITSGGHNMIHGLGFGEKK

SEQ ID NO: 28232 - protein, 173 aa, Arabidopsis thaliana
  peptide (1)..(173): Ceres Seq. ID no. 13489311
  misc_feature (4)..(156): Pfam Name: YABBY protein Pfam Description: YABBY protein
  misc_feature (79)..(148): Homolog of NCBI NO: 38605890 NR Description: OSJNBb0020O11.2 [Oryza sativa (japonica
  misc_feature (1)..(94): Homolog of NCBI NO: 38605890 NR Description: OSJNBb0020O11.2 [Oryza sativa (japonica
  misc_feature (1)..(67): Homolog of NCBI NO: 6730647 NR Description: F4N2.14 [Arabidopsis thaliana]
  misc_feature (7)..(48): Homolog of NCBI NO: 32330677 NR Description: yabby15 protein [Zea mays]
  misc_feature (57)..(148): Homolog of NCBI NO: 32330677 NR Description: yabby15 protein [Zea mays]
  misc_feature (7)..(158): Homolog of NCBI NO: 33333529 NR Description: CRC-related protein [Triticum aestivum]
  misc_feature (7)..(162): Homolog of NCBI NO: 40362873 NR Description: drooping leaf [Oryza sativa (japonica
  misc_feature (1)..(162): Homolog of NCBI NO: 37542843 NR Description: crabs claw [Nicotiana langsdorffii x Nicotiana
  misc_feature (1)..(173): Homolog of NCBI NO: 21617944 NR Description: transcription factor CRC [Arabidopsis thaliana]
  misc_feature (1)..(173): Homolog of NCBI NO: 15222228 NR Description: transcription factor CRC [Arabidopsis thaliana]
MTASRASPQAEHLYYVRCSICNTILAVGIPLKRMLDTVTVKCGHCGNLSFLTTTPPLQGHVSLTLQMQSFGGSDYKKGSSSSSSSSTSSDQPPSPSPPFVVKPPEKKQRLPSAYNRFMRDEIQRIKSANPEIPHREAFSAAAKNWAKYIPNSPTSITSGGHNMIHGLGFGEKK

SEQ ID NO: 28233 - protein, 140 aa, Arabidopsis thaliana
  peptide (1)..(140): Ceres Seq. ID no. 13489312
  misc_feature (1)..(123): Pfam Name: YABBY protein Pfam Description: YABBY protein
  misc_feature (46)..(115): Homolog of NCBI NO: 38605890 NR Description: OSJNBb0020O11.2 [Oryza sativa (japonica
  misc_feature (1)..(61): Homolog of NCBI NO: 38605890 NR Description: OSJNBb0020O11.2 [Oryza sativa (japonica
  misc_feature (1)..(34): Homolog of NCBI NO: 6730647 NR Description: F4N2.14 [Arabidopsis thaliana]
  misc_feature (1)..(15): Homolog of NCBI NO: 32330677 NR Description: yabby15 protein [Zea mays]
  misc_feature (24)..(115): Homolog of NCBI NO: 32330677 NR Description: yabby15 protein [Zea mays]
  misc_feature (1)..(125): Homolog of NCBI NO: 33333529 NR Description: CRC-related protein [Triticum aestivum]
  misc_feature (1)..(129): Homolog of NCBI NO: 40362873 NR Description: drooping leaf [Oryza sativa (japonica
  misc_feature (1)..(129): Homolog of NCBI NO: 37542843 NR Description: crabs claw [Nicotiana langsdorffii x Nicotiana
  misc_feature (1)..(140): Homolog of NCBI NO: 21617944 NR Description: transcription factor CRC [Arabidopsis thaliana]
  misc_feature (1)..(140): Homolog of NCBI NO: 15222228 NR Description: transcription factor CRC [Arabidopsis thaliana]
MLDTVTVKCGHCGNLSFLTTTPPLQGHVSLTLQMQSFGGSDYKKGSSSSSSSSTSSDQPPSPSPPFVVKPPEKKQRLPSAYNRFMRDEIQRIKSANPEIPHREAFSAAAKNWAKYIPNSPTSITSGGHNMIHGLGFGEKK

SEQ ID NO: 28234 - DNA, 593 bp, Arabidopsis thaliana
  misc_feature (1)..(593): Ceres Seq. ID no. 12337607
  misc_feature: MA Experiment ID: 20000173 Result: Down-regulated in Transcription
  misc_feature: MA Experiment 20000173 PARAMETER Experiment Name: At_42deg_Heat_P Parameter: Age (day) Value: 14
  misc_feature: MA Experiment 20000173 PARAMETER Experiment Name: At_42deg_Heat_P Parameter: Organism Value: A. thaliana
  misc_feature: MA Experiment 20000173 PARAMETER Experiment Name: At_42deg_Heat_P Parameter: Plant Line Value: WS
  misc_feature: MA Experiment 20000173 PARAMETER Experiment Name: At_42deg_Heat_P Parameter: Temperature (deg C) Value: 42 vs. 22
  misc_feature: MA Experiment 20000173 PARAMETER Experiment Name: At_42deg_Heat_P Parameter: Timepoint (hr) Value: 6
  misc_feature: MA Experiment 20000173 PARAMETER Experiment Name: At_42deg_Heat_P Parameter: Tissue Value: Aerial
  misc_feature: MA Experiment ID: 20000179 Result: Up-regulated in Transcription
  misc_feature: MA Experiment 20000179 PARAMETER Experiment Name: At_Germinating_Seeds_P Parameter: Age (hr) Value: 6 vs. 0
  misc_feature: MA Experiment 20000179 PARAMETER Experiment Name: At_Germinating_Seeds_P Parameter: Tissue Value: Germinating Seeds
  misc_feature: MA Experiment ID: 20000180 Result: Up-regulated in Transcription
  misc_feature: MA Experiment 20000180 PARAMETER Experiment Name: At_Germinating_Seeds_P Parameter: Age (hr) Value: 24 vs. 0
  misc_feature: MA Experiment 20000180 PARAMETER Experiment Name: At_Germinating_Seeds_P Parameter: Tissue Value: Germinating Seeds
  misc_feature: MA Experiment ID: 20000184 Result: Down-regulated in Transcription
  misc_feature: MA Experiment 20000184 PARAMETER Experiment Name: At_Shoots__P Parameter: Age (day) Value: 7
  misc_feature: MA Experiment 20000184 PARAMETER Experiment Name: At_Shoots__P Parameter: Tissue Value: Shoots vs. Whole Plant
  misc_feature: MA Experiment ID: 20000437 Result: Up-regulated in Transcription
  misc_feature: MA Experiment 20000437 PARAMETER Experiment Name: At_Drought_P Parameter: Age (day) Value: 8
  misc_feature: MA Experiment 20000437 PARAMETER Experiment Name: At_Drought_P Parameter: Organism Value: A. thaliana
  misc_feature: MA Experiment 20000437 PARAMETER Experiment Name: At_Drought_P Parameter: Plant Line Value: WS
  misc_feature: MA Experiment 20000437 PARAMETER Experiment Name: At_Drought_P Parameter: Timepoint (hr) Value: 24
  misc_feature: MA Experiment 20000437 PARAMETER Experiment Name: At_Drought_P Parameter: Tissue Value: Whole Plant
  misc_feature: MA Experiment 20000437 PARAMETER Experiment Name: At_Drought_P Parameter: Treatment Value: Drought vs. No Drought
  misc_feature: MA Experiment ID: 20000438 Result: Down-regulated in Transcription
  misc_feature: MA Experiment 20000438 PARAMETER Experiment Name: At_Shoots__P Parameter: Age (day) Value: 14
  misc_feature: MA Experiment 20000438 PARAMETER Experiment Name: At_Shoots__P Parameter: Tissue Value: Shoots vs. Whole Plant
  misc_feature: MA Experiment ID: 20001558 Result: Down-regulated in Transcription
  misc_feature: MA Experiment 20001558 PARAMETER Experiment Name: At_Drought_Soil_Dry_P Parameter: Age (day) Value: 27
  misc_feature: MA Experiment 20001558 PARAMETER Experiment Name: At_Drought_Soil_Dry_P Parameter: Organism Value: A. thaliana
  misc_feature: MA Experiment 20001558 PARAMETER Experiment Name: At_Drought_Soil_Dry_P Parameter: Plant Line Value: WS
  misc_feature: MA Experiment 20001558 PARAMETER Experiment Name: At_Drought_Soil_Dry_P Parameter: Post Timepoint (hr) Value: 6
  misc_feature: MA Experiment 20001558 PARAMETER Experiment Name: At_Drought_Soil_Dry_P Parameter: Post-Treatment Value: Re-Water vs. No Drought
  misc_feature: MA Experiment 20001558 PARAMETER Experiment Name: At_Drought_Soil_Dry_P Parameter: Timepoint (day) Value: 13
  misc_feature: MA Experiment 20001558 PARAMETER Experiment Name: At_Drought_Soil_Dry_P Parameter: Treatment Value: Drought vs. No Drought
gcttttatagattctgggaatagtttagagatggggagattgttcttggtgaatttggaaggcaagtcttacagttgtaagcactgcaagaccaatcttgctctctgtgatgatgtattctctaagtcttttcagtcccgacatgggaaagcttacctcttcagtaaggtagtgaatgtgtatgctggcaagaaagaagataggatgatgatgacgggaatgcatacggtggtcgatatttactgtgtcaaatgcggctcttatgttggatggaaatatgagtttgcttttgagaagaatcaaaagtacaaggaaggaaaatctgttctcgaaaggtacaaggtctggggtccagatgggaacaattattgggtggctcaagaagcttgaagccggagacagcgatactgatgatgcttgattctcatcattcatatctgacttgtacattccctccaactctttcatttttctttattcttttttcctcattttgtaaaccatctatcttacattagaacagcttccgagaccaattgtttggtcattgctgcaactaccttggacacataagttaaagatctcattatctt

SEQ ID NO: 28235 - protein, 129 aa, Arabidopsis thaliana
  peptide (1)..(129): Ceres Seq. ID no. 12337608
  misc_feature (11)..(118): Pfam Name: Yippee putative zinc-binding protein Pfam Description: Yippee putative zinc-binding protein
  misc_feature (22)..(111): Homolog of NCBI NO: 20840809 NR Description: similar to hypothetical protein FLJ30213
  misc_feature (11)..(113): Homolog of NCBI NO: 34393694 NR Description: Yippee-like protein [Oryza sativa (japonica
  misc_feature (11)..(115): Homolog of NCBI NO: 15238881 NR Description: zinc-binding protein-like
  misc_feature (11)..(113): Homolog of NCBI NO: 15232001 NR Description: Yippee-like protein; protein id: At3g08990.1
  misc_feature (11)..(122): Homolog of NCBI NO: 15228759 NR Description: Yippee-like protein
  misc_feature (11)..(129): Homolog of NCBI NO: 28273361 NR Description: putative zinc binding protein
  misc_feature (11)..(128): Homolog of NCBI NO: 27923880 NR Description: Yippee-like protein
  misc_feature (11)..(126): Homolog of NCBI NO: 15225631 NR Description: unknown protein
  misc_feature (11)..(128): Homolog of NCBI NO: 18399156 NR Description: expressed protein
  misc_feature (11)..(128): Homolog of NCBI NO: 21617953 NR Description: yippee-like protein [Arabidopsis thaliana]
AFIDSGNSLEMGRLFLVNLEGKSYSCKHCKTNLALCDDVFSKSFQSRHGKAYLFSKVVNVYAGKKEDRMMMTGMHTVVDIYCVKCGSYVGWKYEFAFEKNQKYKEGKSVLERYKVWGPDGNNYWVAQEA

SEQ ID NO: 28236 - protein, 119 aa, Arabidopsis thaliana
  peptide (1)..(119): Ceres Seq. ID no. 12337609
  misc_feature (1)..(108): Pfam Name: Yippee putative zinc-binding protein Pfam Description: Yippee putative zinc-binding protein
  misc_feature (12)..(101): Homolog of NCBI NO: 20840809 NR Description: similar to hypothetical protein FLJ30213
  misc_feature (1)..(103): Homolog of NCBI NO: 34393694 NR Description: Yippee-like protein [Oryza sativa (japonica
  misc_feature (1)..(105): Homolog of NCBI NO: 15238881 NR Description: zinc-binding protein-like
  misc_feature (1)..(103): Homolog of NCBI NO: 15232001 NR Description: Yippee-like protein; protein id: At3g08990.1
  misc_feature (1)..(112): Homolog of NCBI NO: 15228759 NR Description: Yippee-like protein
  misc_feature (1)..(119): Homolog of NCBI NO: 28273361 NR Description: putative zinc binding protein
  misc_feature (1)..(118): Homolog of NCBI NO: 27923880 NR Description: Yippee-like protein
  misc_feature (1)..(116): Homolog of NCBI NO: 15225631 NR Description: unknown protein
  misc_feature (1)..(118): Homolog of NCBI NO: 18399156 NR Description: expressed protein
  misc_feature (1)..(118): Homolog of NCBI NO: 21617953 NR Description: yippee-like protein [Arabidopsis thaliana]
MGRLFLVNLEGKSYSCKHCKTNLALCDDVFSKSFQSRHGKAYLFSKVVNVYAGKKEDRMMMTGMHTVVDIYCVKCGSYVGWKYEFAFEKNQKYKEGKSVLERYKVWGPDGNNYWVAQEA

SEQ ID NO: 28237 - DNA, 943 bp, Arabidopsis thaliana
  misc_feature (1)..(943): Ceres Seq. ID no. 13489778
  misc_feature: MA Experiment ID: 108434 Result: Up-regulated in Transcription
  misc_feature: MA Experiment 108434 PARAMETER Experiment Name: At_Root_Tips_cDNA_P Parameter: Tissue Value: Root Tips
acatttgacatcctccgcttcaattctaaatctcccggcgaagaaaattaccggcaaatttcacggagaaacctcgccaacgaagcggagttatggcgggcatggctgcggtggcaggattacgaccgtggaacgcttttattcaagctctagttctgatatctctatcatttccctttctctccagcgcttaccgacctggagatatcgtccggatgagcaagatggggcagtatcactcttcgagaacgacttggcatgatgtgatcggaaagcattgcccgatcttcgccgtcaatcgcgaggtgttgatcccaatagcgaaaccaattggctacacaggaactgatccttataagataaaattccaagttggaagtgagaaatttctgattcactggcttttggtaattaatcgtaagagctcagaagttccgatgatcgatgtaaatttgagatattctggaggagatctgcttggagtcacagctcaagttatcgacatgcctcatagctatctgaatacacacccggagatccgcaaacagttttgggatcctcaacactggccaaaacatgttcttgttagatacacatggaaggagcagtcagagattgatgtatcctcaggattctatgtcctgtttggctcagctctcacattttcttttgtactctccatttacgtcttacaatcgtcacgagagaagctggcaaggtttgtaagagagacggtggtggagagcagcagcatgaatgttggagaatttggcaagggggattgagtcacatagtcaagtatatgtatgtttctacaattttagatacttggaatatggaattggccgttcaactctcagaaaagatttttcatcaaacatgaatagtcgaaagcaaaaactttgtccttgtaacattatggtttaatagatttacgtttctt

SEQ ID NO: 28238 - protein, 230 aa, Arabidopsis thaliana
  peptide (1)..(230): Ceres Seq. ID no. 13489779
  misc_feature (42)..(230): Homolog of NCBI NO: 11280696 NR Description: hypothetical protein F26O13.250 - Arabidopsis
  misc_feature (4)..(230): Homolog of NCBI NO: 21617957 NR Description: unknown [Arabidopsis thaliana]
  misc_feature (1)..(230): Homolog of NCBI NO: 18409385 NR Description: expressed protein [Arabidopsis thaliana]
MAGMAAVAGLRPWNAFIQALVLISLSFPFLSSAYRPGDIVRMSKMGQYHSSRTTWHDVIGKHCPIFAVNREVLIPIAKPIGYTGTDPYKIKFQVGSEKFLIHWLLVINRKSSEVPMIDVNLRYSGGDLLGVTAQVIDMPHSYLNTHPEIRKQFWDPQHWPKHVLVRYTWKEQSEIDVSSGFYVLFGSALTFSFVLSIYVLQSSREKLARFVRETVVESSSMNVGEFGKGD

SEQ ID NO: 28239 - protein, 227 aa, Arabidopsis thaliana
  peptide (1)..(227): Ceres Seq. ID no. 13489780
  misc_feature (39)..(227): Homolog of NCBI NO: 11280696 NR Description: hypothetical protein F26O13.250 - Arabidopsis
  misc_feature (1)..(227): Homolog of NCBI NO: 21617957 NR Description: unknown [Arabidopsis thaliana]
  misc_feature (1)..(227): Homolog of NCBI NO: 18409385 NR Description: expressed protein [Arabidopsis thaliana]
MAAVAGLRPWNAFIQALVLISLSFPFLSSAYRPGDIVRMSKMGQYHSSRTTWHDVIGKHCPIFAVNREVLIPIAKPIGYTGTDPYKIKFQVGSEKFLIHWLLVINRKSSEVPMIDVNLRYSGGDLLGVTAQVIDMPHSYLNTHPEIRKQFWDPQHWPKHVLVRYTWKEQSEIDVSSGFYVLFGSALTFSFVLSIYVLQSSREKLARFVRETVVESSSMNVGEFGKGD

SEQ ID NO: 28240 - protein, 189 aa, Arabidopsis thaliana
  peptide (1)..(189): Ceres Seq. ID no. 13489781
  misc_feature (1)..(189): Homolog of NCBI NO: 11280696 NR Description: hypothetical protein F26O13.250 - Arabidopsis
  misc_feature (1)..(189): Homolog of NCBI NO: 21617957 NR Description: unknown [Arabidopsis thaliana]
  misc_feature (1)..(189): Homolog of NCBI NO: 18409385 NR Description: expressed protein [Arabidopsis thaliana]
MSKMGQYHSSRTTWHDVIGKHCPIFAVNREVLIPIAKPIGYTGTDPYKIKFQVGSEKFLIHWLLVINRKSSEVPMIDVNLRYSGGDLLGVTAQVIDMPHSYLNTHPEIRKQFWDPQHWPKHVLVRYTWKEQSEIDVSSGFYVLFGSALTFSFVLSIYVLQSSREKLARFVRETVVESSSMNVGEFGKGD

SEQ ID NO: 28241 - DNA, 563 bp, Arabidopsis thaliana; identical to SEQ ID NO: 21572
  misc_feature (1)..(563): Ceres Seq. ID no. 12333265
  misc_feature: MA Experiment ID: 20000234 Result: Up-regulated in Transcription
  misc_feature: MA Experiment 20000234 PARAMETER Experiment Name: At_Siliques_P Parameter: Age (day) Value: 21
  misc_feature: MA Experiment 20000234 PARAMETER Experiment Name: At_Siliques_P Parameter: Organism Value: A. thaliana
  misc_feature: MA Experiment 20000234 PARAMETER Experiment Name: At_Siliques_P Parameter: Plant Line Value: WS
  misc_feature: MA Experiment 20000234 PARAMETER Experiment Name: At_Siliques_P Parameter: Tissue Value: Less Than 5mm Siliques vs. Whole Plant
  misc_feature: MA Experiment ID: 20000235 Result: Up-regulated in Transcription
  misc_feature: MA Experiment 20000235 PARAMETER Experiment Name: At_Siliques_P Parameter: Age (day) Value: 21
  misc_feature: MA Experiment 20000235 PARAMETER Experiment Name: At_Siliques_P Parameter: Organism Value: A. thaliana
  misc_feature: MA Experiment 20000235 PARAMETER Experiment Name: At_Siliques_P Parameter: Plant Line Value: WS
  misc_feature: MA Experiment 20000235 PARAMETER Experiment Name: At_Siliques_P Parameter: Tissue Value: 5-10mm Siliques vs. Whole Plant
  misc_feature: MA Experiment ID: 20001556 Result: Down-regulated in Transcription
  misc_feature: MA Experiment 20001556 PARAMETER Experiment Name: At_Drought_Soil_Dry_P Parameter: Age (day) Value: 26
  misc_feature: MA Experiment 20001556 PARAMETER Experiment Name: At_Drought_Soil_Dry_P Parameter: Organism Value: A. thaliana
  misc_feature: MA Experiment 20001556 PARAMETER Experiment Name: At_Drought_Soil_Dry_P Parameter: Plant Line Value: WS
  misc_feature: MA Experiment 20001556 PARAMETER Experiment Name: At_Drought_Soil_Dry_P Parameter: Post Timepoint (hr) Value: None
  misc_feature: MA Experiment 20001556 PARAMETER Experiment Name: At_Drought_Soil_Dry_P Parameter: Post-Treatment Value: None
  misc_feature: MA Experiment 20001556 PARAMETER Experiment Name: At_Drought_Soil_Dry_P Parameter: Timepoint (day) Value: 12
  misc_feature: MA Experiment 20001556 PARAMETER Experiment Name: At_Drought_Soil_Dry_P Parameter: Treatment Value: Drought vs. No Drought

SEQ ID NO: 28242 - protein, 114 aa, Arabidopsis thaliana; identical to SEQ ID NO: 21573
  peptide (1)..(114): Ceres Seq. ID no. 12333266
  misc_feature (2)..(113): Homolog of NCBI NO: 40287476 NR Description: thioredoxin [Capsicum annuum]
  misc_feature (3)..(112): Homolog of NCBI NO: 19851972 NR Description: thioredoxin H [Populus tremula x Populus
  misc_feature (3)..(112): Homolog of NCBI NO: 30575686 NR Description: thioredoxin H [Citrus x paradisi]
  misc_feature (3)..(114): Homolog of NCBI NO: 27466894 NR Description: thioredoxin h [Pisum sativum]
  misc_feature (2)..(114): Homolog of NCBI NO: 267124 NR Description: Thioredoxin H-type 1 (TRX-H1)
  misc_feature (3)..(114): Homolog of NCBI NO: 16588843 NR Description: thioredoxin H [Prunus persica]
  misc_feature (2)..(114): Homolog of NCBI NO: 13624884 NR Description: thioredoxin h [Pisum sativum]
  misc_feature (3)..(114): Homolog of NCBI NO: 586099 NR Description: Thioredoxin H-type 2 (TRX-H2)
  misc_feature (1)..(114): Homolog of NCBI NO: 11135282 NR Description: Thioredoxin H-type (TRX-H)
  misc_feature (1)..(114): Homolog of NCBI NO: 15230385 NR Description: thioredoxin h; protein id: At3g51030.1, supported
  misc_feature (2)..(113): Homolog of NCBI NO: 40287476 NR Description: thioredoxin [Capsicum annuum]
  misc_feature (3)..(112): Homolog of NCBI NO: 19851972 NR Description: thioredoxin H [Populus tremula x Populus
  misc_feature (3)..(112): Homolog of NCBI NO: 30575686 NR Description: thioredoxin H [Citrus x paradisi]
  misc_feature (3)..(114): Homolog of NCBI NO: 27466894 NR Description: thioredoxin h [Pisum sativum]
  misc_feature (2)..(114): Homolog of NCBI NO: 267124 NR Description: Thioredoxin H-type 1 (TRX-H1)
  misc_feature (3)..(114): Homolog of NCBI NO: 16588843 NR Description: thioredoxin H [Prunus persica]
  misc_feature (2)..(114): Homolog of NCBI NO: 13624884 NR Description: thioredoxin h [Pisum sativum]
  misc_feature (3)..(114): Homolog of NCBI NO: 586099 NR Description: Thioredoxin H-type 2 (TRX-H2)
  misc_feature (1)..(114): Homolog of NCBI NO: 11135282 NR Description: Thioredoxin H-type (TRX-H)
  misc_feature (1)..(114): Homolog of NCBI NO: 15230385 NR Description: thioredoxin h; protein id: At3g51030.1, supported

SEQ ID NO: 28243 - DNA, 759 bp, Arabidopsis thaliana
  misc_feature (1)..(759): Ceres Seq. ID no. 12331788
  misc_feature: MA Experiment ID: 108595 Result: Up-regulated in Transcription
  misc_feature: MA Experiment 108595 PARAMETER Experiment Name: At_Ler-pi_Ovule_cDNA_P Parameter: Plant Line Value: null
  misc_feature: MA Experiment ID: 20000111 Result: Down-regulated in Transcription
  misc_feature: MA Experiment 20000111 PARAMETER Experiment Name: At_42deg_Heat_cDNA_P Parameter: Temperature (deg C) Value: 42 vs. 22
  misc_feature: MA Experiment 20000111 PARAMETER Experiment Name: At_42deg_Heat_cDNA_P Parameter: Timepoint (hr) Value: 6
  misc_feature: MA Experiment 20000111 PARAMETER Experiment Name: At_42deg_Heat_cDNA_P Parameter: Tissue Value: Aerial
  misc_feature: MA Experiment ID: 20000113 Result: Down-regulated in Transcription
  misc_feature: MA Experiment 20000113 PARAMETER Experiment Name: At_42deg_Heat_cDNA_P Parameter: Temperature (deg C) Value: 42 vs. 22
  misc_feature: MA Experiment 20000113 PARAMETER Experiment Name: At_42deg_Heat_cDNA_P Parameter: Timepoint (hr) Value: 8
  misc_feature: MA Experiment 20000113 PARAMETER Experiment Name: At_42deg_Heat_cDNA_P Parameter: Tissue Value: Aerial
  misc_feature: MA Experiment ID: 20000144 Result: Down-regulated in Transcription
  misc_feature: MA Experiment 20000144 PARAMETER Experiment Name: At_42deg_Heat_cDNA_P Parameter: Temperature (deg C) Value: 42 vs. 22
  misc_feature: MA Experiment 20000144 PARAMETER Experiment Name: At_42deg_Heat_cDNA_P Parameter: Timepoint (hr) Value: 1
  misc_feature: MA Experiment 20000144 PARAMETER Experiment Name: At_42deg_Heat_cDNA_P Parameter: Tissue Value: Aerial
  misc_feature: MA Experiment ID: 20000180 Result: Up-regulated in Transcription
  misc_feature: MA Experiment 20000180 PARAMETER Experiment Name: At_Germinating_Seeds_P Parameter: Age (hr) Value: 24 vs. 0
  misc_feature: MA Experiment 20000180 PARAMETER Experiment Name: At_Germinating_Seeds_P Parameter: Tissue Value: Germinating Seeds
  misc_feature: MA Experiment ID: 20000184 Result: Up-regulated in Transcription
  misc_feature: MA Experiment 20000184 PARAMETER Experiment Name: At_Shoots__P Parameter: Age (day) Value: 7
  misc_feature: MA Experiment 20000184 PARAMETER Experiment Name: At_Shoots__P Parameter: Tissue Value: Shoots vs. Whole Plant
  misc_feature: MA Experiment ID: 20000227 Result: Down-regulated in Transcription
  misc_feature: MA Experiment 20000227 PARAMETER Experiment Name: At_Root-Tips-vs-Tops_P Parameter: Tissue Value: Root Tips vs. Root Tops
  misc_feature: MA Experiment ID: 20000439 Result: Up-regulated in Transcription
  misc_feature: MA Experiment 20000439 PARAMETER Experiment Name: At_Roots__P Parameter: Age (day) Value: 14 vs. 21
  misc_feature: MA Experiment 20000439 PARAMETER Experiment Name: At_Roots__P Parameter: Organism Value: A. thaliana
  misc_feature: MA Experiment 20000439 PARAMETER Experiment Name: At_Roots__P Parameter: Tissue Value: Roots vs. Whole Plant
accccttctctctctctctctctctcacacacacacacaaacgcacatacttgagcaaagtcatcacaatgagcttcttcatcgaagattctggtctcatagtcactcagcttctctacaaaatggctgttctcatcaccgtcttgagatggatcctcgcttggatcttacgctaccgatccagatccagatccacctcttcttccacttccgcctgtccttcgatttcctcacaggcgatcaaagaaagcctctccgtgacgacgttccgtgacgcagctgagagatctccggcgatgatcaacgacacctgcgctgtgtgtctcggagatctggaagatggagatgaggttagagaactcaggaactgtagccatatgtttcaccgtgagtgtattgaccggtggttggattatgaatgttgcggtggtgatgagaataacgaaggtgaggaggataatcaccgtacgtgtcctctttgtagaactccgctacttgctgctaatacgacgtcgtgtggtgattggccgacgaagaacgaacctagctgggccgttgaacggcttctctacctcttcggagatgatcttcacgtctgattaaatttttttttgtcttttcatttgattttttatttagtgggatcgattttgatcaattagaaatttaagtagtgagagtggttaatttttgtaaattgggggatttaatgtgttagattaggaaatataataataatatcatcgattaatttaaacc

SEQ ID NO: 28244 - protein, 198 aa, Arabidopsis thaliana
  peptide (1)..(198): Ceres Seq. ID no. 12331789
  misc_feature (104)..(160): Pfam Name: Zinc finger, C3HC4 type (RING finger) Pfam Description: Zinc finger, C3HC4 type (RING finger)
  misc_feature (32)..(175): Homolog of NCBI NO: 15233352 NR Description: RING-H2 finger protein RHA1a -like protein
  misc_feature (26)..(176): Homolog of NCBI NO: 15223041 NR Description: putative RING zinc finger protein
  misc_feature (64)..(179): Homolog of NCBI NO: 15233350 NR Description: RING-H2 finger protein RHA1b
  misc_feature (58)..(166): Homolog of NCBI NO: 21554155 NR Description: RING zinc finger protein-like [Arabidopsis
  misc_feature (63)..(165): Homolog of NCBI NO: 18411282 NR Description: similar to RING finger protein; protein id:
  misc_feature (58)..(166): Homolog of NCBI NO: 15238072 NR Description: RING zinc finger protein-like
  misc_feature (76)..(165): Homolog of NCBI NO: 15233117 NR Description: RING finger protein
  misc_feature (32)..(169): Homolog of NCBI NO: 23451086 NR Description: RING-H2 protein [Medicago sativa]
  misc_feature (23)..(196): Homolog of NCBI NO: 15229284 NR Description: putative protein
  misc_feature (23)..(198): Homolog of NCBI NO: 18420336 NR Description: putative protein
PFSLSLSLTHTHKRTYLSKVITMSFFIEDSGLIVTQLLYKMAVLITVLRWILAWILRYRSRSRSTSSSTSACPSISSQAIKESLSVTTFRDAAERSPAMINDTCAVCLGDLEDGDEVRELRNCSHMFHRECIDRWLDYECCGGDENNEGEEDNHRTCPLCRTPLLAANTTSCGDWPTKNEPSWAVERLLYLFGDDLHV

SEQ ID NO: 28245 - protein, 176 aa, Arabidopsis thaliana
  peptide (1)..(176): Ceres Seq. ID no. 12331790
  misc_feature (82)..(138): Pfam Name: Zinc finger, C3HC4 type (RING finger) Pfam Description: Zinc finger, C3HC4 type (RING finger)
  misc_feature (10)..(153): Homolog of NCBI NO: 15233352 NR Description: RING-H2 finger protein RHA1a -like protein
  misc_feature (4)..(154): Homolog of NCBI NO: 15223041 NR Description: putative RING zinc finger protein
  misc_feature (42)..(157): Homolog of NCBI NO: 15233350 NR Description: RING-H2 finger protein RHA1b
  misc_feature (36)..(144): Homolog of NCBI NO: 21554155 NR Description: RING zinc finger protein-like [Arabidopsis
  misc_feature (41)..(143): Homolog of NCBI NO: 18411282 NR Description: similar to RING finger protein; protein id:
  misc_feature (36)..(144): Homolog of NCBI NO: 15238072 NR Description: RING zinc finger protein-like
  misc_feature (54)..(143): Homolog of NCBI NO: 15233117 NR Description: RING finger protein
  misc_feature (10)..(147): Homolog of NCBI NO: 23451086 NR Description: RING-H2 protein [Medicago sativa]
  misc_feature (1)..(174): Homolog of NCBI NO: 15229284 NR Description: putative protein
  misc_feature (1)..(176): Homolog of NCBI NO: 18420336 NR Description: putative protein
MSFFIEDSGLIVTQLLYKMAVLITVLRWILAWILRYRSRSRSTSSSTSACPSISSQAIKESLSVTTFRDAAERSPAMINDTCAVCLGDLEDGDEVRELRNCSHMFHRECIDRWLDYECCGGDENNEGEEDNHRTCPLCRTPLLAANTTSCGDWPTKNEPSWAVERLLYLFGDDLHV

SEQ ID NO: 28246 - protein, 158 aa, Arabidopsis thaliana
  peptide (1)..(158): Ceres Seq. ID no. 12331791
  misc_feature (64)..(120): Pfam Name: Zinc finger, C3HC4 type (RING finger) Pfam Description: Zinc finger, C3HC4 type (RING finger)
  misc_feature (1)..(135): Homolog of NCBI NO: 15233352 NR Description: RING-H2 finger protein RHA1a -like protein
  misc_feature (1)..(136): Homolog of NCBI NO: 15223041 NR Description: putative RING zinc finger protein
  misc_feature (24)..(139): Homolog of NCBI NO: 15233350 NR Description: RING-H2 finger protein RHA1b
  misc_feature (18)..(126): Homolog of NCBI NO: 21554155 NR Description: RING zinc finger protein-like [Arabidopsis
  misc_feature (23)..(125): Homolog of NCBI NO: 18411282 NR Description: similar to RING finger protein; protein id:
  misc_feature (18)..(126): Homolog of NCBI NO: 15238072 NR Description: RING zinc finger protein-like
  misc_feature (36)..(125): Homolog of NCBI NO: 15233117 NR Description: RING finger protein
  misc_feature (1)..(129): Homolog of NCBI NO: 23451086 NR Description: RING-H2 protein [Medicago sativa]
  misc_feature (1)..(156): Homolog of NCBI NO: 15229284 NR Description: putative protein
  misc_feature (1)..(158): Homolog of NCBI NO: 18420336 NR Description: putative protein
MAVLITVLRWILAWILRYRSRSRSTSSSTSACPSISSQAIKESLSVTTFRDAAERSPAMINDTCAVCLGDLEDGDEVRELRNCSHMFHRECIDRWLDYECCGGDENNEGEEDNHRTCPLCRTPLLAANTTSCGDWPTKNEPSWAVERLLYLFGDDLHV

SEQ ID NO: 28247 - DNA, 476 bp, Arabidopsis thaliana
  misc_feature (1)..(476): Ceres Seq. ID no. 12393749
  misc_feature: MA Experiment ID: 20000437 Result: Down-regulated in Transcription
  misc_feature: MA Experiment 20000437 PARAMETER Experiment Name: At_Drought_P Parameter: Age (day) Value: 8
  misc_feature: MA Experiment 20000437 PARAMETER Experiment Name: At_Drought_P Parameter: Organism Value: A. thaliana
  misc_feature: MA Experiment 20000437 PARAMETER Experiment Name: At_Drought_P Parameter: Plant Line Value: WS
  misc_feature: MA Experiment 20000437 PARAMETER Experiment Name: At_Drought_P Parameter: Timepoint (hr) Value: 24
  misc_feature: MA Experiment 20000437 PARAMETER Experiment Name: At_Drought_P Parameter: Tissue Value: Whole Plant
  misc_feature: MA Experiment 20000437 PARAMETER Experiment Name: At_Drought_P Parameter: Treatment Value: Drought vs. No Drought
  misc_feature: MA Experiment ID: 20001557 Result: Up-regulated in Transcription
  misc_feature: MA Experiment 20001557 PARAMETER Experiment Name: At_Drought_Soil_Dry_P Parameter: Age (day) Value: 27
  misc_feature: MA Experiment 20001557 PARAMETER Experiment Name: At_Drought_Soil_Dry_P Parameter: Organism Value: A. thaliana
  misc_feature: MA Experiment 20001557 PARAMETER Experiment Name: At_Drought_Soil_Dry_P Parameter: Plant Line Value: WS
  misc_feature: MA Experiment 20001557 PARAMETER Experiment Name: At_Drought_Soil_Dry_P Parameter: Post Timepoint (hr) Value: 3
  misc_feature: MA Experiment 20001557 PARAMETER Experiment Name: At_Drought_Soil_Dry_P Parameter: Post-Treatment Value: Re-Water vs. No Drought
  misc_feature: MA Experiment 20001557 PARAMETER Experiment Name: At_Drought_Soil_Dry_P Parameter: Timepoint (day) Value: 13
  misc_feature: MA Experiment 20001557 PARAMETER Experiment Name: At_Drought_Soil_Dry_P Parameter: Treatment Value: Drought vs. No Drought
aaagatgtcgaagaaagcaggttggggagtgatgaccagccacagaagtggtgaaaccgaggacacattcattgctgacttagccgttggcttgtccactggacaaatcaaaaccggtgctccttgcagatccgagcgtcttgccaagtacaaccagcttttgcgtattgaggaggagttgggatcagaggcaatttacgctggagtcaacttccgcaaacctgtggaaccctactaaatggagcttttagaagcaaagtggtcttctttgtgacgaggagaagatgacctgagtttgatcatttgctttaattaaataaaacgttctgtttttgtttcttctttgtttggtttcttacgtcttttgttgaaccctttttgggaaaagttactcatttttgtaagggaaacatgagaatgctctgcctttgtcgaggacggtagccccttatttcaatctaatttcggctttactc

SEQ ID NO: 28248 - protein, 78 aa, Arabidopsis thaliana
  peptide (1)..(78): Ceres Seq. ID no. 12393750
  misc_feature (1)..(75): Pfam Name: Enolase, C-terminal TIM barrel domain Pfam Description: Enolase, C-terminal TIM barrel domain
  misc_feature (1)..(78): Homolog of NCBI NO: 3023714 NR Description: Enolase (2-phosphoglycerate dehydratase)
  misc_feature (1)..(78): Homolog of NCBI NO: 14423688 NR Description: Enolase 1 (2-phosphoglycerate dehydratase 1)
  misc_feature (1)..(78): Homolog of NCBI NO: 34597332 NR Description: enolase [Brassica napus]
  misc_feature (1)..(78): Homolog of NCBI NO: 34597330 NR Description: enolase [Brassica rapa]
  misc_feature (1)..(78): Homolog of NCBI NO: 6996529 NR Description: enolase [Lupinus luteus]
  misc_feature (1)..(78): Homolog of NCBI NO: 119354 NR Description: Enolase (2-phosphoglycerate dehydratase)
  misc_feature (1)..(78): Homolog of NCBI NO: 15809970 NR Description: At2g36530/F1O11.16 [Arabidopsis thaliana]
  misc_feature (1)..(78): Homolog of NCBI NO: 20260174 NR Description: enolase (2-phospho-D-glycerate hydroylase)
  misc_feature (1)..(78): Homolog of NCBI NO: 18175728 NR Description: putative enolase (2-phospho-D-glycerate
  misc_feature (1)..(78): Homolog of NCBI NO: 15227987 NR Description: enolase (2-phospho-D-glycerate hydroylase)
KMSKKAGWGVMTSHRSGETEDTFIADLAVGLSTGQIKTGAPCRSERLAKYNQLLRIEEELGSEAIYAGVNFRKPVEPY

SEQ ID NO: 28249 - protein, 77 aa, Arabidopsis thaliana
  peptide (1)..(77): Ceres Seq. ID no. 12393751
  misc_feature (1)..(74): Pfam Name: Enolase, C-terminal TIM barrel domain Pfam Description: Enolase, C-terminal TIM barrel domain
  misc_feature (1)..(77): Homolog of NCBI NO: 3023714 NR Description: Enolase (2-phosphoglycerate dehydratase)
  misc_feature (1)..(77): Homolog of NCBI NO: 14423688 NR Description: Enolase 1 (2-phosphoglycerate dehydratase 1)
  misc_feature (1)..(77): Homolog of NCBI NO: 34597332 NR Description: enolase [Brassica napus]
  misc_feature (1)..(77): Homolog of NCBI NO: 34597330 NR Description: enolase [Brassica rapa]
  misc_feature (1)..(77): Homolog of NCBI NO: 6996529 NR Description: enolase [Lupinus luteus]
  misc_feature (1)..(77): Homolog of NCBI NO: 119354 NR Description: Enolase (2-phosphoglycerate dehydratase)
  misc_feature (1)..(77): Homolog of NCBI NO: 15809970 NR Description: At2g36530/F1O11.16 [Arabidopsis thaliana]
  misc_feature (1)..(77): Homolog of NCBI NO: 18175728 NR Description: putative enolase (2-phospho-D-glycerate
  misc_feature (1)..(77): Homolog of NCBI NO: 20260174 NR Description: enolase (2-phospho-D-glycerate hydroylase)
  misc_feature (1)..(77): Homolog of NCBI NO: 15227987 NR Description: enolase (2-phospho-D-glycerate hydroylase)
MSKKAGWGVMTSHRSGETEDTFIADLAVGLSTGQIKTGAPCRSERLAKYNQLLRIEEELGSEAIYAGVNFRKPVEPY

SEQ ID NO: 28250 - protein, 68 aa, Arabidopsis thaliana
  peptide (1)..(68): Ceres Seq. ID no. 12393752
  misc_feature (1)..(65): Pfam Name: Enolase, C-terminal TIM barrel domain Pfam Description: Enolase, C-terminal TIM barrel domain
  misc_feature (1)..(68): Homolog of NCBI NO: 3023714 NR Description: Enolase (2-phosphoglycerate dehydratase)
  misc_feature (1)..(68): Homolog of NCBI NO: 14423688 NR Description: Enolase 1 (2-phosphoglycerate dehydratase 1)
  misc_feature (1)..(68): Homolog of NCBI NO: 34597332 NR Description: enolase [Brassica napus]
  misc_feature (1)..(68): Homolog of NCBI NO: 34597330 NR Description: enolase [Brassica rapa]
  misc_feature (1)..(68): Homolog of NCBI NO: 6996529 NR Description: enolase [Lupinus luteus]
  misc_feature (1)..(68): Homolog of NCBI NO: 119354 NR Description: Enolase (2-phosphoglycerate dehydratase)
  misc_feature (1)..(68): Homolog of NCBI NO: 15809970 NR Description: At2g36530/F1O11.16 [Arabidopsis thaliana]
  misc_feature (1)..(68): Homolog of NCBI NO: 20260174 NR Description: enolase (2-phospho-D-glycerate hydroylase)
  misc_feature (1)..(68): Homolog of NCBI NO: 18175728 NR Description: putative enolase (2-phospho-D-glycerate
  misc_feature (1)..(68): Homolog of NCBI NO: 15227987 NR Description: enolase (2-phospho-D-glycerate hydroylase)
MTSHRSGETEDTFIADLAVGLSTGQIKTGAPCRSERLAKYNQLLRIEEELGSEAIYAGVNFRKPVEPY

SEQ ID NO: 28251 - DNA, 898 bp, Arabidopsis thaliana
  misc_feature (1)..(898): Ceres Seq. ID no. 12338786
  misc_feature: MA Experiment ID: 20000184 Result: Down-regulated in Transcription
  misc_feature: MA Experiment 20000184 PARAMETER Experiment Name: At_Shoots__P Parameter: Age (day) Value: 7
  misc_feature: MA Experiment 20000184 PARAMETER Experiment Name: At_Shoots__P Parameter: Tissue Value: Shoots vs. Whole Plant
  misc_feature: MA Experiment ID: 20000185 Result: Down-regulated in Transcription
  misc_feature: MA Experiment 20000185 PARAMETER Experiment Name: At_Roots__P Parameter: Age (day) Value: 7 vs. 21
  misc_feature: MA Experiment 20000185 PARAMETER Experiment Name: At_Roots__P Parameter: Organism Value: A. thaliana
  misc_feature: MA Experiment 20000185 PARAMETER Experiment Name: At_Roots__P Parameter: Tissue Value: Roots vs. Whole Plant
  misc_feature: MA Experiment ID: 20000264 Result: Up-regulated in Transcription
  misc_feature: MA Experiment 20000264 PARAMETER Experiment Name: At_Open_Flower_P Parameter: Age (day) Value: 21
  misc_feature: MA Experiment 20000264 PARAMETER Experiment Name: At_Open_Flower_P Parameter: Plant Line Value: WS
  misc_feature: MA Experiment 20000264 PARAMETER Experiment Name: At_Open_Flower_P Parameter: Tissue Value: Open Flower vs. Whole Plant
  misc_feature: MA Experiment ID: 20000265 Result: Down-regulated in Transcription
  misc_feature: MA Experiment 20000265 PARAMETER Experiment Name: At_Open_Flower_P Parameter: Age (day) Value: 21
  misc_feature: MA Experiment 20000265 PARAMETER Experiment Name: At_Open_Flower_P Parameter: Plant Line Value: WS
  misc_feature: MA Experiment 20000265 PARAMETER Experiment Name: At_Open_Flower_P Parameter: Tissue Value: Closed Flower vs. Whole Plant
  misc_feature: MA Experiment ID: 20000438 Result: Down-regulated in Transcription
  misc_feature: MA Experiment 20000438 PARAMETER Experiment Name: At_Shoots__P Parameter: Age (day) Value: 14
  misc_feature: MA Experiment 20000438 PARAMETER Experiment Name: At_Shoots__P Parameter: Tissue Value: Shoots vs. Whole Plant
  misc_feature: MA Experiment ID: 20000439 Result: Down-regulated in Transcription
  misc_feature: MA Experiment 20000439 PARAMETER Experiment Name: At_Roots__P Parameter: Age (day) Value: 14 vs. 21
  misc_feature: MA Experiment 20000439 PARAMETER Experiment Name: At_Roots__P Parameter: Organism Value: A. thaliana
  misc_feature: MA Experiment 20000439 PARAMETER Experiment Name: At_Roots__P Parameter: Tissue Value: Roots vs. Whole Plant
  misc_feature: MA Experiment ID: 20000794 Result: Up-regulated in Transcription
  misc_feature: MA Experiment 20000794 PARAMETER Experiment Name: At_Petals_P Parameter: Age (day) Value: 23-25 days
  misc_feature: MA Experiment 20000794 PARAMETER Experiment Name: At_Petals_P Parameter: Plant Line Value: WS
  misc_feature: MA Experiment 20000794 PARAMETER Experiment Name: At_Petals_P Parameter: Tissue Value: Petals vs. Whole plant
  misc_feature: MA Experiment ID: 20001555 Result: Up-regulated in Transcription
  misc_feature: MA Experiment 20001555 PARAMETER Experiment Name: At_Drought_Soil_Dry_P Parameter: Age (day) Value: 24
  misc_feature: MA Experiment 20001555 PARAMETER Experiment Name: At_Drought_Soil_Dry_P Parameter: Organism Value: A. thaliana
  misc_feature: MA Experiment 20001555 PARAMETER Experiment Name: At_Drought_Soil_Dry_P Parameter: Plant Line Value: WS
  misc_feature: MA Experiment 20001555 PARAMETER Experiment Name: At_Drought_Soil_Dry_P Parameter: Post Timepoint (hr) Value: None
  misc_feature: MA Experiment 20001555 PARAMETER Experiment Name: At_Drought_Soil_Dry_P Parameter: Post-Treatment Value: None
  misc_feature: MA Experiment 20001555 PARAMETER Experiment Name: At_Drought_Soil_Dry_P Parameter: Timepoint (day) Value: 10
  misc_feature: MA Experiment 20001555 PARAMETER Experiment Name: At_Drought_Soil_Dry_P Parameter: Treatment Value: Drought vs. No Drought
  misc_feature: MA Experiment ID: 20001556 Result: Up-regulated in Transcription
  misc_feature: MA Experiment 20001556 PARAMETER Experiment Name: At_Drought_Soil_Dry_P Parameter: Age (day) Value: 26
  misc_feature: MA Experiment 20001556 PARAMETER Experiment Name: At_Drought_Soil_Dry_P Parameter: Organism Value: A. thaliana
  misc_feature: MA Experiment 20001556 PARAMETER Experiment Name: At_Drought_Soil_Dry_P Parameter: Plant Line Value: WS
  misc_feature: MA Experiment 20001556 PARAMETER Experiment Name: At_Drought_Soil_Dry_P Parameter: Post Timepoint (hr) Value: None
  misc_feature: MA Experiment 20001556 PARAMETER Experiment Name: At_Drought_Soil_Dry_P Parameter: Post-Treatment Value: None
  misc_feature: MA Experiment 20001556 PARAMETER Experiment Name: At_Drought_Soil_Dry_P Parameter: Timepoint (day) Value: 12
  misc_feature: MA Experiment 20001556 PARAMETER Experiment Name: At_Drought_Soil_Dry_P Parameter: Treatment Value: Drought vs. No Drought
  misc_feature: MA Experiment ID: 20001904 Result: Up-regulated in Transcription
  misc_feature: MA Experiment 20001904 PARAMETER Experiment Name: At_Drought_Reproduction_P Parameter: Age (day) Value: 37
  misc_feature: MA Experiment 20001904 PARAMETER Experiment Name: At_Drought_Reproduction_P Parameter: Organism Value: A. thaliana
  misc_feature: MA Experiment 20001904 PARAMETER Experiment Name: At_Drought_Reproduction_P Parameter: Plant Line Value: WS
  misc_feature: MA Experiment 20001904 PARAMETER Experiment Name: At_Drought_Reproduction_P Parameter: Timepoint (day) Value: 7
  misc_feature: MA Experiment 20001904 PARAMETER Experiment Name: At_Drought_Reproduction_P Parameter: Tissue Value: Rosettes
  misc_feature: MA Experiment 20001904 PARAMETER Experiment Name: At_Drought_Reproduction_P Parameter: Treatment Value: Drought vs. No Drought
  misc_feature: MA Experiment ID: 20001905 Result: Up-regulated in Transcription
  misc_feature: MA Experiment 20001905 PARAMETER Experiment Name: At_Drought_Reproduction_P Parameter: Age (day) Value: 40
  misc_feature: MA Experiment 20001905 PARAMETER Experiment Name: At_Drought_Reproduction_P Parameter: Organism Value: A. thaliana
  misc_feature: MA Experiment 20001905 PARAMETER Experiment Name: At_Drought_Reproduction_P Parameter: Plant Line Value: WS
  misc_feature: MA Experiment 20001905 PARAMETER Experiment Name: At_Drought_Reproduction_P Parameter: Timepoint (day) Value: 10
  misc_feature: MA Experiment 20001905 PARAMETER Experiment Name: At_Drought_Reproduction_P Parameter: Tissue Value: Rosettes
  misc_feature: MA Experiment 20001905 PARAMETER Experiment Name: At_Drought_Reproduction_P Parameter: Treatment Value: Drought vs. No Drought
  misc_feature: MA Experiment ID: 20001911 Result: Down-regulated in Transcription
  misc_feature: MA Experiment 20001911 PARAMETER Experiment Name: At_Drought_Reproduction_P Parameter: Age (day) Value: 40
  misc_feature: MA Experiment 20001911 PARAMETER Experiment Name: At_Drought_Reproduction_P Parameter: Organism Value: A. thaliana
  misc_feature: MA Experiment 20001911 PARAMETER Experiment Name: At_Drought_Reproduction_P Parameter: Plant Line Value: WS
  misc_feature: MA Experiment 20001911 PARAMETER Experiment Name: At_Drought_Reproduction_P Parameter: Timepoint (day) Value: 10
  misc_feature: MA Experiment 20001911 PARAMETER Experiment Name: At_Drought_Reproduction_P Parameter: Tissue Value: Flowers
  misc_feature: MA Experiment 20001911 PARAMETER Experiment Name: At_Drought_Reproduction_P Parameter: Treatment Value: Drought vs. No Drought
gagtatttatcacattaattattatcatacaataacagcgtttcaccattctcttttcaatattttcagttactttctataagaaccattcacttattcttttttctctccatctgtgattatggcttcctctatttccgctgctgaagtgaaagttgtcccagaagagtataatttcttgcaaaaacatgtcgccttcttcgacagaaacaaagatggtatcgtttatccctcggagacatttcaaggatttagagcaatcggatgtggatatttgttgtcaacattcgctgctgttttcatcaacatcagtctcagcagcaaaactcgtccggggaaaggattctcattctcgtttccgatagaggttaagaatgtccgcctagggatacatagcagcgattcaggcgtttacgacaaggatggacggtttgtggcttcaaagttcgaggagatatttgcgaagcatgctcacacacatcgcgatgctttgaccagcaaggaacttaaagaacttctcaaggcaaacagagaacctaatgattgtaaaggagggattttagcgtttggggagtggaaggtattgtataatttgtgcaaagacaagagtggtttgctacacaaggagatagtgagagccgtctatgatggttctcttttcgaacaactcgagaaacaaagatcttctaaaactccttagaatataatcatccaaaaaaaatcctaatgtaaattcattgttatgctcgtgaatctgttttagttaaatctttagtagttacagtaatctatggtgtgaagattgggatgtgtttgattttcaagaattatagtttatttgtgtaagtacttgtgtgattgtatcttattcaaataaaagattatatgattttttttt

SEQ ID NO: 28252 - protein, 192 aa, Arabidopsis thaliana
  peptide (1)..(192): Ceres Seq. ID no. 12338787
  misc_feature (12)..(185): Pfam Name: Caleosin related protein Pfam Description: Caleosin related protein
  misc_feature (20)..(187): Homolog of NCBI NO: 32488447 NR Description: OSJNBa0004N05.4 [Oryza sativa (japonica
  misc_feature (42)..(191): Homolog of NCBI NO: 15220688 NR Description: Ca2+-binding EF-hand common family protein,
  misc_feature (20)..(189): Homolog of NCBI NO: 34902470 NR Description: Putative abscisic acid-induced protein - rice
  misc_feature (12)..(189): Homolog of NCBI NO: 37652831 NR Description: calcium binding protein [Fagus sylvatica]
  misc_feature (1)..(191): Homolog of NCBI NO: 9295714 NR Description: F26F24.9 [Arabidopsis thaliana]
  misc_feature (20)..(191): Homolog of NCBI NO: 15220687 NR Description: pollen coat EF-hand protein
  misc_feature (1)..(191): Homolog of NCBI NO: 21593851 NR Description: unknown [Arabidopsis thaliana]
  misc_feature (1)..(191): Homolog of NCBI NO: 18409649 NR Description: Ca2+-binding EF-hand common family protein,
  misc_feature (1)..(192): Homolog of NCBI NO: 21617961 NR Description: unknown [Arabidopsis thaliana]
  misc_feature (1)..(192): Homolog of NCBI NO: 18409651 NR Description: Ca2+-binding EF-hand common family protein,
MASSISAAEVKVVPEEYNFLQKHVAFFDRNKDGIVYPSETFQGFRAIGCGYLLSTFAAVFINISLSSKTRPGKGFSFSFPIEVKNVRLGIHSSDSGVYDKDGRFVASKFEEIFAKHAHTHRDALTSKELKELLKANREPNDCKGGILAFGEWKVLYNLCKDKSGLLHKEIVRAVYDGSLFEQLEKQRSSKTP

SEQ ID NO: 28253 - DNA, 710 bp, Arabidopsis thaliana
  misc_feature (1)..(710): Ceres Seq. ID no. 12439581
  misc_feature: MA Experiment ID: 108595 Result: Down-regulated in Transcription
  misc_feature: MA Experiment 108595 PARAMETER Experiment Name: At_Ler-pi_Ovule_cDNA_P Parameter: Plant Line Value: null
  misc_feature: MA Experiment ID: 20000224 Result: Down-regulated in Transcription
agaaagagaaaagaaattgagaagaaaaaaaaaaggtgaccgtattctccgtcgattgtagccgcctgaagaaatatcttctcctctctcgttgaaccacgaatttgctctgatattagtgtttctctagccatggtgagctcaattttccacttgttatctcgatcggcgaacgcggcgtctggaatggctgtgcatgatgattgcaagctgagatttctggaactgaaggcgaaaaggacacaccgtttcatagtttacaagattgaggagaagcagaagcaagttgttgttgagaaagttggtcaaccgatccaaacttacgaggagtttgcagcatgtcttccagctgatgaatgccgttacgccatttacgattttgactttgtcactgctgagaattgccagaagagcaagatcttcttcatcgcgtggtgcccggatattgctaaggtgagaagcaagatgatctacgcaagctctaaggacaggttcaagagggaactagatgggattcaagtagagctacaggcaactgatccaacagagatggatctcgatgttttcagaagccgtgccaactaaagagtaaaaaccaaagtttattatcatcatccccttgaaagatctattctcttattctgttatttttgagtgatggtactggtacttgattatgtttttacattgtgttgtgaagttatgaaccc

SEQ ID NO: 28254 - protein, 150 aa, Arabidopsis thaliana
  peptide (1)..(150): Ceres Seq. ID no. 12439582
  misc_feature (23)..(150): Pfam Name: Cofilin/tropomyosin-type actin-binding protein Pfam Description: Cofilin/tropomyosin-type actin-binding protein
  misc_feature (19)..(150): Homolog of NCBI NO: 11276987 NR Description: actin depolymerizing factor 2 - Arabidopsis
  misc_feature (13)..(150): Homolog of NCBI NO: 38564721 NR Description: putative actin-depolymerizing factor 2
  misc_feature (13)..(150): Homolog of NCBI NO: 18408116 NR Description: actin depolymerizing factor 2 (ADF2)
  misc_feature (13)..(150): Homolog of NCBI NO: 30697295 NR Description: actin depolymerizing factor 3 - like protein
  misc_feature (13)..(149): Homolog of NCBI NO: 17366765 NR Description: Actin-depolymerizing factor 2 (ADF 2)
  misc_feature (13)..(150): Homolog of NCBI NO: 17366768 NR Description: Actin-depolymerizing factor 1 (ADF 1)
  misc_feature (19)..(150): Homolog of NCBI NO: 30697303 NR Description: actin depolymerizing factor 4 - like protein
  misc_feature (13)..(150): Homolog of NCBI NO: 4185511 NR Description: actin depolymerizing factor 4 [Arabidopsis
  misc_feature (13)..(150): Homolog of NCBI NO: 30697300 NR Description: actin depolymerizing factor 4 - like protein
  misc_feature (13)..(150): Homolog of NCBI NO: 15231309 NR Description: actin depolymerizing factor 1 (ADF1)
MVSSIFHLLSRSANAASGMAVHDDCKLRFLELKAKRTHRFIVYKIEEKQKQVVVEKVGQPIQTYEEFAACLPADECRYAIYDFDFVTAENCQKSKIFFIAWCPDIAKVRSKMIYASSKDRFKRELDGIQVELQATDPTEMDLDVFRSRAN

SEQ ID NO: 28255 - protein, 132 aa, Arabidopsis thaliana; identical to SEQ ID NO: 26127
  peptide (1)..(132): Ceres Seq. ID no. 12439583
  misc_feature (5)..(132): Pfam Name: Cofilin/tropomyosin-type actin-binding protein Pfam Description: Cofilin/tropomyosin-type actin-binding protein
  misc_feature (1)..(132): Homolog of NCBI NO: 11276987 NR Description: actin depolymerizing factor 2 - Arabidopsis
  misc_feature (1)..(132): Homolog of NCBI NO: 38564721 NR Description: putative actin-depolymerizing factor 2
  misc_feature (1)..(132): Homolog of NCBI NO: 18408116 NR Description: actin depolymerizing factor 2 (ADF2)
  misc_feature (1)..(132): Homolog of NCBI NO: 30697295 NR Description: actin depolymerizing factor 3 - like protein
  misc_feature (1)..(131): Homolog of NCBI NO: 17366765 NR Description: Actin-depolymerizing factor 2 (ADF 2)
  misc_feature (1)..(132): Homolog of NCBI NO: 17366768 NR Description: Actin-depolymerizing factor 1 (ADF 1)
  misc_feature (1)..(132): Homolog of NCBI NO: 30697303 NR Description: actin depolymerizing factor 4 - like protein
  misc_feature (1)..(132): Homolog of NCBI NO: 4185511 NR Description: actin depolymerizing factor 4 [Arabidopsis
  misc_feature (1)..(132): Homolog of NCBI NO: 30697300 NR Description: actin depolymerizing factor 4 - like protein
  misc_feature (1)..(132): Homolog of NCBI NO: 15231309 NR Description: actin depolymerizing factor 1 (ADF1)

SEQ ID NO: 28256 - DNA, 938 bp, Arabidopsis thaliana
  misc_feature (1)..(938): Ceres Seq. ID no. 13490234
  misc_feature: MA Experiment ID: 108488 Result: Down-regulated in Transcription
  misc_feature: MA Experiment ID: 108595 Result: Up-regulated in Transcription
  misc_feature: MA Experiment 108595 PARAMETER Experiment Name: At_Ler-pi_Ovule_cDNA_P Parameter: Plant Line Value: null
  misc_feature: MA Experiment ID: 20000184 Result: Down-regulated in Transcription
  misc_feature: MA Experiment 20000184 PARAMETER Experiment Name: At_Shoots__P Parameter: Age (day) Value: 7
  misc_feature: MA Experiment 20000184 PARAMETER Experiment Name: At_Shoots__P Parameter: Tissue Value: Shoots vs. Whole Plant
  misc_feature: MA Experiment ID: 20000185 Result: Down-regulated in Transcription
  misc_feature: MA Experiment 20000185 PARAMETER Experiment Name: At_Roots__P Parameter: Age (day) Value: 7 vs. 21
  misc_feature: MA Experiment 20000185 PARAMETER Experiment Name: At_Roots__P Parameter: Organism Value: A. thaliana
  misc_feature: MA Experiment 20000185 PARAMETER Experiment Name: At_Roots__P Parameter: Tissue Value: Roots vs. Whole Plant
  misc_feature: MA Experiment ID: 20000264 Result: Up-regulated in Transcription
  misc_feature: MA Experiment 20000264 PARAMETER Experiment Name: At_Open_Flower_P Parameter: Age (day) Value: 21
  misc_feature: MA Experiment 20000264 PARAMETER Experiment Name: At_Open_Flower_P Parameter: Plant Line Value: WS
  misc_feature: MA Experiment 20000264 PARAMETER Experiment Name: At_Open_Flower_P Parameter: Tissue Value: Open Flower vs. Whole Plant
  misc_feature: MA Experiment ID: 20000265 Result: Up-regulated in Transcription
  misc_feature: MA Experiment 20000265 PARAMETER Experiment Name: At_Open_Flower_P Parameter: Age (day) Value: 21
  misc_feature: MA Experiment 20000265 PARAMETER Experiment Name: At_Open_Flower_P Parameter: Plant Line Value: WS
  misc_feature: MA Experiment 20000265 PARAMETER Experiment Name: At_Open_Flower_P Parameter: Tissue Value: Closed Flower vs. Whole Plant
  misc_feature: MA Experiment ID: 20000286 Result: Up-regulated in Transcription
  misc_feature: MA Experiment 20000286 PARAMETER Experiment Name: At_Open_Flower_P Parameter: Age (day) Value: 21
  misc_feature: MA Experiment 20000286 PARAMETER Experiment Name: At_Open_Flower_P Parameter: Plant Line Value: WS
  misc_feature: MA Experiment 20000286 PARAMETER Experiment Name: At_Open_Flower_P Parameter: Tissue Value: Half Open vs. Whole Plant
  misc_feature: MA Experiment ID: 20000438 Result: Down-regulated in Transcription
  misc_feature: MA Experiment 20000438 PARAMETER Experiment Name: At_Shoots__P Parameter: Age (day) Value: 14
  misc_feature: MA Experiment 20000438 PARAMETER Experiment Name: At_Shoots__P Parameter: Tissue Value: Shoots vs. Whole Plant
  misc_feature: MA Experiment ID: 20000439 Result: Down-regulated in Transcription
  misc_feature: MA Experiment 20000439 PARAMETER Experiment Name: At_Roots__P Parameter: Age (day) Value: 14 vs. 21
  misc_feature: MA Experiment 20000439 PARAMETER Experiment Name: At_Roots__P Parameter: Organism Value: A. thaliana
  misc_feature: MA Experiment 20000439 PARAMETER Experiment Name: At_Roots__P Parameter: Tissue Value: Roots vs. Whole Plant
  misc_feature: MA Experiment ID: 20000794 Result: Up-regulated in Transcription
  misc_feature: MA Experiment 20000794 PARAMETER Experiment Name: At_Petals_P Parameter: Age (day) Value: 23-25 days
  misc_feature: MA Experiment 20000794 PARAMETER Experiment Name: At_Petals_P Parameter: Plant Line Value: WS
  misc_feature: MA Experiment 20000794 PARAMETER Experiment Name: At_Petals_P Parameter: Tissue Value: Petals vs. Whole plant
  misc_feature: MA Experiment ID: 20001560 Result: Down-regulated in Transcription
  misc_feature: MA Experiment 20001560 PARAMETER Experiment Name: At_Drought_Soil_Dry_P Parameter: Age (day) Value: 28
  misc_feature: MA Experiment 20001560 PARAMETER Experiment Name: At_Drought_Soil_Dry_P Parameter: Organism Value: A. thaliana
  misc_feature: MA Experiment 20001560 PARAMETER Experiment Name: At_Drought_Soil_Dry_P Parameter: Plant Line Value: WS
  misc_feature: MA Experiment 20001560 PARAMETER Experiment Name: At_Drought_Soil_Dry_P Parameter: Post Timepoint (hr) Value: None
  misc_feature: MA Experiment 20001560 PARAMETER Experiment Name: At_Drought_Soil_Dry_P Parameter: Post-Treatment Value: None
  misc_feature: MA Experiment 20001560 PARAMETER Experiment Name: At_Drought_Soil_Dry_P Parameter: Timepoint (day) Value: 14
  misc_feature: MA Experiment 20001560 PARAMETER Experiment Name: At_Drought_Soil_Dry_P Parameter: Treatment Value: Drought vs. No Drought
  misc_feature: MA Experiment ID: 20001757 Result: Down-regulated in Transcription
  misc_feature: MA Experiment 20001757 PARAMETER Experiment Name: At_50mM_NH4NO3_L-to-H_P Parameter: Timepoint (hr) Value: 6
  misc_feature: MA Experiment 20001757 PARAMETER Experiment Name: At_50mM_NH4NO3_L-to-H_P Parameter: Tissue Value: Leaf
  misc_feature: MA Experiment 20001757 PARAMETER Experiment Name: At_50mM_NH4NO3_L-to-H_P Parameter: Treatment Value: 50mM NH4NO3 vs 100mM Mannitol
  misc_feature: MA Experiment ID: 20001905 Result: Up-regulated in Transcription
  misc_feature: MA Experiment 20001905 PARAMETER Experiment Name: At_Drought_Reproduction_P Parameter: Age (day) Value: 40
  misc_feature: MA Experiment 20001905 PARAMETER Experiment Name: At_Drought_Reproduction_P Parameter: Organism Value: A. thaliana
  misc_feature: MA Experiment 20001905 PARAMETER Experiment Name: At_Drought_Reproduction_P Parameter: Plant Line Value: WS
  misc_feature: MA Experiment 20001905 PARAMETER Experiment Name: At_Drought_Reproduction_P Parameter: Timepoint (day) Value: 10
  misc_feature: MA Experiment 20001905 PARAMETER Experiment Name: At_Drought_Reproduction_P Parameter: Tissue Value: Rosettes
  misc_feature: MA Experiment 20001905 PARAMETER Experiment Name: At_Drought_Reproduction_P Parameter: Treatment Value: Drought vs. No Drought
  misc_feature: MA Experiment ID: 20001910 Result: Up-regulated in Transcription
  misc_feature: MA Experiment 20001910 PARAMETER Experiment Name: At_Drought_Reproduction_P Parameter: Age (day) Value: 37
  misc_feature: MA Experiment 20001910 PARAMETER Experiment Name: At_Drought_Reproduction_P Parameter: Organism Value: A. thaliana
  misc_feature: MA Experiment 20001910 PARAMETER Experiment Name: At_Drought_Reproduction_P Parameter: Plant Line Value: WS
  misc_feature: MA Experiment 20001910 PARAMETER Experiment Name: At_Drought_Reproduction_P Parameter: Timepoint (day) Value: 7
  misc_feature: MA Experiment 20001910 PARAMETER Experiment Name: At_Drought_Reproduction_P Parameter: Tissue Value: Flowers
  misc_feature: MA Experiment 20001910 PARAMETER Experiment Name: At_Drought_Reproduction_P Parameter: Treatment Value: Drought vs. No Drought
  misc_feature: MA Experiment ID: 20001911 Result: Up-regulated in Transcription
  misc_feature: MA Experiment 20001911 PARAMETER Experiment Name: At_Drought_Reproduction_P Parameter: Age (day) Value: 40
  misc_feature: MA Experiment 20001911 PARAMETER Experiment Name: At_Drought_Reproduction_P Parameter: Organism Value: A. thaliana
  misc_feature: MA Experiment 20001911 PARAMETER Experiment Name: At_Drought_Reproduction_P Parameter: Plant Line Value: WS
  misc_feature: MA Experiment 20001911 PARAMETER Experiment Name: At_Drought_Reproduction_P Parameter: Timepoint (day) Value: 10
  misc_feature: MA Experiment 20001911 PARAMETER Experiment Name: At_Drought_Reproduction_P Parameter: Tissue Value: Flowers
  misc_feature: MA Experiment 20001911 PARAMETER Experiment Name: At_Drought_Reproduction_P Parameter: Treatment Value: Drought vs. No Drought
actttaccatccaccagttcttctcaatctttctcttcctgggatcatcatcgttatgatttgattagcaacataacctagaatcaaaatgatgaatgaccttatcaacaacgatgggtcaattttcactagattctatttcctcggagatatctgagagaaaaaggttatttcactaatcgttaatcccagaggtgttttttttttgccaaggtcacgtgatatttttttttaatttcaatgactcgtcacgtgattttaaaatccccgttgttagtttcatcggaagaatcaacgatgagaaactctcctccttcgacgacgtcgttaagcaaagagagacgaaaagttggagaggtagcgggaggagcggcggcggagtgtgcggctgtgtggtgttgttgtccatgcgcggtggtgaatctaatggttttagccgtgtataaagttccggccgcggtttgtaaaaaagcttggaggcgaagcaaacgacgacgttttacgaggaaacgacatggtttgcttgcgtcagcgacggcggaaggaagcgaaagtaccgtacacgctagattgaatgaagaagatctaacggctgagattgtttttgaggaatgtcatgtgagtggtggtgagttaaacgacgtcgtcaggcttgaaaatgaaatgttggatcgtttctatggggctggcttttggagaagcccttcacagaaggacacgtcatcaggaagcctatgaattcttcttcttatgagtattttgggttttttgaaagaattaatagtaatttatttgttttttattttatttttttgtatgtaagttcaattgttttatgtggggtatgtgaatagaagaacattgtagtatactttatacatttttatttgttttctgttcgtttaaaatgtaactatgtctctttgtgtcagaatttg

SEQ ID NO: 28257 - protein, 165 aa, Arabidopsis thaliana
  peptide (1)..(165): Ceres Seq. ID no. 13490235
  misc_feature (38)..(164): Homolog of NCBI NO: 40539005 NR Description: expressed protein [Oryza sativa (japonica
  misc_feature (14)..(151): Homolog of NCBI NO: 18399317 NR Description: expressed protein [Arabidopsis thaliana]
  misc_feature (21)..(161): Homolog of NCBI NO: 322884 NR Description: pollen-preferential protein - trumpet lily
  misc_feature (15)..(162): Homolog of NCBI NO: 15240027 NR Description: hypothetical protein [Arabidopsis thaliana]
  misc_feature (77)..(165): Homolog of NCBI NO: 25370727 NR Description: hypothetical protein At2g27180 [imported] -
  misc_feature (20)..(165): Homolog of NCBI NO: 21617979 NR Description: unknown [Arabidopsis thaliana]
  misc_feature (1)..(165): Homolog of NCBI NO: 18401348 NR Description: expressed protein [Arabidopsis thaliana]
MTRHVILKSPLLVSSEESTMRNSPPSTTSLSKERRKVGEVAGGAAAECAAVWCCCPCAVVNLMVLAVYKVPAAVCKKAWRRSKRRRFTRKRHGLLASATAEGSESTVHARLNEEDLTAEIVFEECHVSGGELNDVVRLENEMLDRFYGAGFWRSPSQKDTSSGSL

SEQ ID NO: 28258 - protein, 146 aa, Arabidopsis thaliana
  peptide (1)..(146): Ceres Seq. ID no. 13490236
  misc_feature (19)..(145): Homolog of NCBI NO: 40539005 NR Description: expressed protein [Oryza sativa (japonica
  misc_feature (1)..(132): Homolog of NCBI NO: 18399317 NR Description: expressed protein [Arabidopsis thaliana]
  misc_feature (2)..(142): Homolog of NCBI NO: 322884 NR Description: pollen-preferential protein - trumpet lily
  misc_feature (1)..(143): Homolog of NCBI NO: 15240027 NR Description: hypothetical protein [Arabidopsis thaliana]
  misc_feature (58)..(146): Homolog of NCBI NO: 25370727 NR Description: hypothetical protein At2g27180 [imported] -
  misc_feature (1)..(146): Homolog of NCBI NO: 21617979 NR Description: unknown [Arabidopsis thaliana]
  misc_feature (1)..(146): Homolog of NCBI NO: 18401348 NR Description: expressed protein [Arabidopsis thaliana]
MRNSPPSTTSLSKERRKVGEVAGGAAAECAAVWCCCPCAVVNLMVLAVYKVPAAVCKKAWRRSKRRRFTRKRHGLLASATAEGSESTVHARLNEEDLTAEIVFEECHVSGGELNDVVRLENEMLDRFYGAGFWRSPSQKDTSSGSL

SEQ ID NO: 28259 - protein, 103 aa, Arabidopsis thaliana
  peptide (1)..(103): Ceres Seq. ID no. 13490237
  misc_feature (1)..(102): Homolog of NCBI NO: 40539005 NR Description: expressed protein [Oryza sativa (japonica
  misc_feature (1)..(89): Homolog of NCBI NO: 18399317 NR Description: expressed protein [Arabidopsis thaliana]
  misc_feature (1)..(99): Homolog of NCBI NO: 322884 NR Description: pollen-preferential protein - trumpet lily
  misc_feature (1)..(100): Homolog of NCBI NO: 15240027 NR Description: hypothetical protein [Arabidopsis thaliana]
  misc_feature (15)..(103): Homolog of NCBI NO: 25370727 NR Description: hypothetical protein At2g27180 [imported] -
  misc_feature (1)..(103): Homolog of NCBI NO: 21617979 NR Description: unknown [Arabidopsis thaliana]
  misc_feature (1)..(103): Homolog of NCBI NO: 18401348 NR Description: expressed protein [Arabidopsis thaliana]
MVLAVYKVPAAVCKKAWRRSKRRRFTRKRHGLLASATAEGSESTVHARLNEEDLTAEIVFEECHVSGGELNDVVRLENEMLDRFYGAGFWRSPSQKDTSSGSL

SEQ ID NO: 28260 - DNA, 1741 bp, Arabidopsis thaliana; identical to SEQ ID NO: 22872
  misc_feature (1)..(1741): Ceres Seq. ID no. 12377573
  misc_feature: MA Experiment ID: 20000112 Result: Up-regulated in Transcription
  misc_feature: MA Experiment 20000112 PARAMETER Experiment Name: At_42deg_Heat_cDNA_P Parameter: Temperature (deg C) Value: 42 vs. 22
  misc_feature: MA Experiment 20000112 PARAMETER Experiment Name: At_42deg_Heat_cDNA_P Parameter: Timepoint (hr) Value: 2
  misc_feature: MA Experiment 20000112 PARAMETER Experiment Name: At_42deg_Heat_cDNA_P Parameter: Tissue Value: Aerial
  misc_feature: MA Experiment ID: 20000180 Result: Up-regulated in Transcription
  misc_feature: MA Experiment 20000180 PARAMETER Experiment Name: At_Germinating_Seeds_P Parameter: Age (hr) Value: 24 vs. 0
  misc_feature: MA Experiment 20000180 PARAMETER Experiment Name: At_Germinating_Seeds_P Parameter: Tissue Value: Germinating Seeds
  misc_feature: MA Experiment ID: 20000182 Result: Down-regulated in Transcription
  misc_feature: MA Experiment 20000182 PARAMETER Experiment Name: At_2mM_SA_P Parameter: Age (day) Value: 14
  misc_feature: MA Experiment 20000182 PARAMETER Experiment Name: At_2mM_SA_P Parameter: Organism Value: A. thaliana
  misc_feature: MA Experiment 20000182 PARAMETER Experiment Name: At_2mM_SA_P Parameter: Plant Line Value: WS
  misc_feature: MA Experiment 20000182 PARAMETER Experiment Name: At_2mM_SA_P Parameter: Timepoint (hr) Value: 6
  misc_feature: MA Experiment 20000182 PARAMETER Experiment Name: At_2mM_SA_P Parameter: Tissue Value: Aerial
  misc_feature: MA Experiment 20000182 PARAMETER Experiment Name: At_2mM_SA_P Parameter: Treatment Value: 2mM SA vs. No Treatment
  misc_feature: MA Experiment ID: 20000184 Result: Up-regulated in Transcription
  misc_feature: MA Experiment 20000184 PARAMETER Experiment Name: At_Shoots__P Parameter: Age (day) Value: 7
  misc_feature: MA Experiment 20000184 PARAMETER Experiment Name: At_Shoots__P Parameter: Tissue Value: Shoots vs. Whole Plant
  misc_feature: MA Experiment ID: 20000185 Result: Down-regulated in Transcription
  misc_feature: MA Experiment 20000185 PARAMETER Experiment Name: At_Roots__P Parameter: Age (day) Value: 7 vs. 21
  misc_feature: MA Experiment 20000185 PARAMETER Experiment Name: At_Roots__P Parameter: Organism Value: A. thaliana
  misc_feature: MA Experiment 20000185 PARAMETER Experiment Name: At_Roots__P Parameter: Tissue Value: Roots vs. Whole Plant
  misc_feature: MA Experiment ID: 20000234 Result: Up-regulated in Transcription
  misc_feature: MA Experiment 20000234 PARAMETER Experiment Name: At_Siliques_P Parameter: Age (day) Value: 21
  misc_feature: MA Experiment 20000234 PARAMETER Experiment Name: At_Siliques_P Parameter: Organism Value: A. thaliana
  misc_feature: MA Experiment 20000234 PARAMETER Experiment Name: At_Siliques_P Parameter: Plant Line Value: WS
  misc_feature: MA Experiment 20000234 PARAMETER Experiment Name: At_Siliques_P Parameter: Tissue Value: Less Than 5mm Siliques vs. Whole Plant
  misc_feature: MA Experiment ID: 20000437 Result: Down-regulated in Transcription
  misc_feature: MA Experiment 20000437 PARAMETER Experiment Name: At_Drought_P Parameter: Age (day) Value: 8
  misc_feature: MA Experiment 20000437 PARAMETER Experiment Name: At_Drought_P Parameter: Organism Value: A. thaliana
  misc_feature: MA Experiment 20000437 PARAMETER Experiment Name: At_Drought_P Parameter: Plant Line Value: WS
  misc_feature: MA Experiment 20000437 PARAMETER Experiment Name: At_Drought_P Parameter: Timepoint (hr) Value: 24
  misc_feature: MA Experiment 20000437 PARAMETER Experiment Name: At_Drought_P Parameter: Tissue Value: Whole Plant
  misc_feature: MA Experiment 20000437 PARAMETER Experiment Name: At_Drought_P Parameter: Treatment Value: Drought vs. No Drought
  misc_feature: MA Experiment ID: 20000438 Result: Up-regulated in Transcription
  misc_feature: MA Experiment 20000438 PARAMETER Experiment Name: At_Shoots__P Parameter: Age (day) Value: 14
  misc_feature: MA Experiment 20000438 PARAMETER Experiment Name: At_Shoots__P Parameter: Tissue Value: Shoots vs. Whole Plant
  misc_feature: MA Experiment ID: 20000439 Result: Down-regulated in Transcription
  misc_feature: MA Experiment 20000439 PARAMETER Experiment Name: At_Roots__P Parameter: Age (day) Value: 14 vs. 21
  misc_feature: MA Experiment 20000439 PARAMETER Experiment Name: At_Roots__P Parameter: Organism Value: A. thaliana
  misc_feature: MA Experiment 20000439 PARAMETER Experiment Name: At_Roots__P Parameter: Tissue Value: Roots vs. Whole Plant
  misc_feature: MA Experiment ID: 20000495 Result: Down-regulated in Transcription
  misc_feature: MA Experiment 20000495 PARAMETER Experiment Name: At_Guard_Cells_P Parameter: Harvest Date Value: 8/2/2002
  misc_feature: MA Experiment 20000495 PARAMETER Experiment Name: At_Guard_Cells_P Parameter: Organism Value: A. thaliana
  misc_feature: MA Experiment 20000495 PARAMETER Experiment Name: At_Guard_Cells_P Parameter: Tissue Value: Guard Cells vs. Leaves
  misc_feature: MA Experiment ID: 20001248 Result: Down-regulated in Transcription
  misc_feature: MA Experiment 20001248 PARAMETER Experiment Name: At_Far-red-induction_P Parameter: Age (day) Value: 7
  misc_feature: MA Experiment 20001248 PARAMETER Experiment Name: At_Far-red-induction_P Parameter: Light Value: Far-red vs. White
  misc_feature: MA Experiment 20001248 PARAMETER Experiment Name: At_Far-red-induction_P Parameter: Organism Value: A. thaliana
  misc_feature: MA Experiment 20001248 PARAMETER Experiment Name: At_Far-red-induction_P Parameter: Plant Line Value: Columbia
  misc_feature: MA Experiment 20001248 PARAMETER Experiment Name: At_Far-red-induction_P Parameter: Timepoint (hr) Value: 4
  misc_feature: MA Experiment 20001248 PARAMETER Experiment Name: At_Far-red-induction_P Parameter: Tissue Value: Whole Plant
  misc_feature: MA Experiment ID: 20001450 Result: Down-regulated in Transcription
  misc_feature: MA Experiment 20001450 PARAMETER Experiment Name: At_Far-red-induction_P Parameter: Age (day) Value: 7
  misc_feature: MA Experiment 20001450 PARAMETER Experiment Name: At_Far-red-induction_P Parameter: Light Value: Far-red vs. White
  misc_feature: MA Experiment 20001450 PARAMETER Experiment Name: At_Far-red-induction_P Parameter: Organism Value: A. thaliana
  misc_feature: MA Experiment 20001450 PARAMETER Experiment Name: At_Far-red-induction_P Parameter: Plant Line Value: Columbia
  misc_feature: MA Experiment 20001450 PARAMETER Experiment Name: At_Far-red-induction_P Parameter: Timepoint (hr) Value: 8
  misc_feature: MA Experiment 20001450 PARAMETER Experiment Name: At_Far-red-induction_P Parameter: Tissue Value: Whole Plant
  misc_feature: MA Experiment ID: 20001451 Result: Down-regulated in Transcription
  misc_feature: MA Experiment 20001451 PARAMETER Experiment Name: At_Far-red-induction_P Parameter: Age (day) Value: 7
  misc_feature: MA Experiment 20001451 PARAMETER Experiment Name: At_Far-red-induction_P Parameter: Light Value: Far-red vs. White
  misc_feature: MA Experiment 20001451 PARAMETER Experiment Name: At_Far-red-induction_P Parameter: Organism Value: A. thaliana
  misc_feature: MA Experiment 20001451 PARAMETER Experiment Name: At_Far-red-induction_P Parameter: Plant Line Value: Columbia
  misc_feature: MA Experiment 20001451 PARAMETER Experiment Name: At_Far-red-induction_P Parameter: Timepoint (hr) Value: 24
  misc_feature: MA Experiment 20001451 PARAMETER Experiment Name: At_Far-red-induction_P Parameter: Tissue Value: Whole Plant
  misc_feature: MA Experiment ID: 20001911 Result: Down-regulated in Transcription
  misc_feature: MA Experiment 20001911 PARAMETER Experiment Name: At_Drought_Reproduction_P Parameter: Age (day) Value: 40
  misc_feature: MA Experiment 20001911 PARAMETER Experiment Name: At_Drought_Reproduction_P Parameter: Organism Value: A. thaliana
  misc_feature: MA Experiment 20001911 PARAMETER Experiment Name: At_Drought_Reproduction_P Parameter: Plant Line Value: WS
  misc_feature: MA Experiment 20001911 PARAMETER Experiment Name: At_Drought_Reproduction_P Parameter: Timepoint (day) Value: 10
  misc_feature: MA Experiment 20001911 PARAMETER Experiment Name: At_Drought_Reproduction_P Parameter: Tissue Value: Flowers
  misc_feature: MA Experiment 20001911 PARAMETER Experiment Name: At_Drought_Reproduction_P Parameter: Treatment Value: Drought vs. No Drought

SEQ ID NO: 28261 - protein, 470 aa, Arabidopsis thaliana; identical to SEQ ID NO: 22873
  peptide (1)..(470): Ceres Seq. ID no. 12377574
  misc_feature (138)..(315): Pfam Name: DNA photolyase Pfam Description: DNA photolyase
  misc_feature (138)..(315): Pfam Name: DNA photolyase Pfam Description: DNA photolyase
  misc_feature (128)..(443): Homolog of NCBI NO: 18400841 NR Description: 6-4 photolyase (UVR3)
  misc_feature (169)..(452): Homolog of NCBI NO: 16330358 NR Description: DNA photolyase [Synechocystis sp. PCC 6803]
  misc_feature (138)..(450): Homolog of NCBI NO: 23135973 NR Description: hypothetical protein [Cytophaga hutchinsonii]
  misc_feature (141)..(452): Homolog of NCBI NO: 28374085 NR Description: Chain A, Crystal Structure Analysis Of
  misc_feature (130)..(461): Homolog of NCBI NO: 28971609 NR Description: cryptochrome dash [Arabidopsis thaliana]
  misc_feature (128)..(443): Homolog of NCBI NO: 18400841 NR Description: 6-4 photolyase (UVR3)
  misc_feature (138)..(450): Homolog of NCBI NO: 23135973 NR Description: hypothetical protein [Cytophaga hutchinsonii]
  misc_feature (130)..(461): Homolog of NCBI NO: 28971609 NR Description: cryptochrome dash [Arabidopsis thaliana]
  misc_feature (24)..(470): Homolog of NCBI NO: 15226633 NR Description: photolyase/blue-light receptor (PHR2)
  misc_feature (24)..(470): Homolog of NCBI NO: 21592984 NR Description: photolyase/blue-light receptor PHR2 [Arabidopsis
  misc_feature (141)..(452): Homolog of NCBI NO: 23040111 NR Description: hypothetical protein [Trichodesmium erythraeum
  misc_feature (138)..(450): Homolog of NCBI NO: 37520404 NR Description: probable bacterial cryptochrome [Gloeobacter
  misc_feature (130)..(461): Homolog of NCBI NO: 22327046 NR Description: DNA photolyase - like protein
  misc_feature (141)..(452): Homolog of NCBI NO: 28374085 NR Description: Chain A, Crystal Structure Analysis Of
  misc_feature (169)..(452): Homolog of NCBI NO: 16330358 NR Description: DNA photolyase [Synechocystis sp. PCC 6803]
  misc_feature (130)..(461): Homolog of NCBI NO: 22327046 NR Description: DNA photolyase - like protein
  misc_feature (138)..(450): Homolog of NCBI NO: 37520404 NR Description: probable bacterial cryptochrome [Gloeobacter
  misc_feature (141)..(452): Homolog of NCBI NO: 23040111 NR Description: hypothetical protein [Trichodesmium erythraeum
  misc_feature (24)..(470): Homolog of NCBI NO: 21592984 NR Description: photolyase/blue-light receptor PHR2 [Arabidopsis
  misc_feature (24)..(470): Homolog of NCBI NO: 15226633 NR Description: photolyase/blue-light receptor (PHR2)

SEQ ID NO: 28262 - protein, 447 aa, Arabidopsis thaliana; identical to SEQ ID NO: 22874
  peptide (1)..(447): Ceres Seq. ID no. 12377575
  misc_feature (115)..(292): Pfam Name: DNA photolyase Pfam Description: DNA photolyase
  misc_feature (115)..(292): Pfam Name: DNA photolyase Pfam Description: DNA photolyase
  misc_feature (105)..(420): Homolog of NCBI NO: 18400841 NR Description: 6-4 photolyase (UVR3)
  misc_feature (146)..(429): Homolog of NCBI NO: 16330358 NR Description: DNA photolyase [Synechocystis sp. PCC 6803]
  misc_feature (115)..(427): Homolog of NCBI NO: 23135973 NR Description: hypothetical protein [Cytophaga hutchinsonii]
  misc_feature (118)..(429): Homolog of NCBI NO: 28374085 NR Description: Chain A, Crystal Structure Analysis Of
  misc_feature (107)..(438): Homolog of NCBI NO: 28971609 NR Description: cryptochrome dash [Arabidopsis thaliana]
  misc_feature (105)..(420): Homolog of NCBI NO: 18400841 NR Description: 6-4 photolyase (UVR3)
  misc_feature (115)..(427): Homolog of NCBI NO: 23135973 NR Description: hypothetical protein [Cytophaga hutchinsonii]
  misc_feature (107)..(438): Homolog of NCBI NO: 28971609 NR Description: cryptochrome dash [Arabidopsis thaliana]
  misc_feature (1)..(447): Homolog of NCBI NO: 15226633 NR Description: photolyase/blue-light receptor (PHR2)
  misc_feature (1)..(447): Homolog of NCBI NO: 21592984 NR Description: photolyase/blue-light receptor PHR2 [Arabidopsis
  misc_feature (118)..(429): Homolog of NCBI NO: 23040111 NR Description: hypothetical protein [Trichodesmium erythraeum
  misc_feature (115)..(427): Homolog of NCBI NO: 37520404 NR Description: probable bacterial cryptochrome [Gloeobacter
  misc_feature (107)..(438): Homolog of NCBI NO: 22327046 NR Description: DNA photolyase - like protein
  misc_feature (118)..(429): Homolog of NCBI NO: 28374085 NR Description: Chain A, Crystal Structure Analysis Of
  misc_feature (146)..(429): Homolog of NCBI NO: 16330358 NR Description: DNA photolyase [Synechocystis sp. PCC 6803]
  misc_feature (107)..(438): Homolog of NCBI NO: 22327046 NR Description: DNA photolyase - like protein
  misc_feature (115)..(427): Homolog of NCBI NO: 37520404 NR Description: probable bacterial cryptochrome [Gloeobacter
  misc_feature (118)..(429): Homolog of NCBI NO: 23040111 NR Description: hypothetical protein [Trichodesmium erythraeum
  misc_feature (1)..(447): Homolog of NCBI NO: 21592984 NR Description: photolyase/blue-light receptor PHR2 [Arabidopsis
  misc_feature (1)..(447): Homolog of NCBI NO: 15226633 NR Description: photolyase/blue-light receptor (PHR2)

SEQ ID NO: 28263 - DNA, 932 bp, Arabidopsis thaliana
  misc_feature (1)..(932): Ceres Seq. ID no. 12332733
  misc_feature: MA Experiment ID: 108434 Result: Down-regulated in Transcription
  misc_feature: MA Experiment 108434 PARAMETER Experiment Name: At_Root_Tips_cDNA_P Parameter: Tissue Value: Root Tips
  misc_feature: MA Experiment ID: 108435 Result: Down-regulated in Transcription
  misc_feature: MA Experiment 108435 PARAMETER Experiment Name: At_stm_Mutants_cDNA_P Parameter: Plant Line Value: wt Landsburg vs stm
  misc_feature: MA Experiment 108435 PARAMETER Experiment Name: At_stm_Mutants_cDNA_P Parameter: Tissue Value: Shoot Apical Meristem Region
  misc_feature: MA Experiment ID: 108461 Result: Up-regulated in Transcription
  misc_feature: MA Experiment 108461 PARAMETER Experiment Name: At_Germinating_Seeds_cDNA_P Parameter: Age (day) Value: 1 vs. 0
  misc_feature: MA Experiment 108461 PARAMETER Experiment Name: At_Germinating_Seeds_cDNA_P Parameter: Tissue Value: Germinating Seeds
  misc_feature: MA Experiment ID: 108462 Result: Up-regulated in Transcription
  misc_feature: MA Experiment 108462 PARAMETER Experiment Name: At_Germinating_Seeds_cDNA_P Parameter: Age (day) Value: 2 vs. 0
  misc_feature: MA Experiment 108462 PARAMETER Experiment Name: At_Germinating_Seeds_cDNA_P Parameter: Tissue Value: Germinating Seeds
  misc_feature: MA Experiment ID: 108464 Result: Up-regulated in Transcription
  misc_feature: MA Experiment 108464 PARAMETER Experiment Name: At_Germinating_Seeds_cDNA_P Parameter: Age (day) Value: 4 vs. 0
  misc_feature: MA Experiment 108464 PARAMETER Experiment Name: At_Germinating_Seeds_cDNA_P Parameter: Tissue Value: Germinating Seeds
  misc_feature: MA Experiment ID: 108488 Result: Up-regulated in Transcription
  misc_feature: MA Experiment ID: 108595 Result: Down-regulated in Transcription
  misc_feature: MA Experiment 108595 PARAMETER Experiment Name: At_Ler-pi_Ovule_cDNA_P Parameter: Plant Line Value: null
  misc_feature: MA Experiment ID: 20000087 Result: Down-regulated in Transcription
  misc_feature: MA Experiment 20000087 PARAMETER Experiment Name: At_100uM_ABA_Mutants_cDNA_P Parameter: Plant Line Value: WS
  misc_feature: MA Experiment 20000087 PARAMETER Experiment Name: At_100uM_ABA_Mutants_cDNA_P Parameter: Timepoint (hr) Value: 6
  misc_feature: MA Experiment 20000087 PARAMETER Experiment Name: At_100uM_ABA_Mutants_cDNA_P Parameter: Tissue Value: Aerial
  misc_feature: MA Experiment 20000087 PARAMETER Experiment Name: At_100uM_ABA_Mutants_cDNA_P Parameter: Treatment Value: 100uM ABA vs. No Treatment
  misc_feature: MA Experiment ID: 20000179 Result: Up-regulated in Transcription
  misc_feature: MA Experiment 20000179 PARAMETER Experiment Name: At_Germinating_Seeds_P Parameter: Age (hr) Value: 6 vs. 0
  misc_feature: MA Experiment 20000179 PARAMETER Experiment Name: At_Germinating_Seeds_P Parameter: Tissue Value: Germinating Seeds
  misc_feature: MA Experiment ID: 20000180 Result: Up-regulated in Transcription
  misc_feature: MA Experiment 20000180 PARAMETER Experiment Name: At_Germinating_Seeds_P Parameter: Age (hr) Value: 24 vs. 0
  misc_feature: MA Experiment 20000180 PARAMETER Experiment Name: At_Germinating_Seeds_P Parameter: Tissue Value: Germinating Seeds
  misc_feature: MA Experiment ID: 20000185 Result: Down-regulated in Transcription
  misc_feature: MA Experiment 20000185 PARAMETER Experiment Name: At_Roots__P Parameter: Age (day) Value: 7 vs. 21
  misc_feature: MA Experiment 20000185 PARAMETER Experiment Name: At_Roots__P Parameter: Organism Value: A. thaliana
  misc_feature: MA Experiment 20000185 PARAMETER Experiment Name: At_Roots__P Parameter: Tissue Value: Roots vs. Whole Plant
  misc_feature: MA Experiment ID: 20000269 Result: Down-regulated in Transcription
  misc_feature: MA Experiment 20000269 PARAMETER Experiment Name: At_1mM_KNO3_L-vs-H_Roots_P Parameter: Age (day) Value: 7,10,12
  misc_feature: MA Experiment 20000269 PARAMETER Experiment Name: At_1mM_KNO3_L-vs-H_Roots_P Parameter: Organism Value: A. thaliana
  misc_feature: MA Experiment 20000269 PARAMETER Experiment Name: At_1mM_KNO3_L-vs-H_Roots_P Parameter: Plant Line Value: WS
  misc_feature: MA Experiment 20000269 PARAMETER Experiment Name: At_1mM_KNO3_L-vs-H_Roots_P Parameter: Timepoint (day) Value: 7,10,12
  misc_feature: MA Experiment 20000269 PARAMETER Experiment Name: At_1mM_KNO3_L-vs-H_Roots_P Parameter: Tissue Value: Roots
  misc_feature: MA Experiment 20000269 PARAMETER Experiment Name: At_1mM_KNO3_L-vs-H_Roots_P Parameter: Treatment Value: 1mM KNO3 vs. 50mM KNO3
  misc_feature: MA Experiment ID: 20000439 Result: Down-regulated in Transcription
  misc_feature: MA Experiment 20000439 PARAMETER Experiment Name: At_Roots__P Parameter: Age (day) Value: 14 vs. 21
  misc_feature: MA Experiment 20000439 PARAMETER Experiment Name: At_Roots__P Parameter: Organism Value: A. thaliana
  misc_feature: MA Experiment 20000439 PARAMETER Experiment Name: At_Roots__P Parameter: Tissue Value: Roots vs. Whole Plant
  misc_feature: MA Experiment ID: 20000794 Result: Down-regulated in Transcription
  misc_feature: MA Experiment 20000794 PARAMETER Experiment Name: At_Petals_P Parameter: Age (day) Value: 23-25 days
  misc_feature: MA Experiment 20000794 PARAMETER Experiment Name: At_Petals_P Parameter: Plant Line Value: WS
  misc_feature: MA Experiment 20000794 PARAMETER Experiment Name: At_Petals_P Parameter: Tissue Value: Petals vs. Whole plant
  misc_feature: MA Experiment ID: 20001557 Result: Down-regulated in Transcription
  misc_feature: MA Experiment 20001557 PARAMETER Experiment Name: At_Drought_Soil_Dry_P Parameter: Age (day) Value: 27
  misc_feature: MA Experiment 20001557 PARAMETER Experiment Name: At_Drought_Soil_Dry_P Parameter: Organism Value: A. thaliana
  misc_feature: MA Experiment 20001557 PARAMETER Experiment Name: At_Drought_Soil_Dry_P Parameter: Plant Line Value: WS
  misc_feature: MA Experiment 20001557 PARAMETER Experiment Name: At_Drought_Soil_Dry_P Parameter: Post Timepoint (hr) Value: 3
  misc_feature: MA Experiment 20001557 PARAMETER Experiment Name: At_Drought_Soil_Dry_P Parameter: Post-Treatment Value: Re-Water vs. No Drought
  misc_feature: MA Experiment 20001557 PARAMETER Experiment Name: At_Drought_Soil_Dry_P Parameter: Timepoint (day) Value: 13
  misc_feature: MA Experiment 20001557 PARAMETER Experiment Name: At_Drought_Soil_Dry_P Parameter: Treatment Value: Drought vs. No Drought
  misc_feature: MA Experiment ID: 20001757 Result: Up-regulated in Transcription
  misc_feature: MA Experiment 20001757 PARAMETER Experiment Name: At_50mM_NH4NO3_L-to-H_P Parameter: Timepoint (hr) Value: 6
  misc_feature: MA Experiment 20001757 PARAMETER Experiment Name: At_50mM_NH4NO3_L-to-H_P Parameter: Tissue Value: Leaf
  misc_feature: MA Experiment 20001757 PARAMETER Experiment Name: At_50mM_NH4NO3_L-to-H_P Parameter: Treatment Value: 50mM NH4NO3 vs 100mM Mannitol
  misc_feature: MA Experiment ID: 20001904 Result: Down-regulated in Transcription
  misc_feature: MA Experiment 20001904 PARAMETER Experiment Name: At_Drought_Reproduction_P Parameter: Age (day) Value: 37
  misc_feature: MA Experiment 20001904 PARAMETER Experiment Name: At_Drought_Reproduction_P Parameter: Organism Value: A. thaliana
  misc_feature: MA Experiment 20001904 PARAMETER Experiment Name: At_Drought_Reproduction_P Parameter: Plant Line Value: WS
  misc_feature: MA Experiment 20001904 PARAMETER Experiment Name: At_Drought_Reproduction_P Parameter: Timepoint (day) Value: 7
  misc_feature: MA Experiment 20001904 PARAMETER Experiment Name: At_Drought_Reproduction_P Parameter: Tissue Value: Rosettes
  misc_feature: MA Experiment 20001904 PARAMETER Experiment Name: At_Drought_Reproduction_P Parameter: Treatment Value: Drought vs. No Drought
  misc_feature: MA Experiment ID: 20001906 Result: Down-regulated in Transcription
  misc_feature: MA Experiment 20001906 PARAMETER Experiment Name: At_Drought_Reproduction_P Parameter: Age (day) Value: 35
  misc_feature: MA Experiment 20001906 PARAMETER Experiment Name: At_Drought_Reproduction_P Parameter: Organism Value: A. thaliana
  misc_feature: MA Experiment 20001906 PARAMETER Experiment Name: At_Drought_Reproduction_P Parameter: Plant Line Value: WS
  misc_feature: MA Experiment 20001906 PARAMETER Experiment Name: At_Drought_Reproduction_P Parameter: Timepoint (day) Value: 5
  misc_feature: MA Experiment 20001906 PARAMETER Experiment Name: At_Drought_Reproduction_P Parameter: Tissue Value: Siliques
  misc_feature: MA Experiment 20001906 PARAMETER Experiment Name: At_Drought_Reproduction_P Parameter: Treatment Value: Drought vs. No Drought
ataacttaatcacacacaaggagagaaagagagaaagagagacagagataatggcgtacagtgcgtgtttcctacaccagagcgcattggcttcatcagccgcacgatcatcatcttcctcctcatcccagcgtcacgtgtcgctctccaaacctgttcagatcatctgtaaagctcaacagtctcatgaagacgataactccgccgtctcccgccgtcttgctctcactctcctcgtcggcgccgctgctgttggttccaaagtatctcctgctgatgccgcctacggtgaagctgcaaacgtgtttgggaagccaaagacgaacacagacttcttgccatacaatggagatgggttcaaagtgcaggttccagcaaaatggaacccaagcaaagagattgagtatccaggacaagtccttaggttcgaagacaacttcgatgctactagcaatctcaatgtcatggtcactcctaccgacaagaagtccatcactgattacggttctcccggagagttcctctctcaggttaattacctcctagggaaacaagcttacttcggtgagactgcctctgagggaggctttgacaacaatgcagtggcaacagcaaacattctggagtcatcatctcaggaagttggtgggaaaccctactattacttgtctgtgttgacaagaacggctgatggagacgaaggtgggaagcatcagctgatcacagcaacggtgaatggagggaagctttacatctgcaaagcacaagctggagacaagaggtggttcaagggagccaggaaatttgtcgagagcgcagccacttctttcagtgttgcttgagtgaaagcaacacaacgtaacaatgctctgcttgctttcttcatttgtctcttgtaaaaaatggaaaatgaaactgagcttttgagaacc

SEQ ID NO: 28264 - protein, 279 aa, Arabidopsis thaliana
  peptide (1)..(279): Ceres Seq. ID no. 12332734
  misc_feature (77)..(279): Pfam Name: PsbP Pfam Description: PsbP
  misc_feature (18)..(279): Homolog of NCBI NO: 266856 NR Description: Oxygen-evolving enhancer protein 2, chloroplast (OEE2) (23 kDa subunit of oxygen evolving system of photosystem
  misc_feature (17)..(279): Homolog of NCBI NO: 417604 NR Description: 23 kDa polypeptide of water-oxidizing complex of
  misc_feature (24)..(279): Homolog of NCBI NO: 19898 NR Description: photosystem II 23 kDa polypeptide [Nicotiana
  misc_feature (22)..(279): Homolog of NCBI NO: 1345550 NR Description: 23-kDa ploypeptide of photosystem II
  misc_feature (17)..(279): Homolog of NCBI NO: 7443216 NR Description: photosystem II oxygen-evolving complex protein 2
  misc_feature (17)..(279): Homolog of NCBI NO: 15224572 NR Description: photosystem II oxygen-evolving complex 23 (OEC23)
  misc_feature (29)..(279): Homolog of NCBI NO: 81723 NR Description: photosystem II oxygen-evolving complex protein 2
  misc_feature (17)..(279): Homolog of NCBI NO: 11133887 NR Description: OXYGEN-EVOLVING ENHANCER PROTEIN 2-2, CHLOROPLAST (OEE2) (23 KDA SUBUNIT OF OXYGEN EVOLVING SYSTEM OF PHOTOSYSTEM
  misc_feature (17)..(279): Homolog of NCBI NO: 131391 NR Description: Oxygen-evolving enhancer protein 2, chloroplast (OEE2) (23 kDa subunit of oxygen evolving system of photosystem
  misc_feature (17)..(279): Homolog of NCBI NO: 15222166 NR Description: photosystem II oxygen-evolving complex 23 (OEC23)
NLITHKERKRERETEIMAYSACFLHQSALASSAARSSSSSSSQRHVSLSKPVQIICKAQQSHEDDNSAVSRRLALTLLVGAAAVGSKVSPADAAYGEAANVFGKPKTNTDFLPYNGDGFKVQVPAKWNPSKEIEYPGQVLRFEDNFDATSNLNVMVTPTDKKSITDYGSPGEFLSQVNYLLGKQAYFGETASEGGFDNNAVATANILESSSQEVGGKPYYYLSVLTRTADGDEGGKHQLITATVNGGKLYICKAQAGDKRWFKGARKFVESAATSFSVA

SEQ ID NO: 28265 - protein, 263 aa, Arabidopsis thaliana
  peptide (1)..(263): Ceres Seq. ID no. 12332735
  misc_feature (61)..(263): Pfam Name: PsbP Pfam Description: PsbP
  misc_feature (2)..(263): Homolog of NCBI NO: 266856 NR Description: Oxygen-evolving enhancer protein 2, chloroplast (OEE2) (23 kDa subunit of oxygen evolving system of photosystem
  misc_feature (1)..(263): Homolog of NCBI NO: 417604 NR Description: 23 kDa polypeptide of water-oxidizing complex of
  misc_feature (8)..(263): Homolog of NCBI NO: 19898 NR Description: photosystem II 23 kDa polypeptide [Nicotiana
  misc_feature (6)..(263): Homolog of NCBI NO: 1345550 NR Description: 23-kDa ploypeptide of photosystem II
  misc_feature (1)..(263): Homolog of NCBI NO: 7443216 NR Description: photosystem II oxygen-evolving complex protein 2
  misc_feature (1)..(263): Homolog of NCBI NO: 15224572 NR Description: photosystem II oxygen-evolving complex 23 (OEC23)
  misc_feature (13)..(263): Homolog of NCBI NO: 81723 NR Description: photosystem II oxygen-evolving complex protein 2
  misc_feature (1)..(263): Homolog of NCBI NO: 11133887 NR Description: OXYGEN-EVOLVING ENHANCER PROTEIN 2-2, CHLOROPLAST (OEE2) (23 KDA SUBUNIT OF OXYGEN EVOLVING SYSTEM OF PHOTOSYSTEM
  misc_feature (1)..(263): Homolog of NCBI NO: 131391 NR Description: Oxygen-evolving enhancer protein 2, chloroplast (OEE2) (23 kDa subunit of oxygen evolving system of photosystem
  misc_feature (1)..(263): Homolog of NCBI NO: 15222166 NR Description: photosystem II oxygen-evolving complex 23 (OEC23)
MAYSACFLHQSALASSAARSSSSSSSQRHVSLSKPVQIICKAQQSHEDDNSAVSRRLALTLLVGAAAVGSKVSPADAAYGEAANVFGKPKTNTDFLPYNGDGFKVQVPAKWNPSKEIEYPGQVLRFEDNFDATSNLNVMVTPTDKKSITDYGSPGEFLSQVNYLLGKQAYFGETASEGGFDNNAVATANILESSSQEVGGKPYYYLSVLTRTADGDEGGKHQLITATVNGGKLYICKAQAGDKRWFKGARKFVESAATSFSVA

SEQ ID NO: 28266 - DNA, 2203 bp, Arabidopsis thaliana
  misc_feature (1)..(2203): Ceres Seq. ID no. 12325555
  misc_feature: MA Experiment ID: 108462 Result: Down-regulated in Transcription
  misc_feature: MA Experiment 108462 PARAMETER Experiment Name: At_Germinating_Seeds_cDNA_P Parameter: Age (day) Value: 2 vs. 0
  misc_feature: MA Experiment 108462 PARAMETER Experiment Name: At_Germinating_Seeds_cDNA_P Parameter: Tissue Value: Germinating Seeds
  misc_feature: MA Experiment ID: 108463 Result: Down-regulated in Transcription
  misc_feature: MA Experiment 108463 PARAMETER Experiment Name: At_Germinating_Seeds_cDNA_P Parameter: Age (day) Value: 3 vs. 0
  misc_feature: MA Experiment 108463 PARAMETER Experiment Name: At_Germinating_Seeds_cDNA_P Parameter: Tissue Value: Germinating Seeds
  misc_feature: MA Experiment ID: 108464 Result: Down-regulated in Transcription
  misc_feature: MA Experiment 108464 PARAMETER Experiment Name: At_Germinating_Seeds_cDNA_P Parameter: Age (day) Value: 4 vs. 0
  misc_feature: MA Experiment 108464 PARAMETER Experiment Name: At_Germinating_Seeds_cDNA_P Parameter: Tissue Value: Germinating Seeds
  misc_feature: MA Experiment ID: 20001557 Result: Up-regulated in Transcription
  misc_feature: MA Experiment 20001557 PARAMETER Experiment Name: At_Drought_Soil_Dry_P Parameter: Age (day) Value: 27
  misc_feature: MA Experiment 20001557 PARAMETER Experiment Name: At_Drought_Soil_Dry_P Parameter: Organism Value: A. thaliana
  misc_feature: MA Experiment 20001557 PARAMETER Experiment Name: At_Drought_Soil_Dry_P Parameter: Plant Line Value: WS
  misc_feature: MA Experiment 20001557 PARAMETER Experiment Name: At_Drought_Soil_Dry_P Parameter: Post Timepoint (hr) Value: 3
  misc_feature: MA Experiment 20001557 PARAMETER Experiment Name: At_Drought_Soil_Dry_P Parameter: Post-Treatment Value: Re-Water vs. No Drought
  misc_feature: MA Experiment 20001557 PARAMETER Experiment Name: At_Drought_Soil_Dry_P Parameter: Timepoint (day) Value: 13
  misc_feature: MA Experiment 20001557 PARAMETER Experiment Name: At_Drought_Soil_Dry_P Parameter: Treatment Value: Drought vs. No Drought
gctttcattctttggatgcgctgttgtcaacttgtccctcgctgcctctgcttcttaactctttctttatcacttttccactcccaaatcaatttttaggttttttttttataattataatttatttgctctcggcaggatctatataatacacagaccagtctttgcgtgtgcttgtgtgcattcattgatcgggtttatatcttttcatcggattttctttgtcgagcaaaagccatgtcactgagacccaacgctaagacggaggttcgccggaaccgatacaaagttgcagtggatgcggaggaaggacgacggaggagagaagacaacatggttgagatccgtaaaagcaagcgtgaggagagtttgatgaagaagagacgtgaaggtatgcaagctcttcagggtttcccttcagcttccgccgcctccgtcgataagaagttggatagtctgaaggatatggtcgctggggtttggtccgatgaccctgccttgcagcttgagtccactactcagttcaggaagcttctctctattgagagaagtcctccaatcgaggaagtgataagtgctggtgttgttcctaggtttgttgagtttcttaagaaagaagattaccccgccattcagtttgaggcagcttgggctctaacaaacattgcatctggaacatcggatcacactaaggttgtaatcgatcacaatgctgttccaatctttgttcagcttcttgcttcccctagcgatgatgttcgtgaacaggctgtatgggctttgggtaacgttgctggtgattcaccacggtgccgtgatcttgttcttggatgtggggcactgcttccgctgctcaatcagcttaatgagcatgctaaattgtccatgcttcgaaatgccacttggaccttgtcaaacttctgtcgtggcaagcctcagcctcactttgaccaggtcaaacctgctcttcccgcccttgaacgactaattcattcagatgatgaagaagtcttgacagatgcctgttgggctctttcttacctctctgatgggaccaatgacaaaatccagactgtcatccaggccggtgttgtcccaaaacttgttgaacttctcctccatcattctccatctgtgctaattcctgctcttcgcactgttggaaatatagttactggagatgatatacaaacacagtgcgtgatcaatagtggtgctctaccttgtcttgccaacctgctcactcaaaaccataagaaaagcataaagaaggaagcttgctggacgatttcaaacatcacagcaggcaacaaagatcagatccagacggtagttgaggctaatttgatttccccgttggtgagtctgcttcaaaatgctgaatttgacattaagaaggaagctgcatgggcaatttcaaatgcaacttcaggtggttctcatgatcaaataaaatacctggtggagcaagggtgcataaaaccattatgcgatctcctggtttgcccagatccaagaatcataactgtctgccttgaaggattggaaaacattttgaaggtgggagaggcagagaagaacttgggtcacacaggagacatgaactattacgctcagctgattgatgatgcagaagggctagaaaagatcgagaaccttcagagccatgacaacaatgagatctatgagaaggctgttaaaattctggagacatactggcttgaagaggaagatgatgagacacagcaacctccaggtgttgatggttctcaggctgggttccagtttggagggaatcaagctccagtaccatccggaggattcaacttcagctgaaggtaaataaaagaatggaattggaagcttgcaacttgagaatggtgaaaggtcagagtcagtcagagtctagtttcactgccatggttatactccaggtctggtctggtctggtctcagaggtttgtaccgggtggtcggtttaaaagtacagcgtctgagaaagtgtttggttcattgtccagggctatttttttgaaatgactggtacaccggtcgtgagtcgacctttgtgttgtttttaaattttggagggttataaaaacttacagtggagtcttttgtttttgtgttgacaacagtttgtatgtcggttaaaaaattgaaaccataaacccttttttggtcttaatatgtttggtgtctg

SEQ ID NO: 28267 - protein, 532 aa, Arabidopsis thaliana
  peptide (1)..(532): Ceres Seq. ID no. 12325556
  misc_feature (12)..(531): Homolog of NCBI NO: 30421147 NR Description: importin alpha [Toxoplasma gondii]
  misc_feature (1)..(531): Homolog of NCBI NO: 6682927 NR Description: importin alpha 1b [Oryza sativa (japonica
  misc_feature (1)..(532): Homolog of NCBI NO: 3915737 NR Description: Importin alpha subunit (Karyopherin alpha
  misc_feature (1)..(531): Homolog of NCBI NO: 13752562 NR Description: importin alpha 2 [Capsicum annuum]
  misc_feature (1)..(531): Homolog of NCBI NO: 25314870 NR Description: probable nuclear transport factor importin alpha
  misc_feature (1)..(531): Homolog of NCBI NO: 13605661 NR Description: AT3g06720/F3E22_14 [Arabidopsis thaliana]
  misc_feature (1)..(532): Homolog of NCBI NO: 13699777 NR Description: AtKAP alpha [Arabidopsis thaliana]
  misc_feature (1)..(532): Homolog of NCBI NO: 25314876 NR Description: probable nuclear transport factor importin
  misc_feature (1)..(532): Homolog of NCBI NO: 15809794 NR Description: AT3g06720/F3E22_14 [Arabidopsis thaliana]
  misc_feature (1)..(532): Homolog of NCBI NO: 15230778 NR Description: importin alpha
MSLRPNAKTEVRRNRYKVAVDAEEGRRRREDNMVEIRKSKREESLMKKRREGMQALQGFPSASAASVDKKLDSLKDMVAGVWSDDPALQLESTTQFRKLLSIERSPPIEEVISAGVVPRFVEFLKKEDYPAIQFEAAWALTNIASGTSDHTKVVIDHNAVPIFVQLLASPSDDVREQAVWALGNVAGDSPRCRDLVLGCGALLPLLNQLNEHAKLSMLRNATWTLSNFCRGKPQPHFDQVKPALPALERLIHSDDEEVLTDACWALSYLSDGTNDKIQTVIQAGVVPKLVELLLHHSPSVLIPALRTVGNIVTGDDIQTQCVINSGALPCLANLLTQNHKKSIKKEACWTISNITAGNKDQIQTVVEANLISPLVSLLQNAEFDIKKEAAWAISNATSGGSHDQIKYLVEQGCIKPLCDLLVCPDPRIITVCLEGLENILKVGEAEKNLGHTGDMNYYAQLIDDAEGLEKIENLQSHDNNEIYEKAVKILETYWLEEEDDETQQPPGVDGSQAGFQFGGNQAPVPSGGFNFS

SEQ ID NO: 28268 - protein, 500 aa, Arabidopsis thaliana
  peptide (1)..(500): Ceres Seq. ID no. 12325557
  misc_feature (1)..(499): Homolog of NCBI NO: 30421147 NR Description: importin alpha [Toxoplasma gondii]
  misc_feature (1)..(499): Homolog of NCBI NO: 6682927 NR Description: importin alpha 1b [Oryza sativa (japonica
  misc_feature (1)..(500): Homolog of NCBI NO: 3915737 NR Description: Importin alpha subunit (Karyopherin alpha
  misc_feature (1)..(499): Homolog of NCBI NO: 13752562 NR Description: importin alpha 2 [Capsicum annuum]
  misc_feature (1)..(499): Homolog of NCBI NO: 25314870 NR Description: probable nuclear transport factor importin alpha
  misc_feature (1)..(499): Homolog of NCBI NO: 13605661 NR Description: AT3g06720/F3E22_14 [Arabidopsis thaliana]
  misc_feature (1)..(500): Homolog of NCBI NO: 13699777 NR Description: AtKAP alpha [Arabidopsis thaliana]
  misc_feature (1)..(500): Homolog of NCBI NO: 25314876 NR Description: probable nuclear transport factor importin
  misc_feature (1)..(500): Homolog of NCBI NO: 15809794 NR Description: AT3g06720/F3E22_14 [Arabidopsis thaliana]
  misc_feature (1)..(500): Homolog of NCBI NO: 15230778 NR Description: importin alpha
MVEIRKSKREESLMKKRREGMQALQGFPSASAASVDKKLDSLKDMVAGVWSDDPALQLESTTQFRKLLSIERSPPIEEVISAGVVPRFVEFLKKEDYPAIQFEAAWALTNIASGTSDHTKVVIDHNAVPIFVQLLASPSDDVREQAVWALGNVAGDSPRCRDLVLGCGALLPLLNQLNEHAKLSMLRNATWTLSNFCRGKPQPHFDQVKPALPALERLIHSDDEEVLTDACWALSYLSDGTNDKIQTVIQAGVVPKLVELLLHHSPSVLIPALRTVGNIVTGDDIQTQCVINSGALPCLANLLTQNHKKSIKKEACWTISNITAGNKDQIQTVVEANLISPLVSLLQNAEFDIKKEAAWAISNATSGGSHDQIKYLVEQGCIKPLCDLLVCPDPRIITVCLEGLENILKVGEAEKNLGHTGDMNYYAQLIDDAEGLEKIENLQSHDNNEIYEKAVKILETYWLEEEDDETQQPPGVDGSQAGFQFGGNQAPVPSGGFNFS

SEQ ID NO: 28269 - protein, 487 aa, Arabidopsis thaliana
  peptide (1)..(487): Ceres Seq. ID no. 12325558
  misc_feature (1)..(486): Homolog of NCBI NO: 30421147 NR Description: importin alpha [Toxoplasma gondii]
  misc_feature (1)..(486): Homolog of NCBI NO: 6682927 NR Description: importin alpha 1b [Oryza sativa (japonica
  misc_feature (1)..(487): Homolog of NCBI NO: 3915737 NR Description: Importin alpha subunit (Karyopherin alpha
  misc_feature (1)..(486): Homolog of NCBI NO: 13752562 NR Description: importin alpha 2 [Capsicum annuum]
  misc_feature (1)..(486): Homolog of NCBI NO: 25314870 NR Description: probable nuclear transport factor importin alpha
  misc_feature (1)..(486): Homolog of NCBI NO: 13605661 NR Description: AT3g06720/F3E22_14 [Arabidopsis thaliana]
  misc_feature (1)..(487): Homolog of NCBI NO: 13699777 NR Description: AtKAP alpha [Arabidopsis thaliana]
  misc_feature (1)..(487): Homolog of NCBI NO: 25314876 NR Description: probable nuclear transport factor importin
  misc_feature (1)..(487): Homolog of NCBI NO: 15809794 NR Description: AT3g06720/F3E22_14 [Arabidopsis thaliana]
  misc_feature (1)..(487): Homolog of NCBI NO: 15230778 NR Description: importin alpha
MKKRREGMQALQGFPSASAASVDKKLDSLKDMVAGVWSDDPALQLESTTQFRKLLSIERSPPIEEVISAGVVPRFVEFLKKEDYPAIQFEAAWALTNIASGTSDHTKVVIDHNAVPIFVQLLASPSDDVREQAVWALGNVAGDSPRCRDLVLGCGALLPLLNQLNEHAKLSMLRNATWTLSNFCRGKPQPHFDQVKPALPALERLIHSDDEEVLTDACWALSYLSDGTNDKIQTVIQAGVVPKLVELLLHHSPSVLIPALRTVGNIVTGDDIQTQCVINSGALPCLANLLTQNHKKSIKKEACWTISNITAGNKDQIQTVVEANLISPLVSLLQNAEFDIKKEAAWAISNATSGGSHDQIKYLVEQGCIKPLCDLLVCPDPRIITVCLEGLENILKVGEAEKNLGHTGDMNYYAQLIDDAEGLEKIENLQSHDNNEIYEKAVKILETYWLEEEDDETQQPPGVDGSQAGFQFGGNQAPVPSGGFNFS

SEQ ID NO: 28270 - DNA, 914 bp, Arabidopsis thaliana
  misc_feature (1)..(914): Ceres Seq. ID no. 12321613
  misc_feature: MA Experiment ID: 108461 Result: Up-regulated in Transcription
  misc_feature: MA Experiment 108461 PARAMETER Experiment Name: At_Germinating_Seeds_cDNA_P Parameter: Age (day) Value: 1 vs. 0
  misc_feature: MA Experiment 108461 PARAMETER Experiment Name: At_Germinating_Seeds_cDNA_P Parameter: Tissue Value: Germinating Seeds
  misc_feature: MA Experiment ID: 108462 Result: Up-regulated in Transcription
  misc_feature: MA Experiment 108462 PARAMETER Experiment Name: At_Germinating_Seeds_cDNA_P Parameter: Age (day) Value: 2 vs. 0
  misc_feature: MA Experiment 108462 PARAMETER Experiment Name: At_Germinating_Seeds_cDNA_P Parameter: Tissue Value: Germinating Seeds
  misc_feature: MA Experiment ID: 108576 Result: Down-regulated in Transcription
  misc_feature: MA Experiment 108576 PARAMETER Experiment Name: At_42deg_Heat_cDNA_P Parameter: Temperature (deg C) Value: 42 vs. 22
  misc_feature: MA Experiment 108576 PARAMETER Experiment Name: At_42deg_Heat_cDNA_P Parameter: Timepoint (hr) Value: 1
  misc_feature: MA Experiment 108576 PARAMETER Experiment Name: At_42deg_Heat_cDNA_P Parameter: Tissue Value: Aerial
  misc_feature: MA Experiment ID: 108579 Result: Down-regulated in Transcription
  misc_feature: MA Experiment 108579 PARAMETER Experiment Name: At_4deg_Cold_cDNA_P Parameter: Temperature (deg C) Value: 4 vs. 22
  misc_feature: MA Experiment 108579 PARAMETER Experiment Name: At_4deg_Cold_cDNA_P Parameter: Timepoint (hr) Value: 6
  misc_feature: MA Experiment 108579 PARAMETER Experiment Name: At_4deg_Cold_cDNA_P Parameter: Tissue Value: Aerial
  misc_feature: MA Experiment ID: 108585 Result: Up-regulated in Transcription
  misc_feature: MA Experiment 108585 PARAMETER Experiment Name: At_5mM_NaNP_cDNA_P Parameter: Timepoint (hr) Value: 6
  misc_feature: MA Experiment 108585 PARAMETER Experiment Name: At_5mM_NaNP_cDNA_P Parameter: Tissue Value: Aerial
  misc_feature: MA Experiment 108585 PARAMETER Experiment Name: At_5mM_NaNP_cDNA_P Parameter: Treatment Value: null
  misc_feature: MA Experiment ID: 20000113 Result: Down-regulated in Transcription
  misc_feature: MA Experiment 20000113 PARAMETER Experiment Name: At_42deg_Heat_cDNA_P Parameter: Temperature (deg C) Value: 42 vs. 22
  misc_feature: MA Experiment 20000113 PARAMETER Experiment Name: At_42deg_Heat_cDNA_P Parameter: Timepoint (hr) Value: 8
  misc_feature: MA Experiment 20000113 PARAMETER Experiment Name: At_42deg_Heat_cDNA_P Parameter: Tissue Value: Aerial
  misc_feature: MA Experiment ID: 20000180 Result: Up-regulated in Transcription
  misc_feature: MA Experiment 20000180 PARAMETER Experiment Name: At_Germinating_Seeds_P Parameter: Age (hr) Value: 24 vs. 0
  misc_feature: MA Experiment 20000180 PARAMETER Experiment Name: At_Germinating_Seeds_P Parameter: Tissue Value: Germinating Seeds
  misc_feature: MA Experiment ID: 20000224 Result: Down-regulated in Transcription
attctccacaatttcataactttcttccgctcaacttcagataaattcggattctgtagctctttcaatacgactgcggagatcagagccaattatttggttatggcgtctctgatctcagatattgaaccgccgacgagtactacttcagatctcgttcggagaaagaagagatcctctgcttcatccgccgcatcgtctcgttcaagcgcatcttccgtctccggtgagattcacgcgcgatggcgatcggagaagcaacaacggatctactcagccaaactgttccaagcgctccaacaagtccgcctcaactcttccgcctcaacatcatcatctccaacggctcagaaacgaggaaaggccgtccgtgaagccgccgatcgagctcttgccgtttccgctcggggaagaacactctggagcagagcgatcttagctaatcggatcaaactgaaatttcgtaaacagagacgtcctcgagctacgatggcgattccggccatgactacggtggttagtagcagcagcaacagatcgagaaaacggagagtgtcggtgttgagattgaataagaagagtataccggatgttaaccggaaagtacgtgttctaggccggttagttcccggttgcggtaaacaatccgtaccggtgattctagaagaagcaactgattatattcaggctctggagatgcaagtgagagccatgaactctttagttcagcttctctcctcctacggctcagctcctccaccgatttgatgaggttaaaatcgtctttttaattctaccatctctcgatctttcacagcttatgtgtatatagaagattcggtttgattataatctgtaactactcttcccaaccgctgattcttctctgctacaagtaaaagtaaattttgaac

SEQ ID NO: 28271 - protein, 255 aa, Arabidopsis thaliana
  peptide (1)..(255): Ceres Seq. ID no. 12321614
  misc_feature (117)..(252): Homolog of NCBI NO: 34912942 NR Description: OSJNBb0035I14.10 [Oryza sativa (japonica
  misc_feature (56)..(247): Homolog of NCBI NO: 34904544 NR Description: B1066G12.17 [Oryza sativa (japonica
  misc_feature (59)..(246): Homolog of NCBI NO: 18397368 NR Description: bHLH protein; protein id: At3g05800.1, supported
  misc_feature (193)..(254): Homolog of NCBI NO: 34898122 NR Description: bHLH protein-like [Oryza sativa (japonica
  misc_feature (59)..(185): Homolog of NCBI NO: 34898122 NR Description: bHLH protein-like [Oryza sativa (japonica
  misc_feature (38)..(252): Homolog of NCBI NO: 18390998 NR Description: bHLH protein; protein id: At1g09250.1, supported
  misc_feature (42)..(254): Homolog of NCBI NO: 18401374 NR Description: bHLH protein
  misc_feature (35)..(255): Homolog of NCBI NO: 21618012 NR Description: unknown [Arabidopsis thaliana]
  misc_feature (35)..(255): Homolog of NCBI NO: 18397627 NR Description: bHLH protein
ILHNFITFFRSTSDKFGFCSSFNTTAEIRANYLVMASLISDIEPPTSTTSDLVRRKKRSSASSAASSRSSASSVSGEIHARWRSEKQQRIYSAKLFQALQQVRLNSSASTSSSPTAQKRGKAVREAADRALAVSARGRTLWSRAILANRIKLKFRKQRRPRATMAIPAMTTVVSSSSNRSRKRRVSVLRLNKKSIPDVNRKVRVLGRLVPGCGKQSVPVILEEATDYIQALEMQVRAMNSLVQLLSSYGSAPPPI

SEQ ID NO: 28272 - protein, 221 aa, Arabidopsis thaliana
  peptide (1)..(221): Ceres Seq. ID no. 12321615
  misc_feature (83)..(218): Homolog of NCBI NO: 34912942 NR Description: OSJNBb0035I14.10 [Oryza sativa (japonica
  misc_feature (22)..(213): Homolog of NCBI NO: 34904544 NR Description: B1066G12.17 [Oryza sativa (japonica
  misc_feature (25)..(212): Homolog of NCBI NO: 18397368 NR Description: bHLH protein; protein id: At3g05800.1, supported
  misc_feature (159)..(220): Homolog of NCBI NO: 34898122 NR Description: bHLH protein-like [Oryza sativa (japonica
  misc_feature (25)..(151): Homolog of NCBI NO: 34898122 NR Description: bHLH protein-like [Oryza sativa (japonica
  misc_feature (4)..(218): Homolog of NCBI NO: 18390998 NR Description: bHLH protein; protein id: At1g09250.1, supported
  misc_feature (8)..(220): Homolog of NCBI NO: 18401374 NR Description: bHLH protein
  misc_feature (1)..(221): Homolog of NCBI NO: 21618012 NR Description: unknown [Arabidopsis thaliana]
  misc_feature (1)..(221): Homolog of NCBI NO: 18397627 NR Description: bHLH protein
MASLISDIEPPTSTTSDLVRRKKRSSASSAASSRSSASSVSGEIHARWRSEKQQRIYSAKLFQALQQVRLNSSASTSSSPTAQKRGKAVREAADRALAVSARGRTLWSRAILANRIKLKFRKQRRPRATMAIPAMTTVVSSSSNRSRKRRVSVLRLNKKSIPDVNRKVRVLGRLVPGCGKQSVPVILEEATDYIQALEMQVRAMNSLVQLLSSYGSAPPPI

SEQ ID NO: 28273 - DNA, 616 bp, Arabidopsis thaliana
  misc_feature (1)..(616): Ceres Seq. ID no. 12322085
  misc_feature: MA Experiment ID: 108434 Result: Down-regulated in Transcription
  misc_feature: MA Experiment 108434 PARAMETER Experiment Name: At_Root_Tips_cDNA_P Parameter: Tissue Value: Root Tips
  misc_feature: MA Experiment ID: 108435 Result: Down-regulated in Transcription
  misc_feature: MA Experiment 108435 PARAMETER Experiment Name: At_stm_Mutants_cDNA_P Parameter: Plant Line Value: wt Landsburg vs stm
  misc_feature: MA Experiment 108435 PARAMETER Experiment Name: At_stm_Mutants_cDNA_P Parameter: Tissue Value: Shoot Apical Meristem Region
  misc_feature: MA Experiment ID: 108461 Result: Up-regulated in Transcription
  misc_feature: MA Experiment 108461 PARAMETER Experiment Name: At_Germinating_Seeds_cDNA_P Parameter: Age (day) Value: 1 vs. 0
  misc_feature: MA Experiment 108461 PARAMETER Experiment Name: At_Germinating_Seeds_cDNA_P Parameter: Tissue Value: Germinating Seeds
  misc_feature: MA Experiment ID: 108488 Result: Down-regulated in Transcription
  misc_feature: MA Experiment ID: 108561 Result: Up-regulated in Transcription
  misc_feature: MA Experiment 108561 PARAMETER Experiment Name: At_100uM_ABA_cDNA_P Parameter: Timepoint (hr) Value: 6
  misc_feature: MA Experiment 108561 PARAMETER Experiment Name: At_100uM_ABA_cDNA_P Parameter: Tissue Value: Aerial
  misc_feature: MA Experiment 108561 PARAMETER Experiment Name: At_100uM_ABA_cDNA_P Parameter: Treatment Value: 100uM ABA vs. No Treatment
  misc_feature: MA Experiment ID: 108576 Result: Up-regulated in Transcription
  misc_feature: MA Experiment 108576 PARAMETER Experiment Name: At_42deg_Heat_cDNA_P Parameter: Temperature (deg C) Value: 42 vs. 22
  misc_feature: MA Experiment 108576 PARAMETER Experiment Name: At_42deg_Heat_cDNA_P Parameter: Timepoint (hr) Value: 1
  misc_feature: MA Experiment 108576 PARAMETER Experiment Name: At_42deg_Heat_cDNA_P Parameter: Tissue Value: Aerial
  misc_feature: MA Experiment ID: 108579 Result: Up-regulated in Transcription
  misc_feature: MA Experiment 108579 PARAMETER Experiment Name: At_4deg_Cold_cDNA_P Parameter: Temperature (deg C) Value: 4 vs. 22
  misc_feature: MA Experiment 108579 PARAMETER Experiment Name: At_4deg_Cold_cDNA_P Parameter: Timepoint (hr) Value: 6
  misc_feature: MA Experiment 108579 PARAMETER Experiment Name: At_4deg_Cold_cDNA_P Parameter: Tissue Value: Aerial
  misc_feature: MA Experiment ID: 108595 Result: Down-regulated in Transcription
  misc_feature: MA Experiment 108595 PARAMETER Experiment Name: At_Ler-pi_Ovule_cDNA_P Parameter: Plant Line Value: null
  misc_feature: MA Experiment ID: 108608 Result: Up-regulated in Transcription
  misc_feature: MA Experiment 108608 PARAMETER Experiment Name: At_100uM_ABA_cDNA_P Parameter: Timepoint (hr) Value: 1
  misc_feature: MA Experiment 108608 PARAMETER Experiment Name: At_100uM_ABA_cDNA_P Parameter: Tissue Value: Aerial
  misc_feature: MA Experiment 108608 PARAMETER Experiment Name: At_100uM_ABA_cDNA_P Parameter: Treatment Value: 100uM ABA vs. No Treatment
  misc_feature: MA Experiment ID: 108668 Result: Down-regulated in Transcription
  misc_feature: MA Experiment 108668 PARAMETER Experiment Name: At_2mM_SA_cDNA_P Parameter: Plant Line Value: WS
  misc_feature: MA Experiment 108668 PARAMETER Experiment Name: At_2mM_SA_cDNA_P Parameter: Timepoint (hr) Value: 6
  misc_feature: MA Experiment 108668 PARAMETER Experiment Name: At_2mM_SA_cDNA_P Parameter: Treatment Value: 2mM SA vs. No Treatment
  misc_feature: MA Experiment ID: 20000069 Result: Up-regulated in Transcription
  misc_feature: MA Experiment 20000069 PARAMETER Experiment Name: At_100uM_ABA_Mutants_cDNA_P Parameter: Plant Line Value: CS23
  misc_feature: MA Experiment 20000069 PARAMETER Experiment Name: At_100uM_ABA_Mutants_cDNA_P Parameter: Timepoint (hr) Value: 6
  misc_feature: MA Experiment 20000069 PARAMETER Experiment Name: At_100uM_ABA_Mutants_cDNA_P Parameter: Tissue Value: Aerial
  misc_feature: MA Experiment 20000069 PARAMETER Experiment Name: At_100uM_ABA_Mutants_cDNA_P Parameter: Treatment Value: 100uM ABA vs. No Treatment
  misc_feature: MA Experiment ID: 20000071 Result: Up-regulated in Transcription
  misc_feature: MA Experiment 20000071 PARAMETER Experiment Name: At_100uM_ABA_Mutants_cDNA_P Parameter: Plant Line Value: CS8104
  misc_feature: MA Experiment 20000071 PARAMETER Experiment Name: At_100uM_ABA_Mutants_cDNA_P Parameter: Timepoint (hr) Value: 6
  misc_feature: MA Experiment 20000071 PARAMETER Experiment Name: At_100uM_ABA_Mutants_cDNA_P Parameter: Tissue Value: Aerial
  misc_feature: MA Experiment 20000071 PARAMETER Experiment Name: At_100uM_ABA_Mutants_cDNA_P Parameter: Treatment Value: 100uM ABA vs. No Treatment
  misc_feature: MA Experiment ID: 20000087 Result: Up-regulated in Transcription
  misc_feature: MA Experiment 20000087 PARAMETER Experiment Name: At_100uM_ABA_Mutants_cDNA_P Parameter: Plant Line Value: WS
  misc_feature: MA Experiment 20000087 PARAMETER Experiment Name: At_100uM_ABA_Mutants_cDNA_P Parameter: Timepoint (hr) Value: 6
  misc_feature: MA Experiment 20000087 PARAMETER Experiment Name: At_100uM_ABA_Mutants_cDNA_P Parameter: Tissue Value: Aerial
  misc_feature: MA Experiment 20000087 PARAMETER Experiment Name: At_100uM_ABA_Mutants_cDNA_P Parameter: Treatment Value: 100uM ABA vs. No Treatment
  misc_feature: MA Experiment ID: 20000088 Result: Up-regulated in Transcription
  misc_feature: MA Experiment 20000088 PARAMETER Experiment Name: At_100uM_ABA_Mutants_cDNA_P Parameter: Plant Line Value: Landsberg
  misc_feature: MA Experiment 20000088 PARAMETER Experiment Name: At_100uM_ABA_Mutants_cDNA_P Parameter: Timepoint (hr) Value: 6
  misc_feature: MA Experiment 20000088 PARAMETER Experiment Name: At_100uM_ABA_Mutants_cDNA_P Parameter: Tissue Value: Aerial
  misc_feature: MA Experiment 20000088 PARAMETER Experiment Name: At_100uM_ABA_Mutants_cDNA_P Parameter: Treatment Value: 100uM ABA vs. No Treatment
  misc_feature: MA Experiment ID: 20000090 Result: Up-regulated in Transcription
  misc_feature: MA Experiment ID: 20000112 Result: Up-regulated in Transcription
  misc_feature: MA Experiment 20000112 PARAMETER Experiment Name: At_42deg_Heat_cDNA_P Parameter: Temperature (deg C) Value: 42 vs. 22
  misc_feature: MA Experiment 20000112 PARAMETER Experiment Name: At_42deg_Heat_cDNA_P Parameter: Timepoint (hr) Value: 2
  misc_feature: MA Experiment 20000112 PARAMETER Experiment Name: At_42deg_Heat_cDNA_P Parameter: Tissue Value: Aerial
  misc_feature: MA Experiment ID: 20000117 Result: Up-regulated in Transcription
  misc_feature: MA Experiment 20000117 PARAMETER Experiment Name: At_100uM_ABA_Mutants_cDNA_P Parameter: Plant Line Value: Columbia
  misc_feature: MA Experiment 20000117 PARAMETER Experiment Name: At_100uM_ABA_Mutants_cDNA_P Parameter: Timepoint (hr) Value: 6
  misc_feature: MA Experiment 20000117 PARAMETER Experiment Name: At_100uM_ABA_Mutants_cDNA_P Parameter: Tissue Value: Aerial
  misc_feature: MA Experiment 20000117 PARAMETER Experiment Name: At_100uM_ABA_Mutants_cDNA_P Parameter: Treatment Value: 100uM ABA vs. No Treatment
  misc_feature: MA Experiment ID: 20000173 Result: Down-regulated in Transcription
  misc_feature: MA Experiment 20000173 PARAMETER Experiment Name: At_42deg_Heat_P Parameter: Age (day) Value: 14
  misc_feature: MA Experiment 20000173 PARAMETER Experiment Name: At_42deg_Heat_P Parameter: Organism Value: A. thaliana
  misc_feature: MA Experiment 20000173 PARAMETER Experiment Name: At_42deg_Heat_P Parameter: Plant Line Value: WS
  misc_feature: MA Experiment 20000173 PARAMETER Experiment Name: At_42deg_Heat_P Parameter: Temperature (deg C) Value: 42 vs. 22
  misc_feature: MA Experiment 20000173 PARAMETER Experiment Name: At_42deg_Heat_P Parameter: Timepoint (hr) Value: 6
  misc_feature: MA Experiment 20000173 PARAMETER Experiment Name: At_42deg_Heat_P Parameter: Tissue Value: Aerial
  misc_feature: MA Experiment ID: 20000179 Result: Up-regulated in Transcription
  misc_feature: MA Experiment 20000179 PARAMETER Experiment Name: At_Germinating_Seeds_P Parameter: Age (hr) Value: 6 vs. 0
  misc_feature: MA Experiment 20000179 PARAMETER Experiment Name: At_Germinating_Seeds_P Parameter: Tissue Value: Germinating Seeds
  misc_feature: MA Experiment ID: 20000184 Result: Down-regulated in Transcription
  misc_feature: MA Experiment 20000184 PARAMETER Experiment Name: At_Shoots__P Parameter: Age (day) Value: 7
  misc_feature: MA Experiment 20000184 PARAMETER Experiment Name: At_Shoots__P Parameter: Tissue Value: Shoots vs. Whole Plant
  misc_feature: MA Experiment ID: 20000185 Result: Down-regulated in Transcription
  misc_feature: MA Experiment 20000185 PARAMETER Experiment Name: At_Roots__P Parameter: Age (day) Value: 7 vs. 21
  misc_feature: MA Experiment 20000185 PARAMETER Experiment Name: At_Roots__P Parameter: Organism Value: A. thaliana
  misc_feature: MA Experiment 20000185 PARAMETER Experiment Name: At_Roots__P Parameter: Tissue Value: Roots vs. Whole Plant
  misc_feature: MA Experiment ID: 20000214 Result: Up-regulated in Transcription
  misc_feature: MA Experiment 20000214 PARAMETER Experiment Name: At_4deg_Cold_P Parameter: Timepoint (hr) Value: 6
  misc_feature: MA Experiment ID: 20000234 Result: Down-regulated in Transcription
  misc_feature: MA Experiment 20000234 PARAMETER Experiment Name: At_Siliques_P Parameter: Age (day) Value: 21
  misc_feature: MA Experiment 20000234 PARAMETER Experiment Name: At_Siliques_P Parameter: Organism Value: A. thaliana
  misc_feature: MA Experiment 20000234 PARAMETER Experiment Name: At_Siliques_P Parameter: Plant Line Value: WS
  misc_feature: MA Experiment 20000234 PARAMETER Experiment Name: At_Siliques_P Parameter: Tissue Value: Less Than 5mm Siliques vs. Whole Plant
  misc_feature: MA Experiment ID: 20000235 Result: Down-regulated in Transcription
  misc_feature: MA Experiment 20000235 PARAMETER Experiment Name: At_Siliques_P Parameter: Age (day) Value: 21
  misc_feature: MA Experiment 20000235 PARAMETER Experiment Name: At_Siliques_P Parameter: Organism Value: A. thaliana
  misc_feature: MA Experiment 20000235 PARAMETER Experiment Name: At_Siliques_P Parameter: Plant Line Value: WS
  misc_feature: MA Experiment 20000235 PARAMETER Experiment Name: At_Siliques_P Parameter: Tissue Value: 5-10mm Siliques vs. Whole Plant
  misc_feature: MA Experiment ID: 20000437 Result: Up-regulated in Transcription
  misc_feature: MA Experiment 20000437 PARAMETER Experiment Name: At_Drought_P Parameter: Age (day) Value: 8
  misc_feature: MA Experiment 20000437 PARAMETER Experiment Name: At_Drought_P Parameter: Organism Value: A. thaliana
  misc_feature: MA Experiment 20000437 PARAMETER Experiment Name: At_Drought_P Parameter: Plant Line Value: WS
  misc_feature: MA Experiment 20000437 PARAMETER Experiment Name: At_Drought_P Parameter: Timepoint (hr) Value: 24
  misc_feature: MA Experiment 20000437 PARAMETER Experiment Name: At_Drought_P Parameter: Tissue Value: Whole Plant
  misc_feature: MA Experiment 20000437 PARAMETER Experiment Name: At_Drought_P Parameter: Treatment Value: Drought vs. No Drought
  misc_feature: MA Experiment ID: 20000438 Result: Down-regulated in Transcription
  misc_feature: MA Experiment 20000438 PARAMETER Experiment Name: At_Shoots__P Parameter: Age (day) Value: 14
  misc_feature: MA Experiment 20000438 PARAMETER Experiment Name: At_Shoots__P Parameter: Tissue Value: Shoots vs. Whole Plant
  misc_feature: MA Experiment ID: 20000439 Result: Down-regulated in Transcription
  misc_feature: MA Experiment 20000439 PARAMETER Experiment Name: At_Roots__P Parameter: Age (day) Value: 14 vs. 21
  misc_feature: MA Experiment 20000439 PARAMETER Experiment Name: At_Roots__P Parameter: Organism Value: A. thaliana
  misc_feature: MA Experiment 20000439 PARAMETER Experiment Name: At_Roots__P Parameter: Tissue Value: Roots vs. Whole Plant
  misc_feature: MA Experiment ID: 20000441 Result: Down-regulated in Transcription
  misc_feature: MA Experiment 20000441 PARAMETER Experiment Name: At_1uM_BR-BRZ__P Parameter: Tissue Value: Shoot Apices
  misc_feature: MA Experiment 20000441 PARAMETER Experiment Name: At_1uM_BR-BRZ__P Parameter: Treatment Value: 1uM BR vs. No Treatment
  misc_feature: MA Experiment ID: 20000443 Result: Down-regulated in Transcription
  misc_feature: MA Experiment 20000443 PARAMETER Experiment Name: At_1uM_BR-BRZ__P Parameter: Tissue Value: Shoot Apices
  misc_feature: MA Experiment 20000443 PARAMETER Experiment Name: At_1uM_BR-BRZ__P Parameter: Treatment Value: 1uM BRZ vs. No Treatment
  misc_feature: MA Experiment ID: 20000495 Result: Down-regulated in Transcription
  misc_feature: MA Experiment 20000495 PARAMETER Experiment Name: At_Guard_Cells_P Parameter: Harvest Date Value: 8/2/2002
  misc_feature: MA Experiment 20000495 PARAMETER Experiment Name: At_Guard_Cells_P Parameter: Organism Value: A. thaliana
  misc_feature: MA Experiment 20000495 PARAMETER Experiment Name: At_Guard_Cells_P Parameter: Tissue Value: Guard Cells vs. Leaves
  misc_feature: MA Experiment ID: 20000496 Result: Down-regulated in Transcription
  misc_feature: MA Experiment 20000496 PARAMETER Experiment Name: At_Guard_Cells_P Parameter: Harvest Date Value: 7/19/2002
  misc_feature: MA Experiment 20000496 PARAMETER Experiment Name: At_Guard_Cells_P Parameter: Organism Value: Canola
  misc_feature: MA Experiment 20000496 PARAMETER Experiment Name: At_Guard_Cells_P Parameter: Tissue Value: Guard Cells vs. Leaves
  misc_feature: MA Experiment ID: 20000794 Result: Up-regulated in Transcription
  misc_feature: MA Experiment 20000794 PARAMETER Experiment Name: At_Petals_P Parameter: Age (day) Value: 23-25 days
  misc_feature: MA Experiment 20000794 PARAMETER Experiment Name: At_Petals_P Parameter: Plant Line Value: WS
  misc_feature: MA Experiment 20000794 PARAMETER Experiment Name: At_Petals_P Parameter: Tissue Value: Petals vs. Whole plant
  misc_feature: MA Experiment ID: 20001247 Result: Down-regulated in Transcription
  misc_feature: MA Experiment 20001247 PARAMETER Experiment Name: At_Far-red-induction_P Parameter: Age (day) Value: 7
  misc_feature: MA Experiment 20001247 PARAMETER Experiment Name: At_Far-red-induction_P Parameter: Light Value: Far-red vs. White
  misc_feature: MA Experiment 20001247 PARAMETER Experiment Name: At_Far-red-induction_P Parameter: Organism Value: A. thaliana
  misc_feature: MA Experiment 20001247 PARAMETER Experiment Name: At_Far-red-induction_P Parameter: Plant Line Value: Columbia
  misc_feature: MA Experiment 20001247 PARAMETER Experiment Name: At_Far-red-induction_P Parameter: Timepoint (hr) Value: 1
  misc_feature: MA Experiment 20001247 PARAMETER Experiment Name: At_Far-red-induction_P Parameter: Tissue Value: Whole Plant
  misc_feature: MA Experiment ID: 20001248 Result: Up-regulated in Transcription
  misc_feature: MA Experiment 20001248 PARAMETER Experiment Name: At_Far-red-induction_P Parameter: Age (day) Value: 7
  misc_feature: MA Experiment 20001248 PARAMETER Experiment Name: At_Far-red-induction_P Parameter: Light Value: Far-red vs. White
  misc_feature: MA Experiment 20001248 PARAMETER Experiment Name: At_Far-red-induction_P Parameter: Organism Value: A. thaliana
  misc_feature: MA Experiment 20001248 PARAMETER Experiment Name: At_Far-red-induction_P Parameter: Plant Line Value: Columbia
  misc_feature: MA Experiment 20001248 PARAMETER Experiment Name: At_Far-red-induction_P Parameter: Timepoint (hr) Value: 4
  misc_feature: MA Experiment 20001248 PARAMETER Experiment Name: At_Far-red-induction_P Parameter: Tissue Value: Whole Plant
  misc_feature: MA Experiment ID: 20001458 Result: Up-regulated in Transcription
  misc_feature: MA Experiment 20001458 PARAMETER Experiment Name: At_50mM_NH4NO3_L-to-H_P Parameter: Age (day) Value: Undefined
  misc_feature: MA Experiment 20001458 PARAMETER Experiment Name: At_50mM_NH4NO3_L-to-H_P Parameter: Organism Value: Undefined
  misc_feature: MA Experiment 20001458 PARAMETER Experiment Name: At_50mM_NH4NO3_L-to-H_P Parameter: Plant Line Value: Undefined
  misc_feature: MA Experiment 20001458 PARAMETER Experiment Name: At_50mM_NH4NO3_L-to-H_P Parameter: Timepoint (hr) Value: 2
  misc_feature: MA Experiment 20001458 PARAMETER Experiment Name: At_50mM_NH4NO3_L-to-H_P Parameter: Tissue Value: Siliques
  misc_feature: MA Experiment 20001458 PARAMETER Experiment Name: At_50mM_NH4NO3_L-to-H_P Parameter: Treatment Value: 50mM NH4NO3 vs. 100mM Manitol
  misc_feature: MA Experiment ID: 20001554 Result: Up-regulated in Transcription
  misc_feature: MA Experiment 20001554 PARAMETER Experiment Name: At_Drought_Soil_Dry_P Parameter: Age (day) Value: 21
  misc_feature: MA Experiment 20001554 PARAMETER Experiment Name: At_Drought_Soil_Dry_P Parameter: Organism Value: A. thaliana
  misc_feature: MA Experiment 20001554 PARAMETER Experiment Name: At_Drought_Soil_Dry_P Parameter: Plant Line Value: WS
  misc_feature: MA Experiment 20001554 PARAMETER Experiment Name: At_Drought_Soil_Dry_P Parameter: Post Timepoint (hr) Value: None
  misc_feature: MA Experiment 20001554 PARAMETER Experiment Name: At_Drought_Soil_Dry_P Parameter: Post-Treatment Value: None
  misc_feature: MA Experiment 20001554 PARAMETER Experiment Name: At_Drought_Soil_Dry_P Parameter: Timepoint (day) Value: 7
  misc_feature: MA Experiment 20001554 PARAMETER Experiment Name: At_Drought_Soil_Dry_P Parameter: Treatment Value: Drought vs. No Drought
  misc_feature: MA Experiment ID: 20001555 Result: Up-regulated in Transcription
  misc_feature: MA Experiment 20001555 PARAMETER Experiment Name: At_Drought_Soil_Dry_P Parameter: Age (day) Value: 24
  misc_feature: MA Experiment 20001555 PARAMETER Experiment Name: At_Drought_Soil_Dry_P Parameter: Organism Value: A. thaliana
  misc_feature: MA Experiment 20001555 PARAMETER Experiment Name: At_Drought_Soil_Dry_P Parameter: Plant Line Value: WS
  misc_feature: MA Experiment 20001555 PARAMETER Experiment Name: At_Drought_Soil_Dry_P Parameter: Post Timepoint (hr) Value: None
  misc_feature: MA Experiment 20001555 PARAMETER Experiment Name: At_Drought_Soil_Dry_P Parameter: Post-Treatment Value: None
  misc_feature: MA Experiment 20001555 PARAMETER Experiment Name: At_Drought_Soil_Dry_P Parameter: Timepoint (day) Value: 10
  misc_feature: MA Experiment 20001555 PARAMETER Experiment Name: At_Drought_Soil_Dry_P Parameter: Treatment Value: Drought vs. No Drought
  misc_feature: MA Experiment ID: 20001556 Result: Up-regulated in Transcription
  misc_feature: MA Experiment 20001556 PARAMETER Experiment Name: At_Drought_Soil_Dry_P Parameter: Age (day) Value: 26
  misc_feature: MA Experiment 20001556 PARAMETER Experiment Name: At_Drought_Soil_Dry_P Parameter: Organism Value: A. thaliana
  misc_feature: MA Experiment 20001556 PARAMETER Experiment Name: At_Drought_Soil_Dry_P Parameter: Plant Line Value: WS
  misc_feature: MA Experiment 20001556 PARAMETER Experiment Name: At_Drought_Soil_Dry_P Parameter: Post Timepoint (hr) Value: None
  misc_feature: MA Experiment 20001556 PARAMETER Experiment Name: At_Drought_Soil_Dry_P Parameter: Post-Treatment Value: None
  misc_feature: MA Experiment 20001556 PARAMETER Experiment Name: At_Drought_Soil_Dry_P Parameter: Timepoint (day) Value: 12
  misc_feature: MA Experiment 20001556 PARAMETER Experiment Name: At_Drought_Soil_Dry_P Parameter: Treatment Value: Drought vs. No Drought
  misc_feature: MA Experiment ID: 20001557 Result: Up-regulated in Transcription
  misc_feature: MA Experiment 20001557 PARAMETER Experiment Name: At_Drought_Soil_Dry_P Parameter: Age (day) Value: 27
  misc_feature: MA Experiment 20001557 PARAMETER Experiment Name: At_Drought_Soil_Dry_P Parameter: Organism Value: A. thaliana
  misc_feature: MA Experiment 20001557 PARAMETER Experiment Name: At_Drought_Soil_Dry_P Parameter: Plant Line Value: WS
  misc_feature: MA Experiment 20001557 PARAMETER Experiment Name: At_Drought_Soil_Dry_P Parameter: Post Timepoint (hr) Value: 3
  misc_feature: MA Experiment 20001557 PARAMETER Experiment Name: At_Drought_Soil_Dry_P Parameter: Post-Treatment Value: Re-Water vs. No Drought
  misc_feature: MA Experiment 20001557 PARAMETER Experiment Name: At_Drought_Soil_Dry_P Parameter: Timepoint (day) Value: 13
  misc_feature: MA Experiment 20001557 PARAMETER Experiment Name: At_Drought_Soil_Dry_P Parameter: Treatment Value: Drought vs. No Drought
  misc_feature: MA Experiment ID: 20001559 Result: Up-regulated in Transcription
  misc_feature: MA Experiment 20001559 PARAMETER Experiment Name: At_Drought_Soil_Dry_P Parameter: Age (day) Value: 28
  misc_feature: MA Experiment 20001559 PARAMETER Experiment Name: At_Drought_Soil_Dry_P Parameter: Organism Value: A. thaliana
  misc_feature: MA Experiment 20001559 PARAMETER Experiment Name: At_Drought_Soil_Dry_P Parameter: Plant Line Value: WS
  misc_feature: MA Experiment 20001559 PARAMETER Experiment Name: At_Drought_Soil_Dry_P Parameter: Post Timepoint (hr) Value: 29
  misc_feature: MA Experiment 20001559 PARAMETER Experiment Name: At_Drought_Soil_Dry_P Parameter: Post-Treatment Value: Re-Water vs. No Drought
  misc_feature: MA Experiment 20001559 PARAMETER Experiment Name: At_Drought_Soil_Dry_P Parameter: Timepoint (day) Value: 14
  misc_feature: MA Experiment 20001559 PARAMETER Experiment Name: At_Drought_Soil_Dry_P Parameter: Treatment Value: Drought vs. No Drought
  misc_feature: MA Experiment ID: 20001906 Result: Up-regulated in Transcription
  misc_feature: MA Experiment 20001906 PARAMETER Experiment Name: At_Drought_Reproduction_P Parameter: Age (day) Value: 35
  misc_feature: MA Experiment 20001906 PARAMETER Experiment Name: At_Drought_Reproduction_P Parameter: Organism Value: A. thaliana
  misc_feature: MA Experiment 20001906 PARAMETER Experiment Name: At_Drought_Reproduction_P Parameter: Plant Line Value: WS
  misc_feature: MA Experiment 20001906 PARAMETER Experiment Name: At_Drought_Reproduction_P Parameter: Timepoint (day) Value: 5
  misc_feature: MA Experiment 20001906 PARAMETER Experiment Name: At_Drought_Reproduction_P Parameter: Tissue Value: Siliques
  misc_feature: MA Experiment 20001906 PARAMETER Experiment Name: At_Drought_Reproduction_P Parameter: Treatment Value: Drought vs. No Drought
  misc_feature: MA Experiment ID: 20001908 Result: Up-regulated in Transcription
  misc_feature: MA Experiment 20001908 PARAMETER Experiment Name: At_Drought_Reproduction_P Parameter: Age (day) Value: 40
  misc_feature: MA Experiment 20001908 PARAMETER Experiment Name: At_Drought_Reproduction_P Parameter: Organism Value: A. thaliana
  misc_feature: MA Experiment 20001908 PARAMETER Experiment Name: At_Drought_Reproduction_P Parameter: Plant Line Value: WS
  misc_feature: MA Experiment 20001908 PARAMETER Experiment Name: At_Drought_Reproduction_P Parameter: Timepoint (day) Value: 10
  misc_feature: MA Experiment 20001908 PARAMETER Experiment Name: At_Drought_Reproduction_P Parameter: Tissue Value: Siliques
  misc_feature: MA Experiment 20001908 PARAMETER Experiment Name: At_Drought_Reproduction_P Parameter: Treatment Value: Drought vs. No Drought
aaaaagagagaaaaacacaattaaaaattattatgaagaggaacggcgagacgaaacggcggaggaacgtggcggaggaggcagagcagggagaggatccggcgatgtgggagaatcttgaccggaatttcagacaagtgcaatcagttttagacagaaacagatcactgattcaacaagtcaacgacaatcaccaatcgagaatggctgataacatgtcgaagaacgttgctttgattcaagaactcaacggaaacatttccaaggttgttaacatgtattctgatctcaatactagtttctcgtcgggctttcacggtgggaagaacggtcacgatggtggtggtgctgccggaactagagcttaatgaaccggaatcaaattgtttcttcttagttggaccggccggtttgagaattttgaatctgtccggttcaagctatgatataaagtaaatgtttagtttttgtattgcaatgatgattgtcgttagaataatccgtgggagcaaacccatctctattggggttattttagttatggttttgagtctttttcaatgtgtctctactgcaatctctctaatgattataataataattgatacagtattag

SEQ ID NO: 28274 - protein, 121 aa, Arabidopsis thaliana
  peptide (1)..(121): Ceres Seq. ID no. 12322086
  misc_feature (32)..(114): Homolog of NCBI NO: 18394486 NR Description: Expressed protein
  misc_feature (32)..(114): Homolog of NCBI NO: 8778455 NR Description: F1L3.15 [Arabidopsis thaliana]
  misc_feature (32)..(114): Homolog of NCBI NO: 25406197 NR Description: hypothetical protein F28P22.18 [imported] -
  misc_feature (32)..(114): Homolog of NCBI NO: 18410139 NR Description: expressed protein
  misc_feature (32)..(120): Homolog of NCBI NO: 18396289 NR Description: Expressed protein
  misc_feature (23)..(121): Homolog of NCBI NO: 4680201 NR Description: hypothetical protein [Sorghum bicolor]
  misc_feature (27)..(114): Homolog of NCBI NO: 4680489 NR Description: hypothetical protein [Oryza sativa]
  misc_feature (31)..(104): Homolog of NCBI NO: 15227672 NR Description: hypothetical protein; protein id: At2g29950.1
  misc_feature (12)..(121): Homolog of NCBI NO: 34499881 NR Description: early flowering 4 [Mesembryanthemum crystallinum]
  misc_feature (11)..(121): Homolog of NCBI NO: 18405258 NR Description: expressed protein
KERKTQLKIIMKRNGETKRRRNVAEEAEQGEDPAMWENLDRNFRQVQSVLDRNRSLIQQVNDNHQSRMADNMSKNVALIQELNGNISKVVNMYSDLNTSFSSGFHGGKNGHDGGGAAGTRA

SEQ ID NO: 28275 - protein, 111 aa, Arabidopsis thaliana
  peptide (1)..(111): Ceres Seq. ID no. 12322087
  misc_feature (22)..(104): Homolog of NCBI NO: 18394486 NR Description: Expressed protein
  misc_feature (22)..(104): Homolog of NCBI NO: 8778455 NR Description: F1L3.15 [Arabidopsis thaliana]
  misc_feature (22)..(104): Homolog of NCBI NO: 25406197 NR Description: hypothetical protein F28P22.18 [imported] -
  misc_feature (22)..(104): Homolog of NCBI NO: 18410139 NR Description: expressed protein
  misc_feature (22)..(110): Homolog of NCBI NO: 18396289 NR Description: Expressed protein
  misc_feature (13)..(111): Homolog of NCBI NO: 4680201 NR Description: hypothetical protein [Sorghum bicolor]
  misc_feature (17)..(104): Homolog of NCBI NO: 4680489 NR Description: hypothetical protein [Oryza sativa]
  misc_feature (21)..(94): Homolog of NCBI NO: 15227672 NR Description: hypothetical protein; protein id: At2g29950.1
  misc_feature (2)..(111): Homolog of NCBI NO: 34499881 NR Description: early flowering 4 [Mesembryanthemum crystallinum]
  misc_feature (1)..(111): Homolog of NCBI NO: 18405258 NR Description: expressed protein
MKRNGETKRRRNVAEEAEQGEDPAMWENLDRNFRQVQSVLDRNRSLIQQVNDNHQSRMADNMSKNVALIQELNGNISKVVNMYSDLNTSFSSGFHGGKNGHDGGGAAGTRA

SEQ ID NO: 28276 - protein, 87 aa, Arabidopsis thaliana
  peptide (1)..(87): Ceres Seq. ID no. 12322088
  misc_feature (1)..(80): Homolog of NCBI NO: 18394486 NR Description: Expressed protein
  misc_feature (1)..(80): Homolog of NCBI NO: 8778455 NR Description: F1L3.15 [Arabidopsis thaliana]
  misc_feature (1)..(80): Homolog of NCBI NO: 25406197 NR Description: hypothetical protein F28P22.18 [imported] -
  misc_feature (1)..(80): Homolog of NCBI NO: 18410139 NR Description: expressed protein
  misc_feature (1)..(86): Homolog of NCBI NO: 18396289 NR Description: Expressed protein
  misc_feature (1)..(87): Homolog of NCBI NO: 4680201 NR Description: hypothetical protein [Sorghum bicolor]
  misc_feature (1)..(80): Homolog of NCBI NO: 4680489 NR Description: hypothetical protein [Oryza sativa]
  misc_feature (1)..(70): Homolog of NCBI NO: 15227672 NR Description: hypothetical protein; protein id: At2g29950.1
  misc_feature (1)..(87): Homolog of NCBI NO: 34499881 NR Description: early flowering 4 [Mesembryanthemum crystallinum]
  misc_feature (1)..(87): Homolog of NCBI NO: 18405258 NR Description: expressed protein
MWENLDRNFRQVQSVLDRNRSLIQQVNDNHQSRMADNMSKNVALIQELNGNISKVVNMYSDLNTSFSSGFHGGKNGHDGGGAAGTRA

SEQ ID NO: 28277 - DNA, 629 bp, Arabidopsis thaliana
  misc_feature (1)..(629): Ceres Seq. ID no. 12348641
  misc_feature: MA Experiment ID: 108434 Result: Down-regulated in Transcription
  misc_feature: MA Experiment 108434 PARAMETER Experiment Name: At_Root_Tips_cDNA_P Parameter: Tissue Value: Root Tips
  misc_feature: MA Experiment ID: 108435 Result: Down-regulated in Transcription
  misc_feature: MA Experiment 108435 PARAMETER Experiment Name: At_stm_Mutants_cDNA_P Parameter: Plant Line Value: wt Landsburg vs stm
  misc_feature: MA Experiment 108435 PARAMETER Experiment Name: At_stm_Mutants_cDNA_P Parameter: Tissue Value: Shoot Apical Meristem Region
  misc_feature: MA Experiment ID: 108461 Result: Up-regulated in Transcription
  misc_feature: MA Experiment 108461 PARAMETER Experiment Name: At_Germinating_Seeds_cDNA_P Parameter: Age (day) Value: 1 vs. 0
  misc_feature: MA Experiment 108461 PARAMETER Experiment Name: At_Germinating_Seeds_cDNA_P Parameter: Tissue Value: Germinating Seeds
  misc_feature: MA Experiment ID: 108462 Result: Up-regulated in Transcription
  misc_feature: MA Experiment 108462 PARAMETER Experiment Name: At_Germinating_Seeds_cDNA_P Parameter: Age (day) Value: 2 vs. 0
  misc_feature: MA Experiment 108462 PARAMETER Experiment Name: At_Germinating_Seeds_cDNA_P Parameter: Tissue Value: Germinating Seeds
  misc_feature: MA Experiment ID: 108463 Result: Up-regulated in Transcription
  misc_feature: MA Experiment 108463 PARAMETER Experiment Name: At_Germinating_Seeds_cDNA_P Parameter: Age (day) Value: 3 vs. 0
  misc_feature: MA Experiment 108463 PARAMETER Experiment Name: At_Germinating_Seeds_cDNA_P Parameter: Tissue Value: Germinating Seeds
  misc_feature: MA Experiment ID: 108464 Result: Up-regulated in Transcription
  misc_feature: MA Experiment 108464 PARAMETER Experiment Name: At_Germinating_Seeds_cDNA_P Parameter: Age (day) Value: 4 vs. 0
  misc_feature: MA Experiment 108464 PARAMETER Experiment Name: At_Germinating_Seeds_cDNA_P Parameter: Tissue Value: Germinating Seeds
  misc_feature: MA Experiment ID: 108473 Result: Down-regulated in Transcription
  misc_feature: MA Experiment 108473 PARAMETER Experiment Name: At_Drought_Flowers_cDNA_P Parameter: Timepoint (hr) Value: 7 d
  misc_feature: MA Experiment 108473 PARAMETER Experiment Name: At_Drought_Flowers_cDNA_P Parameter: Tissue Value: Flower
  misc_feature: MA Experiment 108473 PARAMETER Experiment Name: At_Drought_Flowers_cDNA_P Parameter: Treatment Value: Drought vs. No Drought
  misc_feature: MA Experiment ID: 108501 Result: Down-regulated in Transcription
  misc_feature: MA Experiment 108501 PARAMETER Experiment Name: At_ap2_floral_buds_cDNA_P Parameter: Plant Line Value: ap2 (Ler.)
  misc_feature: MA Experiment 108501 PARAMETER Experiment Name: At_ap2_floral_buds_cDNA_P Parameter: Tissue Value: Closed Flower
  misc_feature: MA Experiment ID: 108572 Result: Down-regulated in Transcription
  misc_feature: MA Experiment 108572 PARAMETER Experiment Name: At_Drought_cDNA_P Parameter: Timepoint (hr) Value: 1
  misc_feature: MA Experiment 108572 PARAMETER Experiment Name: At_Drought_cDNA_P Parameter: Tissue Value: Aerial
  misc_feature: MA Experiment 108572 PARAMETER Experiment Name: At_Drought_cDNA_P Parameter: Treatment Value: Drought vs. No Drought
  misc_feature: MA Experiment ID: 108573 Result: Down-regulated in Transcription
  misc_feature: MA Experiment 108573 PARAMETER Experiment Name: At_Drought_cDNA_P Parameter: Timepoint (hr) Value: 6
  misc_feature: MA Experiment 108573 PARAMETER Experiment Name: At_Drought_cDNA_P Parameter: Tissue Value: Aerial
  misc_feature: MA Experiment 108573 PARAMETER Experiment Name: At_Drought_cDNA_P Parameter: Treatment Value: Drought vs. No Drought
  misc_feature: MA Experiment ID: 108576 Result: Up-regulated in Transcription
  misc_feature: MA Experiment 108576 PARAMETER Experiment Name: At_42deg_Heat_cDNA_P Parameter: Temperature (deg C) Value: 42 vs. 22
  misc_feature: MA Experiment 108576 PARAMETER Experiment Name: At_42deg_Heat_cDNA_P Parameter: Timepoint (hr) Value: 1
  misc_feature: MA Experiment 108576 PARAMETER Experiment Name: At_42deg_Heat_cDNA_P Parameter: Tissue Value: Aerial
  misc_feature: MA Experiment ID: 108577 Result: Up-regulated in Transcription
  misc_feature: MA Experiment 108577 PARAMETER Experiment Name: At_42deg_Heat_cDNA_P Parameter: Temperature (deg C) Value: 42 vs. 22
  misc_feature: MA Experiment 108577 PARAMETER Experiment Name: At_42deg_Heat_cDNA_P Parameter: Timepoint (hr) Value: 6
  misc_feature: MA Experiment 108577 PARAMETER Experiment Name: At_42deg_Heat_cDNA_P Parameter: Tissue Value: Aerial
  misc_feature: MA Experiment ID: 108595 Result: Down-regulated in Transcription
  misc_feature: MA Experiment 108595 PARAMETER Experiment Name: At_Ler-pi_Ovule_cDNA_P Parameter: Plant Line Value: null
  misc_feature: MA Experiment ID: 108607 Result: Down-regulated in Transcription
  misc_feature: MA Experiment 108607 PARAMETER Experiment Name: At_100uM_ABA_cDNA_P Parameter: Timepoint (hr) Value: 4
  misc_feature: MA Experiment 108607 PARAMETER Experiment Name: At_100uM_ABA_cDNA_P Parameter: Tissue Value: Aerial
  misc_feature: MA Experiment 108607 PARAMETER Experiment Name: At_100uM_ABA_cDNA_P Parameter: Treatment Value: 100uM ABA vs. No Treatment
  misc_feature: MA Experiment ID: 108609 Result: Up-regulated in Transcription
  misc_feature: MA Experiment 108609 PARAMETER Experiment Name: At_100uM_ABA_cDNA_P Parameter: Timepoint (hr) Value: 24
  misc_feature: MA Experiment 108609 PARAMETER Experiment Name: At_100uM_ABA_cDNA_P Parameter: Tissue Value: Aerial
  misc_feature: MA Experiment 108609 PARAMETER Experiment Name: At_100uM_ABA_cDNA_P Parameter: Treatment Value: 100uM ABA vs. No Treatment
  misc_feature: MA Experiment ID: 20000070 Result: Down-regulated in Transcription
  misc_feature: MA Experiment 20000070 PARAMETER Experiment Name: At_100uM_ABA_Mutants_cDNA_P Parameter: Plant Line Value: CS24
  misc_feature: MA Experiment 20000070 PARAMETER Experiment Name: At_100uM_ABA_Mutants_cDNA_P Parameter: Timepoint (hr) Value: 6
  misc_feature: MA Experiment 20000070 PARAMETER Experiment Name: At_100uM_ABA_Mutants_cDNA_P Parameter: Tissue Value: Aerial
  misc_feature: MA Experiment 20000070 PARAMETER Experiment Name: At_100uM_ABA_Mutants_cDNA_P Parameter: Treatment Value: 100uM ABA vs. No Treatment
  misc_feature: MA Experiment ID: 20000072 Result: Down-regulated in Transcription
  misc_feature: MA Experiment 20000072 PARAMETER Experiment Name: At_100uM_ABA_Mutants_cDNA_P Parameter: Plant Line Value: CS8105
  misc_feature: MA Experiment 20000072 PARAMETER Experiment Name: At_100uM_ABA_Mutants_cDNA_P Parameter: Timepoint (hr) Value: 6
  misc_feature: MA Experiment 20000072 PARAMETER Experiment Name: At_100uM_ABA_Mutants_cDNA_P Parameter: Tissue Value: Aerial
  misc_feature: MA Experiment 20000072 PARAMETER Experiment Name: At_100uM_ABA_Mutants_cDNA_P Parameter: Treatment Value: 100uM ABA vs. No Treatment
  misc_feature: MA Experiment ID: 20000093 Result: Up-regulated in Transcription
  misc_feature: MA Experiment 20000093 PARAMETER Experiment Name: At_42deg_Heat_cDNA_P Parameter: Temperature (deg C) Value: 42 vs. 22
  misc_feature: MA Experiment 20000093 PARAMETER Experiment Name: At_42deg_Heat_cDNA_P Parameter: Timepoint (hr) Value: 0.5
  misc_feature: MA Experiment 20000093 PARAMETER Experiment Name: At_42deg_Heat_cDNA_P Parameter: Tissue Value: Aerial
  misc_feature: MA Experiment ID: 20000111 Result: Up-regulated in Transcription
  misc_feature: MA Experiment 20000111 PARAMETER Experiment Name: At_42deg_Heat_cDNA_P Parameter: Temperature (deg C) Value: 42 vs. 22
  misc_feature: MA Experiment 20000111 PARAMETER Experiment Name: At_42deg_Heat_cDNA_P Parameter: Timepoint (hr) Value: 6
  misc_feature: MA Experiment 20000111 PARAMETER Experiment Name: At_42deg_Heat_cDNA_P Parameter: Tissue Value: Aerial
  misc_feature: MA Experiment ID: 20000112 Result: Up-regulated in Transcription
  misc_feature: MA Experiment 20000112 PARAMETER Experiment Name: At_42deg_Heat_cDNA_P Parameter: Temperature (deg C) Value: 42 vs. 22
  misc_feature: MA Experiment 20000112 PARAMETER Experiment Name: At_42deg_Heat_cDNA_P Parameter: Timepoint (hr) Value: 2
  misc_feature: MA Experiment 20000112 PARAMETER Experiment Name: At_42deg_Heat_cDNA_P Parameter: Tissue Value: Aerial
  misc_feature: MA Experiment ID: 20000113 Result: Up-regulated in Transcription
  misc_feature: MA Experiment 20000113 PARAMETER Experiment Name: At_42deg_Heat_cDNA_P Parameter: Temperature (deg C) Value: 42 vs. 22
  misc_feature: MA Experiment 20000113 PARAMETER Experiment Name: At_42deg_Heat_cDNA_P Parameter: Timepoint (hr) Value: 8
  misc_feature: MA Experiment 20000113 PARAMETER Experiment Name: At_42deg_Heat_cDNA_P Parameter: Tissue Value: Aerial
  misc_feature: MA Experiment ID: 20000144 Result: Up-regulated in Transcription
  misc_feature: MA Experiment 20000144 PARAMETER Experiment Name: At_42deg_Heat_cDNA_P Parameter: Temperature (deg C) Value: 42 vs. 22
  misc_feature: MA Experiment 20000144 PARAMETER Experiment Name: At_42deg_Heat_cDNA_P Parameter: Timepoint (hr) Value: 1
  misc_feature: MA Experiment 20000144 PARAMETER Experiment Name: At_42deg_Heat_cDNA_P Parameter: Tissue Value: Aerial
  misc_feature: MA Experiment ID: 20000171 Result: Up-regulated in Transcription
  misc_feature: MA Experiment 20000171 PARAMETER Experiment Name: At_42deg_Heat_P Parameter: Age (day) Value: 14
  misc_feature: MA Experiment 20000171 PARAMETER Experiment Name: At_42deg_Heat_P Parameter: Organism Value: A. thaliana
  misc_feature: MA Experiment 20000171 PARAMETER Experiment Name: At_42deg_Heat_P Parameter: Plant Line Value: WS
  misc_feature: MA Experiment 20000171 PARAMETER Experiment Name: At_42deg_Heat_P Parameter: Temperature (deg C) Value: 42 vs. 22
  misc_feature: MA Experiment 20000171 PARAMETER Experiment Name: At_42deg_Heat_P Parameter: Timepoint (hr) Value: 1
  misc_feature: MA Experiment 20000171 PARAMETER Experiment Name: At_42deg_Heat_P Parameter: Tissue Value: Aerial
  misc_feature: MA Experiment ID: 20000173 Result: Up-regulated in Transcription
  misc_feature: MA Experiment 20000173 PARAMETER Experiment Name: At_42deg_Heat_P Parameter: Age (day) Value: 14
  misc_feature: MA Experiment 20000173 PARAMETER Experiment Name: At_42deg_Heat_P Parameter: Organism Value: A. thaliana
  misc_feature: MA Experiment 20000173 PARAMETER Experiment Name: At_42deg_Heat_P Parameter: Plant Line Value: WS
  misc_feature: MA Experiment 20000173 PARAMETER Experiment Name: At_42deg_Heat_P Parameter: Temperature (deg C) Value: 42 vs. 22
  misc_feature: MA Experiment 20000173 PARAMETER Experiment Name: At_42deg_Heat_P Parameter: Timepoint (hr) Value: 6
  misc_feature: MA Experiment 20000173 PARAMETER Experiment Name: At_42deg_Heat_P Parameter: Tissue Value: Aerial
  misc_feature: MA Experiment ID: 20000179 Result: Up-regulated in Transcription
  misc_feature: MA Experiment 20000179 PARAMETER Experiment Name: At_Germinating_Seeds_P Parameter: Age (hr) Value: 6 vs. 0
  misc_feature: MA Experiment 20000179 PARAMETER Experiment Name: At_Germinating_Seeds_P Parameter: Tissue Value: Germinating Seeds
  misc_feature: MA Experiment ID: 20000180 Result: Up-regulated in Transcription
  misc_feature: MA Experiment 20000180 PARAMETER Experiment Name: At_Germinating_Seeds_P Parameter: Age (hr) Value: 24 vs. 0
  misc_feature: MA Experiment 20000180 PARAMETER Experiment Name: At_Germinating_Seeds_P Parameter: Tissue Value: Germinating Seeds
  misc_feature: MA Experiment ID: 20000184 Result: Up-regulated in Transcription
  misc_feature: MA Experiment 20000184 PARAMETER Experiment Name: At_Shoots__P Parameter: Age (day) Value: 7
  misc_feature: MA Experiment 20000184 PARAMETER Experiment Name: At_Shoots__P Parameter: Tissue Value: Shoots vs. Whole Plant
  misc_feature: MA Experiment ID: 20000224 Result: Down-regulated in Transcription
  misc_feature: MA Experiment ID: 20000267 Result: Down-regulated in Transcription
  misc_feature: MA Experiment 20000267 PARAMETER Experiment Name: At_Drought_P Parameter: Age (day) Value: 7
  misc_feature: MA Experiment 20000267 PARAMETER Experiment Name: At_Drought_P Parameter: Organism Value: A. thaliana
  misc_feature: MA Experiment 20000267 PARAMETER Experiment Name: At_Drought_P Parameter: Plant Line Value: WS
  misc_feature: MA Experiment 20000267 PARAMETER Experiment Name: At_Drought_P Parameter: Timepoint (hr) Value: 6
  misc_feature: MA Experiment 20000267 PARAMETER Experiment Name: At_Drought_P Parameter: Tissue Value: Whole Plant
  misc_feature: MA Experiment 20000267 PARAMETER Experiment Name: At_Drought_P Parameter: Treatment Value: Drought vs. No Drought
  misc_feature: MA Experiment ID: 20000268 Result: Down-regulated in Transcription
  misc_feature: MA Experiment 20000268 PARAMETER Experiment Name: At_100mM_NaCl__P Parameter: Age (day) Value: 14
  misc_feature: MA Experiment 20000268 PARAMETER Experiment Name: At_100mM_NaCl__P Parameter: Organism Value: A. thaliana
  misc_feature: MA Experiment 20000268 PARAMETER Experiment Name: At_100mM_NaCl__P Parameter: Plant Line Value: WS
  misc_feature: MA Experiment 20000268 PARAMETER Experiment Name: At_100mM_NaCl__P Parameter: Timepoint (hr) Value: 6
  misc_feature: MA Experiment 20000268 PARAMETER Experiment Name: At_100mM_NaCl__P Parameter: Tissue Value: Whole Plant
  misc_feature: MA Experiment 20000268 PARAMETER Experiment Name: At_100mM_NaCl__P Parameter: Treatment Value: 100mM NaCl vs. No Treatment
  misc_feature: MA Experiment ID: 20000436 Result: Down-regulated in Transcription
  misc_feature: MA Experiment 20000436 PARAMETER Experiment Name: At_Drought_P Parameter: Age (day) Value: 7
  misc_feature: MA Experiment 20000436 PARAMETER Experiment Name: At_Drought_P Parameter: Organism Value: A. thaliana
  misc_feature: MA Experiment 20000436 PARAMETER Experiment Name: At_Drought_P Parameter: Plant Line Value: WS
  misc_feature: MA Experiment 20000436 PARAMETER Experiment Name: At_Drought_P Parameter: Timepoint (hr) Value: 12
  misc_feature: MA Experiment 20000436 PARAMETER Experiment Name: At_Drought_P Parameter: Tissue Value: Whole Plant
  misc_feature: MA Experiment 20000436 PARAMETER Experiment Name: At_Drought_P Parameter: Treatment Value: Drought vs. No Drought
  misc_feature: MA Experiment ID: 20000437 Result: Down-regulated in Transcription
  misc_feature: MA Experiment 20000437 PARAMETER Experiment Name: At_Drought_P Parameter: Age (day) Value: 8
  misc_feature: MA Experiment 20000437 PARAMETER Experiment Name: At_Drought_P Parameter: Organism Value: A. thaliana
  misc_feature: MA Experiment 20000437 PARAMETER Experiment Name: At_Drought_P Parameter: Plant Line Value: WS
  misc_feature: MA Experiment 20000437 PARAMETER Experiment Name: At_Drought_P Parameter: Timepoint (hr) Value: 24
  misc_feature: MA Experiment 20000437 PARAMETER Experiment Name: At_Drought_P Parameter: Tissue Value: Whole Plant
  misc_feature: MA Experiment 20000437 PARAMETER Experiment Name: At_Drought_P Parameter: Treatment Value: Drought vs. No Drought
  misc_feature: MA Experiment ID: 20000441 Result: Up-regulated in Transcription
  misc_feature: MA Experiment 20000441 PARAMETER Experiment Name: At_1uM_BR-BRZ__P Parameter: Tissue Value: Shoot Apices
  misc_feature: MA Experiment 20000441 PARAMETER Experiment Name: At_1uM_BR-BRZ__P Parameter: Treatment Value: 1uM BR vs. No Treatment
  misc_feature: MA Experiment ID: 20000443 Result: Up-regulated in Transcription
  misc_feature: MA Experiment 20000443 PARAMETER Experiment Name: At_1uM_BR-BRZ__P Parameter: Tissue Value: Shoot Apices
  misc_feature: MA Experiment 20000443 PARAMETER Experiment Name: At_1uM_BR-BRZ__P Parameter: Treatment Value: 1uM BRZ vs. No Treatment
  misc_feature: MA Experiment ID: 20000453 Result: Up-regulated in Transcription
  misc_feature: MA Experiment 20000453 PARAMETER Experiment Name: At_100uM_ABA_P Parameter: Age (day) Value: 15
  misc_feature: MA Experiment 20000453 PARAMETER Experiment Name: At_100uM_ABA_P Parameter: Organism Value: A. thaliana
  misc_feature: MA Experiment 20000453 PARAMETER Experiment Name: At_100uM_ABA_P Parameter: Plant Line Value: WS
  misc_feature: MA Experiment 20000453 PARAMETER Experiment Name: At_100uM_ABA_P Parameter: Timepoint (hr) Value: 24
  misc_feature: MA Experiment 20000453 PARAMETER Experiment Name: At_100uM_ABA_P Parameter: Tissue Value: Aerial
  misc_feature: MA Experiment 20000453 PARAMETER Experiment Name: At_100uM_ABA_P Parameter: Treatment Value: 100uM ABA vs. No Treatment
  misc_feature: MA Experiment ID: 20000456 Result: Down-regulated in Transcription
  misc_feature: MA Experiment 20000456 PARAMETER Experiment Name: At_100uM_BA_P Parameter: Age (day) Value: 14
  misc_feature: MA Experiment 20000456 PARAMETER Experiment Name: At_100uM_BA_P Parameter: Organism Value: A. thaliana
  misc_feature: MA Experiment 20000456 PARAMETER Experiment Name: At_100uM_BA_P Parameter: Plant Line Value: WS
  misc_feature: MA Experiment 20000456 PARAMETER Experiment Name: At_100uM_BA_P Parameter: Timepoint (hr) Value: 6
  misc_feature: MA Experiment 20000456 PARAMETER Experiment Name: At_100uM_BA_P Parameter: Tissue Value: Aerial
  misc_feature: MA Experiment 20000456 PARAMETER Experiment Name: At_100uM_BA_P Parameter: Treatment Value: 100uM BA vs. No Treatment
  misc_feature: MA Experiment ID: 20000573 Result: Up-regulated in Transcription
  misc_feature: MA Experiment 20000573 PARAMETER Experiment Name: At_100uM_ABA_Mutants__P Parameter: Organism Value: A. thaliana
  misc_feature: MA Experiment 20000573 PARAMETER Experiment Name: At_100uM_ABA_Mutants__P Parameter: Plant Line Value: CS22 vs. Ler wt
  misc_feature: MA Experiment 20000573 PARAMETER Experiment Name: At_100uM_ABA_Mutants__P Parameter: Timepoint (hr) Value: N/A
  misc_feature: MA Experiment 20000573 PARAMETER Experiment Name: At_100uM_ABA_Mutants__P Parameter: Tissue Value: Whole Plant
  misc_feature: MA Experiment 20000573 PARAMETER Experiment Name: At_100uM_ABA_Mutants__P Parameter: Treatment Value: None
  misc_feature: MA Experiment ID: 20000574 Result: Up-regulated in Transcription
  misc_feature: MA Experiment 20000574 PARAMETER Experiment Name: At_100uM_ABA_Mutants__P Parameter: Organism Value: A. thaliana
  misc_feature: MA Experiment 20000574 PARAMETER Experiment Name: At_100uM_ABA_Mutants__P Parameter: Plant Line Value: CS23 vs. Ler wt
  misc_feature: MA Experiment 20000574 PARAMETER Experiment Name: At_100uM_ABA_Mutants__P Parameter: Timepoint (hr) Value: N/A
  misc_feature: MA Experiment 20000574 PARAMETER Experiment Name: At_100uM_ABA_Mutants__P Parameter: Tissue Value: Whole Plant
  misc_feature: MA Experiment 20000574 PARAMETER Experiment Name: At_100uM_ABA_Mutants__P Parameter: Treatment Value: None
  misc_feature: MA Experiment ID: 20000709 Result: Up-regulated in Transcription
  misc_feature: MA Experiment 20000709 PARAMETER Experiment Name: At_15mM_NH4NO3_L-to-H_P Parameter: Age (hr) Value: 14
  misc_feature: MA Experiment 20000709 PARAMETER Experiment Name: At_15mM_NH4NO3_L-to-H_P Parameter: Organism Value: A. thaliana
  misc_feature: MA Experiment 20000709 PARAMETER Experiment Name: At_15mM_NH4NO3_L-to-H_P Parameter: Plant Line Value: WS
  misc_feature: MA Experiment 20000709 PARAMETER Experiment Name: At_15mM_NH4NO3_L-to-H_P Parameter: Timepoint (hr) Value: 4
  misc_feature: MA Experiment 20000709 PARAMETER Experiment Name: At_15mM_NH4NO3_L-to-H_P Parameter: Tissue Value: Aerial
  misc_feature: MA Experiment 20000709 PARAMETER Experiment Name: At_15mM_NH4NO3_L-to-H_P Parameter: Treatment Value: 15mM NH4NO3 vs. 30mM Mannitol
  misc_feature: MA Experiment ID: 20001450 Result: Up-regulated in Transcription
  misc_feature: MA Experiment 20001450 PARAMETER Experiment Name: At_Far-red-induction_P Parameter: Age (day) Value: 7
  misc_feature: MA Experiment 20001450 PARAMETER Experiment Name: At_Far-red-induction_P Parameter: Light Value: Far-red vs. White
  misc_feature: MA Experiment 20001450 PARAMETER Experiment Name: At_Far-red-induction_P Parameter: Organism Value: A. thaliana
  misc_feature: MA Experiment 20001450 PARAMETER Experiment Name: At_Far-red-induction_P Parameter: Plant Line Value: Columbia
  misc_feature: MA Experiment 20001450 PARAMETER Experiment Name: At_Far-red-induction_P Parameter: Timepoint (hr) Value: 8
  misc_feature: MA Experiment 20001450 PARAMETER Experiment Name: At_Far-red-induction_P Parameter: Tissue Value: Whole Plant
  misc_feature: MA Experiment ID: 20001451 Result: Up-regulated in Transcription
  misc_feature: MA Experiment 20001451 PARAMETER Experiment Name: At_Far-red-induction_P Parameter: Age (day) Value: 7
  misc_feature: MA Experiment 20001451 PARAMETER Experiment Name: At_Far-red-induction_P Parameter: Light Value: Far-red vs. White
  misc_feature: MA Experiment 20001451 PARAMETER Experiment Name: At_Far-red-induction_P Parameter: Organism Value: A. thaliana
  misc_feature: MA Experiment 20001451 PARAMETER Experiment Name: At_Far-red-induction_P Parameter: Plant Line Value: Columbia
  misc_feature: MA Experiment 20001451 PARAMETER Experiment Name: At_Far-red-induction_P Parameter: Timepoint (hr) Value: 24
  misc_feature: MA Experiment 20001451 PARAMETER Experiment Name: At_Far-red-induction_P Parameter: Tissue Value: Whole Plant
  misc_feature: MA Experiment ID: 20001553 Result: Down-regulated in Transcription
  misc_feature: MA Experiment 20001553 PARAMETER Experiment Name: At_Drought_Soil_Dry_P Parameter: Age (day) Value: 19
  misc_feature: MA Experiment 20001553 PARAMETER Experiment Name: At_Drought_Soil_Dry_P Parameter: Organism Value: A. thaliana
  misc_feature: MA Experiment 20001553 PARAMETER Experiment Name: At_Drought_Soil_Dry_P Parameter: Plant Line Value: WS
  misc_feature: MA Experiment 20001553 PARAMETER Experiment Name: At_Drought_Soil_Dry_P Parameter: Post Timepoint (hr) Value: None
  misc_feature: MA Experiment 20001553 PARAMETER Experiment Name: At_Drought_Soil_Dry_P Parameter: Post-Treatment Value: None
  misc_feature: MA Experiment 20001553 PARAMETER Experiment Name: At_Drought_Soil_Dry_P Parameter: Timepoint (day) Value: 5
  misc_feature: MA Experiment 20001553 PARAMETER Experiment Name: At_Drought_Soil_Dry_P Parameter: Treatment Value: Drought vs. No Drought
  misc_feature: MA Experiment ID: 20001554 Result: Down-regulated in Transcription
  misc_feature: MA Experiment 20001554 PARAMETER Experiment Name: At_Drought_Soil_Dry_P Parameter: Age (day) Value: 21
  misc_feature: MA Experiment 20001554 PARAMETER Experiment Name: At_Drought_Soil_Dry_P Parameter: Organism Value: A. thaliana
  misc_feature: MA Experiment 20001554 PARAMETER Experiment Name: At_Drought_Soil_Dry_P Parameter: Plant Line Value: WS
  misc_feature: MA Experiment 20001554 PARAMETER Experiment Name: At_Drought_Soil_Dry_P Parameter: Post Timepoint (hr) Value: None
  misc_feature: MA Experiment 20001554 PARAMETER Experiment Name: At_Drought_Soil_Dry_P Parameter: Post-Treatment Value: None
  misc_feature: MA Experiment 20001554 PARAMETER Experiment Name: At_Drought_Soil_Dry_P Parameter: Timepoint (day) Value: 7
  misc_feature: MA Experiment 20001554 PARAMETER Experiment Name: At_Drought_Soil_Dry_P Parameter: Treatment Value: Drought vs. No Drought
  misc_feature: MA Experiment ID: 20001555 Result: Down-regulated in Transcription
  misc_feature: MA Experiment 20001555 PARAMETER Experiment Name: At_Drought_Soil_Dry_P Parameter: Age (day) Value: 24
  misc_feature: MA Experiment 20001555 PARAMETER Experiment Name: At_Drought_Soil_Dry_P Parameter: Organism Value: A. thaliana
  misc_feature: MA Experiment 20001555 PARAMETER Experiment Name: At_Drought_Soil_Dry_P Parameter: Plant Line Value: WS
  misc_feature: MA Experiment 20001555 PARAMETER Experiment Name: At_Drought_Soil_Dry_P Parameter: Post Timepoint (hr) Value: None
  misc_feature: MA Experiment 20001555 PARAMETER Experiment Name: At_Drought_Soil_Dry_P Parameter: Post-Treatment Value: None
  misc_feature: MA Experiment 20001555 PARAMETER Experiment Name: At_Drought_Soil_Dry_P Parameter: Timepoint (day) Value: 10
  misc_feature: MA Experiment 20001555 PARAMETER Experiment Name: At_Drought_Soil_Dry_P Parameter: Treatment Value: Drought vs. No Drought
  misc_feature: MA Experiment ID: 20001556 Result: Down-regulated in Transcription
  misc_feature: MA Experiment 20001556 PARAMETER Experiment Name: At_Drought_Soil_Dry_P Parameter: Age (day) Value: 26
  misc_feature: MA Experiment 20001556 PARAMETER Experiment Name: At_Drought_Soil_Dry_P Parameter: Organism Value: A. thaliana
  misc_feature: MA Experiment 20001556 PARAMETER Experiment Name: At_Drought_Soil_Dry_P Parameter: Plant Line Value: WS
  misc_feature: MA Experiment 20001556 PARAMETER Experiment Name: At_Drought_Soil_Dry_P Parameter: Post Timepoint (hr) Value: None
  misc_feature: MA Experiment 20001556 PARAMETER Experiment Name: At_Drought_Soil_Dry_P Parameter: Post-Treatment Value: None
  misc_feature: MA Experiment 20001556 PARAMETER Experiment Name: At_Drought_Soil_Dry_P Parameter: Timepoint (day) Value: 12
  misc_feature: MA Experiment 20001556 PARAMETER Experiment Name: At_Drought_Soil_Dry_P Parameter: Treatment Value: Drought vs. No Drought
  misc_feature: MA Experiment ID: 20001557 Result: Down-regulated in Transcription
  misc_feature: MA Experiment 20001557 PARAMETER Experiment Name: At_Drought_Soil_Dry_P Parameter: Age (day) Value: 27
  misc_feature: MA Experiment 20001557 PARAMETER Experiment Name: At_Drought_Soil_Dry_P Parameter: Organism Value: A. thaliana
  misc_feature: MA Experiment 20001557 PARAMETER Experiment Name: At_Drought_Soil_Dry_P Parameter: Plant Line Value: WS
  misc_feature: MA Experiment 20001557 PARAMETER Experiment Name: At_Drought_Soil_Dry_P Parameter: Post Timepoint (hr) Value: 3
  misc_feature: MA Experiment 20001557 PARAMETER Experiment Name: At_Drought_Soil_Dry_P Parameter: Post-Treatment Value: Re-Water vs. No Drought
  misc_feature: MA Experiment 20001557 PARAMETER Experiment Name: At_Drought_Soil_Dry_P Parameter: Timepoint (day) Value: 13
  misc_feature: MA Experiment 20001557 PARAMETER Experiment Name: At_Drought_Soil_Dry_P Parameter: Treatment Value: Drought vs. No Drought
  misc_feature: MA Experiment ID: 20001558 Result: Up-regulated in Transcription
  misc_feature: MA Experiment 20001558 PARAMETER Experiment Name: At_Drought_Soil_Dry_P Parameter: Age (day) Value: 27
  misc_feature: MA Experiment 20001558 PARAMETER Experiment Name: At_Drought_Soil_Dry_P Parameter: Organism Value: A. thaliana
  misc_feature: MA Experiment 20001558 PARAMETER Experiment Name: At_Drought_Soil_Dry_P Parameter: Plant Line Value: WS
  misc_feature: MA Experiment 20001558 PARAMETER Experiment Name: At_Drought_Soil_Dry_P Parameter: Post Timepoint (hr) Value: 6
  misc_feature: MA Experiment 20001558 PARAMETER Experiment Name: At_Drought_Soil_Dry_P Parameter: Post-Treatment Value: Re-Water vs. No Drought
  misc_feature: MA Experiment 20001558 PARAMETER Experiment Name: At_Drought_Soil_Dry_P Parameter: Timepoint (day) Value: 13
  misc_feature: MA Experiment 20001558 PARAMETER Experiment Name: At_Drought_Soil_Dry_P Parameter: Treatment Value: Drought vs. No Drought
  misc_feature: MA Experiment ID: 20001559 Result: Down-regulated in Transcription
  misc_feature: MA Experiment 20001559 PARAMETER Experiment Name: At_Drought_Soil_Dry_P Parameter: Age (day) Value: 28
  misc_feature: MA Experiment 20001559 PARAMETER Experiment Name: At_Drought_Soil_Dry_P Parameter: Organism Value: A. thaliana
  misc_feature: MA Experiment 20001559 PARAMETER Experiment Name: At_Drought_Soil_Dry_P Parameter: Plant Line Value: WS
  misc_feature: MA Experiment 20001559 PARAMETER Experiment Name: At_Drought_Soil_Dry_P Parameter: Post Timepoint (hr) Value: 29
  misc_feature: MA Experiment 20001559 PARAMETER Experiment Name: At_Drought_Soil_Dry_P Parameter: Post-Treatment Value: Re-Water vs. No Drought
  misc_feature: MA Experiment 20001559 PARAMETER Experiment Name: At_Drought_Soil_Dry_P Parameter: Timepoint (day) Value: 14
  misc_feature: MA Experiment 20001559 PARAMETER Experiment Name: At_Drought_Soil_Dry_P Parameter: Treatment Value: Drought vs. No Drought
  misc_feature: MA Experiment ID: 20001560 Result: Up-regulated in Transcription
  misc_feature: MA Experiment 20001560 PARAMETER Experiment Name: At_Drought_Soil_Dry_P Parameter: Age (day) Value: 28
  misc_feature: MA Experiment 20001560 PARAMETER Experiment Name: At_Drought_Soil_Dry_P Parameter: Organism Value: A. thaliana
  misc_feature: MA Experiment 20001560 PARAMETER Experiment Name: At_Drought_Soil_Dry_P Parameter: Plant Line Value: WS
  misc_feature: MA Experiment 20001560 PARAMETER Experiment Name: At_Drought_Soil_Dry_P Parameter: Post Timepoint (hr) Value: None
  misc_feature: MA Experiment 20001560 PARAMETER Experiment Name: At_Drought_Soil_Dry_P Parameter: Post-Treatment Value: None
  misc_feature: MA Experiment 20001560 PARAMETER Experiment Name: At_Drought_Soil_Dry_P Parameter: Timepoint (day) Value: 14
  misc_feature: MA Experiment 20001560 PARAMETER Experiment Name: At_Drought_Soil_Dry_P Parameter: Treatment Value: Drought vs. No Drought
  misc_feature: MA Experiment ID: 20001757 Result: Up-regulated in Transcription
  misc_feature: MA Experiment 20001757 PARAMETER Experiment Name: At_50mM_NH4NO3_L-to-H_P Parameter: Timepoint (hr) Value: 6
  misc_feature: MA Experiment 20001757 PARAMETER Experiment Name: At_50mM_NH4NO3_L-to-H_P Parameter: Tissue Value: Leaf
  misc_feature: MA Experiment 20001757 PARAMETER Experiment Name: At_50mM_NH4NO3_L-to-H_P Parameter: Treatment Value: 50mM NH4NO3 vs 100mM Mannitol
  misc_feature: MA Experiment ID: 20001772 Result: Up-regulated in Transcription
  misc_feature: MA Experiment 20001772 PARAMETER Experiment Name: At_Far-red-enriched-adult_P Parameter: Age (day) Value: 29
  misc_feature: MA Experiment 20001772 PARAMETER Experiment Name: At_Far-red-enriched-adult_P Parameter: Light Value: Far-red enriched vs. White
  misc_feature: MA Experiment 20001772 PARAMETER Experiment Name: At_Far-red-enriched-adult_P Parameter: Organism Value: A. thaliana
  misc_feature: MA Experiment 20001772 PARAMETER Experiment Name: At_Far-red-enriched-adult_P Parameter: Plant Line Value: Columbia
  misc_feature: MA Experiment 20001772 PARAMETER Experiment Name: At_Far-red-enriched-adult_P Parameter: Timepoint (hr) Value: 24
  misc_feature: MA Experiment 20001772 PARAMETER Experiment Name: At_Far-red-enriched-adult_P Parameter: Tissue Value: Aerial
  misc_feature: MA Experiment ID: 20001774 Result: Up-regulated in Transcription
  misc_feature: MA Experiment 20001774 PARAMETER Experiment Name: At_Far-red-enriched-adult_P Parameter: Age (day) Value: 31
  misc_feature: MA Experiment 20001774 PARAMETER Experiment Name: At_Far-red-enriched-adult_P Parameter: Light Value: Far-red enriched vs. White
  misc_feature: MA Experiment 20001774 PARAMETER Experiment Name: At_Far-red-enriched-adult_P Parameter: Organism Value: A. thaliana
  misc_feature: MA Experiment 20001774 PARAMETER Experiment Name: At_Far-red-enriched-adult_P Parameter: Plant Line Value: Columbia
  misc_feature: MA Experiment 20001774 PARAMETER Experiment Name: At_Far-red-enriched-adult_P Parameter: Timepoint (hr) Value: 72
  misc_feature: MA Experiment 20001774 PARAMETER Experiment Name: At_Far-red-enriched-adult_P Parameter: Tissue Value: Aerial
  misc_feature: MA Experiment ID: 20001904 Result: Down-regulated in Transcription
  misc_feature: MA Experiment 20001904 PARAMETER Experiment Name: At_Drought_Reproduction_P Parameter: Age (day) Value: 37
  misc_feature: MA Experiment 20001904 PARAMETER Experiment Name: At_Drought_Reproduction_P Parameter: Organism Value: A. thaliana
  misc_feature: MA Experiment 20001904 PARAMETER Experiment Name: At_Drought_Reproduction_P Parameter: Plant Line Value: WS
  misc_feature: MA Experiment 20001904 PARAMETER Experiment Name: At_Drought_Reproduction_P Parameter: Timepoint (day) Value: 7
  misc_feature: MA Experiment 20001904 PARAMETER Experiment Name: At_Drought_Reproduction_P Parameter: Tissue Value: Rosettes
  misc_feature: MA Experiment 20001904 PARAMETER Experiment Name: At_Drought_Reproduction_P Parameter: Treatment Value: Drought vs. No Drought
  misc_feature: MA Experiment ID: 20001905 Result: Down-regulated in Transcription
  misc_feature: MA Experiment 20001905 PARAMETER Experiment Name: At_Drought_Reproduction_P Parameter: Age (day) Value: 40
  misc_feature: MA Experiment 20001905 PARAMETER Experiment Name: At_Drought_Reproduction_P Parameter: Organism Value: A. thaliana
  misc_feature: MA Experiment 20001905 PARAMETER Experiment Name: At_Drought_Reproduction_P Parameter: Plant Line Value: WS
  misc_feature: MA Experiment 20001905 PARAMETER Experiment Name: At_Drought_Reproduction_P Parameter: Timepoint (day) Value: 10
  misc_feature: MA Experiment 20001905 PARAMETER Experiment Name: At_Drought_Reproduction_P Parameter: Tissue Value: Rosettes
  misc_feature: MA Experiment 20001905 PARAMETER Experiment Name: At_Drought_Reproduction_P Parameter: Treatment Value: Drought vs. No Drought
aacaactaaaaccacatttatcattacagtctgatttgagctaagttctctcatcataaactctccttggagaatcatggctatttcaaaagctcttatcgcttctcttctcatatctcttcttgttctccaactcgtccaggctgatgtcgaaaactcacagaagaaaaatggttacgcaaagaagatcgattgtgggagtgcgtgtgtagcacggtgcaggctttcgaggaggccgaggctgtgtcacagagcgtgcgggacttgctgctacaggtgcaactgtgtgcctccgggtacgtacggaaactacgacaagtgccagtgctacgctagcctcaccacccacggtggacgccgcaagtgcccataagaagaaacaaagctcttaattgctgcggataatgggacgatgtcgttttgttagtatttactttggcgtatatatgtggatcgaataataaacgagaacgtacgttgtcgttgtgagtgtgagtactgtattattaatggttctatttgtttttacttgcaagttttcttgttttgaatttgtttttttcatatttgtatatcgattcgtgcattattgtattatttcaatttgtaataagattatgttacctttg

SEQ ID NO: 28278 - protein, 98 aa, Arabidopsis thaliana
  peptide (1)..(98): Ceres Seq. ID no. 12348642
  misc_feature (3)..(98): Pfam Name: Gibberellin regulated protein Pfam Description: Gibberellin regulated protein
  misc_feature (1)..(98): Homolog of NCBI NO: 14625943 NR Description: snakin2 [Solanum tuberosum]
  misc_feature (1)..(98): Homolog of NCBI NO: 14625945 NR Description: snakin2 [Solanum tuberosum]
  misc_feature (1)..(98): Homolog of NCBI NO: 2253442 NR Description: LTCOR11 [Lavatera thuringiaca]
  misc_feature (1)..(98): Homolog of NCBI NO: 3094012 NR Description: cold-regulated LTCOR12 [Lavatera thuringiaca]
  misc_feature (1)..(25): Homolog of NCBI NO: 25313155 NR Description: protein F10A5.6 [imported] - Arabidopsis thaliana
  misc_feature (26)..(98): Homolog of NCBI NO: 25313155 NR Description: protein F10A5.6 [imported] - Arabidopsis thaliana
  misc_feature (1)..(98): Homolog of NCBI NO: 21618022 NR Description: GAST1-like protein [Arabidopsis thaliana]
  misc_feature (1)..(98): Homolog of NCBI NO: 887939 NR Description: GAST1 protein homolog
  misc_feature (1)..(98): Homolog of NCBI NO: 22530936 NR Description: expressed protein [Arabidopsis thaliana]
  misc_feature (1)..(98): Homolog of NCBI NO: 18410924 NR Description: expressed protein
MAISKALIASLLISLLVLQLVQADVENSQKKNGYAKKIDCGSACVARCRLSRRPRLCHRACGTCCYRCNCVPPGTYGNYDKCQCYASLTTHGGRRKCP

SEQ ID NO: 28279 - DNA, 677 bp, Arabidopsis thaliana
  misc_feature (1)..(677): Ceres Seq. ID no. 12577603
  misc_feature: MA Experiment ID: 108576 Result: Down-regulated in Transcription
  misc_feature: MA Experiment 108576 PARAMETER Experiment Name: At_42deg_Heat_cDNA_P Parameter: Temperature (deg C) Value: 42 vs. 22
  misc_feature: MA Experiment 108576 PARAMETER Experiment Name: At_42deg_Heat_cDNA_P Parameter: Timepoint (hr) Value: 1
  misc_feature: MA Experiment 108576 PARAMETER Experiment Name: At_42deg_Heat_cDNA_P Parameter: Tissue Value: Aerial
  misc_feature: MA Experiment ID: 108577 Result: Down-regulated in Transcription
  misc_feature: MA Experiment 108577 PARAMETER Experiment Name: At_42deg_Heat_cDNA_P Parameter: Temperature (deg C) Value: 42 vs. 22
  misc_feature: MA Experiment 108577 PARAMETER Experiment Name: At_42deg_Heat_cDNA_P Parameter: Timepoint (hr) Value: 6
  misc_feature: MA Experiment 108577 PARAMETER Experiment Name: At_42deg_Heat_cDNA_P Parameter: Tissue Value: Aerial
  misc_feature: MA Experiment ID: 20000111 Result: Down-regulated in Transcription
  misc_feature: MA Experiment 20000111 PARAMETER Experiment Name: At_42deg_Heat_cDNA_P Parameter: Temperature (deg C) Value: 42 vs. 22
  misc_feature: MA Experiment 20000111 PARAMETER Experiment Name: At_42deg_Heat_cDNA_P Parameter: Timepoint (hr) Value: 6
  misc_feature: MA Experiment 20000111 PARAMETER Experiment Name: At_42deg_Heat_cDNA_P Parameter: Tissue Value: Aerial
  misc_feature: MA Experiment ID: 20000112 Result: Down-regulated in Transcription
  misc_feature: MA Experiment 20000112 PARAMETER Experiment Name: At_42deg_Heat_cDNA_P Parameter: Temperature (deg C) Value: 42 vs. 22
  misc_feature: MA Experiment 20000112 PARAMETER Experiment Name: At_42deg_Heat_cDNA_P Parameter: Timepoint (hr) Value: 2
  misc_feature: MA Experiment 20000112 PARAMETER Experiment Name: At_42deg_Heat_cDNA_P Parameter: Tissue Value: Aerial
  misc_feature: MA Experiment ID: 20000113 Result: Down-regulated in Transcription
  misc_feature: MA Experiment 20000113 PARAMETER Experiment Name: At_42deg_Heat_cDNA_P Parameter: Temperature (deg C) Value: 42 vs. 22
  misc_feature: MA Experiment 20000113 PARAMETER Experiment Name: At_42deg_Heat_cDNA_P Parameter: Timepoint (hr) Value: 8
  misc_feature: MA Experiment 20000113 PARAMETER Experiment Name: At_42deg_Heat_cDNA_P Parameter: Tissue Value: Aerial
aatgttttttctgttactgtctccgcgatctgattttacgacaatagagtttcgggttttgtcccattccagtttgaaaataaagatggctcgtaccaagcaaaccgctcgtaagtccaccggaggtaaagctccaaggaagcaacttgctactaaggctgctcgtaaatctgcaccaactactggtggagtcaagaaaccacatcgttaccgtcctggaactgttgctctccgtgaaatccgtaagtaccagaagagtactgagttgcttatcaggaaactgccatttcagaggctagtccgtgagattgctcaagatttcaagactgatttgcgtttccagagccatgctgtcttagctctccaggaagctgcagaagcatatcttgttggtctctttgaagacactaacctttgtgccattcatgccaagcgtgtgaccataatgcccaaagacattcagctcgctcgtcgtatcagaggtgaacgcgcttaagccaaccaagaatccgagatttggttcatgtagtttttgttttttatgaaagcaagatcttaattgctgtgttttttaaatctctgggtatgtagtagtaagagtagtaagaagtctgcaatctaagaatgttgtgttctttaagcttattattatgtgtgttgcgaactctttttaaccc

SEQ ID NO: 28280 - protein, 164 aa, Arabidopsis thaliana
  peptide (1)..(164): Ceres Seq. ID no. 12577604
  misc_feature (45)..(163): Pfam Name: Core histone H2A/H2B/H3/H4 Pfam Description: Core histone H2A/H2B/H3/H4
  misc_feature (29)..(164): Homolog of NCBI NO: 37546835 NR Description: similar to histone protein Hist2h3c1 [Homo
  misc_feature (29)..(164): Homolog of NCBI NO: 34858260 NR Description: similar to histone protein Hist2h3c1 [Rattus
  misc_feature (29)..(164): Homolog of NCBI NO: 34858254 NR Description: similar to histone protein Hist2h3c1 [Rattus
  misc_feature (29)..(164): Homolog of NCBI NO: 30061401 NR Description: histone 2, H3ca1 [Mus musculus]
  misc_feature (29)..(164): Homolog of NCBI NO: 7305139 NR Description: histone 1, H3f; histone gene complex 1 [Mus
  misc_feature (20)..(164): Homolog of NCBI NO: 34876396 NR Description: similar to H3 histone family, member I [Rattus
  misc_feature (29)..(164): Homolog of NCBI NO: 2119013 NR Description: histone H3.2 protein - shrew mouse
  misc_feature (21)..(164): Homolog of NCBI NO: 34876364 NR Description: similar to CG31613-PA [Rattus norvegicus]
  misc_feature (29)..(164): Homolog of NCBI NO: 18698662 NR Description: disease-resistent-related protein [Oryza sativa]
  misc_feature (29)..(164): Homolog of NCBI NO: 15236103 NR Description: histone H3.3
MFFLLLSPRSDFTTIEFRVLSHSSLKIKMARTKQTARKSTGGKAPRKQLATKAARKSAPTTGGVKKPHRYRPGTVALREIRKYQKSTELLIRKLPFQRLVREIAQDFKTDLRFQSHAVLALQEAAEAYLVGLFEDTNLCAIHAKRVTIMPKDIQLARRIRGERA

SEQ ID NO: 28281 - protein, 136 aa, Arabidopsis thaliana; identical to SEQ ID NO: 26403
  peptide (1)..(136): Ceres Seq. ID no. 12577605
  misc_feature (17)..(135): Pfam Name: Core histone H2A/H2B/H3/H4 Pfam Description: Core histone H2A/H2B/H3/H4
  misc_feature (1)..(136): Homolog of NCBI NO: 37546835 NR Description: similar to histone protein Hist2h3c1 [Homo
  misc_feature (1)..(136): Homolog of NCBI NO: 34858260 NR Description: similar to histone protein Hist2h3c1 [Rattus
  misc_feature (1)..(136): Homolog of NCBI NO: 34858254 NR Description: similar to histone protein Hist2h3c1 [Rattus
  misc_feature (1)..(136): Homolog of NCBI NO: 30061401 NR Description: histone 2, H3ca1 [Mus musculus]
  misc_feature (1)..(136): Homolog of NCBI NO: 7305139 NR Description: histone 1, H3f; histone gene complex 1 [Mus
  misc_feature (1)..(136): Homolog of NCBI NO: 34876396 NR Description: similar to H3 histone family, member I [Rattus
  misc_feature (1)..(136): Homolog of NCBI NO: 2119013 NR Description: histone H3.2 protein - shrew mouse
  misc_feature (1)..(136): Homolog of NCBI NO: 34876364 NR Description: similar to CG31613-PA [Rattus norvegicus]
  misc_feature (1)..(136): Homolog of NCBI NO: 18698662 NR Description: disease-resistent-related protein [Oryza sativa]
  misc_feature (1)..(136): Homolog of NCBI NO: 15236103 NR Description: histone H3.3

SEQ ID NO: 28282 - DNA, 641 bp, Arabidopsis thaliana
  misc_feature (1)..(641): Ceres Seq. ID no. 12332727
  misc_feature: MA Experiment ID: 108434 Result: Up-regulated in Transcription
  misc_feature: MA Experiment 108434 PARAMETER Experiment Name: At_Root_Tips_cDNA_P Parameter: Tissue Value: Root Tips
  misc_feature: MA Experiment ID: 108462 Result: Down-regulated in Transcription
  misc_feature: MA Experiment 108462 PARAMETER Experiment Name: At_Germinating_Seeds_cDNA_P Parameter: Age (day) Value: 2 vs. 0
  misc_feature: MA Experiment 108462 PARAMETER Experiment Name: At_Germinating_Seeds_cDNA_P Parameter: Tissue Value: Germinating Seeds
  misc_feature: MA Experiment ID: 108463 Result: Down-regulated in Transcription
  misc_feature: MA Experiment 108463 PARAMETER Experiment Name: At_Germinating_Seeds_cDNA_P Parameter: Age (day) Value: 3 vs. 0
  misc_feature: MA Experiment 108463 PARAMETER Experiment Name: At_Germinating_Seeds_cDNA_P Parameter: Tissue Value: Germinating Seeds
  misc_feature: MA Experiment ID: 108464 Result: Down-regulated in Transcription
  misc_feature: MA Experiment 108464 PARAMETER Experiment Name: At_Germinating_Seeds_cDNA_P Parameter: Age (day) Value: 4 vs. 0
  misc_feature: MA Experiment 108464 PARAMETER Experiment Name: At_Germinating_Seeds_cDNA_P Parameter: Tissue Value: Germinating Seeds
  misc_feature: MA Experiment ID: 20000111 Result: Down-regulated in Transcription
  misc_feature: MA Experiment 20000111 PARAMETER Experiment Name: At_42deg_Heat_cDNA_P Parameter: Temperature (deg C) Value: 42 vs. 22
  misc_feature: MA Experiment 20000111 PARAMETER Experiment Name: At_42deg_Heat_cDNA_P Parameter: Timepoint (hr) Value: 6
  misc_feature: MA Experiment 20000111 PARAMETER Experiment Name: At_42deg_Heat_cDNA_P Parameter: Tissue Value: Aerial
  misc_feature: MA Experiment ID: 20000173 Result: Down-regulated in Transcription
  misc_feature: MA Experiment 20000173 PARAMETER Experiment Name: At_42deg_Heat_P Parameter: Age (day) Value: 14
  misc_feature: MA Experiment 20000173 PARAMETER Experiment Name: At_42deg_Heat_P Parameter: Organism Value: A. thaliana
  misc_feature: MA Experiment 20000173 PARAMETER Experiment Name: At_42deg_Heat_P Parameter: Plant Line Value: WS
  misc_feature: MA Experiment 20000173 PARAMETER Experiment Name: At_42deg_Heat_P Parameter: Temperature (deg C) Value: 42 vs. 22
  misc_feature: MA Experiment 20000173 PARAMETER Experiment Name: At_42deg_Heat_P Parameter: Timepoint (hr) Value: 6
  misc_feature: MA Experiment 20000173 PARAMETER Experiment Name: At_42deg_Heat_P Parameter: Tissue Value: Aerial
  misc_feature: MA Experiment ID: 20000184 Result: Down-regulated in Transcription
  misc_feature: MA Experiment 20000184 PARAMETER Experiment Name: At_Shoots__P Parameter: Age (day) Value: 7
  misc_feature: MA Experiment 20000184 PARAMETER Experiment Name: At_Shoots__P Parameter: Tissue Value: Shoots vs. Whole Plant
  misc_feature: MA Experiment ID: 20000227 Result: Up-regulated in Transcription
  misc_feature: MA Experiment 20000227 PARAMETER Experiment Name: At_Root-Tips-vs-Tops_P Parameter: Tissue Value: Root Tips vs. Root Tops
  misc_feature: MA Experiment ID: 20000234 Result: Up-regulated in Transcription
  misc_feature: MA Experiment 20000234 PARAMETER Experiment Name: At_Siliques_P Parameter: Age (day) Value: 21
  misc_feature: MA Experiment 20000234 PARAMETER Experiment Name: At_Siliques_P Parameter: Organism Value: A. thaliana
  misc_feature: MA Experiment 20000234 PARAMETER Experiment Name: At_Siliques_P Parameter: Plant Line Value: WS
  misc_feature: MA Experiment 20000234 PARAMETER Experiment Name: At_Siliques_P Parameter: Tissue Value: Less Than 5mm Siliques vs. Whole Plant
  misc_feature: MA Experiment ID: 20001560 Result: Up-regulated in Transcription
  misc_feature: MA Experiment 20001560 PARAMETER Experiment Name: At_Drought_Soil_Dry_P Parameter: Age (day) Value: 28
  misc_feature: MA Experiment 20001560 PARAMETER Experiment Name: At_Drought_Soil_Dry_P Parameter: Organism Value: A. thaliana
  misc_feature: MA Experiment 20001560 PARAMETER Experiment Name: At_Drought_Soil_Dry_P Parameter: Plant Line Value: WS
  misc_feature: MA Experiment 20001560 PARAMETER Experiment Name: At_Drought_Soil_Dry_P Parameter: Post Timepoint (hr) Value: None
  misc_feature: MA Experiment 20001560 PARAMETER Experiment Name: At_Drought_Soil_Dry_P Parameter: Post-Treatment Value: None
  misc_feature: MA Experiment 20001560 PARAMETER Experiment Name: At_Drought_Soil_Dry_P Parameter: Timepoint (day) Value: 14
  misc_feature: MA Experiment 20001560 PARAMETER Experiment Name: At_Drought_Soil_Dry_P Parameter: Treatment Value: Drought vs. No Drought
aaaaaccctaaatcttgttcgatcagagcattcgccattattaacccgagtttgaaatcgttgaagatttgaagacacagaatgggcaaaccaagcaaaggatcggaagtgacaacgaagtctgataagaagtttgagaagaagcttcaattttacacaaaggtcaaagatacagttacttctttgtctgtccaaaaggagattggcaagaagaagaaaatccgcagccgacaaaagaagctaaaggcgtatgatctcaccaacctgtcggagtttcttcccgagttcaatgctctgcagaaatcagctcttcctgcacccgagctgaaaatgaactgtaaaaggcgacaaaagctcgtattgacagaaggggagagattgaataaggttctagaccatccagcttttcaagctgatccagttggttcgatatttcagcacttgctgagtcaacagccaccggtggaagagaaaccgaagaagaagactaacactaatggaagcaagaaaaggaataagaaaaaaggaaagactgattccatggatttctgatcttgtcctataagtttacttatgttttgtttttgttgttttgttatagtaacatgattttggaaatgaagaatcttcaaatttgattg

SEQ ID NO: 28283 - protein, 156 aa, Arabidopsis thaliana
  peptide (1)..(156): Ceres Seq. ID no. 12332728
  misc_feature (1)..(156): Homolog of NCBI NO: 18379269 NR Description: expressed protein
MGKPSKGSEVTTKSDKKFEKKLQFYTKVKDTVTSLSVQKEIGKKKKIRSRQKKLKAYDLTNLSEFLPEFNALQKSALPAPELKMNCKRRQKLVLTEGERLNKVLDHPAFQADPVGSIFQHLLSQQPPVEEKPKKKTNTNGSKKRNKKKGKTDSMDF

SEQ ID NO: 28284 - DNA, 1130 bp, Arabidopsis thaliana
  misc_feature (1)..(1130): Ceres Seq. ID no. 13491560
  misc_feature: MA Experiment ID: 20000171 Result: Down-regulated in Transcription
  misc_feature: MA Experiment 20000171 PARAMETER Experiment Name: At_42deg_Heat_P Parameter: Age (day) Value: 14
  misc_feature: MA Experiment 20000171 PARAMETER Experiment Name: At_42deg_Heat_P Parameter: Organism Value: A. thaliana
  misc_feature: MA Experiment 20000171 PARAMETER Experiment Name: At_42deg_Heat_P Parameter: Plant Line Value: WS
  misc_feature: MA Experiment 20000171 PARAMETER Experiment Name: At_42deg_Heat_P Parameter: Temperature (deg C) Value: 42 vs. 22
  misc_feature: MA Experiment 20000171 PARAMETER Experiment Name: At_42deg_Heat_P Parameter: Timepoint (hr) Value: 1
  misc_feature: MA Experiment 20000171 PARAMETER Experiment Name: At_42deg_Heat_P Parameter: Tissue Value: Aerial
  misc_feature: MA Experiment ID: 20000173 Result: Down-regulated in Transcription
  misc_feature: MA Experiment 20000173 PARAMETER Experiment Name: At_42deg_Heat_P Parameter: Age (day) Value: 14
  misc_feature: MA Experiment 20000173 PARAMETER Experiment Name: At_42deg_Heat_P Parameter: Organism Value: A. thaliana
  misc_feature: MA Experiment 20000173 PARAMETER Experiment Name: At_42deg_Heat_P Parameter: Plant Line Value: WS
  misc_feature: MA Experiment 20000173 PARAMETER Experiment Name: At_42deg_Heat_P Parameter: Temperature (deg C) Value: 42 vs. 22
  misc_feature: MA Experiment 20000173 PARAMETER Experiment Name: At_42deg_Heat_P Parameter: Timepoint (hr) Value: 6
  misc_feature: MA Experiment 20000173 PARAMETER Experiment Name: At_42deg_Heat_P Parameter: Tissue Value: Aerial
  misc_feature: MA Experiment ID: 20000184 Result: Up-regulated in Transcription
  misc_feature: MA Experiment 20000184 PARAMETER Experiment Name: At_Shoots__P Parameter: Age (day) Value: 7
  misc_feature: MA Experiment 20000184 PARAMETER Experiment Name: At_Shoots__P Parameter: Tissue Value: Shoots vs. Whole Plant
  misc_feature: MA Experiment ID: 20000185 Result: Up-regulated in Transcription
  misc_feature: MA Experiment 20000185 PARAMETER Experiment Name: At_Roots__P Parameter: Age (day) Value: 7 vs. 21
  misc_feature: MA Experiment 20000185 PARAMETER Experiment Name: At_Roots__P Parameter: Organism Value: A. thaliana
  misc_feature: MA Experiment 20000185 PARAMETER Experiment Name: At_Roots__P Parameter: Tissue Value: Roots vs. Whole Plant
  misc_feature: MA Experiment ID: 20000227 Result: Down-regulated in Transcription
  misc_feature: MA Experiment 20000227 PARAMETER Experiment Name: At_Root-Tips-vs-Tops_P Parameter: Tissue Value: Root Tips vs. Root Tops
  misc_feature: MA Experiment ID: 20000234 Result: Up-regulated in Transcription
  misc_feature: MA Experiment 20000234 PARAMETER Experiment Name: At_Siliques_P Parameter: Age (day) Value: 21
  misc_feature: MA Experiment 20000234 PARAMETER Experiment Name: At_Siliques_P Parameter: Organism Value: A. thaliana
  misc_feature: MA Experiment 20000234 PARAMETER Experiment Name: At_Siliques_P Parameter: Plant Line Value: WS
  misc_feature: MA Experiment 20000234 PARAMETER Experiment Name: At_Siliques_P Parameter: Tissue Value: Less Than 5mm Siliques vs. Whole Plant
  misc_feature: MA Experiment ID: 20000265 Result: Up-regulated in Transcription
  misc_feature: MA Experiment 20000265 PARAMETER Experiment Name: At_Open_Flower_P Parameter: Age (day) Value: 21
  misc_feature: MA Experiment 20000265 PARAMETER Experiment Name: At_Open_Flower_P Parameter: Plant Line Value: WS
  misc_feature: MA Experiment 20000265 PARAMETER Experiment Name: At_Open_Flower_P Parameter: Tissue Value: Closed Flower vs. Whole Plant
  misc_feature: MA Experiment ID: 20000286 Result: Up-regulated in Transcription
  misc_feature: MA Experiment 20000286 PARAMETER Experiment Name: At_Open_Flower_P Parameter: Age (day) Value: 21
  misc_feature: MA Experiment 20000286 PARAMETER Experiment Name: At_Open_Flower_P Parameter: Plant Line Value: WS
  misc_feature: MA Experiment 20000286 PARAMETER Experiment Name: At_Open_Flower_P Parameter: Tissue Value: Half Open vs. Whole Plant
  misc_feature: MA Experiment ID: 20000439 Result: Up-regulated in Transcription
  misc_feature: MA Experiment 20000439 PARAMETER Experiment Name: At_Roots__P Parameter: Age (day) Value: 14 vs. 21
  misc_feature: MA Experiment 20000439 PARAMETER Experiment Name: At_Roots__P Parameter: Organism Value: A. thaliana
  misc_feature: MA Experiment 20000439 PARAMETER Experiment Name: At_Roots__P Parameter: Tissue Value: Roots vs. Whole Plant
  misc_feature: MA Experiment ID: 20000794 Result: Down-regulated in Transcription
  misc_feature: MA Experiment 20000794 PARAMETER Experiment Name: At_Petals_P Parameter: Age (day) Value: 23-25 days
  misc_feature: MA Experiment 20000794 PARAMETER Experiment Name: At_Petals_P Parameter: Plant Line Value: WS
  misc_feature: MA Experiment 20000794 PARAMETER Experiment Name: At_Petals_P Parameter: Tissue Value: Petals vs. Whole plant
  misc_feature: MA Experiment ID: 20001557 Result: Up-regulated in Transcription
  misc_feature: MA Experiment 20001557 PARAMETER Experiment Name: At_Drought_Soil_Dry_P Parameter: Age (day) Value: 27
  misc_feature: MA Experiment 20001557 PARAMETER Experiment Name: At_Drought_Soil_Dry_P Parameter: Organism Value: A. thaliana
  misc_feature: MA Experiment 20001557 PARAMETER Experiment Name: At_Drought_Soil_Dry_P Parameter: Plant Line Value: WS
  misc_feature: MA Experiment 20001557 PARAMETER Experiment Name: At_Drought_Soil_Dry_P Parameter: Post Timepoint (hr) Value: 3
  misc_feature: MA Experiment 20001557 PARAMETER Experiment Name: At_Drought_Soil_Dry_P Parameter: Post-Treatment Value: Re-Water vs. No Drought
  misc_feature: MA Experiment 20001557 PARAMETER Experiment Name: At_Drought_Soil_Dry_P Parameter: Timepoint (day) Value: 13
  misc_feature: MA Experiment 20001557 PARAMETER Experiment Name: At_Drought_Soil_Dry_P Parameter: Treatment Value: Drought vs. No Drought
  misc_feature: MA Experiment ID: 20001558 Result: Up-regulated in Transcription
  misc_feature: MA Experiment 20001558 PARAMETER Experiment Name: At_Drought_Soil_Dry_P Parameter: Age (day) Value: 27
  misc_feature: MA Experiment 20001558 PARAMETER Experiment Name: At_Drought_Soil_Dry_P Parameter: Organism Value: A. thaliana
  misc_feature: MA Experiment 20001558 PARAMETER Experiment Name: At_Drought_Soil_Dry_P Parameter: Plant Line Value: WS
  misc_feature: MA Experiment 20001558 PARAMETER Experiment Name: At_Drought_Soil_Dry_P Parameter: Post Timepoint (hr) Value: 6
  misc_feature: MA Experiment 20001558 PARAMETER Experiment Name: At_Drought_Soil_Dry_P Parameter: Post-Treatment Value: Re-Water vs. No Drought
  misc_feature: MA Experiment 20001558 PARAMETER Experiment Name: At_Drought_Soil_Dry_P Parameter: Timepoint (day) Value: 13
  misc_feature: MA Experiment 20001558 PARAMETER Experiment Name: At_Drought_Soil_Dry_P Parameter: Treatment Value: Drought vs. No Drought
  misc_feature: MA Experiment ID: 20001560 Result: Up-regulated in Transcription
  misc_feature: MA Experiment 20001560 PARAMETER Experiment Name: At_Drought_Soil_Dry_P Parameter: Age (day) Value: 28
  misc_feature: MA Experiment 20001560 PARAMETER Experiment Name: At_Drought_Soil_Dry_P Parameter: Organism Value: A. thaliana
  misc_feature: MA Experiment 20001560 PARAMETER Experiment Name: At_Drought_Soil_Dry_P Parameter: Plant Line Value: WS
  misc_feature: MA Experiment 20001560 PARAMETER Experiment Name: At_Drought_Soil_Dry_P Parameter: Post Timepoint (hr) Value: None
  misc_feature: MA Experiment 20001560 PARAMETER Experiment Name: At_Drought_Soil_Dry_P Parameter: Post-Treatment Value: None
  misc_feature: MA Experiment 20001560 PARAMETER Experiment Name: At_Drought_Soil_Dry_P Parameter: Timepoint (day) Value: 14
  misc_feature: MA Experiment 20001560 PARAMETER Experiment Name: At_Drought_Soil_Dry_P Parameter: Treatment Value: Drought vs. No Drought
  misc_feature: MA Experiment ID: 20001904 Result: Up-regulated in Transcription
  misc_feature: MA Experiment 20001904 PARAMETER Experiment Name: At_Drought_Reproduction_P Parameter: Age (day) Value: 37
  misc_feature: MA Experiment 20001904 PARAMETER Experiment Name: At_Drought_Reproduction_P Parameter: Organism Value: A. thaliana
  misc_feature: MA Experiment 20001904 PARAMETER Experiment Name: At_Drought_Reproduction_P Parameter: Plant Line Value: WS
  misc_feature: MA Experiment 20001904 PARAMETER Experiment Name: At_Drought_Reproduction_P Parameter: Timepoint (day) Value: 7
  misc_feature: MA Experiment 20001904 PARAMETER Experiment Name: At_Drought_Reproduction_P Parameter: Tissue Value: Rosettes
  misc_feature: MA Experiment 20001904 PARAMETER Experiment Name: At_Drought_Reproduction_P Parameter: Treatment Value: Drought vs. No Drought
  misc_feature: MA Experiment ID: 20001911 Result: Down-regulated in Transcription
  misc_feature: MA Experiment 20001911 PARAMETER Experiment Name: At_Drought_Reproduction_P Parameter: Age (day) Value: 40
  misc_feature: MA Experiment 20001911 PARAMETER Experiment Name: At_Drought_Reproduction_P Parameter: Organism Value: A. thaliana
  misc_feature: MA Experiment 20001911 PARAMETER Experiment Name: At_Drought_Reproduction_P Parameter: Plant Line Value: WS
  misc_feature: MA Experiment 20001911 PARAMETER Experiment Name: At_Drought_Reproduction_P Parameter: Timepoint (day) Value: 10
  misc_feature: MA Experiment 20001911 PARAMETER Experiment Name: At_Drought_Reproduction_P Parameter: Tissue Value: Flowers
  misc_feature: MA Experiment 20001911 PARAMETER Experiment Name: At_Drought_Reproduction_P Parameter: Treatment Value: Drought vs. No Drought
actgtactcttccaccaaatccattaatcatcatcttttcttcacagagaggaaaaaaaaaaaatggcgacagattctcaaccaaaccaaaagctaacgcttccgttaaaaacaagaatcgctctcaccgttatctccaccatgaccgataacgctcaacgtcctgacggaactatcaaccgccgtttcctccgcctcttcgatttccgtgctcctcccaatcctaaacccgtcaacatcgtctccacctccgatttcgtcgtggatcaatcccgtgatctctggttccgattgtacactccacatgtctccggcgataaaatccccgtcgttgttttcttccacggcggtggtttcgctttccttagtcctaatgcgtatccttacgataatgtatgccggagattcgctaggaaattacctgcttatgtcatctccgttaactaccgtctcgctccggagcatcgttatcctgctcaatacgacgacggtttcgatgctttgaagtacatcgaggagaatcacggttcgattcttccggcgaacgctgatctctcgagatgcttcttcgccggagacagtgcaggtggaaacatcgcgcacaacgtcgcgattcgaatttgtcgcgagccgcggtcatctttcaccgccgtgaaactcatcggacttatctcgattcaacctttcttcggcggagaagagagaacggaagcggagaaacaactcgtcggagctcctttggtttcaccggaccgaacagattggtgctggaaagcgatgggattaaaccgggatcatgaagcggttaacgtaggcggaccaaacgcggttgatatatcgggtctggattatccggagacgatggtggtagtagctgggtttgatccgttaaaagattggcagagaagttactacgagtggttaaagttatgcggtaaaaaagcaacgttaatcgaatattcaaacatgtttcatgcgttttacattttccctgaattgcctgaggcgggtcagttaattatgcggattaaggattttgttgatgagcgcgtggcttcactctccgcttaatcaccttcgctaatgatggatttttaaattagctcaatgaataataatgtattaagctt

SEQ ID NO: 28285 - protein, 335 aa, Arabidopsis thaliana
  peptide (1)..(335): Ceres Seq. ID no. 13491561
  misc_feature (78)..(109): Pfam Name: Carboxylesterase Pfam Description: Carboxylesterase
  misc_feature (10)..(327): Homolog of NCBI NO: 15229905 NR Description: expressed protein [Arabidopsis thaliana]
  misc_feature (10)..(327): Homolog of NCBI NO: 15240483 NR Description: expressed protein [Arabidopsis thaliana]
  misc_feature (33)..(328): Homolog of NCBI NO: 34904758 NR Description: hypothetical protein~predicted by GeneMark.hmm
  misc_feature (9)..(332): Homolog of NCBI NO: 34904772 NR Description: similar to carboxylesterase
  misc_feature (1)..(335): Homolog of NCBI NO: 34904760 NR Description: similar to carboxylesterase
  misc_feature (3)..(335): Homolog of NCBI NO: 34904774 NR Description: similar to carboxylesterase
  misc_feature (3)..(335): Homolog of NCBI NO: 34393714 NR Description: putative esterase [Oryza sativa (japonica
  misc_feature (1)..(327): Homolog of NCBI NO: 34904770 NR Description: similar to carboxylesterase
  misc_feature (1)..(335): Homolog of NCBI NO: 15237783 NR Description: expressed protein [Arabidopsis thaliana]
  misc_feature (1)..(335): Homolog of NCBI NO: 21618039 NR Description: unknown [Arabidopsis thaliana]
MATDSQPNQKLTLPLKTRIALTVISTMTDNAQRPDGTINRRFLRLFDFRAPPNPKPVNIVSTSDFVVDQSRDLWFRLYTPHVSGDKIPVVVFFHGGGFAFLSPNAYPYDNVCRRFARKLPAYVISVNYRLAPEHRYPAQYDDGFDALKYIEENHGSILPANADLSRCFFAGDSAGGNIAHNVAIRICREPRSSFTAVKLIGLISIQPFFGGEERTEAEKQLVGAPLVSPDRTDWCWKAMGLNRDHEAVNVGGPNAVDISGLDYPETMVVVAGFDPLKDWQRSYYEWLKLCGKKATLIEYSNMFHAFYIFPELPEAGQLIMRIKDFVDERVASLSA

SEQ ID NO: 28286 - protein, 309 aa, Arabidopsis thaliana
  peptide (1)..(309): Ceres Seq. ID no. 13491562
  misc_feature (52)..(83): Pfam Name: Carboxylesterase Pfam Description: Carboxylesterase
  misc_feature (1)..(301): Homolog of NCBI NO: 15229905 NR Description: expressed protein [Arabidopsis thaliana]
  misc_feature (1)..(301): Homolog of NCBI NO: 15240483 NR Description: expressed protein [Arabidopsis thaliana]
  misc_feature (7)..(302): Homolog of NCBI NO: 34904758 NR Description: hypothetical protein~predicted by GeneMark.hmm
  misc_feature (1)..(306): Homolog of NCBI NO: 34904772 NR Description: similar to carboxylesterase
  misc_feature (1)..(309): Homolog of NCBI NO: 34904760 NR Description: similar to carboxylesterase
  misc_feature (1)..(309): Homolog of NCBI NO: 34904774 NR Description: similar to carboxylesterase
  misc_feature (1)..(309): Homolog of NCBI NO: 34393714 NR Description: putative esterase [Oryza sativa (japonica
  misc_feature (1)..(301): Homolog of NCBI NO: 34904770 NR Description: similar to carboxylesterase
  misc_feature (1)..(309): Homolog of NCBI NO: 15237783 NR Description: expressed protein [Arabidopsis thaliana]
  misc_feature (1)..(309): Homolog of NCBI NO: 21618039 NR Description: unknown [Arabidopsis thaliana]
MTDNAQRPDGTINRRFLRLFDFRAPPNPKPVNIVSTSDFVVDQSRDLWFRLYTPHVSGDKIPVVVFFHGGGFAFLSPNAYPYDNVCRRFARKLPAYVISVNYRLAPEHRYPAQYDDGFDALKYIEENHGSILPANADLSRCFFAGDSAGGNIAHNVAIRICREPRSSFTAVKLIGLISIQPFFGGEERTEAEKQLVGAPLVSPDRTDWCWKAMGLNRDHEAVNVGGPNAVDISGLDYPETMVVVAGFDPLKDWQRSYYEWLKLCGKKATLIEYSNMFHAFYIFPELPEAGQLIMRIKDFVDERVASLSA

SEQ ID NO: 28287 - DNA, 972 bp, Arabidopsis thaliana
  misc_feature (1)..(972): Ceres Seq. ID no. 13487354
  misc_feature: MA Experiment ID: 108434 Result: Down-regulated in Transcription
  misc_feature: MA Experiment 108434 PARAMETER Experiment Name: At_Root_Tips_cDNA_P Parameter: Tissue Value: Root Tips
  misc_feature: MA Experiment ID: 108594 Result: Down-regulated in Transcription
  misc_feature: MA Experiment 108594 PARAMETER Experiment Name: At_Ler-rhl_Root_cDNA_P Parameter: Plant Line Value: null
  misc_feature: MA Experiment ID: 108605 Result: Up-regulated in Transcription
  misc_feature: MA Experiment 108605 PARAMETER Experiment Name: At_100uM_ABA_cDNA_P Parameter: Timepoint (hr) Value: 6
  misc_feature: MA Experiment 108605 PARAMETER Experiment Name: At_100uM_ABA_cDNA_P Parameter: Tissue Value: Aerial
  misc_feature: MA Experiment 108605 PARAMETER Experiment Name: At_100uM_ABA_cDNA_P Parameter: Treatment Value: 100uM ABA vs. No Treatment
  misc_feature: MA Experiment ID: 20000111 Result: Down-regulated in Transcription
  misc_feature: MA Experiment 20000111 PARAMETER Experiment Name: At_42deg_Heat_cDNA_P Parameter: Temperature (deg C) Value: 42 vs. 22
  misc_feature: MA Experiment 20000111 PARAMETER Experiment Name: At_42deg_Heat_cDNA_P Parameter: Timepoint (hr) Value: 6
  misc_feature: MA Experiment 20000111 PARAMETER Experiment Name: At_42deg_Heat_cDNA_P Parameter: Tissue Value: Aerial
  misc_feature: MA Experiment ID: 20000184 Result: Down-regulated in Transcription
  misc_feature: MA Experiment 20000184 PARAMETER Experiment Name: At_Shoots__P Parameter: Age (day) Value: 7
  misc_feature: MA Experiment 20000184 PARAMETER Experiment Name: At_Shoots__P Parameter: Tissue Value: Shoots vs. Whole Plant
  misc_feature: MA Experiment ID: 20000227 Result: Down-regulated in Transcription
  misc_feature: MA Experiment 20000227 PARAMETER Experiment Name: At_Root-Tips-vs-Tops_P Parameter: Tissue Value: Root Tips vs. Root Tops
  misc_feature: MA Experiment ID: 20000234 Result: Down-regulated in Transcription
  misc_feature: MA Experiment 20000234 PARAMETER Experiment Name: At_Siliques_P Parameter: Age (day) Value: 21
  misc_feature: MA Experiment 20000234 PARAMETER Experiment Name: At_Siliques_P Parameter: Organism Value: A. thaliana
  misc_feature: MA Experiment 20000234 PARAMETER Experiment Name: At_Siliques_P Parameter: Plant Line Value: WS
  misc_feature: MA Experiment 20000234 PARAMETER Experiment Name: At_Siliques_P Parameter: Tissue Value: Less Than 5mm Siliques vs. Whole Plant
  misc_feature: MA Experiment ID: 20000265 Result: Down-regulated in Transcription
  misc_feature: MA Experiment 20000265 PARAMETER Experiment Name: At_Open_Flower_P Parameter: Age (day) Value: 21
  misc_feature: MA Experiment 20000265 PARAMETER Experiment Name: At_Open_Flower_P Parameter: Plant Line Value: WS
  misc_feature: MA Experiment 20000265 PARAMETER Experiment Name: At_Open_Flower_P Parameter: Tissue Value: Closed Flower vs. Whole Plant
  misc_feature: MA Experiment ID: 20000451 Result: Down-regulated in Transcription
  misc_feature: MA Experiment 20000451 PARAMETER Experiment Name: At_CS6879_Shoots-Roots_P Parameter: Age (day) Value: 14
  misc_feature: MA Experiment 20000451 PARAMETER Experiment Name: At_CS6879_Shoots-Roots_P Parameter: Organism Value: A. thaliana
  misc_feature: MA Experiment 20000451 PARAMETER Experiment Name: At_CS6879_Shoots-Roots_P Parameter: Plant Line Value: CS6879 vs. WS
  misc_feature: MA Experiment 20000451 PARAMETER Experiment Name: At_CS6879_Shoots-Roots_P Parameter: Tissue Value: Roots
acatcatcaacttcatcaattcatcacctttgtctctctttcaagcttctctgtgtgtgatctccgttggtcaacaacaactacaacagcttattgagcagagatggatcatcaatttggatatggtgttgaagttactgggttatctccatctgttactcataatgatcttatcgatttcttctctttctctggtactatccaagatattgatattgtcaggtcgggtgagcaagcttgtactgcttatgtgatgtttaaggattcttattctcaagaaactgctgttttactcactggcgcaacgatattggatcagcgtgtttgtataactcgttggggacaacatcacgaagagttcgatttctggaatgcgacttcgcgaggttttgaagatgaatcggactcacaacattatgctcaacgaagcgagttcaacgctggagaagcagtgacaaaagctcaagaagtggtgaaaataatgcttgccacaggattcgtgctaggcaaagacgctttaagcaaagctaaagcctttgatgaatcccacggcgtatcagctgcagcggtggctagagtatctcaactagaacagaggattggtcttactgacaaaatctttaccggacttgaagctgttagaatgactgaccaaaggtatcatgtttcagatacagctaaatcagctgtctttgccacaggaagaaccgcggcagcagctgcaactagtgttgtcaatagcagttacttctccagcggagctctttggctgtctggtgcattagagagagctgctaaagccgcatctgatctcggtacccgcggctcaaggcagtgaatagaccaatggcccgattcagaaccgtattcgtctgtgaatatatatgatgcaaagctgatcatgaataactggctcatgaagtgtgataagaccaaattttatcaaaacgaataccatatagaaatctatct

SEQ ID NO: 28288 - protein, 244 aa, Arabidopsis thaliana
  peptide (1)..(244): Ceres Seq. ID no. 13487355
  misc_feature (9)..(77): Pfam Name: RNA recognition motif. (a.k.a. RRM, RBD, or RNP domain) Pfam Description: RNA recognition motif. (a.k.a. RRM, RBD, or RNP
  misc_feature (9)..(240): Homolog of NCBI NO: 18421342 NR Description: RNA recognition motif (RRM)-containing protein
  misc_feature (9)..(244): Homolog of NCBI NO: 38347069 NR Description: OSJNBa0006A01.10 [Oryza sativa (japonica
  misc_feature (9)..(244): Homolog of NCBI NO: 30695063 NR Description: RNA recognition motif (RRM)-containing protein
  misc_feature (9)..(244): Homolog of NCBI NO: 8809670 NR Description: gene_id:MSD23.5~pir||C71447~similar to unknown
  misc_feature (9)..(244): Homolog of NCBI NO: 18414951 NR Description: RNA recognition motif (RRM)-containing protein
  misc_feature (6)..(242): Homolog of NCBI NO: 6714467 NR Description: unknown protein [Arabidopsis thaliana]
  misc_feature (6)..(241): Homolog of NCBI NO: 38344906 NR Description: OSJNBb0079B02.9 [Oryza sativa (japonica
  misc_feature (1)..(239): Homolog of NCBI NO: 25518024 NR Description: F14L17.11 protein - Arabidopsis thaliana
  misc_feature (1)..(244): Homolog of NCBI NO: 21618045 NR Description: unknown [Arabidopsis thaliana]
  misc_feature (1)..(244): Homolog of NCBI NO: 18394102 NR Description: RNA recognition motif (RRM)-containing protein
MDHQFGYGVEVTGLSPSVTHNDLIDFFSFSGTIQDIDIVRSGEQACTAYVMFKDSYSQETAVLLTGATILDQRVCITRWGQHHEEFDFWNATSRGFEDESDSQHYAQRSEFNAGEAVTKAQEVVKIMLATGFVLGKDALSKAKAFDESHGVSAAAVARVSQLEQRIGLTDKIFTGLEAVRMTDQRYHVSDTAKSAVFATGRTAAAAATSVVNSSYFSSGALWLSGALERAAKAASDLGTRGSRQ

SEQ ID NO: 28289 - protein, 194 aa, Arabidopsis thaliana
  peptide (1)..(194): Ceres Seq. ID no. 13487356
  misc_feature (1)..(190): Homolog of NCBI NO: 18421342 NR Description: RNA recognition motif (RRM)-containing protein
  misc_feature (1)..(194): Homolog of NCBI NO: 38347069 NR Description: OSJNBa0006A01.10 [Oryza sativa (japonica
  misc_feature (1)..(194): Homolog of NCBI NO: 30695063 NR Description: RNA recognition motif (RRM)-containing protein
  misc_feature (1)..(194): Homolog of NCBI NO: 8809670 NR Description: gene_id:MSD23.5~pir||C71447~similar to unknown
  misc_feature (1)..(194): Homolog of NCBI NO: 18414951 NR Description: RNA recognition motif (RRM)-containing protein
  misc_feature (1)..(192): Homolog of NCBI NO: 6714467 NR Description: unknown protein [Arabidopsis thaliana]
  misc_feature (1)..(191): Homolog of NCBI NO: 38344906 NR Description: OSJNBb0079B02.9 [Oryza sativa (japonica
  misc_feature (1)..(189): Homolog of NCBI NO: 25518024 NR Description: F14L17.11 protein - Arabidopsis thaliana
  misc_feature (1)..(194): Homolog of NCBI NO: 21618045 NR Description: unknown [Arabidopsis thaliana]
  misc_feature (1)..(194): Homolog of NCBI NO: 18394102 NR Description: RNA recognition motif (RRM)-containing protein
MFKDSYSQETAVLLTGATILDQRVCITRWGQHHEEFDFWNATSRGFEDESDSQHYAQRSEFNAGEAVTKAQEVVKIMLATGFVLGKDALSKAKAFDESHGVSAAAVARVSQLEQRIGLTDKIFTGLEAVRMTDQRYHVSDTAKSAVFATGRTAAAAATSVVNSSYFSSGALWLSGALERAAKAASDLGTRGSRQ

SEQ ID NO: 28290 - DNA, 1504 bp, Arabidopsis thaliana; identical to SEQ ID NO: 24511
  misc_feature (1)..(1504): Ceres Seq. ID no. 13647866
  misc_feature: MA Experiment ID: 108573 Result: Down-regulated in Transcription
  misc_feature: MA Experiment 108573 PARAMETER Experiment Name: At_Drought_cDNA_P Parameter: Timepoint (hr) Value: 6
  misc_feature: MA Experiment 108573 PARAMETER Experiment Name: At_Drought_cDNA_P Parameter: Tissue Value: Aerial
  misc_feature: MA Experiment 108573 PARAMETER Experiment Name: At_Drought_cDNA_P Parameter: Treatment Value: Drought vs. No Drought
  misc_feature: MA Experiment ID: 20000180 Result: Up-regulated in Transcription
  misc_feature: MA Experiment 20000180 PARAMETER Experiment Name: At_Germinating_Seeds_P Parameter: Age (hr) Value: 24 vs. 0
  misc_feature: MA Experiment 20000180 PARAMETER Experiment Name: At_Germinating_Seeds_P Parameter: Tissue Value: Germinating Seeds
  misc_feature: MA Experiment ID: 20000182 Result: Up-regulated in Transcription
  misc_feature: MA Experiment 20000182 PARAMETER Experiment Name: At_2mM_SA_P Parameter: Age (day) Value: 14
  misc_feature: MA Experiment 20000182 PARAMETER Experiment Name: At_2mM_SA_P Parameter: Organism Value: A. thaliana
  misc_feature: MA Experiment 20000182 PARAMETER Experiment Name: At_2mM_SA_P Parameter: Plant Line Value: WS
  misc_feature: MA Experiment 20000182 PARAMETER Experiment Name: At_2mM_SA_P Parameter: Timepoint (hr) Value: 6
  misc_feature: MA Experiment 20000182 PARAMETER Experiment Name: At_2mM_SA_P Parameter: Tissue Value: Aerial
  misc_feature: MA Experiment 20000182 PARAMETER Experiment Name: At_2mM_SA_P Parameter: Treatment Value: 2mM SA vs. No Treatment
  misc_feature: MA Experiment ID: 20000227 Result: Up-regulated in Transcription
  misc_feature: MA Experiment 20000227 PARAMETER Experiment Name: At_Root-Tips-vs-Tops_P Parameter: Tissue Value: Root Tips vs. Root Tops
  misc_feature: MA Experiment ID: 20000234 Result: Up-regulated in Transcription
  misc_feature: MA Experiment 20000234 PARAMETER Experiment Name: At_Siliques_P Parameter: Age (day) Value: 21
  misc_feature: MA Experiment 20000234 PARAMETER Experiment Name: At_Siliques_P Parameter: Organism Value: A. thaliana
  misc_feature: MA Experiment 20000234 PARAMETER Experiment Name: At_Siliques_P Parameter: Plant Line Value: WS
  misc_feature: MA Experiment 20000234 PARAMETER Experiment Name: At_Siliques_P Parameter: Tissue Value: Less Than 5mm Siliques vs. Whole Plant
  misc_feature: MA Experiment ID: 20000495 Result: Up-regulated in Transcription
  misc_feature: MA Experiment 20000495 PARAMETER Experiment Name: At_Guard_Cells_P Parameter: Harvest Date Value: 8/2/2002
  misc_feature: MA Experiment 20000495 PARAMETER Experiment Name: At_Guard_Cells_P Parameter: Organism Value: A. thaliana
  misc_feature: MA Experiment 20000495 PARAMETER Experiment Name: At_Guard_Cells_P Parameter: Tissue Value: Guard Cells vs. Leaves

SEQ ID NO: 28291 - protein, 361 aa, Arabidopsis thaliana; identical to SEQ ID NO: 24512
  peptide (1)..(361): Ceres Seq. ID no. 13647867
  misc_feature (17)..(358): Homolog of NCBI NO: 2501210 NR Description: PUTATIVE DISULFIDE ISOMERASE TIGA PRECURSOR
  misc_feature (10)..(358): Homolog of NCBI NO: 19114496 NR Description: putative protein disulfide isomerase (EC 5.3.4.1)
  misc_feature (165)..(361): Homolog of NCBI NO: 10180029 NR Description: putative protein disulfide-isomerase [Prunus
  misc_feature (13)..(357): Homolog of NCBI NO: 2627440 NR Description: protein disulfide isomerase; PDI; P5-like
  misc_feature (13)..(357): Homolog of NCBI NO: 28829383 NR Description: similar to Dictyostelium discoideum (Slime mold).
  misc_feature (14)..(357): Homolog of NCBI NO: 34897646 NR Description: putative disulfide-isomerase precursor [Oryza
  misc_feature (10)..(357): Homolog of NCBI NO: 34894982 NR Description: putative protein disulfide isomerase
  misc_feature (1)..(357): Homolog of NCBI NO: 7489183 NR Description: probable protein disulfide-isomerase (EC 5.3.4.1)
  misc_feature (1)..(357): Homolog of NCBI NO: 729442 NR Description: PROBABLE PROTEIN DISULFIDE ISOMERASE P5 PRECURSOR
  misc_feature (1)..(361): Homolog of NCBI NO: 15226610 NR Description: protein disulfide isomerase family [Arabidopsis
  misc_feature (17)..(358): Homolog of NCBI NO: 2501210 NR Description: PUTATIVE DISULFIDE ISOMERASE TIGA PRECURSOR
  misc_feature (10)..(358): Homolog of NCBI NO: 19114496 NR Description: putative protein disulfide isomerase (EC 5.3.4.1)
  misc_feature (165)..(361): Homolog of NCBI NO: 10180029 NR Description: putative protein disulfide-isomerase [Prunus
  misc_feature (13)..(357): Homolog of NCBI NO: 2627440 NR Description: protein disulfide isomerase; PDI; P5-like
  misc_feature (13)..(357): Homolog of NCBI NO: 28829383 NR Description: similar to Dictyostelium discoideum (Slime mold).
  misc_feature (14)..(357): Homolog of NCBI NO: 34897646 NR Description: putative disulfide-isomerase precursor [Oryza
  misc_feature (10)..(357): Homolog of NCBI NO: 34894982 NR Description: putative protein disulfide isomerase
  misc_feature (1)..(357): Homolog of NCBI NO: 7489183 NR Description: probable protein disulfide-isomerase (EC 5.3.4.1)
  misc_feature (1)..(357): Homolog of NCBI NO: 729442 NR Description: PROBABLE PROTEIN DISULFIDE ISOMERASE P5 PRECURSOR
  misc_feature (1)..(361): Homolog of NCBI NO: 15226610 NR Description: protein disulfide isomerase family [Arabidopsis

SEQ ID NO: 28292 - DNA, 970 bp, Arabidopsis thaliana
  misc_feature (1)..(970): Ceres Seq. ID no. 13592472
  misc_feature: MA Experiment ID: 108595 Result: Down-regulated in Transcription
  misc_feature: MA Experiment 108595 PARAMETER Experiment Name: At_Ler-pi_Ovule_cDNA_P Parameter: Plant Line Value: null
  misc_feature: MA Experiment ID: 20000071 Result: Down-regulated in Transcription
  misc_feature: MA Experiment 20000071 PARAMETER Experiment Name: At_100uM_ABA_Mutants_cDNA_P Parameter: Plant Line Value: CS8104
  misc_feature: MA Experiment 20000071 PARAMETER Experiment Name: At_100uM_ABA_Mutants_cDNA_P Parameter: Timepoint (hr) Value: 6
  misc_feature: MA Experiment 20000071 PARAMETER Experiment Name: At_100uM_ABA_Mutants_cDNA_P Parameter: Tissue Value: Aerial
  misc_feature: MA Experiment 20000071 PARAMETER Experiment Name: At_100uM_ABA_Mutants_cDNA_P Parameter: Treatment Value: 100uM ABA vs. No Treatment
  misc_feature: MA Experiment ID: 20000180 Result: Down-regulated in Transcription
  misc_feature: MA Experiment 20000180 PARAMETER Experiment Name: At_Germinating_Seeds_P Parameter: Age (hr) Value: 24 vs. 0
  misc_feature: MA Experiment 20000180 PARAMETER Experiment Name: At_Germinating_Seeds_P Parameter: Tissue Value: Germinating Seeds
  misc_feature: MA Experiment ID: 20000184 Result: Up-regulated in Transcription
  misc_feature: MA Experiment 20000184 PARAMETER Experiment Name: At_Shoots__P Parameter: Age (day) Value: 7
  misc_feature: MA Experiment 20000184 PARAMETER Experiment Name: At_Shoots__P Parameter: Tissue Value: Shoots vs. Whole Plant
  misc_feature: MA Experiment ID: 20000234 Result: Up-regulated in Transcription
  misc_feature: MA Experiment 20000234 PARAMETER Experiment Name: At_Siliques_P Parameter: Age (day) Value: 21
  misc_feature: MA Experiment 20000234 PARAMETER Experiment Name: At_Siliques_P Parameter: Organism Value: A. thaliana
  misc_feature: MA Experiment 20000234 PARAMETER Experiment Name: At_Siliques_P Parameter: Plant Line Value: WS
  misc_feature: MA Experiment 20000234 PARAMETER Experiment Name: At_Siliques_P Parameter: Tissue Value: Less Than 5mm Siliques vs. Whole Plant
  misc_feature: MA Experiment ID: 20001451 Result: Down-regulated in Transcription
  misc_feature: MA Experiment 20001451 PARAMETER Experiment Name: At_Far-red-induction_P Parameter: Age (day) Value: 7
  misc_feature: MA Experiment 20001451 PARAMETER Experiment Name: At_Far-red-induction_P Parameter: Light Value: Far-red vs. White
  misc_feature: MA Experiment 20001451 PARAMETER Experiment Name: At_Far-red-induction_P Parameter: Organism Value: A. thaliana
  misc_feature: MA Experiment 20001451 PARAMETER Experiment Name: At_Far-red-induction_P Parameter: Plant Line Value: Columbia
  misc_feature: MA Experiment 20001451 PARAMETER Experiment Name: At_Far-red-induction_P Parameter: Timepoint (hr) Value: 24
  misc_feature: MA Experiment 20001451 PARAMETER Experiment Name: At_Far-red-induction_P Parameter: Tissue Value: Whole Plant
  misc_feature: MA Experiment ID: 20001557 Result: Up-regulated in Transcription
  misc_feature: MA Experiment 20001557 PARAMETER Experiment Name: At_Drought_Soil_Dry_P Parameter: Age (day) Value: 27
  misc_feature: MA Experiment 20001557 PARAMETER Experiment Name: At_Drought_Soil_Dry_P Parameter: Organism Value: A. thaliana
  misc_feature: MA Experiment 20001557 PARAMETER Experiment Name: At_Drought_Soil_Dry_P Parameter: Plant Line Value: WS
  misc_feature: MA Experiment 20001557 PARAMETER Experiment Name: At_Drought_Soil_Dry_P Parameter: Post Timepoint (hr) Value: 3
  misc_feature: MA Experiment 20001557 PARAMETER Experiment Name: At_Drought_Soil_Dry_P Parameter: Post-Treatment Value: Re-Water vs. No Drought
  misc_feature: MA Experiment 20001557 PARAMETER Experiment Name: At_Drought_Soil_Dry_P Parameter: Timepoint (day) Value: 13
  misc_feature: MA Experiment 20001557 PARAMETER Experiment Name: At_Drought_Soil_Dry_P Parameter: Treatment Value: Drought vs. No Drought
  misc_feature: MA Experiment ID: 20001558 Result: Up-regulated in Transcription
  misc_feature: MA Experiment 20001558 PARAMETER Experiment Name: At_Drought_Soil_Dry_P Parameter: Age (day) Value: 27
  misc_feature: MA Experiment 20001558 PARAMETER Experiment Name: At_Drought_Soil_Dry_P Parameter: Organism Value: A. thaliana
  misc_feature: MA Experiment 20001558 PARAMETER Experiment Name: At_Drought_Soil_Dry_P Parameter: Plant Line Value: WS
  misc_feature: MA Experiment 20001558 PARAMETER Experiment Name: At_Drought_Soil_Dry_P Parameter: Post Timepoint (hr) Value: 6
  misc_feature: MA Experiment 20001558 PARAMETER Experiment Name: At_Drought_Soil_Dry_P Parameter: Post-Treatment Value: Re-Water vs. No Drought
  misc_feature: MA Experiment 20001558 PARAMETER Experiment Name: At_Drought_Soil_Dry_P Parameter: Timepoint (day) Value: 13
  misc_feature: MA Experiment 20001558 PARAMETER Experiment Name: At_Drought_Soil_Dry_P Parameter: Treatment Value: Drought vs. No Drought
  misc_feature: MA Experiment ID: 20001757 Result: Up-regulated in Transcription
  misc_feature: MA Experiment 20001757 PARAMETER Experiment Name: At_50mM_NH4NO3_L-to-H_P Parameter: Timepoint (hr) Value: 6
  misc_feature: MA Experiment 20001757 PARAMETER Experiment Name: At_50mM_NH4NO3_L-to-H_P Parameter: Tissue Value: Leaf
  misc_feature: MA Experiment 20001757 PARAMETER Experiment Name: At_50mM_NH4NO3_L-to-H_P Parameter: Treatment Value: 50mM NH4NO3 vs 100mM Mannitol
gacgccgctcatttttagggtttcagatataggcagattctcacatttgcaaacatgacgactcagatcagcaagaagagaaagtttgtagcggacggtgtgttctacgctgaattgaatgaggttcttacaagagagctagcagaggatggttactctggtgttgaggttagggttactcctatgaggactgagattatcatcagagctacacgtactcagaatgttctcggtgagaaggggaggagaattagggaattgacttcccttgttcagaagagattcaagtttccagttgacagtgttgagctttatgccgagaaggttaacaacagaggtctctgtgccatcgctcaggctgagtctttacgttacaagcttcttggtggtctcgctgttcgtagggcttgctatggtgtgttgaggtttgttatggagagtggagctaagggatgcgaggttatcgtgagtggaaagcttcgtgctgccagagccaagtctatgaagttcaaagatggctacatggtgtcatctggtcaaccaactaaggaatacatagactctgcagtgagacatgttttgcttagacaaggtgtgttgggaatcaaggtgaaggttatgcttgattgggaccctaagggcatatcaggaccaaagacaccattgcctgatgttgtgatcattcattctcctaaagaagaagaggccatctatgcacctgctcaggttgctgccccggctgctctcgtagcagatgcaccactcacagccgtagattaccctgcgatgatcccagtcgcctaaaagaatcctttgtactagtcgatgtgattttgttttcaactgttcttgctcttttgacagattatagcttctcgtatcttcgaatcagacacgtttcctctgttcttattcgaaaattatctcaagtttccattgttgaaaaagccctttttagtttcataaatcg

SEQ ID NO: 28293 - protein, 249 aa, Arabidopsis thaliana
  peptide (1)..(249): Ceres Seq. ID no. 13592473
  misc_feature (104)..(188): Pfam Name: Ribosomal protein S3, C-terminal domain Pfam Description: Ribosomal protein S3, C-terminal domain
  misc_feature (104)..(188): Pfam Name: Ribosomal protein S3, C-terminal domain Pfam Description: Ribosomal protein S3, C-terminal domain
  misc_feature (1)..(216): Homolog of NCBI NO: 27735393 NR Description: Similar to ribosomal protein S3 [Xenopus laevis]
  misc_feature (1)..(216): Homolog of NCBI NO: 6755372 NR Description: ribosomal protein S3 [Mus musculus]
  misc_feature (1)..(249): Homolog of NCBI NO: 133940 NR Description: 40S ribosomal protein S3A (S1A)
  misc_feature (1)..(216): Homolog of NCBI NO: 12847921 NR Description: unnamed protein product [Mus musculus]
  misc_feature (1)..(249): Homolog of NCBI NO: 38512247 NR Description: Ribosomal protein S3 [Silurana tropicalis]
  misc_feature (1)..(216): Homolog of NCBI NO: 27735393 NR Description: Similar to ribosomal protein S3 [Xenopus laevis]
  misc_feature (1)..(249): Homolog of NCBI NO: 133940 NR Description: 40S ribosomal protein S3A (S1A)
  misc_feature (1)..(249): Homolog of NCBI NO: 38512247 NR Description: Ribosomal protein S3 [Silurana tropicalis]
  misc_feature (1)..(249): Homolog of NCBI NO: 15232352 NR Description: 40S ribosomal protein S3 (RPS3B) [Arabidopsis
  misc_feature (1)..(247): Homolog of NCBI NO: 15225107 NR Description: 40S ribosomal protein S3 (RPS3A) [Arabidopsis
  misc_feature (1)..(249): Homolog of NCBI NO: 15238533 NR Description: 40S ribosomal protein S3 (RPS3C) [Arabidopsis
  misc_feature (3)..(230): Homolog of NCBI NO: 14192875 NR Description: Putative 40S ribosomal protein; contains
  misc_feature (1)..(225): Homolog of NCBI NO: 22204124 NR Description: putative 40S ribosomal protein S3 [Triticum
  misc_feature (1)..(216): Homolog of NCBI NO: 12847921 NR Description: unnamed protein product [Mus musculus]
  misc_feature (1)..(216): Homolog of NCBI NO: 6755372 NR Description: ribosomal protein S3 [Mus musculus]
  misc_feature (1)..(225): Homolog of NCBI NO: 22204124 NR Description: putative 40S ribosomal protein S3 [Triticum
  misc_feature (3)..(230): Homolog of NCBI NO: 14192875 NR Description: Putative 40S ribosomal protein; contains
  misc_feature (1)..(249): Homolog of NCBI NO: 15238533 NR Description: 40S ribosomal protein S3 (RPS3C) [Arabidopsis
  misc_feature (1)..(247): Homolog of NCBI NO: 15225107 NR Description: 40S ribosomal protein S3 (RPS3A) [Arabidopsis
  misc_feature (1)..(249): Homolog of NCBI NO: 15232352 NR Description: 40S ribosomal protein S3 (RPS3B) [Arabidopsis
MTTQISKKRKFVADGVFYAELNEVLTRELAEDGYSGVEVRVTPMRTEIIIRATRTQNVLGEKGRRIRELTSLVQKRFKFPVDSVELYAEKVNNRGLCAIAQAESLRYKLLGGLAVRRACYGVLRFVMESGAKGCEVIVSGKLRAARAKSMKFKDGYMVSSGQPTKEYIDSAVRHVLLRQGVLGIKVKVMLDWDPKGISGPKTPLPDVVIIHSPKEEEAIYAPAQVAAPAALVADAPLTAVDYPAMIPVA

SEQ ID NO: 28294 - protein, 206 aa, Arabidopsis thaliana
  peptide (1)..(206): Ceres Seq. ID no. 13592474
  misc_feature (61)..(145): Pfam Name: Ribosomal protein S3, C-terminal domain Pfam Description: Ribosomal protein S3, C-terminal domain
  misc_feature (61)..(145): Pfam Name: Ribosomal protein S3, C-terminal domain Pfam Description: Ribosomal protein S3, C-terminal domain
  misc_feature (1)..(173): Homolog of NCBI NO: 27735393 NR Description: Similar to ribosomal protein S3 [Xenopus laevis]
  misc_feature (1)..(173): Homolog of NCBI NO: 6755372 NR Description: ribosomal protein S3 [Mus musculus]
  misc_feature (1)..(206): Homolog of NCBI NO: 133940 NR Description: 40S ribosomal protein S3A (S1A)
  misc_feature (1)..(173): Homolog of NCBI NO: 12847921 NR Description: unnamed protein product [Mus musculus]
  misc_feature (1)..(206): Homolog of NCBI NO: 38512247 NR Description: Ribosomal protein S3 [Silurana tropicalis]
  misc_feature (1)..(173): Homolog of NCBI NO: 27735393 NR Description: Similar to ribosomal protein S3 [Xenopus laevis]
  misc_feature (1)..(206): Homolog of NCBI NO: 133940 NR Description: 40S ribosomal protein S3A (S1A)
  misc_feature (1)..(206): Homolog of NCBI NO: 38512247 NR Description: Ribosomal protein S3 [Silurana tropicalis]
  misc_feature (1)..(206): Homolog of NCBI NO: 15232352 NR Description: 40S ribosomal protein S3 (RPS3B) [Arabidopsis
  misc_feature (1)..(204): Homolog of NCBI NO: 15225107 NR Description: 40S ribosomal protein S3 (RPS3A) [Arabidopsis
  misc_feature (1)..(206): Homolog of NCBI NO: 15238533 NR Description: 40S ribosomal protein S3 (RPS3C) [Arabidopsis
  misc_feature (1)..(187): Homolog of NCBI NO: 14192875 NR Description: Putative 40S ribosomal protein; contains
  misc_feature (1)..(182): Homolog of NCBI NO: 22204124 NR Description: putative 40S ribosomal protein S3 [Triticum
  misc_feature (1)..(173): Homolog of NCBI NO: 12847921 NR Description: unnamed protein product [Mus musculus]
  misc_feature (1)..(173): Homolog of NCBI NO: 6755372 NR Description: ribosomal protein S3 [Mus musculus]
  misc_feature (1)..(182): Homolog of NCBI NO: 22204124 NR Description: putative 40S ribosomal protein S3 [Triticum
  misc_feature (1)..(187): Homolog of NCBI NO: 14192875 NR Description: Putative 40S ribosomal protein; contains
  misc_feature (1)..(206): Homolog of NCBI NO: 15238533 NR Description: 40S ribosomal protein S3 (RPS3C) [Arabidopsis
  misc_feature (1)..(204): Homolog of NCBI NO: 15225107 NR Description: 40S ribosomal protein S3 (RPS3A) [Arabidopsis
  misc_feature (1)..(206): Homolog of NCBI NO: 15232352 NR Description: 40S ribosomal protein S3 (RPS3B) [Arabidopsis
MRTEIIIRATRTQNVLGEKGRRIRELTSLVQKRFKFPVDSVELYAEKVNNRGLCAIAQAESLRYKLLGGLAVRRACYGVLRFVMESGAKGCEVIVSGKLRAARAKSMKFKDGYMVSSGQPTKEYIDSAVRHVLLRQGVLGIKVKVMLDWDPKGISGPKTPLPDVVIIHSPKEEEAIYAPAQVAAPAALVADAPLTAVDYPAMIPVA

SEQ ID NO: 28295 - DNA, 871 bp, Arabidopsis thaliana
  misc_feature (1)..(871): Ceres Seq. ID no. 12328183
  misc_feature: MA Experiment ID: 108461 Result: Up-regulated in Transcription
  misc_feature: MA Experiment 108461 PARAMETER Experiment Name: At_Germinating_Seeds_cDNA_P Parameter: Age (day) Value: 1 vs. 0
  misc_feature: MA Experiment 108461 PARAMETER Experiment Name: At_Germinating_Seeds_cDNA_P Parameter: Tissue Value: Germinating Seeds
  misc_feature: MA Experiment ID: 108462 Result: Up-regulated in Transcription
  misc_feature: MA Experiment 108462 PARAMETER Experiment Name: At_Germinating_Seeds_cDNA_P Parameter: Age (day) Value: 2 vs. 0
  misc_feature: MA Experiment 108462 PARAMETER Experiment Name: At_Germinating_Seeds_cDNA_P Parameter: Tissue Value: Germinating Seeds
  misc_feature: MA Experiment ID: 108463 Result: Up-regulated in Transcription
  misc_feature: MA Experiment 108463 PARAMETER Experiment Name: At_Germinating_Seeds_cDNA_P Parameter: Age (day) Value: 3 vs. 0
  misc_feature: MA Experiment 108463 PARAMETER Experiment Name: At_Germinating_Seeds_cDNA_P Parameter: Tissue Value: Germinating Seeds
  misc_feature: MA Experiment ID: 108464 Result: Up-regulated in Transcription
  misc_feature: MA Experiment 108464 PARAMETER Experiment Name: At_Germinating_Seeds_cDNA_P Parameter: Age (day) Value: 4 vs. 0
  misc_feature: MA Experiment 108464 PARAMETER Experiment Name: At_Germinating_Seeds_cDNA_P Parameter: Tissue Value: Germinating Seeds
  misc_feature: MA Experiment ID: 108488 Result: Down-regulated in Transcription
  misc_feature: MA Experiment ID: 108489 Result: Up-regulated in Transcription
  misc_feature: MA Experiment ID: 108573 Result: Up-regulated in Transcription
  misc_feature: MA Experiment 108573 PARAMETER Experiment Name: At_Drought_cDNA_P Parameter: Timepoint (hr) Value: 6
  misc_feature: MA Experiment 108573 PARAMETER Experiment Name: At_Drought_cDNA_P Parameter: Tissue Value: Aerial
  misc_feature: MA Experiment 108573 PARAMETER Experiment Name: At_Drought_cDNA_P Parameter: Treatment Value: Drought vs. No Drought
  misc_feature: MA Experiment ID: 108579 Result: Up-regulated in Transcription
  misc_feature: MA Experiment 108579 PARAMETER Experiment Name: At_4deg_Cold_cDNA_P Parameter: Temperature (deg C) Value: 4 vs. 22
  misc_feature: MA Experiment 108579 PARAMETER Experiment Name: At_4deg_Cold_cDNA_P Parameter: Timepoint (hr) Value: 6
  misc_feature: MA Experiment 108579 PARAMETER Experiment Name: At_4deg_Cold_cDNA_P Parameter: Tissue Value: Aerial
  misc_feature: MA Experiment ID: 108594 Result: Down-regulated in Transcription
  misc_feature: MA Experiment 108594 PARAMETER Experiment Name: At_Ler-rhl_Root_cDNA_P Parameter: Plant Line Value: null
  misc_feature: MA Experiment ID: 20000111 Result: Down-regulated in Transcription
  misc_feature: MA Experiment 20000111 PARAMETER Experiment Name: At_42deg_Heat_cDNA_P Parameter: Temperature (deg C) Value: 42 vs. 22
  misc_feature: MA Experiment 20000111 PARAMETER Experiment Name: At_42deg_Heat_cDNA_P Parameter: Timepoint (hr) Value: 6
  misc_feature: MA Experiment 20000111 PARAMETER Experiment Name: At_42deg_Heat_cDNA_P Parameter: Tissue Value: Aerial
  misc_feature: MA Experiment ID: 20000113 Result: Down-regulated in Transcription
  misc_feature: MA Experiment 20000113 PARAMETER Experiment Name: At_42deg_Heat_cDNA_P Parameter: Temperature (deg C) Value: 42 vs. 22
  misc_feature: MA Experiment 20000113 PARAMETER Experiment Name: At_42deg_Heat_cDNA_P Parameter: Timepoint (hr) Value: 8
  misc_feature: MA Experiment 20000113 PARAMETER Experiment Name: At_42deg_Heat_cDNA_P Parameter: Tissue Value: Aerial
  misc_feature: MA Experiment ID: 20000173 Result: Down-regulated in Transcription
  misc_feature: MA Experiment 20000173 PARAMETER Experiment Name: At_42deg_Heat_P Parameter: Age (day) Value: 14
  misc_feature: MA Experiment 20000173 PARAMETER Experiment Name: At_42deg_Heat_P Parameter: Organism Value: A. thaliana
  misc_feature: MA Experiment 20000173 PARAMETER Experiment Name: At_42deg_Heat_P Parameter: Plant Line Value: WS
  misc_feature: MA Experiment 20000173 PARAMETER Experiment Name: At_42deg_Heat_P Parameter: Temperature (deg C) Value: 42 vs. 22
  misc_feature: MA Experiment 20000173 PARAMETER Experiment Name: At_42deg_Heat_P Parameter: Timepoint (hr) Value: 6
  misc_feature: MA Experiment 20000173 PARAMETER Experiment Name: At_42deg_Heat_P Parameter: Tissue Value: Aerial
  misc_feature: MA Experiment ID: 20000182 Result: Down-regulated in Transcription
  misc_feature: MA Experiment 20000182 PARAMETER Experiment Name: At_2mM_SA_P Parameter: Age (day) Value: 14
  misc_feature: MA Experiment 20000182 PARAMETER Experiment Name: At_2mM_SA_P Parameter: Organism Value: A. thaliana
  misc_feature: MA Experiment 20000182 PARAMETER Experiment Name: At_2mM_SA_P Parameter: Plant Line Value: WS
  misc_feature: MA Experiment 20000182 PARAMETER Experiment Name: At_2mM_SA_P Parameter: Timepoint (hr) Value: 6
  misc_feature: MA Experiment 20000182 PARAMETER Experiment Name: At_2mM_SA_P Parameter: Tissue Value: Aerial
  misc_feature: MA Experiment 20000182 PARAMETER Experiment Name: At_2mM_SA_P Parameter: Treatment Value: 2mM SA vs. No Treatment
  misc_feature: MA Experiment ID: 20000184 Result: Down-regulated in Transcription
  misc_feature: MA Experiment 20000184 PARAMETER Experiment Name: At_Shoots__P Parameter: Age (day) Value: 7
  misc_feature: MA Experiment 20000184 PARAMETER Experiment Name: At_Shoots__P Parameter: Tissue Value: Shoots vs. Whole Plant
  misc_feature: MA Experiment ID: 20000264 Result: Up-regulated in Transcription
  misc_feature: MA Experiment 20000264 PARAMETER Experiment Name: At_Open_Flower_P Parameter: Age (day) Value: 21
  misc_feature: MA Experiment 20000264 PARAMETER Experiment Name: At_Open_Flower_P Parameter: Plant Line Value: WS
  misc_feature: MA Experiment 20000264 PARAMETER Experiment Name: At_Open_Flower_P Parameter: Tissue Value: Open Flower vs. Whole Plant
  misc_feature: MA Experiment ID: 20000438 Result: Down-regulated in Transcription
  misc_feature: MA Experiment 20000438 PARAMETER Experiment Name: At_Shoots__P Parameter: Age (day) Value: 14
  misc_feature: MA Experiment 20000438 PARAMETER Experiment Name: At_Shoots__P Parameter: Tissue Value: Shoots vs. Whole Plant
  misc_feature: MA Experiment ID: 20000794 Result: Up-regulated in Transcription
  misc_feature: MA Experiment 20000794 PARAMETER Experiment Name: At_Petals_P Parameter: Age (day) Value: 23-25 days
  misc_feature: MA Experiment 20000794 PARAMETER Experiment Name: At_Petals_P Parameter: Plant Line Value: WS
  misc_feature: MA Experiment 20000794 PARAMETER Experiment Name: At_Petals_P Parameter: Tissue Value: Petals vs. Whole plant
  misc_feature: MA Experiment ID: 20001757 Result: Down-regulated in Transcription
  misc_feature: MA Experiment 20001757 PARAMETER Experiment Name: At_50mM_NH4NO3_L-to-H_P Parameter: Timepoint (hr) Value: 6
  misc_feature: MA Experiment 20001757 PARAMETER Experiment Name: At_50mM_NH4NO3_L-to-H_P Parameter: Tissue Value: Leaf
  misc_feature: MA Experiment 20001757 PARAMETER Experiment Name: At_50mM_NH4NO3_L-to-H_P Parameter: Treatment Value: 50mM NH4NO3 vs 100mM Mannitol
  misc_feature: MA Experiment ID: 20001904 Result: Up-regulated in Transcription
  misc_feature: MA Experiment 20001904 PARAMETER Experiment Name: At_Drought_Reproduction_P Parameter: Age (day) Value: 37
  misc_feature: MA Experiment 20001904 PARAMETER Experiment Name: At_Drought_Reproduction_P Parameter: Organism Value: A. thaliana
  misc_feature: MA Experiment 20001904 PARAMETER Experiment Name: At_Drought_Reproduction_P Parameter: Plant Line Value: WS
  misc_feature: MA Experiment 20001904 PARAMETER Experiment Name: At_Drought_Reproduction_P Parameter: Timepoint (day) Value: 7
  misc_feature: MA Experiment 20001904 PARAMETER Experiment Name: At_Drought_Reproduction_P Parameter: Tissue Value: Rosettes
  misc_feature: MA Experiment 20001904 PARAMETER Experiment Name: At_Drought_Reproduction_P Parameter: Treatment Value: Drought vs. No Drought
  misc_feature: MA Experiment ID: 20001910 Result: Down-regulated in Transcription
  misc_feature: MA Experiment 20001910 PARAMETER Experiment Name: At_Drought_Reproduction_P Parameter: Age (day) Value: 37
  misc_feature: MA Experiment 20001910 PARAMETER Experiment Name: At_Drought_Reproduction_P Parameter: Organism Value: A. thaliana
  misc_feature: MA Experiment 20001910 PARAMETER Experiment Name: At_Drought_Reproduction_P Parameter: Plant Line Value: WS
  misc_feature: MA Experiment 20001910 PARAMETER Experiment Name: At_Drought_Reproduction_P Parameter: Timepoint (day) Value: 7
  misc_feature: MA Experiment 20001910 PARAMETER Experiment Name: At_Drought_Reproduction_P Parameter: Tissue Value: Flowers
  misc_feature: MA Experiment 20001910 PARAMETER Experiment Name: At_Drought_Reproduction_P Parameter: Treatment Value: Drought vs. No Drought
atccatccttcattggttttcgacaaatttgattcccacaaattatttgatatcttgaggaaatgaaattcttcatttttattctagcgttacaacaactctacgtacaaagtttcgcccaagatttcgatttcttctacttcgttttacagtggcctggagcgtattgtgattcaagacatagttgttgctatccacaaaccggtaaaccagctgcagattttggaattcacggtctttggcctaactacaaaaccggtggatggccgcaaaattgtaatcctgacagtcgatttgatgatttacgggtttctgatctgatgagcgatttacaaagagaatggccaacgttgtcgtgtccgagcaatgatggtatgaagttttggacacatgagtgggagaaacacggtacgtgcgctgagtccgagcttgaccaacacgattacttcgaagctggtctcaagctcaaacagaaagctaatctccttcatgcccttaccaatgctgggatcaaaccggatgataaattttatgaaatgaaagatattgagaatacgatcaaacaagtagttgggtttgctccgggcattgaatgtaacaaagattcgtcacataatagccaactctatcagatttatttatgtgttgacacttcggcctccaaattcatcaactgtcctgttatgccgcatggtcgatgcgactctcgagttcaatttcccaagttctaaattttatggctacattttttctatgtatttacattctacctattaatttttatttgtgtttcttgcaaaatttagttgtaataaacagtgtataattggacgatacccgtgatttgcatggtaaaaagatgataaaggtt

SEQ ID NO: 28296 - protein, 222 aa, Arabidopsis thaliana
  peptide (1)..(222): Ceres Seq. ID no. 12328184
  misc_feature (22)..(211): Pfam Name: Ribonuclease T2 family Pfam Description: Ribonuclease T2 family
  misc_feature (3)..(222): Homolog of NCBI NO: 7768564 NR Description: RNase [Nicotiana tabacum]
  misc_feature (3)..(222): Homolog of NCBI NO: 7435266 NR Description: ribonuclease M5 (EC 3.1.-.-) precursor,
  misc_feature (17)..(222): Homolog of NCBI NO: 21555182 NR Description: ribonuclease, RNS1 [Arabidopsis thaliana]
  misc_feature (17)..(222): Homolog of NCBI NO: 15227068 NR Description: ribonuclease, RNS1
  misc_feature (5)..(222): Homolog of NCBI NO: 9081845 NR Description: S-like ribonuclease [Prunus dulcis]
  misc_feature (7)..(222): Homolog of NCBI NO: 3860325 NR Description: ribonuclease T2 [Cicer arietinum]
  misc_feature (5)..(222): Homolog of NCBI NO: 9957752 NR Description: S-like ribonuclease [Prunus dulcis]
  misc_feature (5)..(222): Homolog of NCBI NO: 2118017 NR Description: ribonuclease non-S (EC 3.1.-.-) precursor -
  misc_feature (7)..(222): Homolog of NCBI NO: 18394085 NR Description: ribonuclease; protein id: At1g14220.1
  misc_feature (1)..(222): Homolog of NCBI NO: 18396065 NR Description: ribonuclease, RNS3
MKFFIFILALQQLYVQSFAQDFDFFYFVLQWPGAYCDSRHSCCYPQTGKPAADFGIHGLWPNYKTGGWPQNCNPDSRFDDLRVSDLMSDLQREWPTLSCPSNDGMKFWTHEWEKHGTCAESELDQHDYFEAGLKLKQKANLLHALTNAGIKPDDKFYEMKDIENTIKQVVGFAPGIECNKDSSHNSQLYQIYLCVDTSASKFINCPVMPHGRCDSRVQFPKF

SEQ ID NO: 28297 - protein, 136 aa, Arabidopsis thaliana
  peptide (1)..(136): Ceres Seq. ID no. 12328185
  misc_feature (1)..(125): Pfam Name: Ribonuclease T2 family Pfam Description: Ribonuclease T2 family
  misc_feature (1)..(136): Homolog of NCBI NO: 7768564 NR Description: RNase [Nicotiana tabacum]
  misc_feature (1)..(136): Homolog of NCBI NO: 7435266 NR Description: ribonuclease M5 (EC 3.1.-.-) precursor,
  misc_feature (1)..(136): Homolog of NCBI NO: 21555182 NR Description: ribonuclease, RNS1 [Arabidopsis thaliana]
  misc_feature (1)..(136): Homolog of NCBI NO: 15227068 NR Description: ribonuclease, RNS1
  misc_feature (1)..(136): Homolog of NCBI NO: 9081845 NR Description: S-like ribonuclease [Prunus dulcis]
  misc_feature (1)..(136): Homolog of NCBI NO: 3860325 NR Description: ribonuclease T2 [Cicer arietinum]
  misc_feature (1)..(136): Homolog of NCBI NO: 9957752 NR Description: S-like ribonuclease [Prunus dulcis]
  misc_feature (1)..(136): Homolog of NCBI NO: 2118017 NR Description: ribonuclease non-S (EC 3.1.-.-) precursor -
  misc_feature (1)..(136): Homolog of NCBI NO: 18394085 NR Description: ribonuclease; protein id: At1g14220.1
  misc_feature (1)..(136): Homolog of NCBI NO: 18396065 NR Description: ribonuclease, RNS3
MSDLQREWPTLSCPSNDGMKFWTHEWEKHGTCAESELDQHDYFEAGLKLKQKANLLHALTNAGIKPDDKFYEMKDIENTIKQVVGFAPGIECNKDSSHNSQLYQIYLCVDTSASKFINCPVMPHGRCDSRVQFPKF

SEQ ID NO: 28298 - protein, 118 aa, Arabidopsis thaliana
  peptide (1)..(118): Ceres Seq. ID no. 12328186
  misc_feature (1)..(107): Pfam Name: Ribonuclease T2 family Pfam Description: Ribonuclease T2 family
  misc_feature (1)..(118): Homolog of NCBI NO: 7768564 NR Description: RNase [Nicotiana tabacum]
  misc_feature (1)..(118): Homolog of NCBI NO: 7435266 NR Description: ribonuclease M5 (EC 3.1.-.-) precursor,
  misc_feature (1)..(118): Homolog of NCBI NO: 21555182 NR Description: ribonuclease, RNS1 [Arabidopsis thaliana]
  misc_feature (1)..(118): Homolog of NCBI NO: 15227068 NR Description: ribonuclease, RNS1
  misc_feature (1)..(118): Homolog of NCBI NO: 9081845 NR Description: S-like ribonuclease [Prunus dulcis]
  misc_feature (1)..(118): Homolog of NCBI NO: 3860325 NR Description: ribonuclease T2 [Cicer arietinum]
  misc_feature (1)..(118): Homolog of NCBI NO: 9957752 NR Description: S-like ribonuclease [Prunus dulcis]
  misc_feature (1)..(118): Homolog of NCBI NO: 2118017 NR Description: ribonuclease non-S (EC 3.1.-.-) precursor -
  misc_feature (1)..(118): Homolog of NCBI NO: 18394085 NR Description: ribonuclease; protein id: At1g14220.1
  misc_feature (1)..(118): Homolog of NCBI NO: 18396065 NR Description: ribonuclease, RNS3
MKFWTHEWEKHGTCAESELDQHDYFEAGLKLKQKANLLHALTNAGIKPDDKFYEMKDIENTIKQVVGFAPGIECNKDSSHNSQLYQIYLCVDTSASKFINCPVMPHGRCDSRVQFPKF

SEQ ID NO: 28299 - DNA, 629 bp, Arabidopsis thaliana
  misc_feature (1)..(629): Ceres Seq. ID no. 12680276
  misc_feature: MA Experiment ID: 108435 Result: Down-regulated in Transcription
  misc_feature: MA Experiment 108435 PARAMETER Experiment Name: At_stm_Mutants_cDNA_P Parameter: Plant Line Value: wt Landsburg vs stm
  misc_feature: MA Experiment 108435 PARAMETER Experiment Name: At_stm_Mutants_cDNA_P Parameter: Tissue Value: Shoot Apical Meristem Region
  misc_feature: MA Experiment ID: 108461 Result: Up-regulated in Transcription
  misc_feature: MA Experiment 108461 PARAMETER Experiment Name: At_Germinating_Seeds_cDNA_P Parameter: Age (day) Value: 1 vs. 0
  misc_feature: MA Experiment 108461 PARAMETER Experiment Name: At_Germinating_Seeds_cDNA_P Parameter: Tissue Value: Germinating Seeds
  misc_feature: MA Experiment ID: 108462 Result: Up-regulated in Transcription
  misc_feature: MA Experiment 108462 PARAMETER Experiment Name: At_Germinating_Seeds_cDNA_P Parameter: Age (day) Value: 2 vs. 0
  misc_feature: MA Experiment 108462 PARAMETER Experiment Name: At_Germinating_Seeds_cDNA_P Parameter: Tissue Value: Germinating Seeds
  misc_feature: MA Experiment ID: 108463 Result: Up-regulated in Transcription
  misc_feature: MA Experiment 108463 PARAMETER Experiment Name: At_Germinating_Seeds_cDNA_P Parameter: Age (day) Value: 3 vs. 0
  misc_feature: MA Experiment 108463 PARAMETER Experiment Name: At_Germinating_Seeds_cDNA_P Parameter: Tissue Value: Germinating Seeds
  misc_feature: MA Experiment ID: 108464 Result: Up-regulated in Transcription
  misc_feature: MA Experiment 108464 PARAMETER Experiment Name: At_Germinating_Seeds_cDNA_P Parameter: Age (day) Value: 4 vs. 0
  misc_feature: MA Experiment 108464 PARAMETER Experiment Name: At_Germinating_Seeds_cDNA_P Parameter: Tissue Value: Germinating Seeds
  misc_feature: MA Experiment ID: 108488 Result: Up-regulated in Transcription
  misc_feature: MA Experiment ID: 108489 Result: Down-regulated in Transcription
  misc_feature: MA Experiment ID: 108594 Result: Down-regulated in Transcription
  misc_feature: MA Experiment 108594 PARAMETER Experiment Name: At_Ler-rhl_Root_cDNA_P Parameter: Plant Line Value: null
  misc_feature: MA Experiment ID: 108595 Result: Down-regulated in Transcription
  misc_feature: MA Experiment 108595 PARAMETER Experiment Name: At_Ler-pi_Ovule_cDNA_P Parameter: Plant Line Value: null
  misc_feature: MA Experiment ID: 20000184 Result: Up-regulated in Transcription
  misc_feature: MA Experiment 20000184 PARAMETER Experiment Name: At_Shoots__P Parameter: Age (day) Value: 7
  misc_feature: MA Experiment 20000184 PARAMETER Experiment Name: At_Shoots__P Parameter: Tissue Value: Shoots vs. Whole Plant
  misc_feature: MA Experiment ID: 20000224 Result: Down-regulated in Transcription
  misc_feature: MA Experiment ID: 20000438 Result: Up-regulated in Transcription
  misc_feature: MA Experiment 20000438 PARAMETER Experiment Name: At_Shoots__P Parameter: Age (day) Value: 14
  misc_feature: MA Experiment 20000438 PARAMETER Experiment Name: At_Shoots__P Parameter: Tissue Value: Shoots vs. Whole Plant
  misc_feature: MA Experiment ID: 20000495 Result: Down-regulated in Transcription
  misc_feature: MA Experiment 20000495 PARAMETER Experiment Name: At_Guard_Cells_P Parameter: Harvest Date Value: 8/2/2002
  misc_feature: MA Experiment 20000495 PARAMETER Experiment Name: At_Guard_Cells_P Parameter: Organism Value: A. thaliana
  misc_feature: MA Experiment 20000495 PARAMETER Experiment Name: At_Guard_Cells_P Parameter: Tissue Value: Guard Cells vs. Leaves
attatttcctacacaaaattcccactcaccacacacaacaaaagaatagtgatcgaagctcatggcgtctcttgcaaccgtcgccgctgtgaaaccatccgccgccataaaaggactcggcggcagctcactcgccggagctaagctctccatcaagccttcccgcctgagctttaaacccaaatccatccgggctaatggtgtggtggctaagtatggagacaaaagtgtctactttgacttagaagatttgggtaacacaacaggtcaatgggacgtatacggctctgatgctccttctccttacaatcctcttcagagcaagttctttgagacattcgctgccccattcacaaagagaggattgctcctcaagttcttgatccttggaggaggctctttgcttacttatgtcagcgctacctctaccggcgaagttcttcccatcaagagaggtcctcaggagccgcctaagctcggtcctcgcggcaagctctgatctatattcatgttacctttctcttcttccttctaaaactcatcaacatttctcaatactgcaaacccttttaagtaattttatgtatattctgtttatctgttacatttgaaacgttttttcttcccct

SEQ ID NO: 28300 - protein, 145 aa, Arabidopsis thaliana
  peptide (1)..(145): Ceres Seq. ID no. 12680277
  misc_feature (6)..(145): Pfam Name: Photosystem I reaction centre subunit VI Pfam Description: Photosystem I reaction centre subunit VI
  misc_feature (6)..(145): Pfam Name: Photosystem I reaction centre subunit VI Pfam Description: Photosystem I reaction centre subunit VI
  misc_feature (1)..(145): Homolog of NCBI NO: 445929 NR Description: photosystem I:SUBUNIT=PS I-H
  misc_feature (1)..(145): Homolog of NCBI NO: 445928 NR Description: photosystem I:SUBUNIT=PS I-H
  misc_feature (1)..(145): Homolog of NCBI NO: 7443140 NR Description: photosystem I psaH precursor - wood tobacco
  misc_feature (1)..(145): Homolog of NCBI NO: 7443139 NR Description: photosystem I protein psaH precursor - wood
  misc_feature (1)..(145): Homolog of NCBI NO: 131199 NR Description: Photosystem I reaction center subunit VI,
  misc_feature (1)..(145): Homolog of NCBI NO: 445929 NR Description: photosystem I:SUBUNIT=PS I-H
  misc_feature (1)..(145): Homolog of NCBI NO: 7443140 NR Description: photosystem I psaH precursor - wood tobacco
  misc_feature (1)..(145): Homolog of NCBI NO: 131199 NR Description: Photosystem I reaction center subunit VI,
  misc_feature (1)..(145): Homolog of NCBI NO: 15233291 NR Description: photosystem I subunit VI precursor
  misc_feature (1)..(145): Homolog of NCBI NO: 15218186 NR Description: photosystem I subunit VI precursor
  misc_feature (1)..(145): Homolog of NCBI NO: 3914442 NR Description: Photosystem I reaction center subunit VI,
  misc_feature (1)..(145): Homolog of NCBI NO: 7443138 NR Description: photosystem I protein psaH precursor - wood
  misc_feature (1)..(145): Homolog of NCBI NO: 33520419 NR Description: photosystem I psaH protein [Trifolium pratense]
  misc_feature (1)..(145): Homolog of NCBI NO: 7443139 NR Description: photosystem I protein psaH precursor - wood
  misc_feature (1)..(145): Homolog of NCBI NO: 445928 NR Description: photosystem I:SUBUNIT=PS I-H
  misc_feature (1)..(145): Homolog of NCBI NO: 33520419 NR Description: photosystem I psaH protein [Trifolium pratense]
  misc_feature (1)..(145): Homolog of NCBI NO: 7443138 NR Description: photosystem I protein psaH precursor - wood
  misc_feature (1)..(145): Homolog of NCBI NO: 3914442 NR Description: Photosystem I reaction center subunit VI,
  misc_feature (1)..(145): Homolog of NCBI NO: 15218186 NR Description: photosystem I subunit VI precursor
  misc_feature (1)..(145): Homolog of NCBI NO: 15233291 NR Description: photosystem I subunit VI precursor
MASLATVAAVKPSAAIKGLGGSSLAGAKLSIKPSRLSFKPKSIRANGVVAKYGDKSVYFDLEDLGNTTGQWDVYGSDAPSPYNPLQSKFFETFAAPFTKRGLLLKFLILGGGSLLTYVSATSTGEVLPIKRGPQEPPKLGPRGKL

SEQ ID NO: 28301 - DNA, 1292 bp, Arabidopsis thaliana
  misc_feature (1)..(1292): Ceres Seq. ID no. 12715029
  misc_feature: MA Experiment ID: 108434 Result: Down-regulated in Transcription
  misc_feature: MA Experiment 108434 PARAMETER Experiment Name: At_Root_Tips_cDNA_P Parameter: Tissue Value: Root Tips
  misc_feature: MA Experiment ID: 108461 Result: Up-regulated in Transcription
  misc_feature: MA Experiment 108461 PARAMETER Experiment Name: At_Germinating_Seeds_cDNA_P Parameter: Age (day) Value: 1 vs. 0
  misc_feature: MA Experiment 108461 PARAMETER Experiment Name: At_Germinating_Seeds_cDNA_P Parameter: Tissue Value: Germinating Seeds
  misc_feature: MA Experiment ID: 108462 Result: Up-regulated in Transcription
  misc_feature: MA Experiment 108462 PARAMETER Experiment Name: At_Germinating_Seeds_cDNA_P Parameter: Age (day) Value: 2 vs. 0
  misc_feature: MA Experiment 108462 PARAMETER Experiment Name: At_Germinating_Seeds_cDNA_P Parameter: Tissue Value: Germinating Seeds
  misc_feature: MA Experiment ID: 108463 Result: Up-regulated in Transcription
  misc_feature: MA Experiment 108463 PARAMETER Experiment Name: At_Germinating_Seeds_cDNA_P Parameter: Age (day) Value: 3 vs. 0
  misc_feature: MA Experiment 108463 PARAMETER Experiment Name: At_Germinating_Seeds_cDNA_P Parameter: Tissue Value: Germinating Seeds
  misc_feature: MA Experiment ID: 108464 Result: Up-regulated in Transcription
  misc_feature: MA Experiment 108464 PARAMETER Experiment Name: At_Germinating_Seeds_cDNA_P Parameter: Age (day) Value: 4 vs. 0
  misc_feature: MA Experiment 108464 PARAMETER Experiment Name: At_Germinating_Seeds_cDNA_P Parameter: Tissue Value: Germinating Seeds
  misc_feature: MA Experiment ID: 108561 Result: Up-regulated in Transcription
  misc_feature: MA Experiment 108561 PARAMETER Experiment Name: At_100uM_ABA_cDNA_P Parameter: Timepoint (hr) Value: 6
  misc_feature: MA Experiment 108561 PARAMETER Experiment Name: At_100uM_ABA_cDNA_P Parameter: Tissue Value: Aerial
  misc_feature: MA Experiment 108561 PARAMETER Experiment Name: At_100uM_ABA_cDNA_P Parameter: Treatment Value: 100uM ABA vs. No Treatment
  misc_feature: MA Experiment ID: 108569 Result: Up-regulated in Transcription
  misc_feature: MA Experiment 108569 PARAMETER Experiment Name: At_0.001%_MeJA__cDNA_P Parameter: Timepoint (hr) Value: 6
  misc_feature: MA Experiment 108569 PARAMETER Experiment Name: At_0.001%_MeJA__cDNA_P Parameter: Tissue Value: Aerial
  misc_feature: MA Experiment 108569 PARAMETER Experiment Name: At_0.001%_MeJA__cDNA_P Parameter: Treatment Value: 0.001% MeJA vs. No Treatment
  misc_feature: MA Experiment ID: 108573 Result: Up-regulated in Transcription
  misc_feature: MA Experiment 108573 PARAMETER Experiment Name: At_Drought_cDNA_P Parameter: Timepoint (hr) Value: 6
  misc_feature: MA Experiment 108573 PARAMETER Experiment Name: At_Drought_cDNA_P Parameter: Tissue Value: Aerial
  misc_feature: MA Experiment 108573 PARAMETER Experiment Name: At_Drought_cDNA_P Parameter: Treatment Value: Drought vs. No Drought
  misc_feature: MA Experiment ID: 108574 Result: Up-regulated in Transcription
  misc_feature: MA Experiment 108574 PARAMETER Experiment Name: At_Wounding__cDNA_P Parameter: Timepoint (hr) Value: 1
  misc_feature: MA Experiment 108574 PARAMETER Experiment Name: At_Wounding__cDNA_P Parameter: Tissue Value: Aerial
  misc_feature: MA Experiment 108574 PARAMETER Experiment Name: At_Wounding__cDNA_P Parameter: Treatment Value: Wounding vs. No Wounding
  misc_feature: MA Experiment ID: 108577 Result: Up-regulated in Transcription
  misc_feature: MA Experiment 108577 PARAMETER Experiment Name: At_42deg_Heat_cDNA_P Parameter: Temperature (deg C) Value: 42 vs. 22
  misc_feature: MA Experiment 108577 PARAMETER Experiment Name: At_42deg_Heat_cDNA_P Parameter: Timepoint (hr) Value: 6
  misc_feature: MA Experiment 108577 PARAMETER Experiment Name: At_42deg_Heat_cDNA_P Parameter: Tissue Value: Aerial
  misc_feature: MA Experiment ID: 108585 Result: Up-regulated in Transcription
  misc_feature: MA Experiment 108585 PARAMETER Experiment Name: At_5mM_NaNP_cDNA_P Parameter: Timepoint (hr) Value: 6
  misc_feature: MA Experiment 108585 PARAMETER Experiment Name: At_5mM_NaNP_cDNA_P Parameter: Tissue Value: Aerial
  misc_feature: MA Experiment 108585 PARAMETER Experiment Name: At_5mM_NaNP_cDNA_P Parameter: Treatment Value: null
  misc_feature: MA Experiment ID: 108605 Result: Up-regulated in Transcription
  misc_feature: MA Experiment 108605 PARAMETER Experiment Name: At_100uM_ABA_cDNA_P Parameter: Timepoint (hr) Value: 6
  misc_feature: MA Experiment 108605 PARAMETER Experiment Name: At_100uM_ABA_cDNA_P Parameter: Tissue Value: Aerial
  misc_feature: MA Experiment 108605 PARAMETER Experiment Name: At_100uM_ABA_cDNA_P Parameter: Treatment Value: 100uM ABA vs. No Treatment
  misc_feature: MA Experiment ID: 108607 Result: Up-regulated in Transcription
  misc_feature: MA Experiment 108607 PARAMETER Experiment Name: At_100uM_ABA_cDNA_P Parameter: Timepoint (hr) Value: 4
  misc_feature: MA Experiment 108607 PARAMETER Experiment Name: At_100uM_ABA_cDNA_P Parameter: Tissue Value: Aerial
  misc_feature: MA Experiment 108607 PARAMETER Experiment Name: At_100uM_ABA_cDNA_P Parameter: Treatment Value: 100uM ABA vs. No Treatment
  misc_feature: MA Experiment ID: 108608 Result: Up-regulated in Transcription
  misc_feature: MA Experiment 108608 PARAMETER Experiment Name: At_100uM_ABA_cDNA_P Parameter: Timepoint (hr) Value: 1
  misc_feature: MA Experiment 108608 PARAMETER Experiment Name: At_100uM_ABA_cDNA_P Parameter: Tissue Value: Aerial
  misc_feature: MA Experiment 108608 PARAMETER Experiment Name: At_100uM_ABA_cDNA_P Parameter: Treatment Value: 100uM ABA vs. No Treatment
  misc_feature: MA Experiment ID: 108609 Result: Up-regulated in Transcription
  misc_feature: MA Experiment 108609 PARAMETER Experiment Name: At_100uM_ABA_cDNA_P Parameter: Timepoint (hr) Value: 24
  misc_feature: MA Experiment 108609 PARAMETER Experiment Name: At_100uM_ABA_cDNA_P Parameter: Tissue Value: Aerial
  misc_feature: MA Experiment 108609 PARAMETER Experiment Name: At_100uM_ABA_cDNA_P Parameter: Treatment Value: 100uM ABA vs. No Treatment
  misc_feature: MA Experiment ID: 108668 Result: Up-regulated in Transcription
  misc_feature: MA Experiment 108668 PARAMETER Experiment Name: At_2mM_SA_cDNA_P Parameter: Plant Line Value: WS
  misc_feature: MA Experiment 108668 PARAMETER Experiment Name: At_2mM_SA_cDNA_P Parameter: Timepoint (hr) Value: 6
  misc_feature: MA Experiment 108668 PARAMETER Experiment Name: At_2mM_SA_cDNA_P Parameter: Treatment Value: 2mM SA vs. No Treatment
  misc_feature: MA Experiment ID: 20000069 Result: Up-regulated in Transcription
  misc_feature: MA Experiment 20000069 PARAMETER Experiment Name: At_100uM_ABA_Mutants_cDNA_P Parameter: Plant Line Value: CS23
  misc_feature: MA Experiment 20000069 PARAMETER Experiment Name: At_100uM_ABA_Mutants_cDNA_P Parameter: Timepoint (hr) Value: 6
  misc_feature: MA Experiment 20000069 PARAMETER Experiment Name: At_100uM_ABA_Mutants_cDNA_P Parameter: Tissue Value: Aerial
  misc_feature: MA Experiment 20000069 PARAMETER Experiment Name: At_100uM_ABA_Mutants_cDNA_P Parameter: Treatment Value: 100uM ABA vs. No Treatment
  misc_feature: MA Experiment ID: 20000070 Result: Up-regulated in Transcription
  misc_feature: MA Experiment 20000070 PARAMETER Experiment Name: At_100uM_ABA_Mutants_cDNA_P Parameter: Plant Line Value: CS24
  misc_feature: MA Experiment 20000070 PARAMETER Experiment Name: At_100uM_ABA_Mutants_cDNA_P Parameter: Timepoint (hr) Value: 6
  misc_feature: MA Experiment 20000070 PARAMETER Experiment Name: At_100uM_ABA_Mutants_cDNA_P Parameter: Tissue Value: Aerial
  misc_feature: MA Experiment 20000070 PARAMETER Experiment Name: At_100uM_ABA_Mutants_cDNA_P Parameter: Treatment Value: 100uM ABA vs. No Treatment
  misc_feature: MA Experiment ID: 20000071 Result: Up-regulated in Transcription
  misc_feature: MA Experiment 20000071 PARAMETER Experiment Name: At_100uM_ABA_Mutants_cDNA_P Parameter: Plant Line Value: CS8104
  misc_feature: MA Experiment 20000071 PARAMETER Experiment Name: At_100uM_ABA_Mutants_cDNA_P Parameter: Timepoint (hr) Value: 6
  misc_feature: MA Experiment 20000071 PARAMETER Experiment Name: At_100uM_ABA_Mutants_cDNA_P Parameter: Tissue Value: Aerial
  misc_feature: MA Experiment 20000071 PARAMETER Experiment Name: At_100uM_ABA_Mutants_cDNA_P Parameter: Treatment Value: 100uM ABA vs. No Treatment
  misc_feature: MA Experiment ID: 20000072 Result: Up-regulated in Transcription
  misc_feature: MA Experiment 20000072 PARAMETER Experiment Name: At_100uM_ABA_Mutants_cDNA_P Parameter: Plant Line Value: CS8105
  misc_feature: MA Experiment 20000072 PARAMETER Experiment Name: At_100uM_ABA_Mutants_cDNA_P Parameter: Timepoint (hr) Value: 6
  misc_feature: MA Experiment 20000072 PARAMETER Experiment Name: At_100uM_ABA_Mutants_cDNA_P Parameter: Tissue Value: Aerial
  misc_feature: MA Experiment 20000072 PARAMETER Experiment Name: At_100uM_ABA_Mutants_cDNA_P Parameter: Treatment Value: 100uM ABA vs. No Treatment
  misc_feature: MA Experiment ID: 20000086 Result: Up-regulated in Transcription
  misc_feature: MA Experiment 20000086 PARAMETER Experiment Name: At_100uM_ABA_Mutants_cDNA_P Parameter: Plant Line Value: CS22
  misc_feature: MA Experiment 20000086 PARAMETER Experiment Name: At_100uM_ABA_Mutants_cDNA_P Parameter: Timepoint (hr) Value: 6
  misc_feature: MA Experiment 20000086 PARAMETER Experiment Name: At_100uM_ABA_Mutants_cDNA_P Parameter: Tissue Value: Aerial
  misc_feature: MA Experiment 20000086 PARAMETER Experiment Name: At_100uM_ABA_Mutants_cDNA_P Parameter: Treatment Value: 100uM ABA vs. No Treatment
  misc_feature: MA Experiment ID: 20000087 Result: Up-regulated in Transcription
  misc_feature: MA Experiment 20000087 PARAMETER Experiment Name: At_100uM_ABA_Mutants_cDNA_P Parameter: Plant Line Value: WS
  misc_feature: MA Experiment 20000087 PARAMETER Experiment Name: At_100uM_ABA_Mutants_cDNA_P Parameter: Timepoint (hr) Value: 6
  misc_feature: MA Experiment 20000087 PARAMETER Experiment Name: At_100uM_ABA_Mutants_cDNA_P Parameter: Tissue Value: Aerial
  misc_feature: MA Experiment 20000087 PARAMETER Experiment Name: At_100uM_ABA_Mutants_cDNA_P Parameter: Treatment Value: 100uM ABA vs. No Treatment
  misc_feature: MA Experiment ID: 20000088 Result: Up-regulated in Transcription
  misc_feature: MA Experiment 20000088 PARAMETER Experiment Name: At_100uM_ABA_Mutants_cDNA_P Parameter: Plant Line Value: Landsberg
  misc_feature: MA Experiment 20000088 PARAMETER Experiment Name: At_100uM_ABA_Mutants_cDNA_P Parameter: Timepoint (hr) Value: 6
  misc_feature: MA Experiment 20000088 PARAMETER Experiment Name: At_100uM_ABA_Mutants_cDNA_P Parameter: Tissue Value: Aerial
  misc_feature: MA Experiment 20000088 PARAMETER Experiment Name: At_100uM_ABA_Mutants_cDNA_P Parameter: Treatment Value: 100uM ABA vs. No Treatment
  misc_feature: MA Experiment ID: 20000089 Result: Up-regulated in Transcription
  misc_feature: MA Experiment ID: 20000093 Result: Up-regulated in Transcription
  misc_feature: MA Experiment 20000093 PARAMETER Experiment Name: At_42deg_Heat_cDNA_P Parameter: Temperature (deg C) Value: 42 vs. 22
  misc_feature: MA Experiment 20000093 PARAMETER Experiment Name: At_42deg_Heat_cDNA_P Parameter: Timepoint (hr) Value: 0.5
  misc_feature: MA Experiment 20000093 PARAMETER Experiment Name: At_42deg_Heat_cDNA_P Parameter: Tissue Value: Aerial
  misc_feature: MA Experiment ID: 20000111 Result: Up-regulated in Transcription
  misc_feature: MA Experiment 20000111 PARAMETER Experiment Name: At_42deg_Heat_cDNA_P Parameter: Temperature (deg C) Value: 42 vs. 22
  misc_feature: MA Experiment 20000111 PARAMETER Experiment Name: At_42deg_Heat_cDNA_P Parameter: Timepoint (hr) Value: 6
  misc_feature: MA Experiment 20000111 PARAMETER Experiment Name: At_42deg_Heat_cDNA_P Parameter: Tissue Value: Aerial
  misc_feature: MA Experiment ID: 20000112 Result: Up-regulated in Transcription
  misc_feature: MA Experiment 20000112 PARAMETER Experiment Name: At_42deg_Heat_cDNA_P Parameter: Temperature (deg C) Value: 42 vs. 22
  misc_feature: MA Experiment 20000112 PARAMETER Experiment Name: At_42deg_Heat_cDNA_P Parameter: Timepoint (hr) Value: 2
  misc_feature: MA Experiment 20000112 PARAMETER Experiment Name: At_42deg_Heat_cDNA_P Parameter: Tissue Value: Aerial
  misc_feature: MA Experiment ID: 20000117 Result: Up-regulated in Transcription
  misc_feature: MA Experiment 20000117 PARAMETER Experiment Name: At_100uM_ABA_Mutants_cDNA_P Parameter: Plant Line Value: Columbia
  misc_feature: MA Experiment 20000117 PARAMETER Experiment Name: At_100uM_ABA_Mutants_cDNA_P Parameter: Timepoint (hr) Value: 6
  misc_feature: MA Experiment 20000117 PARAMETER Experiment Name: At_100uM_ABA_Mutants_cDNA_P Parameter: Tissue Value: Aerial
  misc_feature: MA Experiment 20000117 PARAMETER Experiment Name: At_100uM_ABA_Mutants_cDNA_P Parameter: Treatment Value: 100uM ABA vs. No Treatment
  misc_feature: MA Experiment ID: 20000144 Result: Up-regulated in Transcription
  misc_feature: MA Experiment 20000144 PARAMETER Experiment Name: At_42deg_Heat_cDNA_P Parameter: Temperature (deg C) Value: 42 vs. 22
  misc_feature: MA Experiment 20000144 PARAMETER Experiment Name: At_42deg_Heat_cDNA_P Parameter: Timepoint (hr) Value: 1
  misc_feature: MA Experiment 20000144 PARAMETER Experiment Name: At_42deg_Heat_cDNA_P Parameter: Tissue Value: Aerial
  misc_feature: MA Experiment ID: 20000166 Result: Up-regulated in Transcription
  misc_feature: MA Experiment 20000166 PARAMETER Experiment Name: At_100uM_ABA_P Parameter: Age (day) Value: 14
  misc_feature: MA Experiment 20000166 PARAMETER Experiment Name: At_100uM_ABA_P Parameter: Organism Value: A. thaliana
  misc_feature: MA Experiment 20000166 PARAMETER Experiment Name: At_100uM_ABA_P Parameter: Plant Line Value: WS
  misc_feature: MA Experiment 20000166 PARAMETER Experiment Name: At_100uM_ABA_P Parameter: Timepoint (hr) Value: 1
  misc_feature: MA Experiment 20000166 PARAMETER Experiment Name: At_100uM_ABA_P Parameter: Tissue Value: Aerial
  misc_feature: MA Experiment 20000166 PARAMETER Experiment Name: At_100uM_ABA_P Parameter: Treatment Value: 100uM ABA vs. No Treatment
  misc_feature: MA Experiment ID: 20000169 Result: Up-regulated in Transcription
  misc_feature: MA Experiment 20000169 PARAMETER Experiment Name: At_100uM_ABA_P Parameter: Age (day) Value: 14
  misc_feature: MA Experiment 20000169 PARAMETER Experiment Name: At_100uM_ABA_P Parameter: Organism Value: A. thaliana
  misc_feature: MA Experiment 20000169 PARAMETER Experiment Name: At_100uM_ABA_P Parameter: Plant Line Value: WS
  misc_feature: MA Experiment 20000169 PARAMETER Experiment Name: At_100uM_ABA_P Parameter: Timepoint (hr) Value: 6
  misc_feature: MA Experiment 20000169 PARAMETER Experiment Name: At_100uM_ABA_P Parameter: Tissue Value: Aerial
  misc_feature: MA Experiment 20000169 PARAMETER Experiment Name: At_100uM_ABA_P Parameter: Treatment Value: 100uM ABA vs. No Treatment
  misc_feature: MA Experiment ID: 20000182 Result: Up-regulated in Transcription
  misc_feature: MA Experiment 20000182 PARAMETER Experiment Name: At_2mM_SA_P Parameter: Age (day) Value: 14
  misc_feature: MA Experiment 20000182 PARAMETER Experiment Name: At_2mM_SA_P Parameter: Organism Value: A. thaliana
  misc_feature: MA Experiment 20000182 PARAMETER Experiment Name: At_2mM_SA_P Parameter: Plant Line Value: WS
  misc_feature: MA Experiment 20000182 PARAMETER Experiment Name: At_2mM_SA_P Parameter: Timepoint (hr) Value: 6
  misc_feature: MA Experiment 20000182 PARAMETER Experiment Name: At_2mM_SA_P Parameter: Tissue Value: Aerial
  misc_feature: MA Experiment 20000182 PARAMETER Experiment Name: At_2mM_SA_P Parameter: Treatment Value: 2mM SA vs. No Treatment
  misc_feature: MA Experiment ID: 20000224 Result: Up-regulated in Transcription
  misc_feature: MA Experiment ID: 20000234 Result: Down-regulated in Transcription
  misc_feature: MA Experiment 20000234 PARAMETER Experiment Name: At_Siliques_P Parameter: Age (day) Value: 21
  misc_feature: MA Experiment 20000234 PARAMETER Experiment Name: At_Siliques_P Parameter: Organism Value: A. thaliana
  misc_feature: MA Experiment 20000234 PARAMETER Experiment Name: At_Siliques_P Parameter: Plant Line Value: WS
  misc_feature: MA Experiment 20000234 PARAMETER Experiment Name: At_Siliques_P Parameter: Tissue Value: Less Than 5mm Siliques vs. Whole Plant
  misc_feature: MA Experiment ID: 20000264 Result: Down-regulated in Transcription
  misc_feature: MA Experiment 20000264 PARAMETER Experiment Name: At_Open_Flower_P Parameter: Age (day) Value: 21
  misc_feature: MA Experiment 20000264 PARAMETER Experiment Name: At_Open_Flower_P Parameter: Plant Line Value: WS
  misc_feature: MA Experiment 20000264 PARAMETER Experiment Name: At_Open_Flower_P Parameter: Tissue Value: Open Flower vs. Whole Plant
  misc_feature: MA Experiment ID: 20000267 Result: Up-regulated in Transcription
  misc_feature: MA Experiment 20000267 PARAMETER Experiment Name: At_Drought_P Parameter: Age (day) Value: 7
  misc_feature: MA Experiment 20000267 PARAMETER Experiment Name: At_Drought_P Parameter: Organism Value: A. thaliana
  misc_feature: MA Experiment 20000267 PARAMETER Experiment Name: At_Drought_P Parameter: Plant Line Value: WS
  misc_feature: MA Experiment 20000267 PARAMETER Experiment Name: At_Drought_P Parameter: Timepoint (hr) Value: 6
  misc_feature: MA Experiment 20000267 PARAMETER Experiment Name: At_Drought_P Parameter: Tissue Value: Whole Plant
  misc_feature: MA Experiment 20000267 PARAMETER Experiment Name: At_Drought_P Parameter: Treatment Value: Drought vs. No Drought
  misc_feature: MA Experiment ID: 20000268 Result: Up-regulated in Transcription
  misc_feature: MA Experiment 20000268 PARAMETER Experiment Name: At_100mM_NaCl__P Parameter: Age (day) Value: 14
  misc_feature: MA Experiment 20000268 PARAMETER Experiment Name: At_100mM_NaCl__P Parameter: Organism Value: A. thaliana
  misc_feature: MA Experiment 20000268 PARAMETER Experiment Name: At_100mM_NaCl__P Parameter: Plant Line Value: WS
  misc_feature: MA Experiment 20000268 PARAMETER Experiment Name: At_100mM_NaCl__P Parameter: Timepoint (hr) Value: 6
  misc_feature: MA Experiment 20000268 PARAMETER Experiment Name: At_100mM_NaCl__P Parameter: Tissue Value: Whole Plant
  misc_feature: MA Experiment 20000268 PARAMETER Experiment Name: At_100mM_NaCl__P Parameter: Treatment Value: 100mM NaCl vs. No Treatment
  misc_feature: MA Experiment ID: 20000436 Result: Up-regulated in Transcription
  misc_feature: MA Experiment 20000436 PARAMETER Experiment Name: At_Drought_P Parameter: Age (day) Value: 7
  misc_feature: MA Experiment 20000436 PARAMETER Experiment Name: At_Drought_P Parameter: Organism Value: A. thaliana
  misc_feature: MA Experiment 20000436 PARAMETER Experiment Name: At_Drought_P Parameter: Plant Line Value: WS
  misc_feature: MA Experiment 20000436 PARAMETER Experiment Name: At_Drought_P Parameter: Timepoint (hr) Value: 12
  misc_feature: MA Experiment 20000436 PARAMETER Experiment Name: At_Drought_P Parameter: Tissue Value: Whole Plant
  misc_feature: MA Experiment 20000436 PARAMETER Experiment Name: At_Drought_P Parameter: Treatment Value: Drought vs. No Drought
  misc_feature: MA Experiment ID: 20000438 Result: Down-regulated in Transcription
  misc_feature: MA Experiment 20000438 PARAMETER Experiment Name: At_Shoots__P Parameter: Age (day) Value: 14
  misc_feature: MA Experiment 20000438 PARAMETER Experiment Name: At_Shoots__P Parameter: Tissue Value: Shoots vs. Whole Plant
  misc_feature: MA Experiment ID: 20000453 Result: Up-regulated in Transcription
  misc_feature: MA Experiment 20000453 PARAMETER Experiment Name: At_100uM_ABA_P Parameter: Age (day) Value: 15
  misc_feature: MA Experiment 20000453 PARAMETER Experiment Name: At_100uM_ABA_P Parameter: Organism Value: A. thaliana
  misc_feature: MA Experiment 20000453 PARAMETER Experiment Name: At_100uM_ABA_P Parameter: Plant Line Value: WS
  misc_feature: MA Experiment 20000453 PARAMETER Experiment Name: At_100uM_ABA_P Parameter: Timepoint (hr) Value: 24
  misc_feature: MA Experiment 20000453 PARAMETER Experiment Name: At_100uM_ABA_P Parameter: Tissue Value: Aerial
  misc_feature: MA Experiment 20000453 PARAMETER Experiment Name: At_100uM_ABA_P Parameter: Treatment Value: 100uM ABA vs. No Treatment
  misc_feature: MA Experiment ID: 20000455 Result: Up-regulated in Transcription
  misc_feature: MA Experiment 20000455 PARAMETER Experiment Name: At_100uM_ABA_P Parameter: Age (day) Value: 16
  misc_feature: MA Experiment 20000455 PARAMETER Experiment Name: At_100uM_ABA_P Parameter: Organism Value: A. thaliana
  misc_feature: MA Experiment 20000455 PARAMETER Experiment Name: At_100uM_ABA_P Parameter: Plant Line Value: WS
  misc_feature: MA Experiment 20000455 PARAMETER Experiment Name: At_100uM_ABA_P Parameter: Timepoint (hr) Value: 48
  misc_feature: MA Experiment 20000455 PARAMETER Experiment Name: At_100uM_ABA_P Parameter: Tissue Value: Aerial
  misc_feature: MA Experiment 20000455 PARAMETER Experiment Name: At_100uM_ABA_P Parameter: Treatment Value: 100uM ABA vs. No Treatment
  misc_feature: MA Experiment ID: 20000506 Result: Up-regulated in Transcription
  misc_feature: MA Experiment 20000506 PARAMETER Experiment Name: At_Wounding_P Parameter: Organism Value: A. thaliana
  misc_feature: MA Experiment 20000506 PARAMETER Experiment Name: At_Wounding_P Parameter: Plant Line Value: WS
  misc_feature: MA Experiment 20000506 PARAMETER Experiment Name: At_Wounding_P Parameter: Timepoint (hr) Value: 6
  misc_feature: MA Experiment 20000506 PARAMETER Experiment Name: At_Wounding_P Parameter: Tissue Value: Aerial
  misc_feature: MA Experiment 20000506 PARAMETER Experiment Name: At_Wounding_P Parameter: Treatment Value: Wounding vs. No Wounding
  misc_feature: MA Experiment ID: 20000527 Result: Down-regulated in Transcription
  misc_feature: MA Experiment 20000527 PARAMETER Experiment Name: At_10percent_PEG_P Parameter: Age (day) Value: 20
  misc_feature: MA Experiment 20000527 PARAMETER Experiment Name: At_10percent_PEG_P Parameter: Organism Value: A. thaliana
  misc_feature: MA Experiment 20000527 PARAMETER Experiment Name: At_10percent_PEG_P Parameter: Plant Line Value: WS
  misc_feature: MA Experiment 20000527 PARAMETER Experiment Name: At_10percent_PEG_P Parameter: Timepoint (day) Value: 20
  misc_feature: MA Experiment 20000527 PARAMETER Experiment Name: At_10percent_PEG_P Parameter: Tissue Value: Whole Plant
  misc_feature: MA Experiment 20000527 PARAMETER Experiment Name: At_10percent_PEG_P Parameter: Treatment Value: 10percent PEG vs. No Treatment
  misc_feature: MA Experiment ID: 20001554 Result: Up-regulated in Transcription
  misc_feature: MA Experiment 20001554 PARAMETER Experiment Name: At_Drought_Soil_Dry_P Parameter: Age (day) Value: 21
  misc_feature: MA Experiment 20001554 PARAMETER Experiment Name: At_Drought_Soil_Dry_P Parameter: Organism Value: A. thaliana
  misc_feature: MA Experiment 20001554 PARAMETER Experiment Name: At_Drought_Soil_Dry_P Parameter: Plant Line Value: WS
  misc_feature: MA Experiment 20001554 PARAMETER Experiment Name: At_Drought_Soil_Dry_P Parameter: Post Timepoint (hr) Value: None
  misc_feature: MA Experiment 20001554 PARAMETER Experiment Name: At_Drought_Soil_Dry_P Parameter: Post-Treatment Value: None
  misc_feature: MA Experiment 20001554 PARAMETER Experiment Name: At_Drought_Soil_Dry_P Parameter: Timepoint (day) Value: 7
  misc_feature: MA Experiment 20001554 PARAMETER Experiment Name: At_Drought_Soil_Dry_P Parameter: Treatment Value: Drought vs. No Drought
  misc_feature: MA Experiment ID: 20001555 Result: Up-regulated in Transcription
  misc_feature: MA Experiment 20001555 PARAMETER Experiment Name: At_Drought_Soil_Dry_P Parameter: Age (day) Value: 24
  misc_feature: MA Experiment 20001555 PARAMETER Experiment Name: At_Drought_Soil_Dry_P Parameter: Organism Value: A. thaliana
  misc_feature: MA Experiment 20001555 PARAMETER Experiment Name: At_Drought_Soil_Dry_P Parameter: Plant Line Value: WS
  misc_feature: MA Experiment 20001555 PARAMETER Experiment Name: At_Drought_Soil_Dry_P Parameter: Post Timepoint (hr) Value: None
  misc_feature: MA Experiment 20001555 PARAMETER Experiment Name: At_Drought_Soil_Dry_P Parameter: Post-Treatment Value: None
  misc_feature: MA Experiment 20001555 PARAMETER Experiment Name: At_Drought_Soil_Dry_P Parameter: Timepoint (day) Value: 10
  misc_feature: MA Experiment 20001555 PARAMETER Experiment Name: At_Drought_Soil_Dry_P Parameter: Treatment Value: Drought vs. No Drought
  misc_feature: MA Experiment ID: 20001757 Result: Down-regulated in Transcription
  misc_feature: MA Experiment 20001757 PARAMETER Experiment Name: At_50mM_NH4NO3_L-to-H_P Parameter: Timepoint (hr) Value: 6
  misc_feature: MA Experiment 20001757 PARAMETER Experiment Name: At_50mM_NH4NO3_L-to-H_P Parameter: Tissue Value: Leaf
  misc_feature: MA Experiment 20001757 PARAMETER Experiment Name: At_50mM_NH4NO3_L-to-H_P Parameter: Treatment Value: 50mM NH4NO3 vs 100mM Mannitol
  misc_feature: MA Experiment ID: 20001904 Result: Up-regulated in Transcription
  misc_feature: MA Experiment 20001904 PARAMETER Experiment Name: At_Drought_Reproduction_P Parameter: Age (day) Value: 37
  misc_feature: MA Experiment 20001904 PARAMETER Experiment Name: At_Drought_Reproduction_P Parameter: Organism Value: A. thaliana
  misc_feature: MA Experiment 20001904 PARAMETER Experiment Name: At_Drought_Reproduction_P Parameter: Plant Line Value: WS
  misc_feature: MA Experiment 20001904 PARAMETER Experiment Name: At_Drought_Reproduction_P Parameter: Timepoint (day) Value: 7
  misc_feature: MA Experiment 20001904 PARAMETER Experiment Name: At_Drought_Reproduction_P Parameter: Tissue Value: Rosettes
  misc_feature: MA Experiment 20001904 PARAMETER Experiment Name: At_Drought_Reproduction_P Parameter: Treatment Value: Drought vs. No Drought
  misc_feature: MA Experiment ID: 20001911 Result: Up-regulated in Transcription
  misc_feature: MA Experiment 20001911 PARAMETER Experiment Name: At_Drought_Reproduction_P Parameter: Age (day) Value: 40
  misc_feature: MA Experiment 20001911 PARAMETER Experiment Name: At_Drought_Reproduction_P Parameter: Organism Value: A. thaliana
  misc_feature: MA Experiment 20001911 PARAMETER Experiment Name: At_Drought_Reproduction_P Parameter: Plant Line Value: WS
  misc_feature: MA Experiment 20001911 PARAMETER Experiment Name: At_Drought_Reproduction_P Parameter: Timepoint (day) Value: 10
  misc_feature: MA Experiment 20001911 PARAMETER Experiment Name: At_Drought_Reproduction_P Parameter: Tissue Value: Flowers
  misc_feature: MA Experiment 20001911 PARAMETER Experiment Name: At_Drought_Reproduction_P Parameter: Treatment Value: Drought vs. No Drought
aaaagcgtgaaagcagcagatcaagataagaaagaagaaagaatcatcaaaaaatgggaataatggaggcagagaggaaaacaacaggctgggctgccagagacccatctgggatcctctctccttacacttacactcttagagagactggaccagaggatgtgaacataagaatcatttgctgtggaatctgccacaccgatcttcatcaaactaaaaatgatcttggcatgtctaattaccccatggttcctgggcatgaagtggtaggggaagtagtggaggtgggatcagatgtgagcaagttcaccgtaggggacatagttggagttggttgcctcgttggatgttgcggaggttgtagcccctgcgagagagatctggaacagtattgtccaaagaagatttggagctacaatgatgtttacatcaatggtcaacctacacaaggcggcttcgctaaagccaccgtcgttcaccaaaagtttgtggtcaagattccagaaggaatggcggttgagcaggctgcgccgctactgtgcgctggtgtgactgtgtacagtccactgagccactttggtctgaaacaaccaggcctaagaggaggtatactagggttaggtggagtcggtcacatgggtgtgaaaatagccaaagcaatgggtcaccatgtgactgtcataagctcatcaaacaagaagagagaagaggcattgcaagatcttggagctgatgattacgtgatcggatccgaccaagcgaagatgagcgaattggctgattcgttggattacgtaattgacacggtgcctgttcatcatgcacttgagccatatttgtctctgcttaagcttgatggtaaactcattctcatgggagttatcaacaatccattacagtttctcactcctctgcttatgcttgggaggaaagtgataacggggagcttcatagggagcatgaaggagacagaggagatgcttgagttctgtaaagaaaagggtttgagttcgattatcgaagttgtgaagatggattatgttaacactgcgtttgagagactcgagaagaacgatgtgcgttataggttcgtcgttgatgtcgaaggaagcaatctcgacgcttgatatcatgaaactcgaggctttttatacatactcgaatactcgatttaaacactcttatgtttgtttgtgagctttttcattcgtgtgtcactatttttcatgagaaagtggtaaaagatataatgatattggatttctaatcatgaatcatatgatatatgtgtt

SEQ ID NO: 28302 - protein, 357 aa, Arabidopsis thaliana; identical to SEQ ID NO: 23719
  peptide (1)..(357): Ceres Seq. ID no. 12715030
  misc_feature (1)..(356): Homolog of NCBI NO: 231676 NR Description: Cinnamyl-alcohol dehydrogenase (CAD)
  misc_feature (1)..(355): Homolog of NCBI NO: 629510 NR Description: cinnamyl-alcohol dehydrogenase (EC 1.1.1.195) CAD
  misc_feature (1)..(355): Homolog of NCBI NO: 7239226 NR Description: cinnamyl alcohol dehydrogenase; CAD [Populus
  misc_feature (1)..(355): Homolog of NCBI NO: 9998899 NR Description: cinnamyl alcohol dehydrogenase
  misc_feature (1)..(355): Homolog of NCBI NO: 1168734 NR Description: Cinnamyl-alcohol dehydrogenase (CAD)
  misc_feature (1)..(355): Homolog of NCBI NO: 21593794 NR Description: cinnamyl alcohol dehydrogenase [Arabidopsis
  misc_feature (1)..(355): Homolog of NCBI NO: 15230382 NR Description: cinnamyl alcohol dehydrogenase
  misc_feature (1)..(356): Homolog of NCBI NO: 1168727 NR Description: Cinnamyl-alcohol dehydrogenase 1 (CAD)
  misc_feature (1)..(356): Homolog of NCBI NO: 231675 NR Description: Cinnamyl-alcohol dehydrogenase (CAD)
  misc_feature (1)..(357): Homolog of NCBI NO: 15235295 NR Description: cinnamyl alcohol dehydrogenase - like protein

SEQ ID NO: 28303 - protein, 354 aa, Arabidopsis thaliana; identical to SEQ ID NO: 23720
  peptide (1)..(354): Ceres Seq. ID no. 12715031
  misc_feature (1)..(353): Homolog of NCBI NO: 231676 NR Description: Cinnamyl-alcohol dehydrogenase (CAD)
  misc_feature (1)..(352): Homolog of NCBI NO: 629510 NR Description: cinnamyl-alcohol dehydrogenase (EC 1.1.1.195) CAD
  misc_feature (1)..(352): Homolog of NCBI NO: 7239226 NR Description: cinnamyl alcohol dehydrogenase; CAD [Populus
  misc_feature (1)..(352): Homolog of NCBI NO: 9998899 NR Description: cinnamyl alcohol dehydrogenase
  misc_feature (1)..(352): Homolog of NCBI NO: 1168734 NR Description: Cinnamyl-alcohol dehydrogenase (CAD)
  misc_feature (1)..(352): Homolog of NCBI NO: 21593794 NR Description: cinnamyl alcohol dehydrogenase [Arabidopsis
  misc_feature (1)..(352): Homolog of NCBI NO: 15230382 NR Description: cinnamyl alcohol dehydrogenase
  misc_feature (1)..(353): Homolog of NCBI NO: 1168727 NR Description: Cinnamyl-alcohol dehydrogenase 1 (CAD)
  misc_feature (1)..(353): Homolog of NCBI NO: 231675 NR Description: Cinnamyl-alcohol dehydrogenase (CAD)
  misc_feature (1)..(354): Homolog of NCBI NO: 15235295 NR Description: cinnamyl alcohol dehydrogenase - like protein

SEQ ID NO: 28304 - protein, 298 aa, Arabidopsis thaliana; identical to SEQ ID NO: 23721
  peptide (1)..(298): Ceres Seq. ID no. 12715032
  misc_feature (1)..(297): Homolog of NCBI NO: 231676 NR Description: Cinnamyl-alcohol dehydrogenase (CAD)
  misc_feature (1)..(296): Homolog of NCBI NO: 629510 NR Description: cinnamyl-alcohol dehydrogenase (EC 1.1.1.195) CAD
  misc_feature (1)..(296): Homolog of NCBI NO: 7239226 NR Description: cinnamyl alcohol dehydrogenase; CAD [Populus
  misc_feature (1)..(296): Homolog of NCBI NO: 9998899 NR Description: cinnamyl alcohol dehydrogenase
  misc_feature (1)..(296): Homolog of NCBI NO: 1168734 NR Description: Cinnamyl-alcohol dehydrogenase (CAD)
  misc_feature (1)..(296): Homolog of NCBI NO: 21593794 NR Description: cinnamyl alcohol dehydrogenase [Arabidopsis
  misc_feature (1)..(296): Homolog of NCBI NO: 15230382 NR Description: cinnamyl alcohol dehydrogenase
  misc_feature (1)..(297): Homolog of NCBI NO: 1168727 NR Description: Cinnamyl-alcohol dehydrogenase 1 (CAD)
  misc_feature (1)..(297): Homolog of NCBI NO: 231675 NR Description: Cinnamyl-alcohol dehydrogenase (CAD)
  misc_feature (1)..(298): Homolog of NCBI NO: 15235295 NR Description: cinnamyl alcohol dehydrogenase - like protein

SEQ ID NO: 28305 - DNA, 2508 bp, Arabidopsis thaliana
  misc_feature (1)..(2508): Ceres Seq. ID no. 12482871
  misc_feature: MA Experiment ID: 108433 Result: Down-regulated in Transcription
  misc_feature: MA Experiment 108433 PARAMETER Experiment Name: At_rhl_Mutant2_cDNA_P Parameter: Age (day) Value: 7
  misc_feature: MA Experiment 108433 PARAMETER Experiment Name: At_rhl_Mutant2_cDNA_P Parameter: Organism Value: A. thaliana
  misc_feature: MA Experiment 108433 PARAMETER Experiment Name: At_rhl_Mutant2_cDNA_P Parameter: Plant Line Value: rhl Mutant vs. wt landsburg
  misc_feature: MA Experiment 108433 PARAMETER Experiment Name: At_rhl_Mutant2_cDNA_P Parameter: Tissue Value: Roots
  misc_feature: MA Experiment ID: 108434 Result: Down-regulated in Transcription
  misc_feature: MA Experiment 108434 PARAMETER Experiment Name: At_Root_Tips_cDNA_P Parameter: Tissue Value: Root Tips
  misc_feature: MA Experiment ID: 108488 Result: Down-regulated in Transcription
  misc_feature: MA Experiment ID: 108573 Result: Up-regulated in Transcription
  misc_feature: MA Experiment 108573 PARAMETER Experiment Name: At_Drought_cDNA_P Parameter: Timepoint (hr) Value: 6
  misc_feature: MA Experiment 108573 PARAMETER Experiment Name: At_Drought_cDNA_P Parameter: Tissue Value: Aerial
  misc_feature: MA Experiment 108573 PARAMETER Experiment Name: At_Drought_cDNA_P Parameter: Treatment Value: Drought vs. No Drought
  misc_feature: MA Experiment ID: 108577 Result: Down-regulated in Transcription
  misc_feature: MA Experiment 108577 PARAMETER Experiment Name: At_42deg_Heat_cDNA_P Parameter: Temperature (deg C) Value: 42 vs. 22
  misc_feature: MA Experiment 108577 PARAMETER Experiment Name: At_42deg_Heat_cDNA_P Parameter: Timepoint (hr) Value: 6
  misc_feature: MA Experiment 108577 PARAMETER Experiment Name: At_42deg_Heat_cDNA_P Parameter: Tissue Value: Aerial
  misc_feature: MA Experiment ID: 108585 Result: Up-regulated in Transcription
  misc_feature: MA Experiment 108585 PARAMETER Experiment Name: At_5mM_NaNP_cDNA_P Parameter: Timepoint (hr) Value: 6
  misc_feature: MA Experiment 108585 PARAMETER Experiment Name: At_5mM_NaNP_cDNA_P Parameter: Tissue Value: Aerial
  misc_feature: MA Experiment 108585 PARAMETER Experiment Name: At_5mM_NaNP_cDNA_P Parameter: Treatment Value: null
  misc_feature: MA Experiment ID: 108594 Result: Up-regulated in Transcription
  misc_feature: MA Experiment 108594 PARAMETER Experiment Name: At_Ler-rhl_Root_cDNA_P Parameter: Plant Line Value: null
  misc_feature: MA Experiment ID: 108595 Result: Up-regulated in Transcription
  misc_feature: MA Experiment 108595 PARAMETER Experiment Name: At_Ler-pi_Ovule_cDNA_P Parameter: Plant Line Value: null
  misc_feature: MA Experiment ID: 20000030 Result: Down-regulated in Transcription
  misc_feature: MA Experiment 20000030 PARAMETER Experiment Name: At_CS6630_Roots_cDNA_P Parameter: Plant Line Value: CS6630 vs. WS
  misc_feature: MA Experiment 20000030 PARAMETER Experiment Name: At_CS6630_Roots_cDNA_P Parameter: Tissue Value: Roots
  misc_feature: MA Experiment ID: 20000068 Result: Down-regulated in Transcription
  misc_feature: MA Experiment ID: 20000071 Result: Up-regulated in Transcription
  misc_feature: MA Experiment 20000071 PARAMETER Experiment Name: At_100uM_ABA_Mutants_cDNA_P Parameter: Plant Line Value: CS8104
  misc_feature: MA Experiment 20000071 PARAMETER Experiment Name: At_100uM_ABA_Mutants_cDNA_P Parameter: Timepoint (hr) Value: 6
  misc_feature: MA Experiment 20000071 PARAMETER Experiment Name: At_100uM_ABA_Mutants_cDNA_P Parameter: Tissue Value: Aerial
  misc_feature: MA Experiment 20000071 PARAMETER Experiment Name: At_100uM_ABA_Mutants_cDNA_P Parameter: Treatment Value: 100uM ABA vs. No Treatment
  misc_feature: MA Experiment ID: 20000087 Result: Up-regulated in Transcription
  misc_feature: MA Experiment 20000087 PARAMETER Experiment Name: At_100uM_ABA_Mutants_cDNA_P Parameter: Plant Line Value: WS
  misc_feature: MA Experiment 20000087 PARAMETER Experiment Name: At_100uM_ABA_Mutants_cDNA_P Parameter: Timepoint (hr) Value: 6
  misc_feature: MA Experiment 20000087 PARAMETER Experiment Name: At_100uM_ABA_Mutants_cDNA_P Parameter: Tissue Value: Aerial
  misc_feature: MA Experiment 20000087 PARAMETER Experiment Name: At_100uM_ABA_Mutants_cDNA_P Parameter: Treatment Value: 100uM ABA vs. No Treatment
  misc_feature: MA Experiment ID: 20000113 Result: Down-regulated in Transcription
  misc_feature: MA Experiment 20000113 PARAMETER Experiment Name: At_42deg_Heat_cDNA_P Parameter: Temperature (deg C) Value: 42 vs. 22
  misc_feature: MA Experiment 20000113 PARAMETER Experiment Name: At_42deg_Heat_cDNA_P Parameter: Timepoint (hr) Value: 8
  misc_feature: MA Experiment 20000113 PARAMETER Experiment Name: At_42deg_Heat_cDNA_P Parameter: Tissue Value: Aerial
  misc_feature: MA Experiment ID: 20000185 Result: Up-regulated in Transcription
  misc_feature: MA Experiment 20000185 PARAMETER Experiment Name: At_Roots__P Parameter: Age (day) Value: 7 vs. 21
  misc_feature: MA Experiment 20000185 PARAMETER Experiment Name: At_Roots__P Parameter: Organism Value: A. thaliana
  misc_feature: MA Experiment 20000185 PARAMETER Experiment Name: At_Roots__P Parameter: Tissue Value: Roots vs. Whole Plant
  misc_feature: MA Experiment ID: 20000227 Result: Down-regulated in Transcription
  misc_feature: MA Experiment 20000227 PARAMETER Experiment Name: At_Root-Tips-vs-Tops_P Parameter: Tissue Value: Root Tips vs. Root Tops
  misc_feature: MA Experiment ID: 20000264 Result: Up-regulated in Transcription
  misc_feature: MA Experiment 20000264 PARAMETER Experiment Name: At_Open_Flower_P Parameter: Age (day) Value: 21
  misc_feature: MA Experiment 20000264 PARAMETER Experiment Name: At_Open_Flower_P Parameter: Plant Line Value: WS
  misc_feature: MA Experiment 20000264 PARAMETER Experiment Name: At_Open_Flower_P Parameter: Tissue Value: Open Flower vs. Whole Plant
  misc_feature: MA Experiment ID: 20000495 Result: Down-regulated in Transcription
  misc_feature: MA Experiment 20000495 PARAMETER Experiment Name: At_Guard_Cells_P Parameter: Harvest Date Value: 8/2/2002
  misc_feature: MA Experiment 20000495 PARAMETER Experiment Name: At_Guard_Cells_P Parameter: Organism Value: A. thaliana
  misc_feature: MA Experiment 20000495 PARAMETER Experiment Name: At_Guard_Cells_P Parameter: Tissue Value: Guard Cells vs. Leaves
  misc_feature: MA Experiment ID: 20000794 Result: Up-regulated in Transcription
  misc_feature: MA Experiment 20000794 PARAMETER Experiment Name: At_Petals_P Parameter: Age (day) Value: 23-25 days
  misc_feature: MA Experiment 20000794 PARAMETER Experiment Name: At_Petals_P Parameter: Plant Line Value: WS
  misc_feature: MA Experiment 20000794 PARAMETER Experiment Name: At_Petals_P Parameter: Tissue Value: Petals vs. Whole plant
  misc_feature: MA Experiment ID: 20001451 Result: Up-regulated in Transcription
  misc_feature: MA Experiment 20001451 PARAMETER Experiment Name: At_Far-red-induction_P Parameter: Age (day) Value: 7
  misc_feature: MA Experiment 20001451 PARAMETER Experiment Name: At_Far-red-induction_P Parameter: Light Value: Far-red vs. White
  misc_feature: MA Experiment 20001451 PARAMETER Experiment Name: At_Far-red-induction_P Parameter: Organism Value: A. thaliana
  misc_feature: MA Experiment 20001451 PARAMETER Experiment Name: At_Far-red-induction_P Parameter: Plant Line Value: Columbia
  misc_feature: MA Experiment 20001451 PARAMETER Experiment Name: At_Far-red-induction_P Parameter: Timepoint (hr) Value: 24
  misc_feature: MA Experiment 20001451 PARAMETER Experiment Name: At_Far-red-induction_P Parameter: Tissue Value: Whole Plant
  misc_feature: MA Experiment ID: 20001903 Result: Up-regulated in Transcription
  misc_feature: MA Experiment 20001903 PARAMETER Experiment Name: At_Drought_Reproduction_P Parameter: Age (day) Value: 35
  misc_feature: MA Experiment 20001903 PARAMETER Experiment Name: At_Drought_Reproduction_P Parameter: Organism Value: A. thaliana
  misc_feature: MA Experiment 20001903 PARAMETER Experiment Name: At_Drought_Reproduction_P Parameter: Plant Line Value: WS
  misc_feature: MA Experiment 20001903 PARAMETER Experiment Name: At_Drought_Reproduction_P Parameter: Timepoint (day) Value: 5
  misc_feature: MA Experiment 20001903 PARAMETER Experiment Name: At_Drought_Reproduction_P Parameter: Tissue Value: Rosettes
  misc_feature: MA Experiment 20001903 PARAMETER Experiment Name: At_Drought_Reproduction_P Parameter: Treatment Value: Drought vs. No Drought
  misc_feature: MA Experiment ID: 20001905 Result: Up-regulated in Transcription
  misc_feature: MA Experiment 20001905 PARAMETER Experiment Name: At_Drought_Reproduction_P Parameter: Age (day) Value: 40
  misc_feature: MA Experiment 20001905 PARAMETER Experiment Name: At_Drought_Reproduction_P Parameter: Organism Value: A. thaliana
  misc_feature: MA Experiment 20001905 PARAMETER Experiment Name: At_Drought_Reproduction_P Parameter: Plant Line Value: WS
  misc_feature: MA Experiment 20001905 PARAMETER Experiment Name: At_Drought_Reproduction_P Parameter: Timepoint (day) Value: 10
  misc_feature: MA Experiment 20001905 PARAMETER Experiment Name: At_Drought_Reproduction_P Parameter: Tissue Value: Rosettes
  misc_feature: MA Experiment 20001905 PARAMETER Experiment Name: At_Drought_Reproduction_P Parameter: Treatment Value: Drought vs. No Drought
acgagagaaccgcacattgaaaagggaaggaagagagatatttggcagagagagaaaacgttggaggaaggattgatatttgttggactttggatcgaaaaattgaaaggtaaaagaggtagagaagctctggattccgtctcttcccgtcgtcggcgacggtggttttgcccgttggctctgaggttatatcaggctttaatttaagtggattgtcatcttctgagatatggaacaagtttttgtctggccaagctgctaccactatcggcttttctcattccaagaagcgctcgattggcggtttcttgtacgttctgatttccttgtgggctctttcgttaactgcacttagtggtcaaaccctcttctatgatctttaggggaaggtgtgaggcaaatttctgagacagggctgaagtctgcaaattcttccttcgcatagtcctagagaaacctctttgttcctctctttcatatcttgttcttatgggtgctggttgaagaaagatacatcaatttcttttctttttcagtttacaaatgtcgtttccttgagtctgaacccctgagtgagatgttgtgagcatagggtccttcctattagccaaaacagtctttcttgttggttccttcgcgtctttgagttctcagtatgtgttttcctcttctcttgctctctttcttttgcctaaatggtcaacccgtttatgttcgaagtaaataacggtcagtctacccagctggagaatcattgattttactgccttggtgtcaagtacttcctacgaacgactggaagattaatgctatataaatctttcagaagttctttacttacataatataaagaggctactttgcttaaccagaaaaaaaaagatggacaggtacaagttaattaaagaggttggtgatggaacttttggtagtgtttggcgagctataaataagcagacgggtgaagtcgttgcaattaagaaaatgaaaaagaagtactactcttgggatgaatgtattaatctgagagaagttaagtcgctcaggagaatgaatcatccaaacattgtgaagttgaaggaagtaatccgggaaaatgatatcctatactttgtctttgagtacatggagtgcaatctttaccaacttatgaaggatcgacaaaagctttttgcagaagctgatatcaaaaattggtgctttcaagtcttccaaggcctttcttacatgcatcagcgtggttacttccaccgcgatcttaagccagaaaatctgttagtctctaaagacatcattaagattgctgattttggcctggcacgtgaggttaattcgagtccaccttttaccgagtatgtttctacacgctggtacagggctcctgaagtacttctacagtcatatgtatacacatcgaaagttgatatgtgggcgatgggagctattatggctgagttgttgtctcttcgccccatttttcctggggctagtgaagcagatgaaatctacaaaatctgcagtgtcataggcaccccaactgaggagacctggttggagggacttaatcttgcaaacacaataaactatcaattccctcagcttcctggtgtacctctttctagcttgatgccatctgctagtgaagacgcaattaatcttattgagcgactttgctcgtgggatccatccagcagaccgactgctgcagaggtgctgcagcacccgttcttccagagttgcttttatgtcccaccatctcttcgtcccaagccttctgttgcaagaactcctccgcctgtcgggcctaggggatcattcgagcaccaatcagttaaacggtacccagtgtctcttgccaatgctaagccattcaatagctatgtttccccaaagtcaaatgccgcttttggcagtggtgtccagcggaaacttgatatggttaatcaagatgggacgagaaacactaaacccgtgagaagttctgtcagagactccaaatacagaccacccggaaaaaagagtcctccagcagcatcgttgaacaagaaccgggtcactcgtagtagtgtatccgagactgctgataaactcgcaaacatgaccattggagcaactggatctcgaagacactctgtgtctgtggttggacagcatcaacagctgaaaccacctccgatgaaggcaggttgggtaggagaaacacgtgacatgttccttagaccaacacaacccaccaccaatgcctactctaggaaagtcgccggatgacccctaaaccaatagtaactcaagcatgcctcttctgagcaaatattttactttataaactctctaataatcttatacatcatcagaaaaaacaagtctccttttttctttttttttcgacggcgcgtctttgcctcgtcaatggttctgcttttgttttcttttcttaatttctgtattgttaaggtttgttttttgcgtgtgtgacaatttggtttgcaataaagatcgacttgggtc

SEQ ID NO: 28306 - protein, 461 aa, Arabidopsis thaliana
  peptide (1)..(461): Ceres Seq. ID no. 12482872
  misc_feature (4)..(283): Pfam Name: Protein kinase domain Pfam Description: Protein kinase domain
  misc_feature (1)..(293): Homolog of NCBI NO: 34897492 NR Description: putative protein kinase [Oryza sativa (japonica
  misc_feature (263)..(410): Homolog of NCBI NO: 34897960 NR Description: serine/threonine-protein kinase Mak (male germ
  misc_feature (4)..(239): Homolog of NCBI NO: 34897960 NR Description: serine/threonine-protein kinase Mak (male germ
  misc_feature (1)..(414): Homolog of NCBI NO: 27948450 NR Description: GAMYB-binding protein [Hordeum vulgare subsp.
  misc_feature (1)..(284): Homolog of NCBI NO: 7488272 NR Description: protein kinase homolog T18B16.80 - Arabidopsis
  misc_feature (1)..(461): Homolog of NCBI NO: 9758733 NR Description: serine/threonine-protein kinase Mak (male germ
  misc_feature (1)..(461): Homolog of NCBI NO: 18422554 NR Description: serine/threonine-protein kinase Mak (male germ
  misc_feature (1)..(461): Homolog of NCBI NO: 15450860 NR Description: serine/threonine-protein kinase Mak (male germ
  misc_feature (1)..(461): Homolog of NCBI NO: 30684655 NR Description: protein kinase, putative [Arabidopsis thaliana]
  misc_feature (1)..(461): Homolog of NCBI NO: 18415242 NR Description: kinase-like protein
MDRYKLIKEVGDGTFGSVWRAINKQTGEVVAIKKMKKKYYSWDECINLREVKSLRRMNHPNIVKLKEVIRENDILYFVFEYMECNLYQLMKDRQKLFAEADIKNWCFQVFQGLSYMHQRGYFHRDLKPENLLVSKDIIKIADFGLAREVNSSPPFTEYVSTRWYRAPEVLLQSYVYTSKVDMWAMGAIMAELLSLRPIFPGASEADEIYKICSVIGTPTEETWLEGLNLANTINYQFPQLPGVPLSSLMPSASEDAINLIERLCSWDPSSRPTAAEVLQHPFFQSCFYVPPSLRPKPSVARTPPPVGPRGSFEHQSVKRYPVSLANAKPFNSYVSPKSNAAFGSGVQRKLDMVNQDGTRNTKPVRSSVRDSKYRPPGKKSPPAASLNKNRVTRSSVSETADKLANMTIGATGSRRHSVSVVGQHQQLKPPPMKAGWVGETRDMFLRPTQPTTNAYSRKVAG

SEQ ID NO: 28307 - protein, 427 aa, Arabidopsis thaliana
  peptide (1)..(427): Ceres Seq. ID no. 12482873
  misc_feature (1)..(249): Pfam Name: Protein kinase domain Pfam Description: Protein kinase domain
  misc_feature (1)..(259): Homolog of NCBI NO: 34897492 NR Description: putative protein kinase [Oryza sativa (japonica
  misc_feature (229)..(376): Homolog of NCBI NO: 34897960 NR Description: serine/threonine-protein kinase Mak (male germ
  misc_feature (1)..(205): Homolog of NCBI NO: 34897960 NR Description: serine/threonine-protein kinase Mak (male germ
  misc_feature (1)..(380): Homolog of NCBI NO: 27948450 NR Description: GAMYB-binding protein [Hordeum vulgare subsp.
  misc_feature (1)..(250): Homolog of NCBI NO: 7488272 NR Description: protein kinase homolog T18B16.80 - Arabidopsis
  misc_feature (1)..(427): Homolog of NCBI NO: 9758733 NR Description: serine/threonine-protein kinase Mak (male germ
  misc_feature (1)..(427): Homolog of NCBI NO: 18422554 NR Description: serine/threonine-protein kinase Mak (male germ
  misc_feature (1)..(427): Homolog of NCBI NO: 15450860 NR Description: serine/threonine-protein kinase Mak (male germ
  misc_feature (1)..(427): Homolog of NCBI NO: 30684655 NR Description: protein kinase, putative [Arabidopsis thaliana]
  misc_feature (1)..(427): Homolog of NCBI NO: 18415242 NR Description: kinase-like protein
MKKKYYSWDECINLREVKSLRRMNHPNIVKLKEVIRENDILYFVFEYMECNLYQLMKDRQKLFAEADIKNWCFQVFQGLSYMHQRGYFHRDLKPENLLVSKDIIKIADFGLAREVNSSPPFTEYVSTRWYRAPEVLLQSYVYTSKVDMWAMGAIMAELLSLRPIFPGASEADEIYKICSVIGTPTEETWLEGLNLANTINYQFPQLPGVPLSSLMPSASEDAINLIERLCSWDPSSRPTAAEVLQHPFFQSCFYVPPSLRPKPSVARTPPPVGPRGSFEHQSVKRYPVSLANAKPFNSYVSPKSNAAFGSGVQRKLDMVNQDGTRNTKPVRSSVRDSKYRPPGKKSPPAASLNKNRVTRSSVSETADKLANMTIGATGSRRHSVSVVGQHQQLKPPPMKAGWVGETRDMFLRPTQPTTNAYSRKVAG

SEQ ID NO: 28308 - protein, 405 aa, Arabidopsis thaliana
  peptide (1)..(405): Ceres Seq. ID no. 12482874
  misc_feature (1)..(227): Pfam Name: Protein kinase domain Pfam Description: Protein kinase domain
  misc_feature (1)..(237): Homolog of NCBI NO: 34897492 NR Description: putative protein kinase [Oryza sativa (japonica
  misc_feature (207)..(354): Homolog of NCBI NO: 34897960 NR Description: serine/threonine-protein kinase Mak (male germ
  misc_feature (1)..(183): Homolog of NCBI NO: 34897960 NR Description: serine/threonine-protein kinase Mak (male germ
  misc_feature (1)..(358): Homolog of NCBI NO: 27948450 NR Description: GAMYB-binding protein [Hordeum vulgare subsp.
  misc_feature (1)..(228): Homolog of NCBI NO: 7488272 NR Description: protein kinase homolog T18B16.80 - Arabidopsis
  misc_feature (1)..(405): Homolog of NCBI NO: 9758733 NR Description: serine/threonine-protein kinase Mak (male germ
  misc_feature (1)..(405): Homolog of NCBI NO: 18422554 NR Description: serine/threonine-protein kinase Mak (male germ
  misc_feature (1)..(405): Homolog of NCBI NO: 15450860 NR Description: serine/threonine-protein kinase Mak (male germ
  misc_feature (1)..(405): Homolog of NCBI NO: 30684655 NR Description: protein kinase, putative [Arabidopsis thaliana]
  misc_feature (1)..(405): Homolog of NCBI NO: 18415242 NR Description: kinase-like protein
MNHPNIVKLKEVIRENDILYFVFEYMECNLYQLMKDRQKLFAEADIKNWCFQVFQGLSYMHQRGYFHRDLKPENLLVSKDIIKIADFGLAREVNSSPPFTEYVSTRWYRAPEVLLQSYVYTSKVDMWAMGAIMAELLSLRPIFPGASEADEIYKICSVIGTPTEETWLEGLNLANTINYQFPQLPGVPLSSLMPSASEDAINLIERLCSWDPSSRPTAAEVLQHPFFQSCFYVPPSLRPKPSVARTPPPVGPRGSFEHQSVKRYPVSLANAKPFNSYVSPKSNAAFGSGVQRKLDMVNQDGTRNTKPVRSSVRDSKYRPPGKKSPPAASLNKNRVTRSSVSETADKLANMTIGATGSRRHSVSVVGQHQQLKPPPMKAGWVGETRDMFLRPTQPTTNAYSRKVAG

SEQ ID NO: 28309 - DNA, 512 bp, Arabidopsis thaliana
  misc_feature (1)..(512): Ceres Seq. ID no. 12603514
  misc_feature: MA Experiment ID: 20000307 Result: Up-regulated in Transcription
  misc_feature: MA Experiment 20000307 PARAMETER Experiment Name: At_Germinating_Seeds_Sub_P Parameter: Age (hr) Value: 24 vs. 0
  misc_feature: MA Experiment 20000307 PARAMETER Experiment Name: At_Germinating_Seeds_Sub_P Parameter: Organism Value: A. thaliana
  misc_feature: MA Experiment 20000307 PARAMETER Experiment Name: At_Germinating_Seeds_Sub_P Parameter: Plant Line Value: WS
  misc_feature: MA Experiment 20000307 PARAMETER Experiment Name: At_Germinating_Seeds_Sub_P Parameter: Tissue Value: Germinating Seeds
aaagttggcgatttgcaaacttcattttcaatcgactgcgtctcctctttcttctcctacccaaccaaagtttctcatcattcatttcagatcagccatggaggacgagattgaactgaaaactgctcctgctgattttcggtttccaacaacaaaccaaacgaggcactgcttcacccgttacattgagttccacaggtgcacaactgcaaaaggtgaggatgcaaatgaatgcgagaggttcgccaagtactaccgcgctctctgccctggggaatgggttgacaagtggaatgagcagagggagactggaacattccctggccctctttgattcacacaagaatctctctttttcattttaagtttgagaccaaaaaaggtcgtgtggatgatcatgaaatctataactcttgtctttcattaatcgtttttccttggatgatcaattaaataaattggaacaagacattctttggattcatcatgtcagaattttatttgtcgagaca

SEQ ID NO: 28310 - protein, 110 aa, Arabidopsis thaliana
  peptide (1)..(110): Ceres Seq. ID no. 12603515
  misc_feature (35)..(109): Pfam Name: Cytochrome oxidase c subunit VIb Pfam Description: Cytochrome oxidase c subunit VIb
  misc_feature (38)..(108): Homolog of NCBI NO: 38048151 NR Description: similar to Drosophila melanogaster CG14235
  misc_feature (36)..(110): Homolog of NCBI NO: 22204116 NR Description: putative cytochrome c oxidase subunit [Triticum
  misc_feature (36)..(110): Homolog of NCBI NO: 9967162 NR Description: cytochrome c oxidase subunit 6b
  misc_feature (36)..(110): Homolog of NCBI NO: 34906824 NR Description: putative cytochrome c oxidase subunit 6b-1
  misc_feature (35)..(110): Homolog of NCBI NO: 21554378 NR Description: cytochrome c oxidase subunit, putative
  misc_feature (35)..(110): Homolog of NCBI NO: 15219886 NR Description: cytochrome c oxidase subunit, putative
  misc_feature (36)..(110): Homolog of NCBI NO: 4586449 NR Description: cytochrome c oxidase subunit 6b-1
  misc_feature (33)..(110): Homolog of NCBI NO: 15234375 NR Description: putative protein; protein id: At4g28060.1
  misc_feature (33)..(110): Homolog of NCBI NO: 21592329 NR Description: cytochrome c oxidase subunit 6b [Arabidopsis
  misc_feature (33)..(110): Homolog of NCBI NO: 18424030 NR Description: Expressed protein
KLAICKLHFQSTASPLSSPTQPKFLIIHFRSAMEDEIELKTAPADFRFPTTNQTRHCFTRYIEFHRCTTAKGEDANECERFAKYYRALCPGEWVDKWNEQRETGTFPGPL

SEQ ID NO: 28311 - protein, 78 aa, Arabidopsis thaliana
  peptide (1)..(78): Ceres Seq. ID no. 12603516
  misc_feature (3)..(77): Pfam Name: Cytochrome oxidase c subunit VIb Pfam Description: Cytochrome oxidase c subunit VIb
  misc_feature (6)..(76): Homolog of NCBI NO: 38048151 NR Description: similar to Drosophila melanogaster CG14235
  misc_feature (4)..(78): Homolog of NCBI NO: 22204116 NR Description: putative cytochrome c oxidase subunit [Triticum
  misc_feature (4)..(78): Homolog of NCBI NO: 9967162 NR Description: cytochrome c oxidase subunit 6b
  misc_feature (4)..(78): Homolog of NCBI NO: 34906824 NR Description: putative cytochrome c oxidase subunit 6b-1
  misc_feature (3)..(78): Homolog of NCBI NO: 21554378 NR Description: cytochrome c oxidase subunit, putative
  misc_feature (3)..(78): Homolog of NCBI NO: 15219886 NR Description: cytochrome c oxidase subunit, putative
  misc_feature (4)..(78): Homolog of NCBI NO: 4586449 NR Description: cytochrome c oxidase subunit 6b-1
  misc_feature (1)..(78): Homolog of NCBI NO: 15234375 NR Description: putative protein; protein id: At4g28060.1
  misc_feature (1)..(78): Homolog of NCBI NO: 21592329 NR Description: cytochrome c oxidase subunit 6b [Arabidopsis
  misc_feature (1)..(78): Homolog of NCBI NO: 18424030 NR Description: Expressed protein
MEDEIELKTAPADFRFPTTNQTRHCFTRYIEFHRCTTAKGEDANECERFAKYYRALCPGEWVDKWNEQRETGTFPGPL

SEQ ID NO: 28312 - DNA, 899 bp, Arabidopsis thaliana
  misc_feature (1)..(899): Ceres Seq. ID no. 12420741
  misc_feature: MA Experiment ID: 108464 Result: Up-regulated in Transcription
  misc_feature: MA Experiment 108464 PARAMETER Experiment Name: At_Germinating_Seeds_cDNA_P Parameter: Age (day) Value: 4 vs. 0
  misc_feature: MA Experiment 108464 PARAMETER Experiment Name: At_Germinating_Seeds_cDNA_P Parameter: Tissue Value: Germinating Seeds
  misc_feature: MA Experiment ID: 108595 Result: Down-regulated in Transcription
  misc_feature: MA Experiment 108595 PARAMETER Experiment Name: At_Ler-pi_Ovule_cDNA_P Parameter: Plant Line Value: null
  misc_feature: MA Experiment ID: 108668 Result: Up-regulated in Transcription
  misc_feature: MA Experiment 108668 PARAMETER Experiment Name: At_2mM_SA_cDNA_P Parameter: Plant Line Value: WS
  misc_feature: MA Experiment 108668 PARAMETER Experiment Name: At_2mM_SA_cDNA_P Parameter: Timepoint (hr) Value: 6
  misc_feature: MA Experiment 108668 PARAMETER Experiment Name: At_2mM_SA_cDNA_P Parameter: Treatment Value: 2mM SA vs. No Treatment
  misc_feature: MA Experiment ID: 20000069 Result: Up-regulated in Transcription
  misc_feature: MA Experiment 20000069 PARAMETER Experiment Name: At_100uM_ABA_Mutants_cDNA_P Parameter: Plant Line Value: CS23
  misc_feature: MA Experiment 20000069 PARAMETER Experiment Name: At_100uM_ABA_Mutants_cDNA_P Parameter: Timepoint (hr) Value: 6
  misc_feature: MA Experiment 20000069 PARAMETER Experiment Name: At_100uM_ABA_Mutants_cDNA_P Parameter: Tissue Value: Aerial
  misc_feature: MA Experiment 20000069 PARAMETER Experiment Name: At_100uM_ABA_Mutants_cDNA_P Parameter: Treatment Value: 100uM ABA vs. No Treatment
  misc_feature: MA Experiment ID: 20000090 Result: Up-regulated in Transcription
  misc_feature: MA Experiment ID: 20000113 Result: Up-regulated in Transcription
  misc_feature: MA Experiment 20000113 PARAMETER Experiment Name: At_42deg_Heat_cDNA_P Parameter: Temperature (deg C) Value: 42 vs. 22
  misc_feature: MA Experiment 20000113 PARAMETER Experiment Name: At_42deg_Heat_cDNA_P Parameter: Timepoint (hr) Value: 8
  misc_feature: MA Experiment 20000113 PARAMETER Experiment Name: At_42deg_Heat_cDNA_P Parameter: Tissue Value: Aerial
  misc_feature: MA Experiment ID: 20000173 Result: Up-regulated in Transcription
  misc_feature: MA Experiment 20000173 PARAMETER Experiment Name: At_42deg_Heat_P Parameter: Age (day) Value: 14
  misc_feature: MA Experiment 20000173 PARAMETER Experiment Name: At_42deg_Heat_P Parameter: Organism Value: A. thaliana
  misc_feature: MA Experiment 20000173 PARAMETER Experiment Name: At_42deg_Heat_P Parameter: Plant Line Value: WS
  misc_feature: MA Experiment 20000173 PARAMETER Experiment Name: At_42deg_Heat_P Parameter: Temperature (deg C) Value: 42 vs. 22
  misc_feature: MA Experiment 20000173 PARAMETER Experiment Name: At_42deg_Heat_P Parameter: Timepoint (hr) Value: 6
  misc_feature: MA Experiment 20000173 PARAMETER Experiment Name: At_42deg_Heat_P Parameter: Tissue Value: Aerial
  misc_feature: MA Experiment ID: 20000182 Result: Up-regulated in Transcription
  misc_feature: MA Experiment 20000182 PARAMETER Experiment Name: At_2mM_SA_P Parameter: Age (day) Value: 14
  misc_feature: MA Experiment 20000182 PARAMETER Experiment Name: At_2mM_SA_P Parameter: Organism Value: A. thaliana
  misc_feature: MA Experiment 20000182 PARAMETER Experiment Name: At_2mM_SA_P Parameter: Plant Line Value: WS
  misc_feature: MA Experiment 20000182 PARAMETER Experiment Name: At_2mM_SA_P Parameter: Timepoint (hr) Value: 6
  misc_feature: MA Experiment 20000182 PARAMETER Experiment Name: At_2mM_SA_P Parameter: Tissue Value: Aerial
  misc_feature: MA Experiment 20000182 PARAMETER Experiment Name: At_2mM_SA_P Parameter: Treatment Value: 2mM SA vs. No Treatment
  misc_feature: MA Experiment ID: 20000184 Result: Down-regulated in Transcription
  misc_feature: MA Experiment 20000184 PARAMETER Experiment Name: At_Shoots__P Parameter: Age (day) Value: 7
  misc_feature: MA Experiment 20000184 PARAMETER Experiment Name: At_Shoots__P Parameter: Tissue Value: Shoots vs. Whole Plant
  misc_feature: MA Experiment ID: 20000224 Result: Up-regulated in Transcription
  misc_feature: MA Experiment ID: 20000234 Result: Down-regulated in Transcription
  misc_feature: MA Experiment 20000234 PARAMETER Experiment Name: At_Siliques_P Parameter: Age (day) Value: 21
  misc_feature: MA Experiment 20000234 PARAMETER Experiment Name: At_Siliques_P Parameter: Organism Value: A. thaliana
  misc_feature: MA Experiment 20000234 PARAMETER Experiment Name: At_Siliques_P Parameter: Plant Line Value: WS
  misc_feature: MA Experiment 20000234 PARAMETER Experiment Name: At_Siliques_P Parameter: Tissue Value: Less Than 5mm Siliques vs. Whole Plant
  misc_feature: MA Experiment ID: 20000264 Result: Down-regulated in Transcription
  misc_feature: MA Experiment 20000264 PARAMETER Experiment Name: At_Open_Flower_P Parameter: Age (day) Value: 21
  misc_feature: MA Experiment 20000264 PARAMETER Experiment Name: At_Open_Flower_P Parameter: Plant Line Value: WS
  misc_feature: MA Experiment 20000264 PARAMETER Experiment Name: At_Open_Flower_P Parameter: Tissue Value: Open Flower vs. Whole Plant
  misc_feature: MA Experiment ID: 20000265 Result: Down-regulated in Transcription
  misc_feature: MA Experiment 20000265 PARAMETER Experiment Name: At_Open_Flower_P Parameter: Age (day) Value: 21
  misc_feature: MA Experiment 20000265 PARAMETER Experiment Name: At_Open_Flower_P Parameter: Plant Line Value: WS
  misc_feature: MA Experiment 20000265 PARAMETER Experiment Name: At_Open_Flower_P Parameter: Tissue Value: Closed Flower vs. Whole Plant
  misc_feature: MA Experiment ID: 20000286 Result: Down-regulated in Transcription
  misc_feature: MA Experiment 20000286 PARAMETER Experiment Name: At_Open_Flower_P Parameter: Age (day) Value: 21
  misc_feature: MA Experiment 20000286 PARAMETER Experiment Name: At_Open_Flower_P Parameter: Plant Line Value: WS
  misc_feature: MA Experiment 20000286 PARAMETER Experiment Name: At_Open_Flower_P Parameter: Tissue Value: Half Open vs. Whole Plant
  misc_feature: MA Experiment ID: 20001558 Result: Down-regulated in Transcription
  misc_feature: MA Experiment 20001558 PARAMETER Experiment Name: At_Drought_Soil_Dry_P Parameter: Age (day) Value: 27
  misc_feature: MA Experiment 20001558 PARAMETER Experiment Name: At_Drought_Soil_Dry_P Parameter: Organism Value: A. thaliana
  misc_feature: MA Experiment 20001558 PARAMETER Experiment Name: At_Drought_Soil_Dry_P Parameter: Plant Line Value: WS
  misc_feature: MA Experiment 20001558 PARAMETER Experiment Name: At_Drought_Soil_Dry_P Parameter: Post Timepoint (hr) Value: 6
  misc_feature: MA Experiment 20001558 PARAMETER Experiment Name: At_Drought_Soil_Dry_P Parameter: Post-Treatment Value: Re-Water vs. No Drought
  misc_feature: MA Experiment 20001558 PARAMETER Experiment Name: At_Drought_Soil_Dry_P Parameter: Timepoint (day) Value: 13
  misc_feature: MA Experiment 20001558 PARAMETER Experiment Name: At_Drought_Soil_Dry_P Parameter: Treatment Value: Drought vs. No Drought
catcgcttcttgttgttagcgctgatgagaagaaggtgaagcggctgagtcctcttcctgagatcaaagatccaaagattttcactgttttggtagaaaatttgccagaggatcattcagatgagaatattcgagagatatttggtaaagctggaagcattaaaagtgtatccatatgtgatccaaatgctactgaagaatcagagaagggtgggaagaaggaacatttcatcagaaccagattacatgcctttgtggagtatgaaacggtggaggcagctgaaaaagcggtagctacattgaataatgagcaagactggagaaatgggttgcgagttaagcttcttgaacaagcagcaggaaagtttgcacagagaagaccagctaggaaggaagtcgataaagaaaaggacactacaggccgagttcatgatcaaactggaggagataaaaacaaaaagacgcgtgaacatcaaaatcaccgtctccatcattctgataatcctgctgatgacgacggtggcaataaaaatggaaacaaaggcagaggtggaggacaaggaaggcgacagaatcatcaaggcggcaacggacatggaacagcttcatcatcttctcatcataattatcatcctgttgaggtctcaaagcgtccacctggcccgagaatgcctgatgggacgagagggttcacaatggggcgtggtaaagtgattcctcctcccacatctactcaaactagtcatgaagtttgatcggttctgcatgttcggttgtatcattgtgtggttttatttacattaaaaaatgtgaaatttgtatgtaattagaattgagatgttgttttggatttgagtttccttttggcatattcaagtcctccaaatcttcactttggc

SEQ ID NO: 28313 - protein, 250 aa, Arabidopsis thaliana
  peptide (1)..(250): Ceres Seq. ID no. 12420742
  misc_feature (29)..(114): Pfam Name: RNA recognition motif. (a.k.a. RRM, RBD, or RNP domain) Pfam Description: RNA recognition motif. (a.k.a. RRM, RBD, or RNP
  misc_feature (1)..(127): Homolog of NCBI NO: 34896588 NR Description: putative RNA-binding protein [Oryza sativa]
  misc_feature (1)..(121): Homolog of NCBI NO: 6449448 NR Description: RNA-binding protein homolog [Brassica napus]
  misc_feature (3)..(222): Homolog of NCBI NO: 34394175 NR Description: putative RNA-binding protein homolog
  misc_feature (3)..(210): Homolog of NCBI NO: 18406414 NR Description: VirF-interacting protein FIP1
  misc_feature (3)..(210): Homolog of NCBI NO: 15724224 NR Description: At2g43970/F6E13.10 [Arabidopsis thaliana]
  misc_feature (1)..(236): Homolog of NCBI NO: 34909652 NR Description: RNA-binding protein-like [Oryza sativa (japonica
  misc_feature (1)..(236): Homolog of NCBI NO: 15230287 NR Description: RNA-binding protein, putative; protein id:
  misc_feature (1)..(250): Homolog of NCBI NO: 30694922 NR Description: RNA recognition motif (RRM)-containing protein
  misc_feature (1)..(250): Homolog of NCBI NO: 10177706 NR Description: contains similarity to RNA-binding
  misc_feature (1)..(250): Homolog of NCBI NO: 30694926 NR Description: RNA recognition motif (RRM)-containing protein
SLLVVSADEKKVKRLSPLPEIKDPKIFTVLVENLPEDHSDENIREIFGKAGSIKSVSICDPNATEESEKGGKKEHFIRTRLHAFVEYETVEAAEKAVATLNNEQDWRNGLRVKLLEQAAGKFAQRRPARKEVDKEKDTTGRVHDQTGGDKNKKTREHQNHRLHHSDNPADDDGGNKNGNKGRGGGQGRRQNHQGGNGHGTASSSSHHNYHPVEVSKRPPGPRMPDGTRGFTMGRGKVIPPPTSTQTSHEV

SEQ ID NO: 28314 - protein, 135 aa, Arabidopsis thaliana
  peptide (1)..(135): Ceres Seq. ID no. 12420743
MSKTGEMGCELSFLNKQQESLHREDQLGRKSIKKRTLQAEFMIKLEEIKTKRRVNIKITVSIILIILLMTTVAIKMETKAEVEDKEGDRIIKAATDMEQLHHLLIIIIILLRSQSVHLARECLMGREGSQWGVVK

SEQ ID NO: 28315 - protein, 129 aa, Arabidopsis thaliana
  peptide (1)..(129): Ceres Seq. ID no. 12420744
MGCELSFLNKQQESLHREDQLGRKSIKKRTLQAEFMIKLEEIKTKRRVNIKITVSIILIILLMTTVAIKMETKAEVEDKEGDRIIKAATDMEQLHHLLIIIIILLRSQSVHLARECLMGREGSQWGVVK

SEQ ID NO: 28316 - DNA, 813 bp, Arabidopsis thaliana
  misc_feature (1)..(813): Ceres Seq. ID no. 12420563
  misc_feature: MA Experiment ID: 108434 Result: Up-regulated in Transcription
  misc_feature: MA Experiment 108434 PARAMETER Experiment Name: At_Root_Tips_cDNA_P Parameter: Tissue Value: Root Tips
  misc_feature: MA Experiment ID: 108435 Result: Up-regulated in Transcription
  misc_feature: MA Experiment 108435 PARAMETER Experiment Name: At_stm_Mutants_cDNA_P Parameter: Plant Line Value: wt Landsburg vs stm
  misc_feature: MA Experiment 108435 PARAMETER Experiment Name: At_stm_Mutants_cDNA_P Parameter: Tissue Value: Shoot Apical Meristem Region
  misc_feature: MA Experiment ID: 108461 Result: Up-regulated in Transcription
  misc_feature: MA Experiment 108461 PARAMETER Experiment Name: At_Germinating_Seeds_cDNA_P Parameter: Age (day) Value: 1 vs. 0
  misc_feature: MA Experiment 108461 PARAMETER Experiment Name: At_Germinating_Seeds_cDNA_P Parameter: Tissue Value: Germinating Seeds
  misc_feature: MA Experiment ID: 108462 Result: Up-regulated in Transcription
  misc_feature: MA Experiment 108462 PARAMETER Experiment Name: At_Germinating_Seeds_cDNA_P Parameter: Age (day) Value: 2 vs. 0
  misc_feature: MA Experiment 108462 PARAMETER Experiment Name: At_Germinating_Seeds_cDNA_P Parameter: Tissue Value: Germinating Seeds
  misc_feature: MA Experiment ID: 108561 Result: Down-regulated in Transcription
  misc_feature: MA Experiment 108561 PARAMETER Experiment Name: At_100uM_ABA_cDNA_P Parameter: Timepoint (hr) Value: 6
  misc_feature: MA Experiment 108561 PARAMETER Experiment Name: At_100uM_ABA_cDNA_P Parameter: Tissue Value: Aerial
  misc_feature: MA Experiment 108561 PARAMETER Experiment Name: At_100uM_ABA_cDNA_P Parameter: Treatment Value: 100uM ABA vs. No Treatment
  misc_feature: MA Experiment ID: 20000069 Result: Down-regulated in Transcription
  misc_feature: MA Experiment 20000069 PARAMETER Experiment Name: At_100uM_ABA_Mutants_cDNA_P Parameter: Plant Line Value: CS23
  misc_feature: MA Experiment 20000069 PARAMETER Experiment Name: At_100uM_ABA_Mutants_cDNA_P Parameter: Timepoint (hr) Value: 6
  misc_feature: MA Experiment 20000069 PARAMETER Experiment Name: At_100uM_ABA_Mutants_cDNA_P Parameter: Tissue Value: Aerial
  misc_feature: MA Experiment 20000069 PARAMETER Experiment Name: At_100uM_ABA_Mutants_cDNA_P Parameter: Treatment Value: 100uM ABA vs. No Treatment
  misc_feature: MA Experiment ID: 20000070 Result: Down-regulated in Transcription
  misc_feature: MA Experiment 20000070 PARAMETER Experiment Name: At_100uM_ABA_Mutants_cDNA_P Parameter: Plant Line Value: CS24
  misc_feature: MA Experiment 20000070 PARAMETER Experiment Name: At_100uM_ABA_Mutants_cDNA_P Parameter: Timepoint (hr) Value: 6
  misc_feature: MA Experiment 20000070 PARAMETER Experiment Name: At_100uM_ABA_Mutants_cDNA_P Parameter: Tissue Value: Aerial
  misc_feature: MA Experiment 20000070 PARAMETER Experiment Name: At_100uM_ABA_Mutants_cDNA_P Parameter: Treatment Value: 100uM ABA vs. No Treatment
  misc_feature: MA Experiment ID: 20000071 Result: Down-regulated in Transcription
  misc_feature: MA Experiment 20000071 PARAMETER Experiment Name: At_100uM_ABA_Mutants_cDNA_P Parameter: Plant Line Value: CS8104
  misc_feature: MA Experiment 20000071 PARAMETER Experiment Name: At_100uM_ABA_Mutants_cDNA_P Parameter: Timepoint (hr) Value: 6
  misc_feature: MA Experiment 20000071 PARAMETER Experiment Name: At_100uM_ABA_Mutants_cDNA_P Parameter: Tissue Value: Aerial
  misc_feature: MA Experiment 20000071 PARAMETER Experiment Name: At_100uM_ABA_Mutants_cDNA_P Parameter: Treatment Value: 100uM ABA vs. No Treatment
  misc_feature: MA Experiment ID: 20000072 Result: Down-regulated in Transcription
  misc_feature: MA Experiment 20000072 PARAMETER Experiment Name: At_100uM_ABA_Mutants_cDNA_P Parameter: Plant Line Value: CS8105
  misc_feature: MA Experiment 20000072 PARAMETER Experiment Name: At_100uM_ABA_Mutants_cDNA_P Parameter: Timepoint (hr) Value: 6
  misc_feature: MA Experiment 20000072 PARAMETER Experiment Name: At_100uM_ABA_Mutants_cDNA_P Parameter: Tissue Value: Aerial
  misc_feature: MA Experiment 20000072 PARAMETER Experiment Name: At_100uM_ABA_Mutants_cDNA_P Parameter: Treatment Value: 100uM ABA vs. No Treatment
  misc_feature: MA Experiment ID: 20000089 Result: Down-regulated in Transcription
  misc_feature: MA Experiment ID: 20000112 Result: Down-regulated in Transcription
  misc_feature: MA Experiment 20000112 PARAMETER Experiment Name: At_42deg_Heat_cDNA_P Parameter: Temperature (deg C) Value: 42 vs. 22
  misc_feature: MA Experiment 20000112 PARAMETER Experiment Name: At_42deg_Heat_cDNA_P Parameter: Timepoint (hr) Value: 2
  misc_feature: MA Experiment 20000112 PARAMETER Experiment Name: At_42deg_Heat_cDNA_P Parameter: Tissue Value: Aerial
  misc_feature: MA Experiment ID: 20000113 Result: Down-regulated in Transcription
  misc_feature: MA Experiment 20000113 PARAMETER Experiment Name: At_42deg_Heat_cDNA_P Parameter: Temperature (deg C) Value: 42 vs. 22
  misc_feature: MA Experiment 20000113 PARAMETER Experiment Name: At_42deg_Heat_cDNA_P Parameter: Timepoint (hr) Value: 8
  misc_feature: MA Experiment 20000113 PARAMETER Experiment Name: At_42deg_Heat_cDNA_P Parameter: Tissue Value: Aerial
  misc_feature: MA Experiment ID: 20000117 Result: Down-regulated in Transcription
  misc_feature: MA Experiment 20000117 PARAMETER Experiment Name: At_100uM_ABA_Mutants_cDNA_P Parameter: Plant Line Value: Columbia
  misc_feature: MA Experiment 20000117 PARAMETER Experiment Name: At_100uM_ABA_Mutants_cDNA_P Parameter: Timepoint (hr) Value: 6
  misc_feature: MA Experiment 20000117 PARAMETER Experiment Name: At_100uM_ABA_Mutants_cDNA_P Parameter: Tissue Value: Aerial
  misc_feature: MA Experiment 20000117 PARAMETER Experiment Name: At_100uM_ABA_Mutants_cDNA_P Parameter: Treatment Value: 100uM ABA vs. No Treatment
  misc_feature: MA Experiment ID: 20000180 Result: Up-regulated in Transcription
  misc_feature: MA Experiment 20000180 PARAMETER Experiment Name: At_Germinating_Seeds_P Parameter: Age (hr) Value: 24 vs. 0
  misc_feature: MA Experiment 20000180 PARAMETER Experiment Name: At_Germinating_Seeds_P Parameter: Tissue Value: Germinating Seeds
  misc_feature: MA Experiment ID: 20000184 Result: Up-regulated in Transcription
  misc_feature: MA Experiment 20000184 PARAMETER Experiment Name: At_Shoots__P Parameter: Age (day) Value: 7
  misc_feature: MA Experiment 20000184 PARAMETER Experiment Name: At_Shoots__P Parameter: Tissue Value: Shoots vs. Whole Plant
  misc_feature: MA Experiment ID: 20000235 Result: Up-regulated in Transcription
  misc_feature: MA Experiment 20000235 PARAMETER Experiment Name: At_Siliques_P Parameter: Age (day) Value: 21
  misc_feature: MA Experiment 20000235 PARAMETER Experiment Name: At_Siliques_P Parameter: Organism Value: A. thaliana
  misc_feature: MA Experiment 20000235 PARAMETER Experiment Name: At_Siliques_P Parameter: Plant Line Value: WS
  misc_feature: MA Experiment 20000235 PARAMETER Experiment Name: At_Siliques_P Parameter: Tissue Value: 5-10mm Siliques vs. Whole Plant
  misc_feature: MA Experiment ID: 20000437 Result: Down-regulated in Transcription
  misc_feature: MA Experiment 20000437 PARAMETER Experiment Name: At_Drought_P Parameter: Age (day) Value: 8
  misc_feature: MA Experiment 20000437 PARAMETER Experiment Name: At_Drought_P Parameter: Organism Value: A. thaliana
  misc_feature: MA Experiment 20000437 PARAMETER Experiment Name: At_Drought_P Parameter: Plant Line Value: WS
  misc_feature: MA Experiment 20000437 PARAMETER Experiment Name: At_Drought_P Parameter: Timepoint (hr) Value: 24
  misc_feature: MA Experiment 20000437 PARAMETER Experiment Name: At_Drought_P Parameter: Tissue Value: Whole Plant
  misc_feature: MA Experiment 20000437 PARAMETER Experiment Name: At_Drought_P Parameter: Treatment Value: Drought vs. No Drought
  misc_feature: MA Experiment ID: 20000495 Result: Up-regulated in Transcription
  misc_feature: MA Experiment 20000495 PARAMETER Experiment Name: At_Guard_Cells_P Parameter: Harvest Date Value: 8/2/2002
  misc_feature: MA Experiment 20000495 PARAMETER Experiment Name: At_Guard_Cells_P Parameter: Organism Value: A. thaliana
  misc_feature: MA Experiment 20000495 PARAMETER Experiment Name: At_Guard_Cells_P Parameter: Tissue Value: Guard Cells vs. Leaves
  misc_feature: MA Experiment ID: 20001248 Result: Down-regulated in Transcription
  misc_feature: MA Experiment 20001248 PARAMETER Experiment Name: At_Far-red-induction_P Parameter: Age (day) Value: 7
  misc_feature: MA Experiment 20001248 PARAMETER Experiment Name: At_Far-red-induction_P Parameter: Light Value: Far-red vs. White
  misc_feature: MA Experiment 20001248 PARAMETER Experiment Name: At_Far-red-induction_P Parameter: Organism Value: A. thaliana
  misc_feature: MA Experiment 20001248 PARAMETER Experiment Name: At_Far-red-induction_P Parameter: Plant Line Value: Columbia
  misc_feature: MA Experiment 20001248 PARAMETER Experiment Name: At_Far-red-induction_P Parameter: Timepoint (hr) Value: 4
  misc_feature: MA Experiment 20001248 PARAMETER Experiment Name: At_Far-red-induction_P Parameter: Tissue Value: Whole Plant
gaaaggtttcttgcccaaatacaagaacttgacagctccaaagaaagaagcatttctcgatttcctcgctgtcccgacatattactcaatggcgatgctcaaatccaacaatggtccgatgaacacacttgcgacagatggagctaacaagtttgagcttactgtacagaacgatggagagaaggttaccctcaagacaaggatcaacactgtcaagatcgttgatactcttattgatgagcagcctttagctatatatgcgactgataaggttttgttgcctaaagagttgtttaaggcttcggctgttgaagctccggctcctgctccggcaccagaggatggtgatgttgcggattctccaaaagcggctaaagggaaagcgaaaggaaagaagaagaaggctgcaccgtcgccagataatgatccttttggtgactcggattcgcctgccgaagggcctgacggagaggccgatgatgcgacggcagatgatgctggtgcggttaggatcatcggaggagctaaggctggtttggtggtgagcttgctctgcttgtttgcttcttcttggcttctatagtttcacttcttgtttcttcgattcttccatgttttttttttttgtgaatcttttatttatggtttttgggggagagtaaatgaggattatttatttccctctattgttgagttttttttatttatttaaaagttggttgtcgaattaaatagtcggtagtttatatatttgtgtgttcttgtttcacgtgtttgtttagttgatgatgtaaacaagtcctgattttggtg

SEQ ID NO: 28317 - protein, 193 aa, Arabidopsis thaliana
  peptide (1)..(193): Ceres Seq. ID no. 12420564
  misc_feature (3)..(94): Pfam Name: Fasciclin domain Pfam Description: Fasciclin domain
  misc_feature (1)..(126): Homolog of NCBI NO: 29836527 NR Description: putative pollen surface protein [Gossypium
  misc_feature (1)..(126): Homolog of NCBI NO: 29836525 NR Description: putative pollen surface protein [Gossypium
  misc_feature (1)..(126): Homolog of NCBI NO: 29836533 NR Description: putative pollen surface protein [Gossypioides
  misc_feature (3)..(168): Homolog of NCBI NO: 38424037 NR Description: putative fasciclin-like arabinogalactan-protein
  misc_feature (1)..(126): Homolog of NCBI NO: 29836529 NR Description: putative pollen surface protein [Gossypium
  misc_feature (3)..(151): Homolog of NCBI NO: 15235459 NR Description: fasciclin-like arabinogalactan-protein (FLA2)
  misc_feature (3)..(151): Homolog of NCBI NO: 13377778 NR Description: fasciclin-like arabinogalactan-protein 2
  misc_feature (3)..(151): Homolog of NCBI NO: 21593810 NR Description: putative pollen surface protein [Arabidopsis
  misc_feature (1)..(193): Homolog of NCBI NO: 21618321 NR Description: unknown [Arabidopsis thaliana]
  misc_feature (1)..(193): Homolog of NCBI NO: 15240570 NR Description: fasciclin-like arabinogalactan-protein (FLA1)
KGFLPKYKNLTAPKKEAFLDFLAVPTYYSMAMLKSNNGPMNTLATDGANKFELTVQNDGEKVTLKTRINTVKIVDTLIDEQPLAIYATDKVLLPKELFKASAVEAPAPAPAPEDGDVADSPKAAKGKAKGKKKKAAPSPDNDPFGDSDSPAEGPDGEADDATADDAGAVRIIGGAKAGLVVSLLCLFASSWLL

SEQ ID NO: 28318 - protein, 164 aa, Arabidopsis thaliana
  peptide (1)..(164): Ceres Seq. ID no. 12420565
  misc_feature (1)..(65): Pfam Name: Fasciclin domain Pfam Description: Fasciclin domain
  misc_feature (1)..(97): Homolog of NCBI NO: 29836527 NR Description: putative pollen surface protein [Gossypium
  misc_feature (1)..(97): Homolog of NCBI NO: 29836525 NR Description: putative pollen surface protein [Gossypium
  misc_feature (1)..(97): Homolog of NCBI NO: 29836533 NR Description: putative pollen surface protein [Gossypioides
  misc_feature (1)..(139): Homolog of NCBI NO: 38424037 NR Description: putative fasciclin-like arabinogalactan-protein
  misc_feature (1)..(97): Homolog of NCBI NO: 29836529 NR Description: putative pollen surface protein [Gossypium
  misc_feature (1)..(122): Homolog of NCBI NO: 15235459 NR Description: fasciclin-like arabinogalactan-protein (FLA2)
  misc_feature (1)..(122): Homolog of NCBI NO: 13377778 NR Description: fasciclin-like arabinogalactan-protein 2
  misc_feature (1)..(122): Homolog of NCBI NO: 21593810 NR Description: putative pollen surface protein [Arabidopsis
  misc_feature (1)..(164): Homolog of NCBI NO: 21618321 NR Description: unknown [Arabidopsis thaliana]
  misc_feature (1)..(164): Homolog of NCBI NO: 15240570 NR Description: fasciclin-like arabinogalactan-protein (FLA1)
MAMLKSNNGPMNTLATDGANKFELTVQNDGEKVTLKTRINTVKIVDTLIDEQPLAIYATDKVLLPKELFKASAVEAPAPAPAPEDGDVADSPKAAKGKAKGKKKKAAPSPDNDPFGDSDSPAEGPDGEADDATADDAGAVRIIGGAKAGLVVSLLCLFASSWLL

SEQ ID NO: 28319 - protein, 162 aa, Arabidopsis thaliana
  peptide (1)..(162): Ceres Seq. ID no. 12420566
  misc_feature (1)..(63): Pfam Name: Fasciclin domain Pfam Description: Fasciclin domain
  misc_feature (1)..(95): Homolog of NCBI NO: 29836527 NR Description: putative pollen surface protein [Gossypium
  misc_feature (1)..(95): Homolog of NCBI NO: 29836525 NR Description: putative pollen surface protein [Gossypium
  misc_feature (1)..(95): Homolog of NCBI NO: 29836533 NR Description: putative pollen surface protein [Gossypioides
  misc_feature (1)..(137): Homolog of NCBI NO: 38424037 NR Description: putative fasciclin-like arabinogalactan-protein
  misc_feature (1)..(95): Homolog of NCBI NO: 29836529 NR Description: putative pollen surface protein [Gossypium
  misc_feature (1)..(120): Homolog of NCBI NO: 15235459 NR Description: fasciclin-like arabinogalactan-protein (FLA2)
  misc_feature (1)..(120): Homolog of NCBI NO: 13377778 NR Description: fasciclin-like arabinogalactan-protein 2
  misc_feature (1)..(120): Homolog of NCBI NO: 21593810 NR Description: putative pollen surface protein [Arabidopsis
  misc_feature (1)..(162): Homolog of NCBI NO: 21618321 NR Description: unknown [Arabidopsis thaliana]
  misc_feature (1)..(162): Homolog of NCBI NO: 15240570 NR Description: fasciclin-like arabinogalactan-protein (FLA1)
MLKSNNGPMNTLATDGANKFELTVQNDGEKVTLKTRINTVKIVDTLIDEQPLAIYATDKVLLPKELFKASAVEAPAPAPAPEDGDVADSPKAAKGKAKGKKKKAAPSPDNDPFGDSDSPAEGPDGEADDATADDAGAVRIIGGAKAGLVVSLLCLFASSWLL

SEQ ID NO: 28320 - DNA, 787 bp, Arabidopsis thaliana
  misc_feature (1)..(787): Ceres Seq. ID no. 12340441
  misc_feature: MA Experiment ID: 108434 Result: Down-regulated in Transcription
  misc_feature: MA Experiment 108434 PARAMETER Experiment Name: At_Root_Tips_cDNA_P Parameter: Tissue Value: Root Tips
  misc_feature: MA Experiment ID: 108462 Result: Down-regulated in Transcription
  misc_feature: MA Experiment 108462 PARAMETER Experiment Name: At_Germinating_Seeds_cDNA_P Parameter: Age (day) Value: 2 vs. 0
  misc_feature: MA Experiment 108462 PARAMETER Experiment Name: At_Germinating_Seeds_cDNA_P Parameter: Tissue Value: Germinating Seeds
  misc_feature: MA Experiment ID: 108488 Result: Up-regulated in Transcription
  misc_feature: MA Experiment ID: 108501 Result: Up-regulated in Transcription
  misc_feature: MA Experiment 108501 PARAMETER Experiment Name: At_ap2_floral_buds_cDNA_P Parameter: Plant Line Value: ap2 (Ler.)
  misc_feature: MA Experiment 108501 PARAMETER Experiment Name: At_ap2_floral_buds_cDNA_P Parameter: Tissue Value: Closed Flower
  misc_feature: MA Experiment ID: 108561 Result: Down-regulated in Transcription
  misc_feature: MA Experiment 108561 PARAMETER Experiment Name: At_100uM_ABA_cDNA_P Parameter: Timepoint (hr) Value: 6
  misc_feature: MA Experiment 108561 PARAMETER Experiment Name: At_100uM_ABA_cDNA_P Parameter: Tissue Value: Aerial
  misc_feature: MA Experiment 108561 PARAMETER Experiment Name: At_100uM_ABA_cDNA_P Parameter: Treatment Value: 100uM ABA vs. No Treatment
  misc_feature: MA Experiment ID: 108573 Result: Down-regulated in Transcription
  misc_feature: MA Experiment 108573 PARAMETER Experiment Name: At_Drought_cDNA_P Parameter: Timepoint (hr) Value: 6
  misc_feature: MA Experiment 108573 PARAMETER Experiment Name: At_Drought_cDNA_P Parameter: Tissue Value: Aerial
  misc_feature: MA Experiment 108573 PARAMETER Experiment Name: At_Drought_cDNA_P Parameter: Treatment Value: Drought vs. No Drought
  misc_feature: MA Experiment ID: 108574 Result: Up-regulated in Transcription
  misc_feature: MA Experiment 108574 PARAMETER Experiment Name: At_Wounding__cDNA_P Parameter: Timepoint (hr) Value: 1
  misc_feature: MA Experiment 108574 PARAMETER Experiment Name: At_Wounding__cDNA_P Parameter: Tissue Value: Aerial
  misc_feature: MA Experiment 108574 PARAMETER Experiment Name: At_Wounding__cDNA_P Parameter: Treatment Value: Wounding vs. No Wounding
  misc_feature: MA Experiment ID: 108579 Result: Up-regulated in Transcription
  misc_feature: MA Experiment 108579 PARAMETER Experiment Name: At_4deg_Cold_cDNA_P Parameter: Temperature (deg C) Value: 4 vs. 22
  misc_feature: MA Experiment 108579 PARAMETER Experiment Name: At_4deg_Cold_cDNA_P Parameter: Timepoint (hr) Value: 6
  misc_feature: MA Experiment 108579 PARAMETER Experiment Name: At_4deg_Cold_cDNA_P Parameter: Tissue Value: Aerial
  misc_feature: MA Experiment ID: 108585 Result: Down-regulated in Transcription
  misc_feature: MA Experiment 108585 PARAMETER Experiment Name: At_5mM_NaNP_cDNA_P Parameter: Timepoint (hr) Value: 6
  misc_feature: MA Experiment 108585 PARAMETER Experiment Name: At_5mM_NaNP_cDNA_P Parameter: Tissue Value: Aerial
  misc_feature: MA Experiment 108585 PARAMETER Experiment Name: At_5mM_NaNP_cDNA_P Parameter: Treatment Value: null
  misc_feature: MA Experiment ID: 108605 Result: Down-regulated in Transcription
  misc_feature: MA Experiment 108605 PARAMETER Experiment Name: At_100uM_ABA_cDNA_P Parameter: Timepoint (hr) Value: 6
  misc_feature: MA Experiment 108605 PARAMETER Experiment Name: At_100uM_ABA_cDNA_P Parameter: Tissue Value: Aerial
  misc_feature: MA Experiment 108605 PARAMETER Experiment Name: At_100uM_ABA_cDNA_P Parameter: Treatment Value: 100uM ABA vs. No Treatment
  misc_feature: MA Experiment ID: 108607 Result: Down-regulated in Transcription
  misc_feature: MA Experiment 108607 PARAMETER Experiment Name: At_100uM_ABA_cDNA_P Parameter: Timepoint (hr) Value: 4
  misc_feature: MA Experiment 108607 PARAMETER Experiment Name: At_100uM_ABA_cDNA_P Parameter: Tissue Value: Aerial
  misc_feature: MA Experiment 108607 PARAMETER Experiment Name: At_100uM_ABA_cDNA_P Parameter: Treatment Value: 100uM ABA vs. No Treatment
  misc_feature: MA Experiment ID: 108668 Result: Down-regulated in Transcription
  misc_feature: MA Experiment 108668 PARAMETER Experiment Name: At_2mM_SA_cDNA_P Parameter: Plant Line Value: WS
  misc_feature: MA Experiment 108668 PARAMETER Experiment Name: At_2mM_SA_cDNA_P Parameter: Timepoint (hr) Value: 6
  misc_feature: MA Experiment 108668 PARAMETER Experiment Name: At_2mM_SA_cDNA_P Parameter: Treatment Value: 2mM SA vs. No Treatment
  misc_feature: MA Experiment ID: 20000069 Result: Up-regulated in Transcription
  misc_feature: MA Experiment 20000069 PARAMETER Experiment Name: At_100uM_ABA_Mutants_cDNA_P Parameter: Plant Line Value: CS23
  misc_feature: MA Experiment 20000069 PARAMETER Experiment Name: At_100uM_ABA_Mutants_cDNA_P Parameter: Timepoint (hr) Value: 6
  misc_feature: MA Experiment 20000069 PARAMETER Experiment Name: At_100uM_ABA_Mutants_cDNA_P Parameter: Tissue Value: Aerial
  misc_feature: MA Experiment 20000069 PARAMETER Experiment Name: At_100uM_ABA_Mutants_cDNA_P Parameter: Treatment Value: 100uM ABA vs. No Treatment
  misc_feature: MA Experiment ID: 20000070 Result: Up-regulated in Transcription
  misc_feature: MA Experiment 20000070 PARAMETER Experiment Name: At_100uM_ABA_Mutants_cDNA_P Parameter: Plant Line Value: CS24
  misc_feature: MA Experiment 20000070 PARAMETER Experiment Name: At_100uM_ABA_Mutants_cDNA_P Parameter: Timepoint (hr) Value: 6
  misc_feature: MA Experiment 20000070 PARAMETER Experiment Name: At_100uM_ABA_Mutants_cDNA_P Parameter: Tissue Value: Aerial
  misc_feature: MA Experiment 20000070 PARAMETER Experiment Name: At_100uM_ABA_Mutants_cDNA_P Parameter: Treatment Value: 100uM ABA vs. No Treatment
  misc_feature: MA Experiment ID: 20000071 Result: Up-regulated in Transcription
  misc_feature: MA Experiment 20000071 PARAMETER Experiment Name: At_100uM_ABA_Mutants_cDNA_P Parameter: Plant Line Value: CS8104
  misc_feature: MA Experiment 20000071 PARAMETER Experiment Name: At_100uM_ABA_Mutants_cDNA_P Parameter: Timepoint (hr) Value: 6
  misc_feature: MA Experiment 20000071 PARAMETER Experiment Name: At_100uM_ABA_Mutants_cDNA_P Parameter: Tissue Value: Aerial
  misc_feature: MA Experiment 20000071 PARAMETER Experiment Name: At_100uM_ABA_Mutants_cDNA_P Parameter: Treatment Value: 100uM ABA vs. No Treatment
  misc_feature: MA Experiment ID: 20000072 Result: Up-regulated in Transcription
  misc_feature: MA Experiment 20000072 PARAMETER Experiment Name: At_100uM_ABA_Mutants_cDNA_P Parameter: Plant Line Value: CS8105
  misc_feature: MA Experiment 20000072 PARAMETER Experiment Name: At_100uM_ABA_Mutants_cDNA_P Parameter: Timepoint (hr) Value: 6
  misc_feature: MA Experiment 20000072 PARAMETER Experiment Name: At_100uM_ABA_Mutants_cDNA_P Parameter: Tissue Value: Aerial
  misc_feature: MA Experiment 20000072 PARAMETER Experiment Name: At_100uM_ABA_Mutants_cDNA_P Parameter: Treatment Value: 100uM ABA vs. No Treatment
  misc_feature: MA Experiment ID: 20000086 Result: Up-regulated in Transcription
  misc_feature: MA Experiment 20000086 PARAMETER Experiment Name: At_100uM_ABA_Mutants_cDNA_P Parameter: Plant Line Value: CS22
  misc_feature: MA Experiment 20000086 PARAMETER Experiment Name: At_100uM_ABA_Mutants_cDNA_P Parameter: Timepoint (hr) Value: 6
  misc_feature: MA Experiment 20000086 PARAMETER Experiment Name: At_100uM_ABA_Mutants_cDNA_P Parameter: Tissue Value: Aerial
  misc_feature: MA Experiment 20000086 PARAMETER Experiment Name: At_100uM_ABA_Mutants_cDNA_P Parameter: Treatment Value: 100uM ABA vs. No Treatment
  misc_feature: MA Experiment ID: 20000087 Result: Up-regulated in Transcription
  misc_feature: MA Experiment 20000087 PARAMETER Experiment Name: At_100uM_ABA_Mutants_cDNA_P Parameter: Plant Line Value: WS
  misc_feature: MA Experiment 20000087 PARAMETER Experiment Name: At_100uM_ABA_Mutants_cDNA_P Parameter: Timepoint (hr) Value: 6
  misc_feature: MA Experiment 20000087 PARAMETER Experiment Name: At_100uM_ABA_Mutants_cDNA_P Parameter: Tissue Value: Aerial
  misc_feature: MA Experiment 20000087 PARAMETER Experiment Name: At_100uM_ABA_Mutants_cDNA_P Parameter: Treatment Value: 100uM ABA vs. No Treatment
  misc_feature: MA Experiment ID: 20000088 Result: Up-regulated in Transcription
  misc_feature: MA Experiment 20000088 PARAMETER Experiment Name: At_100uM_ABA_Mutants_cDNA_P Parameter: Plant Line Value: Landsberg
  misc_feature: MA Experiment 20000088 PARAMETER Experiment Name: At_100uM_ABA_Mutants_cDNA_P Parameter: Timepoint (hr) Value: 6
  misc_feature: MA Experiment 20000088 PARAMETER Experiment Name: At_100uM_ABA_Mutants_cDNA_P Parameter: Tissue Value: Aerial
  misc_feature: MA Experiment 20000088 PARAMETER Experiment Name: At_100uM_ABA_Mutants_cDNA_P Parameter: Treatment Value: 100uM ABA vs. No Treatment
  misc_feature: MA Experiment ID: 20000089 Result: Up-regulated in Transcription
  misc_feature: MA Experiment ID: 20000090 Result: Up-regulated in Transcription
  misc_feature: MA Experiment ID: 20000117 Result: Up-regulated in Transcription
  misc_feature: MA Experiment 20000117 PARAMETER Experiment Name: At_100uM_ABA_Mutants_cDNA_P Parameter: Plant Line Value: Columbia
  misc_feature: MA Experiment 20000117 PARAMETER Experiment Name: At_100uM_ABA_Mutants_cDNA_P Parameter: Timepoint (hr) Value: 6
  misc_feature: MA Experiment 20000117 PARAMETER Experiment Name: At_100uM_ABA_Mutants_cDNA_P Parameter: Tissue Value: Aerial
  misc_feature: MA Experiment 20000117 PARAMETER Experiment Name: At_100uM_ABA_Mutants_cDNA_P Parameter: Treatment Value: 100uM ABA vs. No Treatment
  misc_feature: MA Experiment ID: 20000169 Result: Down-regulated in Transcription
  misc_feature: MA Experiment 20000169 PARAMETER Experiment Name: At_100uM_ABA_P Parameter: Age (day) Value: 14
  misc_feature: MA Experiment 20000169 PARAMETER Experiment Name: At_100uM_ABA_P Parameter: Organism Value: A. thaliana
  misc_feature: MA Experiment 20000169 PARAMETER Experiment Name: At_100uM_ABA_P Parameter: Plant Line Value: WS
  misc_feature: MA Experiment 20000169 PARAMETER Experiment Name: At_100uM_ABA_P Parameter: Timepoint (hr) Value: 6
  misc_feature: MA Experiment 20000169 PARAMETER Experiment Name: At_100uM_ABA_P Parameter: Tissue Value: Aerial
  misc_feature: MA Experiment 20000169 PARAMETER Experiment Name: At_100uM_ABA_P Parameter: Treatment Value: 100uM ABA vs. No Treatment
  misc_feature: MA Experiment ID: 20000171 Result: Down-regulated in Transcription
  misc_feature: MA Experiment 20000171 PARAMETER Experiment Name: At_42deg_Heat_P Parameter: Age (day) Value: 14
  misc_feature: MA Experiment 20000171 PARAMETER Experiment Name: At_42deg_Heat_P Parameter: Organism Value: A. thaliana
  misc_feature: MA Experiment 20000171 PARAMETER Experiment Name: At_42deg_Heat_P Parameter: Plant Line Value: WS
  misc_feature: MA Experiment 20000171 PARAMETER Experiment Name: At_42deg_Heat_P Parameter: Temperature (deg C) Value: 42 vs. 22
  misc_feature: MA Experiment 20000171 PARAMETER Experiment Name: At_42deg_Heat_P Parameter: Timepoint (hr) Value: 1
  misc_feature: MA Experiment 20000171 PARAMETER Experiment Name: At_42deg_Heat_P Parameter: Tissue Value: Aerial
  misc_feature: MA Experiment ID: 20000179 Result: Down-regulated in Transcription
  misc_feature: MA Experiment 20000179 PARAMETER Experiment Name: At_Germinating_Seeds_P Parameter: Age (hr) Value: 6 vs. 0
  misc_feature: MA Experiment 20000179 PARAMETER Experiment Name: At_Germinating_Seeds_P Parameter: Tissue Value: Germinating Seeds
  misc_feature: MA Experiment ID: 20000182 Result: Down-regulated in Transcription
  misc_feature: MA Experiment 20000182 PARAMETER Experiment Name: At_2mM_SA_P Parameter: Age (day) Value: 14
  misc_feature: MA Experiment 20000182 PARAMETER Experiment Name: At_2mM_SA_P Parameter: Organism Value: A. thaliana
  misc_feature: MA Experiment 20000182 PARAMETER Experiment Name: At_2mM_SA_P Parameter: Plant Line Value: WS
  misc_feature: MA Experiment 20000182 PARAMETER Experiment Name: At_2mM_SA_P Parameter: Timepoint (hr) Value: 6
  misc_feature: MA Experiment 20000182 PARAMETER Experiment Name: At_2mM_SA_P Parameter: Tissue Value: Aerial
  misc_feature: MA Experiment 20000182 PARAMETER Experiment Name: At_2mM_SA_P Parameter: Treatment Value: 2mM SA vs. No Treatment
  misc_feature: MA Experiment ID: 20000211 Result: Up-regulated in Transcription
  misc_feature: MA Experiment 20000211 PARAMETER Experiment Name: At_0.001percent_MeJA__P Parameter: Age (day) Value: 14
  misc_feature: MA Experiment 20000211 PARAMETER Experiment Name: At_0.001percent_MeJA__P Parameter: Organism Value: A. thaliana
  misc_feature: MA Experiment 20000211 PARAMETER Experiment Name: At_0.001percent_MeJA__P Parameter: Plant Line Value: WS
  misc_feature: MA Experiment 20000211 PARAMETER Experiment Name: At_0.001percent_MeJA__P Parameter: Timepoint (hr) Value: 1
  misc_feature: MA Experiment 20000211 PARAMETER Experiment Name: At_0.001percent_MeJA__P Parameter: Tissue Value: Aerial
  misc_feature: MA Experiment 20000211 PARAMETER Experiment Name: At_0.001percent_MeJA__P Parameter: Treatment Value: 0.001percent MeJA vs. No Treatment
  misc_feature: MA Experiment ID: 20000214 Result: Up-regulated in Transcription
  misc_feature: MA Experiment 20000214 PARAMETER Experiment Name: At_4deg_Cold_P Parameter: Timepoint (hr) Value: 6
  misc_feature: MA Experiment ID: 20000227 Result: Down-regulated in Transcription
  misc_feature: MA Experiment 20000227 PARAMETER Experiment Name: At_Root-Tips-vs-Tops_P Parameter: Tissue Value: Root Tips vs. Root Tops
  misc_feature: MA Experiment ID: 20000437 Result: Down-regulated in Transcription
  misc_feature: MA Experiment 20000437 PARAMETER Experiment Name: At_Drought_P Parameter: Age (day) Value: 8
  misc_feature: MA Experiment 20000437 PARAMETER Experiment Name: At_Drought_P Parameter: Organism Value: A. thaliana
  misc_feature: MA Experiment 20000437 PARAMETER Experiment Name: At_Drought_P Parameter: Plant Line Value: WS
  misc_feature: MA Experiment 20000437 PARAMETER Experiment Name: At_Drought_P Parameter: Timepoint (hr) Value: 24
  misc_feature: MA Experiment 20000437 PARAMETER Experiment Name: At_Drought_P Parameter: Tissue Value: Whole Plant
  misc_feature: MA Experiment 20000437 PARAMETER Experiment Name: At_Drought_P Parameter: Treatment Value: Drought vs. No Drought
  misc_feature: MA Experiment ID: 20001560 Result: Down-regulated in Transcription
  misc_feature: MA Experiment 20001560 PARAMETER Experiment Name: At_Drought_Soil_Dry_P Parameter: Age (day) Value: 28
  misc_feature: MA Experiment 20001560 PARAMETER Experiment Name: At_Drought_Soil_Dry_P Parameter: Organism Value: A. thaliana
  misc_feature: MA Experiment 20001560 PARAMETER Experiment Name: At_Drought_Soil_Dry_P Parameter: Plant Line Value: WS
  misc_feature: MA Experiment 20001560 PARAMETER Experiment Name: At_Drought_Soil_Dry_P Parameter: Post Timepoint (hr) Value: None
  misc_feature: MA Experiment 20001560 PARAMETER Experiment Name: At_Drought_Soil_Dry_P Parameter: Post-Treatment Value: None
  misc_feature: MA Experiment 20001560 PARAMETER Experiment Name: At_Drought_Soil_Dry_P Parameter: Timepoint (day) Value: 14
  misc_feature: MA Experiment 20001560 PARAMETER Experiment Name: At_Drought_Soil_Dry_P Parameter: Treatment Value: Drought vs. No Drought
  misc_feature: MA Experiment ID: 20001757 Result: Up-regulated in Transcription
  misc_feature: MA Experiment 20001757 PARAMETER Experiment Name: At_50mM_NH4NO3_L-to-H_P Parameter: Timepoint (hr) Value: 6
  misc_feature: MA Experiment 20001757 PARAMETER Experiment Name: At_50mM_NH4NO3_L-to-H_P Parameter: Tissue Value: Leaf
  misc_feature: MA Experiment 20001757 PARAMETER Experiment Name: At_50mM_NH4NO3_L-to-H_P Parameter: Treatment Value: 50mM NH4NO3 vs 100mM Mannitol
  misc_feature: MA Experiment ID: 20001904 Result: Down-regulated in Transcription
  misc_feature: MA Experiment 20001904 PARAMETER Experiment Name: At_Drought_Reproduction_P Parameter: Age (day) Value: 37
  misc_feature: MA Experiment 20001904 PARAMETER Experiment Name: At_Drought_Reproduction_P Parameter: Organism Value: A. thaliana
  misc_feature: MA Experiment 20001904 PARAMETER Experiment Name: At_Drought_Reproduction_P Parameter: Plant Line Value: WS
  misc_feature: MA Experiment 20001904 PARAMETER Experiment Name: At_Drought_Reproduction_P Parameter: Timepoint (day) Value: 7
  misc_feature: MA Experiment 20001904 PARAMETER Experiment Name: At_Drought_Reproduction_P Parameter: Tissue Value: Rosettes
  misc_feature: MA Experiment 20001904 PARAMETER Experiment Name: At_Drought_Reproduction_P Parameter: Treatment Value: Drought vs. No Drought
  misc_feature: MA Experiment ID: 20001905 Result: Down-regulated in Transcription
  misc_feature: MA Experiment 20001905 PARAMETER Experiment Name: At_Drought_Reproduction_P Parameter: Age (day) Value: 40
  misc_feature: MA Experiment 20001905 PARAMETER Experiment Name: At_Drought_Reproduction_P Parameter: Organism Value: A. thaliana
  misc_feature: MA Experiment 20001905 PARAMETER Experiment Name: At_Drought_Reproduction_P Parameter: Plant Line Value: WS
  misc_feature: MA Experiment 20001905 PARAMETER Experiment Name: At_Drought_Reproduction_P Parameter: Timepoint (day) Value: 10
  misc_feature: MA Experiment 20001905 PARAMETER Experiment Name: At_Drought_Reproduction_P Parameter: Tissue Value: Rosettes
  misc_feature: MA Experiment 20001905 PARAMETER Experiment Name: At_Drought_Reproduction_P Parameter: Treatment Value: Drought vs. No Drought
  misc_feature: MA Experiment ID: 20001906 Result: Down-regulated in Transcription
  misc_feature: MA Experiment 20001906 PARAMETER Experiment Name: At_Drought_Reproduction_P Parameter: Age (day) Value: 35
  misc_feature: MA Experiment 20001906 PARAMETER Experiment Name: At_Drought_Reproduction_P Parameter: Organism Value: A. thaliana
  misc_feature: MA Experiment 20001906 PARAMETER Experiment Name: At_Drought_Reproduction_P Parameter: Plant Line Value: WS
  misc_feature: MA Experiment 20001906 PARAMETER Experiment Name: At_Drought_Reproduction_P Parameter: Timepoint (day) Value: 5
  misc_feature: MA Experiment 20001906 PARAMETER Experiment Name: At_Drought_Reproduction_P Parameter: Tissue Value: Siliques
  misc_feature: MA Experiment 20001906 PARAMETER Experiment Name: At_Drought_Reproduction_P Parameter: Treatment Value: Drought vs. No Drought
  misc_feature: MA Experiment ID: 20001908 Result: Down-regulated in Transcription
  misc_feature: MA Experiment 20001908 PARAMETER Experiment Name: At_Drought_Reproduction_P Parameter: Age (day) Value: 40
  misc_feature: MA Experiment 20001908 PARAMETER Experiment Name: At_Drought_Reproduction_P Parameter: Organism Value: A. thaliana
  misc_feature: MA Experiment 20001908 PARAMETER Experiment Name: At_Drought_Reproduction_P Parameter: Plant Line Value: WS
  misc_feature: MA Experiment 20001908 PARAMETER Experiment Name: At_Drought_Reproduction_P Parameter: Timepoint (day) Value: 10
  misc_feature: MA Experiment 20001908 PARAMETER Experiment Name: At_Drought_Reproduction_P Parameter: Tissue Value: Siliques
  misc_feature: MA Experiment 20001908 PARAMETER Experiment Name: At_Drought_Reproduction_P Parameter: Treatment Value: Drought vs. No Drought
acaaaaaaaatcactaatggcaaaacaatatctctttctaatcctctcaatctcctacctcttatcactggagctcacggcggccaccgcagcctcacagaccggagcttctaagaaagccataaacttcatccaatcttcttgcaaaaccaccacatacccagccttatgcgtccactcactctccgtctacgcaaacgacatccaaacaagccctaaacgtttagctgagaccgctatagccgtgacactaagccgagcccaatccacgaagctctttgtctctcgtctgacacgtatgaaaggtcttaagaagcgcgaggtggaagccatcaaagattgcgtcgaggagatgaacgataccgttgaccgtttgaccagatctgttcaagaactgaagttgtgtgggagtgccaaagatcaagaccagtttgcgtaccacatgagtaatgctcagacttggactagtgcggctttgactgacgagaacacttgctccgatgggttttcgggtcgggttatggatgggaggatcaagaactcggttcgggctagaatcatgaacgtgggacatgaaaccagcaacgctttgtccttgattaatgcctttgctaaaacttactaatttaaaactatattttgtcctgtaaaatatatatatagataaatgtaatgtcttgctaagagtttgatgtgatatatttctttcgattttggtagtttctttttgttttgtaacgtggtttataatagtataatgtgtattttgagctataaagttgttttt

SEQ ID NO: 28321 - protein, 207 aa, Arabidopsis thaliana
  peptide (1)..(207): Ceres Seq. ID no. 12340442
  misc_feature (26)..(204): Homolog of NCBI NO: 21555297 NR Description: unknown [Arabidopsis thaliana]
  misc_feature (21)..(204): Homolog of NCBI NO: 15234547 NR Description: putative protein
  misc_feature (15)..(204): Homolog of NCBI NO: 112717 NR Description: 21 KD PROTEIN PRECURSOR (1.2 PROTEIN)
  misc_feature (6)..(207): Homolog of NCBI NO: 15234982 NR Description: putative protein
  misc_feature (36)..(204): Homolog of NCBI NO: 7488727 NR Description: 21K protein precursor - alfalfa
  misc_feature (6)..(204): Homolog of NCBI NO: 7406663 NR Description: putative ripening-related protein [Vitis vinifera]
  misc_feature (6)..(207): Homolog of NCBI NO: 15232790 NR Description: putative protein; protein id: At3g47380.1
  misc_feature (55)..(207): Homolog of NCBI NO: 11127599 NR Description: DC 1.2 homolog [Arabidopsis thaliana]
  misc_feature (6)..(207): Homolog of NCBI NO: 15241799 NR Description: ripening-related protein - like
  misc_feature (6)..(207): Homolog of NCBI NO: 21618088 NR Description: ripening-related protein-like [Arabidopsis
QKKSLMAKQYLFLILSISYLLSLELTAATAASQTGASKKAINFIQSSCKTTTYPALCVHSLSVYANDIQTSPKRLAETAIAVTLSRAQSTKLFVSRLTRMKGLKKREVEAIKDCVEEMNDTVDRLTRSVQELKLCGSAKDQDQFAYHMSNAQTWTSAALTDENTCSDGFSGRVMDGRIKNSVRARIMNVGHETSNALSLINAFAKTY

SEQ ID NO: 28322 - protein, 202 aa, Arabidopsis thaliana
  peptide (1)..(202): Ceres Seq. ID no. 12340443
  misc_feature (21)..(199): Homolog of NCBI NO: 21555297 NR Description: unknown [Arabidopsis thaliana]
  misc_feature (16)..(199): Homolog of NCBI NO: 15234547 NR Description: putative protein
  misc_feature (10)..(199): Homolog of NCBI NO: 112717 NR Description: 21 KD PROTEIN PRECURSOR (1.2 PROTEIN)
  misc_feature (1)..(202): Homolog of NCBI NO: 15234982 NR Description: putative protein
  misc_feature (31)..(199): Homolog of NCBI NO: 7488727 NR Description: 21K protein precursor - alfalfa
  misc_feature (1)..(199): Homolog of NCBI NO: 7406663 NR Description: putative ripening-related protein [Vitis vinifera]
  misc_feature (1)..(202): Homolog of NCBI NO: 15232790 NR Description: putative protein; protein id: At3g47380.1
  misc_feature (50)..(202): Homolog of NCBI NO: 11127599 NR Description: DC 1.2 homolog [Arabidopsis thaliana]
  misc_feature (1)..(202): Homolog of NCBI NO: 15241799 NR Description: ripening-related protein - like
  misc_feature (1)..(202): Homolog of NCBI NO: 21618088 NR Description: ripening-related protein-like [Arabidopsis
MAKQYLFLILSISYLLSLELTAATAASQTGASKKAINFIQSSCKTTTYPALCVHSLSVYANDIQTSPKRLAETAIAVTLSRAQSTKLFVSRLTRMKGLKKREVEAIKDCVEEMNDTVDRLTRSVQELKLCGSAKDQDQFAYHMSNAQTWTSAALTDENTCSDGFSGRVMDGRIKNSVRARIMNVGHETSNALSLINAFAKTY

SEQ ID NO: 28323 - protein, 108 aa, Arabidopsis thaliana
  peptide (1)..(108): Ceres Seq. ID no. 12340444
  misc_feature (1)..(105): Homolog of NCBI NO: 21555297 NR Description: unknown [Arabidopsis thaliana]
  misc_feature (1)..(105): Homolog of NCBI NO: 15234547 NR Description: putative protein
  misc_feature (1)..(105): Homolog of NCBI NO: 112717 NR Description: 21 KD PROTEIN PRECURSOR (1.2 PROTEIN)
  misc_feature (1)..(108): Homolog of NCBI NO: 15234982 NR Description: putative protein
  misc_feature (1)..(105): Homolog of NCBI NO: 7488727 NR Description: 21K protein precursor - alfalfa
  misc_feature (1)..(105): Homolog of NCBI NO: 7406663 NR Description: putative ripening-related protein [Vitis vinifera]
  misc_feature (1)..(108): Homolog of NCBI NO: 15232790 NR Description: putative protein; protein id: At3g47380.1
  misc_feature (1)..(108): Homolog of NCBI NO: 11127599 NR Description: DC 1.2 homolog [Arabidopsis thaliana]
  misc_feature (1)..(108): Homolog of NCBI NO: 15241799 NR Description: ripening-related protein - like
  misc_feature (1)..(108): Homolog of NCBI NO: 21618088 NR Description: ripening-related protein-like [Arabidopsis
MKGLKKREVEAIKDCVEEMNDTVDRLTRSVQELKLCGSAKDQDQFAYHMSNAQTWTSAALTDENTCSDGFSGRVMDGRIKNSVRARIMNVGHETSNALSLINAFAKTY

SEQ ID NO: 28324 - DNA, 737 bp, Arabidopsis thaliana
  misc_feature (1)..(737): Ceres Seq. ID no. 12393223
  misc_feature: MA Experiment ID: 108607 Result: Up-regulated in Transcription
  misc_feature: MA Experiment 108607 PARAMETER Experiment Name: At_100uM_ABA_cDNA_P Parameter: Timepoint (hr) Value: 4
  misc_feature: MA Experiment 108607 PARAMETER Experiment Name: At_100uM_ABA_cDNA_P Parameter: Tissue Value: Aerial
  misc_feature: MA Experiment 108607 PARAMETER Experiment Name: At_100uM_ABA_cDNA_P Parameter: Treatment Value: 100uM ABA vs. No Treatment
  misc_feature: MA Experiment ID: 20000069 Result: Up-regulated in Transcription
  misc_feature: MA Experiment 20000069 PARAMETER Experiment Name: At_100uM_ABA_Mutants_cDNA_P Parameter: Plant Line Value: CS23
  misc_feature: MA Experiment 20000069 PARAMETER Experiment Name: At_100uM_ABA_Mutants_cDNA_P Parameter: Timepoint (hr) Value: 6
  misc_feature: MA Experiment 20000069 PARAMETER Experiment Name: At_100uM_ABA_Mutants_cDNA_P Parameter: Tissue Value: Aerial
  misc_feature: MA Experiment 20000069 PARAMETER Experiment Name: At_100uM_ABA_Mutants_cDNA_P Parameter: Treatment Value: 100uM ABA vs. No Treatment
  misc_feature: MA Experiment ID: 20000070 Result: Up-regulated in Transcription
  misc_feature: MA Experiment 20000070 PARAMETER Experiment Name: At_100uM_ABA_Mutants_cDNA_P Parameter: Plant Line Value: CS24
  misc_feature: MA Experiment 20000070 PARAMETER Experiment Name: At_100uM_ABA_Mutants_cDNA_P Parameter: Timepoint (hr) Value: 6
  misc_feature: MA Experiment 20000070 PARAMETER Experiment Name: At_100uM_ABA_Mutants_cDNA_P Parameter: Tissue Value: Aerial
  misc_feature: MA Experiment 20000070 PARAMETER Experiment Name: At_100uM_ABA_Mutants_cDNA_P Parameter: Treatment Value: 100uM ABA vs. No Treatment
  misc_feature: MA Experiment ID: 20000086 Result: Up-regulated in Transcription
  misc_feature: MA Experiment 20000086 PARAMETER Experiment Name: At_100uM_ABA_Mutants_cDNA_P Parameter: Plant Line Value: CS22
  misc_feature: MA Experiment 20000086 PARAMETER Experiment Name: At_100uM_ABA_Mutants_cDNA_P Parameter: Timepoint (hr) Value: 6
  misc_feature: MA Experiment 20000086 PARAMETER Experiment Name: At_100uM_ABA_Mutants_cDNA_P Parameter: Tissue Value: Aerial
  misc_feature: MA Experiment 20000086 PARAMETER Experiment Name: At_100uM_ABA_Mutants_cDNA_P Parameter: Treatment Value: 100uM ABA vs. No Treatment
  misc_feature: MA Experiment ID: 20000179 Result: Up-regulated in Transcription
  misc_feature: MA Experiment 20000179 PARAMETER Experiment Name: At_Germinating_Seeds_P Parameter: Age (hr) Value: 6 vs. 0
  misc_feature: MA Experiment 20000179 PARAMETER Experiment Name: At_Germinating_Seeds_P Parameter: Tissue Value: Germinating Seeds
  misc_feature: MA Experiment ID: 20000180 Result: Up-regulated in Transcription
  misc_feature: MA Experiment 20000180 PARAMETER Experiment Name: At_Germinating_Seeds_P Parameter: Age (hr) Value: 24 vs. 0
  misc_feature: MA Experiment 20000180 PARAMETER Experiment Name: At_Germinating_Seeds_P Parameter: Tissue Value: Germinating Seeds
  misc_feature: MA Experiment ID: 20000185 Result: Up-regulated in Transcription
  misc_feature: MA Experiment 20000185 PARAMETER Experiment Name: At_Roots__P Parameter: Age (day) Value: 7 vs. 21
  misc_feature: MA Experiment 20000185 PARAMETER Experiment Name: At_Roots__P Parameter: Organism Value: A. thaliana
  misc_feature: MA Experiment 20000185 PARAMETER Experiment Name: At_Roots__P Parameter: Tissue Value: Roots vs. Whole Plant
  misc_feature: MA Experiment ID: 20000437 Result: Down-regulated in Transcription
  misc_feature: MA Experiment 20000437 PARAMETER Experiment Name: At_Drought_P Parameter: Age (day) Value: 8
  misc_feature: MA Experiment 20000437 PARAMETER Experiment Name: At_Drought_P Parameter: Organism Value: A. thaliana
  misc_feature: MA Experiment 20000437 PARAMETER Experiment Name: At_Drought_P Parameter: Plant Line Value: WS
  misc_feature: MA Experiment 20000437 PARAMETER Experiment Name: At_Drought_P Parameter: Timepoint (hr) Value: 24
  misc_feature: MA Experiment 20000437 PARAMETER Experiment Name: At_Drought_P Parameter: Tissue Value: Whole Plant
  misc_feature: MA Experiment 20000437 PARAMETER Experiment Name: At_Drought_P Parameter: Treatment Value: Drought vs. No Drought
  misc_feature: MA Experiment ID: 20001554 Result: Down-regulated in Transcription
  misc_feature: MA Experiment 20001554 PARAMETER Experiment Name: At_Drought_Soil_Dry_P Parameter: Age (day) Value: 21
  misc_feature: MA Experiment 20001554 PARAMETER Experiment Name: At_Drought_Soil_Dry_P Parameter: Organism Value: A. thaliana
  misc_feature: MA Experiment 20001554 PARAMETER Experiment Name: At_Drought_Soil_Dry_P Parameter: Plant Line Value: WS
  misc_feature: MA Experiment 20001554 PARAMETER Experiment Name: At_Drought_Soil_Dry_P Parameter: Post Timepoint (hr) Value: None
  misc_feature: MA Experiment 20001554 PARAMETER Experiment Name: At_Drought_Soil_Dry_P Parameter: Post-Treatment Value: None
  misc_feature: MA Experiment 20001554 PARAMETER Experiment Name: At_Drought_Soil_Dry_P Parameter: Timepoint (day) Value: 7
  misc_feature: MA Experiment 20001554 PARAMETER Experiment Name: At_Drought_Soil_Dry_P Parameter: Treatment Value: Drought vs. No Drought
  misc_feature: MA Experiment ID: 20001555 Result: Down-regulated in Transcription
  misc_feature: MA Experiment 20001555 PARAMETER Experiment Name: At_Drought_Soil_Dry_P Parameter: Age (day) Value: 24
  misc_feature: MA Experiment 20001555 PARAMETER Experiment Name: At_Drought_Soil_Dry_P Parameter: Organism Value: A. thaliana
  misc_feature: MA Experiment 20001555 PARAMETER Experiment Name: At_Drought_Soil_Dry_P Parameter: Plant Line Value: WS
  misc_feature: MA Experiment 20001555 PARAMETER Experiment Name: At_Drought_Soil_Dry_P Parameter: Post Timepoint (hr) Value: None
  misc_feature: MA Experiment 20001555 PARAMETER Experiment Name: At_Drought_Soil_Dry_P Parameter: Post-Treatment Value: None
  misc_feature: MA Experiment 20001555 PARAMETER Experiment Name: At_Drought_Soil_Dry_P Parameter: Timepoint (day) Value: 10
  misc_feature: MA Experiment 20001555 PARAMETER Experiment Name: At_Drought_Soil_Dry_P Parameter: Treatment Value: Drought vs. No Drought
  misc_feature: MA Experiment ID: 20001556 Result: Down-regulated in Transcription
  misc_feature: MA Experiment 20001556 PARAMETER Experiment Name: At_Drought_Soil_Dry_P Parameter: Age (day) Value: 26
  misc_feature: MA Experiment 20001556 PARAMETER Experiment Name: At_Drought_Soil_Dry_P Parameter: Organism Value: A. thaliana
  misc_feature: MA Experiment 20001556 PARAMETER Experiment Name: At_Drought_Soil_Dry_P Parameter: Plant Line Value: WS
  misc_feature: MA Experiment 20001556 PARAMETER Experiment Name: At_Drought_Soil_Dry_P Parameter: Post Timepoint (hr) Value: None
  misc_feature: MA Experiment 20001556 PARAMETER Experiment Name: At_Drought_Soil_Dry_P Parameter: Post-Treatment Value: None
  misc_feature: MA Experiment 20001556 PARAMETER Experiment Name: At_Drought_Soil_Dry_P Parameter: Timepoint (day) Value: 12
  misc_feature: MA Experiment 20001556 PARAMETER Experiment Name: At_Drought_Soil_Dry_P Parameter: Treatment Value: Drought vs. No Drought
  misc_feature: MA Experiment ID: 20001560 Result: Up-regulated in Transcription
  misc_feature: MA Experiment 20001560 PARAMETER Experiment Name: At_Drought_Soil_Dry_P Parameter: Age (day) Value: 28
  misc_feature: MA Experiment 20001560 PARAMETER Experiment Name: At_Drought_Soil_Dry_P Parameter: Organism Value: A. thaliana
  misc_feature: MA Experiment 20001560 PARAMETER Experiment Name: At_Drought_Soil_Dry_P Parameter: Plant Line Value: WS
  misc_feature: MA Experiment 20001560 PARAMETER Experiment Name: At_Drought_Soil_Dry_P Parameter: Post Timepoint (hr) Value: None
  misc_feature: MA Experiment 20001560 PARAMETER Experiment Name: At_Drought_Soil_Dry_P Parameter: Post-Treatment Value: None
  misc_feature: MA Experiment 20001560 PARAMETER Experiment Name: At_Drought_Soil_Dry_P Parameter: Timepoint (day) Value: 14
  misc_feature: MA Experiment 20001560 PARAMETER Experiment Name: At_Drought_Soil_Dry_P Parameter: Treatment Value: Drought vs. No Drought
  misc_feature: MA Experiment ID: 20001905 Result: Down-regulated in Transcription
  misc_feature: MA Experiment 20001905 PARAMETER Experiment Name: At_Drought_Reproduction_P Parameter: Age (day) Value: 40
  misc_feature: MA Experiment 20001905 PARAMETER Experiment Name: At_Drought_Reproduction_P Parameter: Organism Value: A. thaliana
  misc_feature: MA Experiment 20001905 PARAMETER Experiment Name: At_Drought_Reproduction_P Parameter: Plant Line Value: WS
  misc_feature: MA Experiment 20001905 PARAMETER Experiment Name: At_Drought_Reproduction_P Parameter: Timepoint (day) Value: 10
  misc_feature: MA Experiment 20001905 PARAMETER Experiment Name: At_Drought_Reproduction_P Parameter: Tissue Value: Rosettes
  misc_feature: MA Experiment 20001905 PARAMETER Experiment Name: At_Drought_Reproduction_P Parameter: Treatment Value: Drought vs. No Drought
aacgacagattaaagcagagagaaaaacaaaatccattgaagaaggagaagaagaaaaaaaatgggagcattttgcaagttgatcgatgcggttctcttcttatactttgctctcatggcggtaattgcgccgcttatcgacggtcaaacgagtcttcccggcgatatcttcccggcgtttatcgtcgatctgaatcgctggtacattgatgaatttggagattatctagtcaaagagaagccgcatttcctagtcggactcgtctggcatgagcttttgcttctttggccgctctcgatcgtcaacgtctacgcaattctcgctgggaaatcgtggtttggtaccacctcaatggtgtacggagcttccgtcgtgacttctatggctgctatactgggagagatgataggatcagggaaggcatctgagaaattgttgatgatgtatgtgccattcatgggtgttggtattctagctcttcttcgtggtcttctttctcaatccaacaaaagtggtggagctgttggcaagagacctgctattttggccaggagaaagcgtgcttgaggtacacttgatgatcagcaagtgtatcttttgactctgagaatttctgctataggtggatttggcttttcaaacagaaaattttgaacctttgtgatgtattcttcctgtttttttagcaatatcatgtcatctgtgttcttgtttgaaattaaatgaagttaaactg

SEQ ID NO: 28325 - protein, 168 aa, Arabidopsis thaliana
  peptide (1)..(168): Ceres Seq. ID no. 12393224
  misc_feature (1)..(112): Homolog of NCBI NO: 27688749 NR Description: similar to RIKEN cDNA 1810014L12
  misc_feature (1)..(112): Homolog of NCBI NO: 19526880 NR Description: RIKEN cDNA 1810014L12 [Mus musculus]
  misc_feature (2)..(116): Homolog of NCBI NO: 2135212 NR Description: gene MAC30 protein - human (fragment)
  misc_feature (1)..(167): Homolog of NCBI NO: 28411943 NR Description: OSJNBa0027N13.35 [Oryza sativa (japonica
  misc_feature (1)..(168): Homolog of NCBI NO: 28411944 NR Description: OSJNBa0027N13.37 [Oryza sativa (japonica
  misc_feature (1)..(168): Homolog of NCBI NO: 15220447 NR Description: hypothetical protein; protein id: At1g05220.1
  misc_feature (1)..(168): Homolog of NCBI NO: 18390494 NR Description: expressed protein
  misc_feature (1)..(168): Homolog of NCBI NO: 18402955 NR Description: expressed protein
MGAFCKLIDAVLFLYFALMAVIAPLIDGQTSLPGDIFPAFIVDLNRWYIDEFGDYLVKEKPHFLVGLVWHELLLLWPLSIVNVYAILAGKSWFGTTSMVYGASVVTSMAAILGEMIGSGKASEKLLMMYVPFMGVGILALLRGLLSQSNKSGGAVGKRPAILARRKRA

SEQ ID NO: 28326 - protein, 150 aa, Arabidopsis thaliana
  peptide (1)..(150): Ceres Seq. ID no. 12393225
  misc_feature (1)..(94): Homolog of NCBI NO: 27688749 NR Description: similar to RIKEN cDNA 1810014L12
  misc_feature (1)..(94): Homolog of NCBI NO: 19526880 NR Description: RIKEN cDNA 1810014L12 [Mus musculus]
  misc_feature (1)..(98): Homolog of NCBI NO: 2135212 NR Description: gene MAC30 protein - human (fragment)
  misc_feature (1)..(149): Homolog of NCBI NO: 28411943 NR Description: OSJNBa0027N13.35 [Oryza sativa (japonica
  misc_feature (1)..(150): Homolog of NCBI NO: 28411944 NR Description: OSJNBa0027N13.37 [Oryza sativa (japonica
  misc_feature (1)..(150): Homolog of NCBI NO: 15220447 NR Description: hypothetical protein; protein id: At1g05220.1
  misc_feature (1)..(150): Homolog of NCBI NO: 18390494 NR Description: expressed protein
  misc_feature (1)..(150): Homolog of NCBI NO: 18402955 NR Description: expressed protein
MAVIAPLIDGQTSLPGDIFPAFIVDLNRWYIDEFGDYLVKEKPHFLVGLVWHELLLLWPLSIVNVYAILAGKSWFGTTSMVYGASVVTSMAAILGEMIGSGKASEKLLMMYVPFMGVGILALLRGLLSQSNKSGGAVGKRPAILARRKRA

SEQ ID NO: 28327 - DNA, 1002 bp, Arabidopsis thaliana
  misc_feature (1)..(1002): Ceres Seq. ID no. 12420559
  misc_feature: MA Experiment ID: 20000180 Result: Up-regulated in Transcription
  misc_feature: MA Experiment 20000180 PARAMETER Experiment Name: At_Germinating_Seeds_P Parameter: Age (hr) Value: 24 vs. 0
  misc_feature: MA Experiment 20000180 PARAMETER Experiment Name: At_Germinating_Seeds_P Parameter: Tissue Value: Germinating Seeds
  misc_feature: MA Experiment ID: 20000182 Result: Down-regulated in Transcription
  misc_feature: MA Experiment 20000182 PARAMETER Experiment Name: At_2mM_SA_P Parameter: Age (day) Value: 14
  misc_feature: MA Experiment 20000182 PARAMETER Experiment Name: At_2mM_SA_P Parameter: Organism Value: A. thaliana
  misc_feature: MA Experiment 20000182 PARAMETER Experiment Name: At_2mM_SA_P Parameter: Plant Line Value: WS
  misc_feature: MA Experiment 20000182 PARAMETER Experiment Name: At_2mM_SA_P Parameter: Timepoint (hr) Value: 6
  misc_feature: MA Experiment 20000182 PARAMETER Experiment Name: At_2mM_SA_P Parameter: Tissue Value: Aerial
  misc_feature: MA Experiment 20000182 PARAMETER Experiment Name: At_2mM_SA_P Parameter: Treatment Value: 2mM SA vs. No Treatment
  misc_feature: MA Experiment ID: 20000184 Result: Up-regulated in Transcription
  misc_feature: MA Experiment 20000184 PARAMETER Experiment Name: At_Shoots__P Parameter: Age (day) Value: 7
  misc_feature: MA Experiment 20000184 PARAMETER Experiment Name: At_Shoots__P Parameter: Tissue Value: Shoots vs. Whole Plant
  misc_feature: MA Experiment ID: 20000185 Result: Up-regulated in Transcription
  misc_feature: MA Experiment 20000185 PARAMETER Experiment Name: At_Roots__P Parameter: Age (day) Value: 7 vs. 21
  misc_feature: MA Experiment 20000185 PARAMETER Experiment Name: At_Roots__P Parameter: Organism Value: A. thaliana
  misc_feature: MA Experiment 20000185 PARAMETER Experiment Name: At_Roots__P Parameter: Tissue Value: Roots vs. Whole Plant
  misc_feature: MA Experiment ID: 20000286 Result: Down-regulated in Transcription
  misc_feature: MA Experiment 20000286 PARAMETER Experiment Name: At_Open_Flower_P Parameter: Age (day) Value: 21
  misc_feature: MA Experiment 20000286 PARAMETER Experiment Name: At_Open_Flower_P Parameter: Plant Line Value: WS
  misc_feature: MA Experiment 20000286 PARAMETER Experiment Name: At_Open_Flower_P Parameter: Tissue Value: Half Open vs. Whole Plant
  misc_feature: MA Experiment ID: 20000439 Result: Up-regulated in Transcription
  misc_feature: MA Experiment 20000439 PARAMETER Experiment Name: At_Roots__P Parameter: Age (day) Value: 14 vs. 21
  misc_feature: MA Experiment 20000439 PARAMETER Experiment Name: At_Roots__P Parameter: Organism Value: A. thaliana
  misc_feature: MA Experiment 20000439 PARAMETER Experiment Name: At_Roots__P Parameter: Tissue Value: Roots vs. Whole Plant
  misc_feature: MA Experiment ID: 20000452 Result: Up-regulated in Transcription
  misc_feature: MA Experiment 20000452 PARAMETER Experiment Name: At_CS6879_Shoots-Roots_P Parameter: Age (day) Value: 14
  misc_feature: MA Experiment 20000452 PARAMETER Experiment Name: At_CS6879_Shoots-Roots_P Parameter: Organism Value: A. thaliana
  misc_feature: MA Experiment 20000452 PARAMETER Experiment Name: At_CS6879_Shoots-Roots_P Parameter: Plant Line Value: CS6879 vs. WS
  misc_feature: MA Experiment 20000452 PARAMETER Experiment Name: At_CS6879_Shoots-Roots_P Parameter: Tissue Value: Shoots
  misc_feature: MA Experiment ID: 20000453 Result: Up-regulated in Transcription
  misc_feature: MA Experiment 20000453 PARAMETER Experiment Name: At_100uM_ABA_P Parameter: Age (day) Value: 15
  misc_feature: MA Experiment 20000453 PARAMETER Experiment Name: At_100uM_ABA_P Parameter: Organism Value: A. thaliana
  misc_feature: MA Experiment 20000453 PARAMETER Experiment Name: At_100uM_ABA_P Parameter: Plant Line Value: WS
  misc_feature: MA Experiment 20000453 PARAMETER Experiment Name: At_100uM_ABA_P Parameter: Timepoint (hr) Value: 24
  misc_feature: MA Experiment 20000453 PARAMETER Experiment Name: At_100uM_ABA_P Parameter: Tissue Value: Aerial
  misc_feature: MA Experiment 20000453 PARAMETER Experiment Name: At_100uM_ABA_P Parameter: Treatment Value: 100uM ABA vs. No Treatment
  misc_feature: MA Experiment ID: 20000456 Result: Up-regulated in Transcription
  misc_feature: MA Experiment 20000456 PARAMETER Experiment Name: At_100uM_BA_P Parameter: Age (day) Value: 14
  misc_feature: MA Experiment 20000456 PARAMETER Experiment Name: At_100uM_BA_P Parameter: Organism Value: A. thaliana
  misc_feature: MA Experiment 20000456 PARAMETER Experiment Name: At_100uM_BA_P Parameter: Plant Line Value: WS
  misc_feature: MA Experiment 20000456 PARAMETER Experiment Name: At_100uM_BA_P Parameter: Timepoint (hr) Value: 6
  misc_feature: MA Experiment 20000456 PARAMETER Experiment Name: At_100uM_BA_P Parameter: Tissue Value: Aerial
  misc_feature: MA Experiment 20000456 PARAMETER Experiment Name: At_100uM_BA_P Parameter: Treatment Value: 100uM BA vs. No Treatment
  misc_feature: MA Experiment ID: 20000460 Result: Down-regulated in Transcription
  misc_feature: MA Experiment 20000460 PARAMETER Experiment Name: At_10percent_PEG_P Parameter: Age (day) Value: 12
  misc_feature: MA Experiment 20000460 PARAMETER Experiment Name: At_10percent_PEG_P Parameter: Organism Value: A. thaliana
  misc_feature: MA Experiment 20000460 PARAMETER Experiment Name: At_10percent_PEG_P Parameter: Plant Line Value: WS
  misc_feature: MA Experiment 20000460 PARAMETER Experiment Name: At_10percent_PEG_P Parameter: Timepoint (day) Value: 12
  misc_feature: MA Experiment 20000460 PARAMETER Experiment Name: At_10percent_PEG_P Parameter: Tissue Value: Whole Plant
  misc_feature: MA Experiment 20000460 PARAMETER Experiment Name: At_10percent_PEG_P Parameter: Treatment Value: 10percent PEG vs. No Treatment
  misc_feature: MA Experiment ID: 20000527 Result: Down-regulated in Transcription
  misc_feature: MA Experiment 20000527 PARAMETER Experiment Name: At_10percent_PEG_P Parameter: Age (day) Value: 20
  misc_feature: MA Experiment 20000527 PARAMETER Experiment Name: At_10percent_PEG_P Parameter: Organism Value: A. thaliana
  misc_feature: MA Experiment 20000527 PARAMETER Experiment Name: At_10percent_PEG_P Parameter: Plant Line Value: WS
  misc_feature: MA Experiment 20000527 PARAMETER Experiment Name: At_10percent_PEG_P Parameter: Timepoint (day) Value: 20
  misc_feature: MA Experiment 20000527 PARAMETER Experiment Name: At_10percent_PEG_P Parameter: Tissue Value: Whole Plant
  misc_feature: MA Experiment 20000527 PARAMETER Experiment Name: At_10percent_PEG_P Parameter: Treatment Value: 10percent PEG vs. No Treatment
  misc_feature: MA Experiment ID: 20000576 Result: Down-regulated in Transcription
  misc_feature: MA Experiment 20000576 PARAMETER Experiment Name: At_100uM_ABA_Mutants__P Parameter: Organism Value: A. thaliana
  misc_feature: MA Experiment 20000576 PARAMETER Experiment Name: At_100uM_ABA_Mutants__P Parameter: Plant Line Value: CS23
  misc_feature: MA Experiment 20000576 PARAMETER Experiment Name: At_100uM_ABA_Mutants__P Parameter: Timepoint (hr) Value: 6
  misc_feature: MA Experiment 20000576 PARAMETER Experiment Name: At_100uM_ABA_Mutants__P Parameter: Tissue Value: Whole Plant
  misc_feature: MA Experiment 20000576 PARAMETER Experiment Name: At_100uM_ABA_Mutants__P Parameter: Treatment Value: 1uM ABA vs. No Treatment
  misc_feature: MA Experiment ID: 20001905 Result: Up-regulated in Transcription
  misc_feature: MA Experiment 20001905 PARAMETER Experiment Name: At_Drought_Reproduction_P Parameter: Age (day) Value: 40
  misc_feature: MA Experiment 20001905 PARAMETER Experiment Name: At_Drought_Reproduction_P Parameter: Organism Value: A. thaliana
  misc_feature: MA Experiment 20001905 PARAMETER Experiment Name: At_Drought_Reproduction_P Parameter: Plant Line Value: WS
  misc_feature: MA Experiment 20001905 PARAMETER Experiment Name: At_Drought_Reproduction_P Parameter: Timepoint (day) Value: 10
  misc_feature: MA Experiment 20001905 PARAMETER Experiment Name: At_Drought_Reproduction_P Parameter: Tissue Value: Rosettes
  misc_feature: MA Experiment 20001905 PARAMETER Experiment Name: At_Drought_Reproduction_P Parameter: Treatment Value: Drought vs. No Drought
  misc_feature: Phenotype: ROSETTE LEAVES Shape-Trident
  misc_feature: Phenotype: WHOLE PLANT Dwarf-Misc. Dwarf
  misc_feature: Phenotype: WHOLE PLANT Size-Small
  misc_feature: Phenotype: FERTILITY Fertility-Sterile
  misc_feature: Phenotype: WHOLE PLANT Size-Small
  misc_feature: Phenotype: ROSETTE LEAVES Shape-Serrate
  misc_feature: Phenotype: WHOLE PLANT Size-Small
  misc_feature: Phenotype: FERTILITY Fertility-Sterile
  misc_feature: Phenotype: WHOLE PLANT Color-Dark Green
  misc_feature: Phenotype: WHOLE PLANT Size-Large
  misc_feature: Phenotype: INFLORESCENCE Flowering Time-Late Flowering
  misc_feature: Phenotype: DIED PREMATURELY but unlikely to be related to gene
  misc_feature: Phenotype: ROSETTE LEAVES Shape-Oval
  misc_feature: Phenotype: WHOLE PLANT Color-Dark Green
  misc_feature: Phenotype: WHOLE PLANT Size-Small
attcaatttttggtggtcttttcaaaagtggaaatacaacaaaacaatgtcgggacttagaagattggatggcaagatcgcaattataacaggcggagctagtgggattggagctgaagcggttaggttgttcacggaccatggagctaaagtggtcatcgtggacatacaagaagagcttggccaaaacctcgccgtttcgatagggctagacaaagcaagtttttaccgttgtaatgtaaccgacgagacggatgtcgagaacgccgttaagttcaccgttgaaaaacacggaaagcttgacgttctgtttagtaacgccggggtcttggaagcgtttggaagcgttcttgatttggatcttgaggcgtttgatcgaacgatggcggttaacgttcgcggtgcggctgcgtttatcaaacacgcggcacgttcgatggtggctagtggtactcgtggctccattgtatgtacgacgagtattgcggcagagataggtggtccgggacctcatagttacacggcttctaagcacgcgcttctcgggctgatccgatcagcgtgtgctggactggggcagtacggtattagagtcaacggtgttgcaccgtatggggttgccactgggatgactagcgcctacaatgaggaagcggtgaagatgcttgaagaatatggtgaagccctagggaatctcaaaggtgtggtgcttaaagctcgccacatcgcagaagcagctttgtttttggcttctgatgattcggtttatattagcggtcagaatctggtggttgatggtggttttagcgtcgttaagctcatgagcacgtgagaaacaactaaaaaatgagggcatagactctcttgacactttcattttatttcttgaataaaaattgaatttataagtactttcgatcattgtgttgtatgttaggctcttgagtttatataaaccttgagtttaataatttactttttcttttagtttctcaattctat

SEQ ID NO: 28328 - protein, 276 aa, Arabidopsis thaliana
  peptide (1)..(276): Ceres Seq. ID no. 12420560
  misc_feature (110)..(275): Homolog of NCBI NO: 9293921 NR Description: contains similarity to alcohol
  misc_feature (128)..(276): Homolog of NCBI NO: 28416591 NR Description: At3g29250 [Arabidopsis thaliana]
  misc_feature (16)..(272): Homolog of NCBI NO: 15983819 NR Description: 3-beta-hydroxysteroiddehydrogenase [Digitalis
  misc_feature (21)..(272): Homolog of NCBI NO: 7431087 NR Description: probable alcohol dehydrogenase [imported] -
  misc_feature (16)..(272): Homolog of NCBI NO: 18407273 NR Description: putative alcohol dehydrogenase
  misc_feature (16)..(272): Homolog of NCBI NO: 15226500 NR Description: (NM_130280) putative alcohol dehydrogenase
  misc_feature (16)..(272): Homolog of NCBI NO: 15226503 NR Description: (NM_130281) putative alcohol dehydrogenase
  misc_feature (16)..(275): Homolog of NCBI NO: 15228656 NR Description: short-chain alcohol dehydrogenase, putative
  misc_feature (29)..(276): Homolog of NCBI NO: 22331405 NR Description: short-chain alcohol dehydrogenase, putative
  misc_feature (1)..(276): Homolog of NCBI NO: 9293918 NR Description: alcohol dehydrogenase-like protein [Arabidopsis
FNFWWSFQKWKYNKTMSGLRRLDGKIAIITGGASGIGAEAVRLFTDHGAKVVIVDIQEELGQNLAVSIGLDKASFYRCNVTDETDVENAVKFTVEKHGKLDVLFSNAGVLEAFGSVLDLDLEAFDRTMAVNVRGAAAFIKHAARSMVASGTRGSIVCTTSIAAEIGGPGPHSYTASKHALLGLIRSACAGLGQYGIRVNGVAPYGVATGMTSAYNEEAVKMLEEYGEALGNLKGVVLKARHIAEAALFLASDDSVYISGQNLVVDGGFSVVKLMST

SEQ ID NO: 28329 - protein, 261 aa, Arabidopsis thaliana
  peptide (1)..(261): Ceres Seq. ID no. 12420561
  misc_feature (95)..(260): Homolog of NCBI NO: 9293921 NR Description: contains similarity to alcohol
  misc_feature (113)..(261): Homolog of NCBI NO: 28416591 NR Description: At3g29250 [Arabidopsis thaliana]
  misc_feature (1)..(257): Homolog of NCBI NO: 15983819 NR Description: 3-beta-hydroxysteroiddehydrogenase [Digitalis
  misc_feature (6)..(257): Homolog of NCBI NO: 7431087 NR Description: probable alcohol dehydrogenase [imported] -
  misc_feature (1)..(257): Homolog of NCBI NO: 18407273 NR Description: putative alcohol dehydrogenase
  misc_feature (1)..(257): Homolog of NCBI NO: 15226500 NR Description: (NM_130280) putative alcohol dehydrogenase
  misc_feature (1)..(257): Homolog of NCBI NO: 15226503 NR Description: (NM_130281) putative alcohol dehydrogenase
  misc_feature (1)..(260): Homolog of NCBI NO: 15228656 NR Description: short-chain alcohol dehydrogenase, putative
  misc_feature (14)..(261): Homolog of NCBI NO: 22331405 NR Description: short-chain alcohol dehydrogenase, putative
  misc_feature (1)..(261): Homolog of NCBI NO: 9293918 NR Description: alcohol dehydrogenase-like protein [Arabidopsis
MSGLRRLDGKIAIITGGASGIGAEAVRLFTDHGAKVVIVDIQEELGQNLAVSIGLDKASFYRCNVTDETDVENAVKFTVEKHGKLDVLFSNAGVLEAFGSVLDLDLEAFDRTMAVNVRGAAAFIKHAARSMVASGTRGSIVCTTSIAAEIGGPGPHSYTASKHALLGLIRSACAGLGQYGIRVNGVAPYGVATGMTSAYNEEAVKMLEEYGEALGNLKGVVLKARHIAEAALFLASDDSVYISGQNLVVDGGFSVVKLMST

SEQ ID NO: 28330 - protein, 149 aa, Arabidopsis thaliana
  peptide (1)..(149): Ceres Seq. ID no. 12420562
  misc_feature (1)..(148): Homolog of NCBI NO: 9293921 NR Description: contains similarity to alcohol
  misc_feature (1)..(149): Homolog of NCBI NO: 28416591 NR Description: At3g29250 [Arabidopsis thaliana]
  misc_feature (1)..(145): Homolog of NCBI NO: 15983819 NR Description: 3-beta-hydroxysteroiddehydrogenase [Digitalis
  misc_feature (1)..(145): Homolog of NCBI NO: 7431087 NR Description: probable alcohol dehydrogenase [imported] -
  misc_feature (1)..(145): Homolog of NCBI NO: 18407273 NR Description: putative alcohol dehydrogenase
  misc_feature (1)..(145): Homolog of NCBI NO: 15226500 NR Description: (NM_130280) putative alcohol dehydrogenase
  misc_feature (1)..(145): Homolog of NCBI NO: 15226503 NR Description: (NM_130281) putative alcohol dehydrogenase
  misc_feature (1)..(148): Homolog of NCBI NO: 15228656 NR Description: short-chain alcohol dehydrogenase, putative
  misc_feature (1)..(149): Homolog of NCBI NO: 22331405 NR Description: short-chain alcohol dehydrogenase, putative
  misc_feature (1)..(149): Homolog of NCBI NO: 9293918 NR Description: alcohol dehydrogenase-like protein [Arabidopsis
MAVNVRGAAAFIKHAARSMVASGTRGSIVCTTSIAAEIGGPGPHSYTASKHALLGLIRSACAGLGQYGIRVNGVAPYGVATGMTSAYNEEAVKMLEEYGEALGNLKGVVLKARHIAEAALFLASDDSVYISGQNLVVDGGFSVVKLMST

SEQ ID NO: 28331 - DNA, 689 bp, Arabidopsis thaliana
  misc_feature (1)..(689): Ceres Seq. ID no. 13494629
  misc_feature: MA Experiment ID: 108434 Result: Down-regulated in Transcription
  misc_feature: MA Experiment 108434 PARAMETER Experiment Name: At_Root_Tips_cDNA_P Parameter: Tissue Value: Root Tips
  misc_feature: MA Experiment ID: 20000185 Result: Up-regulated in Transcription
  misc_feature: MA Experiment 20000185 PARAMETER Experiment Name: At_Roots__P Parameter: Age (day) Value: 7 vs. 21
  misc_feature: MA Experiment 20000185 PARAMETER Experiment Name: At_Roots__P Parameter: Organism Value: A. thaliana
  misc_feature: MA Experiment 20000185 PARAMETER Experiment Name: At_Roots__P Parameter: Tissue Value: Roots vs. Whole Plant
  misc_feature: MA Experiment ID: 20000227 Result: Up-regulated in Transcription
  misc_feature: MA Experiment 20000227 PARAMETER Experiment Name: At_Root-Tips-vs-Tops_P Parameter: Tissue Value: Root Tips vs. Root Tops
  misc_feature: MA Experiment ID: 20000234 Result: Up-regulated in Transcription
  misc_feature: MA Experiment 20000234 PARAMETER Experiment Name: At_Siliques_P Parameter: Age (day) Value: 21
  misc_feature: MA Experiment 20000234 PARAMETER Experiment Name: At_Siliques_P Parameter: Organism Value: A. thaliana
  misc_feature: MA Experiment 20000234 PARAMETER Experiment Name: At_Siliques_P Parameter: Plant Line Value: WS
  misc_feature: MA Experiment 20000234 PARAMETER Experiment Name: At_Siliques_P Parameter: Tissue Value: Less Than 5mm Siliques vs. Whole Plant
  misc_feature: MA Experiment ID: 20000235 Result: Up-regulated in Transcription
  misc_feature: MA Experiment 20000235 PARAMETER Experiment Name: At_Siliques_P Parameter: Age (day) Value: 21
  misc_feature: MA Experiment 20000235 PARAMETER Experiment Name: At_Siliques_P Parameter: Organism Value: A. thaliana
  misc_feature: MA Experiment 20000235 PARAMETER Experiment Name: At_Siliques_P Parameter: Plant Line Value: WS
  misc_feature: MA Experiment 20000235 PARAMETER Experiment Name: At_Siliques_P Parameter: Tissue Value: 5-10mm Siliques vs. Whole Plant
  misc_feature: MA Experiment ID: 20000264 Result: Up-regulated in Transcription
  misc_feature: MA Experiment 20000264 PARAMETER Experiment Name: At_Open_Flower_P Parameter: Age (day) Value: 21
  misc_feature: MA Experiment 20000264 PARAMETER Experiment Name: At_Open_Flower_P Parameter: Plant Line Value: WS
  misc_feature: MA Experiment 20000264 PARAMETER Experiment Name: At_Open_Flower_P Parameter: Tissue Value: Open Flower vs. Whole Plant
  misc_feature: MA Experiment ID: 20000265 Result: Up-regulated in Transcription
  misc_feature: MA Experiment 20000265 PARAMETER Experiment Name: At_Open_Flower_P Parameter: Age (day) Value: 21
  misc_feature: MA Experiment 20000265 PARAMETER Experiment Name: At_Open_Flower_P Parameter: Plant Line Value: WS
  misc_feature: MA Experiment 20000265 PARAMETER Experiment Name: At_Open_Flower_P Parameter: Tissue Value: Closed Flower vs. Whole Plant
  misc_feature: MA Experiment ID: 20000286 Result: Up-regulated in Transcription
  misc_feature: MA Experiment 20000286 PARAMETER Experiment Name: At_Open_Flower_P Parameter: Age (day) Value: 21
  misc_feature: MA Experiment 20000286 PARAMETER Experiment Name: At_Open_Flower_P Parameter: Plant Line Value: WS
  misc_feature: MA Experiment 20000286 PARAMETER Experiment Name: At_Open_Flower_P Parameter: Tissue Value: Half Open vs. Whole Plant
  misc_feature: MA Experiment ID: 20000439 Result: Up-regulated in Transcription
  misc_feature: MA Experiment 20000439 PARAMETER Experiment Name: At_Roots__P Parameter: Age (day) Value: 14 vs. 21
  misc_feature: MA Experiment 20000439 PARAMETER Experiment Name: At_Roots__P Parameter: Organism Value: A. thaliana
  misc_feature: MA Experiment 20000439 PARAMETER Experiment Name: At_Roots__P Parameter: Tissue Value: Roots vs. Whole Plant
  misc_feature: MA Experiment ID: 20000496 Result: Down-regulated in Transcription
  misc_feature: MA Experiment 20000496 PARAMETER Experiment Name: At_Guard_Cells_P Parameter: Harvest Date Value: 7/19/2002
  misc_feature: MA Experiment 20000496 PARAMETER Experiment Name: At_Guard_Cells_P Parameter: Organism Value: Canola
  misc_feature: MA Experiment 20000496 PARAMETER Experiment Name: At_Guard_Cells_P Parameter: Tissue Value: Guard Cells vs. Leaves
  misc_feature: MA Experiment ID: 20000527 Result: Down-regulated in Transcription
  misc_feature: MA Experiment 20000527 PARAMETER Experiment Name: At_10percent_PEG_P Parameter: Age (day) Value: 20
  misc_feature: MA Experiment 20000527 PARAMETER Experiment Name: At_10percent_PEG_P Parameter: Organism Value: A. thaliana
  misc_feature: MA Experiment 20000527 PARAMETER Experiment Name: At_10percent_PEG_P Parameter: Plant Line Value: WS
  misc_feature: MA Experiment 20000527 PARAMETER Experiment Name: At_10percent_PEG_P Parameter: Timepoint (day) Value: 20
  misc_feature: MA Experiment 20000527 PARAMETER Experiment Name: At_10percent_PEG_P Parameter: Tissue Value: Whole Plant
  misc_feature: MA Experiment 20000527 PARAMETER Experiment Name: At_10percent_PEG_P Parameter: Treatment Value: 10percent PEG vs. No Treatment
  misc_feature: MA Experiment ID: 20001450 Result: Down-regulated in Transcription
  misc_feature: MA Experiment 20001450 PARAMETER Experiment Name: At_Far-red-induction_P Parameter: Age (day) Value: 7
  misc_feature: MA Experiment 20001450 PARAMETER Experiment Name: At_Far-red-induction_P Parameter: Light Value: Far-red vs. White
  misc_feature: MA Experiment 20001450 PARAMETER Experiment Name: At_Far-red-induction_P Parameter: Organism Value: A. thaliana
  misc_feature: MA Experiment 20001450 PARAMETER Experiment Name: At_Far-red-induction_P Parameter: Plant Line Value: Columbia
  misc_feature: MA Experiment 20001450 PARAMETER Experiment Name: At_Far-red-induction_P Parameter: Timepoint (hr) Value: 8
  misc_feature: MA Experiment 20001450 PARAMETER Experiment Name: At_Far-red-induction_P Parameter: Tissue Value: Whole Plant
gagagagagagacaaagagagatctgatcctttgaagaaacaacaccaaaaaaaaaaaaaaaagaatggcatcagcggatgaaaaggtggtggaagagaaggcttcggtgatttcaagcttgttggacaaagccaaaggtttctttgcggagaagctggcgaatattccgacgccggaagcaaccgtggacgacgttgatttcaaaggcgtgacacgtgatggagtagattatcacgccaaggtctccgtcaagaatccttactctcaatccatccctatctgccagatctcttacatcctcaagagtgccacaaggacgatcgcgtcaggcacgataccggacccgggttcgttggttgggagcggcacgacggttctggacgtaccggttaaggtggcttatagcatagcggttagtctgatgaaggatatgtgtacggactgggacattgactatcaactagacattgggctaaccttcgacattcctgttgttggtgatatcaccattcctgtctctactcagggagagatcaagctcccttcccttcgcgacttcttttaattaccttatttcaaatatagttttcttaaatcataatctaattttcaataatgtacgatccataaacatagacgatcggagattaatacatttctggaatcctttttttattttgttgattcc

SEQ ID NO: 28332 - protein, 166 aa, Arabidopsis thaliana; identical to SEQ ID NO: 26434
  peptide (1)..(166): Ceres Seq. ID no. 13494630
  misc_feature (17)..(166): Pfam Name: Late embryogenesis abundant protein Pfam Description: Late embryogenesis abundant protein
  misc_feature (16)..(166): Homolog of NCBI NO: 1170745 NR Description: Late embryogenesis abundant protein Lea14-A
  misc_feature (16)..(166): Homolog of NCBI NO: 1170746 NR Description: Desiccation protectant protein Lea14 homolog
  misc_feature (1)..(166): Homolog of NCBI NO: 3789986 NR Description: desiccation protein [Brassica napus]
  misc_feature (1)..(166): Homolog of NCBI NO: 21555248 NR Description: putative desiccation related protein [Arabidopsis
  misc_feature (1)..(166): Homolog of NCBI NO: 15225930 NR Description: desiccation related protein -related [Arabidopsis

SEQ ID NO: 28333 - DNA, 678 bp, Arabidopsis thaliana
  misc_feature (1)..(678): Ceres Seq. ID no. 12330045
  misc_feature: MA Experiment ID: 108461 Result: Up-regulated in Transcription
  misc_feature: MA Experiment 108461 PARAMETER Experiment Name: At_Germinating_Seeds_cDNA_P Parameter: Age (day) Value: 1 vs. 0
  misc_feature: MA Experiment 108461 PARAMETER Experiment Name: At_Germinating_Seeds_cDNA_P Parameter: Tissue Value: Germinating Seeds
  misc_feature: MA Experiment ID: 108462 Result: Up-regulated in Transcription
  misc_feature: MA Experiment 108462 PARAMETER Experiment Name: At_Germinating_Seeds_cDNA_P Parameter: Age (day) Value: 2 vs. 0
  misc_feature: MA Experiment 108462 PARAMETER Experiment Name: At_Germinating_Seeds_cDNA_P Parameter: Tissue Value: Germinating Seeds
  misc_feature: MA Experiment ID: 108464 Result: Up-regulated in Transcription
  misc_feature: MA Experiment 108464 PARAMETER Experiment Name: At_Germinating_Seeds_cDNA_P Parameter: Age (day) Value: 4 vs. 0
  misc_feature: MA Experiment 108464 PARAMETER Experiment Name: At_Germinating_Seeds_cDNA_P Parameter: Tissue Value: Germinating Seeds
  misc_feature: MA Experiment ID: 108561 Result: Down-regulated in Transcription
  misc_feature: MA Experiment 108561 PARAMETER Experiment Name: At_100uM_ABA_cDNA_P Parameter: Timepoint (hr) Value: 6
  misc_feature: MA Experiment 108561 PARAMETER Experiment Name: At_100uM_ABA_cDNA_P Parameter: Tissue Value: Aerial
  misc_feature: MA Experiment 108561 PARAMETER Experiment Name: At_100uM_ABA_cDNA_P Parameter: Treatment Value: 100uM ABA vs. No Treatment
  misc_feature: MA Experiment ID: 20000179 Result: Up-regulated in Transcription
  misc_feature: MA Experiment 20000179 PARAMETER Experiment Name: At_Germinating_Seeds_P Parameter: Age (hr) Value: 6 vs. 0
  misc_feature: MA Experiment 20000179 PARAMETER Experiment Name: At_Germinating_Seeds_P Parameter: Tissue Value: Germinating Seeds
  misc_feature: MA Experiment ID: 20000180 Result: Up-regulated in Transcription
  misc_feature: MA Experiment 20000180 PARAMETER Experiment Name: At_Germinating_Seeds_P Parameter: Age (hr) Value: 24 vs. 0
  misc_feature: MA Experiment 20000180 PARAMETER Experiment Name: At_Germinating_Seeds_P Parameter: Tissue Value: Germinating Seeds
  misc_feature: MA Experiment ID: 20001248 Result: Down-regulated in Transcription
  misc_feature: MA Experiment 20001248 PARAMETER Experiment Name: At_Far-red-induction_P Parameter: Age (day) Value: 7
  misc_feature: MA Experiment 20001248 PARAMETER Experiment Name: At_Far-red-induction_P Parameter: Light Value: Far-red vs. White
  misc_feature: MA Experiment 20001248 PARAMETER Experiment Name: At_Far-red-induction_P Parameter: Organism Value: A. thaliana
  misc_feature: MA Experiment 20001248 PARAMETER Experiment Name: At_Far-red-induction_P Parameter: Plant Line Value: Columbia
  misc_feature: MA Experiment 20001248 PARAMETER Experiment Name: At_Far-red-induction_P Parameter: Timepoint (hr) Value: 4
  misc_feature: MA Experiment 20001248 PARAMETER Experiment Name: At_Far-red-induction_P Parameter: Tissue Value: Whole Plant
aaaaatttcaaaatccctaaaaagctttcaaacaaataaactcagaaaaaatggccgaaaccgaaacggagtcgatcaccacctcttctccaccgccgatctcagaaatcgaaaactccaccacattaccgacaacggagacggagaagaatccgaatccggtaaccatctcgctccgaatctggccaccgactcaaaaaactcgcgacgccgtgattaaccgtctgatcgaaacactgtcaaccgaatcaatcctctccaagagattcggatctcttgaatcggaagaagcttcctccgtcgcgaaagcaatcgaagaagaagcttacgccgtcgcttctgccaccgtattcggtgatgacgacgggatcgagattcttaaagcttattctaaagagattagtaaacgtatgcttgaatctgttaaagctaagaataatgtggcttctcctccaccaaaggatggtgatggaattgaatcagctgttgattcgaaaattgattcaagtgaagcttgaggaggcttgaatatggtgttgttctcttatctttaactatctttttatttgtgttagattgttatgcgattatctatctcagagtttttgttgttgtataacttgtggatttgggacctgttactaatatgattttgtggttgatttggttttgacgttc

SEQ ID NO: 28334 - protein, 155 aa, Arabidopsis thaliana
  peptide (1)..(155): Ceres Seq. ID no. 12330046
  misc_feature (17)..(153): Homolog of NCBI NO: 7546725 NR Description: MFP1 attachment factor 1 [Lycopersicon esculentum]
  misc_feature (1)..(154): Homolog of NCBI NO: 21553809 NR Description: unknown [Arabidopsis thaliana]
  misc_feature (1)..(154): Homolog of NCBI NO: 18401618 NR Description: expressed protein
  misc_feature (1)..(155): Homolog of NCBI NO: 15239170 NR Description: putative protein
  misc_feature (1)..(155): Homolog of NCBI NO: 21618109 NR Description: MFP1 attachment factor 1 [Arabidopsis thaliana]
MAETETESITTSSPPPISEIENSTTLPTTETEKNPNPVTISLRIWPPTQKTRDAVINRLIETLSTESILSKRFGSLESEEASSVAKAIEEEAYAVASATVFGDDDGIEILKAYSKEISKRMLESVKAKNNVASPPPKDGDGIESAVDSKIDSSEA

SEQ ID NO: 28335 - DNA, 1463 bp, Arabidopsis thaliana
  misc_feature (1)..(1463): Ceres Seq. ID no. 13487748
  misc_feature: MA Experiment ID: 108464 Result: Up-regulated in Transcription
  misc_feature: MA Experiment 108464 PARAMETER Experiment Name: At_Germinating_Seeds_cDNA_P Parameter: Age (day) Value: 4 vs. 0
  misc_feature: MA Experiment 108464 PARAMETER Experiment Name: At_Germinating_Seeds_cDNA_P Parameter: Tissue Value: Germinating Seeds
  misc_feature: MA Experiment ID: 20000111 Result: Down-regulated in Transcription
  misc_feature: MA Experiment 20000111 PARAMETER Experiment Name: At_42deg_Heat_cDNA_P Parameter: Temperature (deg C) Value: 42 vs. 22
  misc_feature: MA Experiment 20000111 PARAMETER Experiment Name: At_42deg_Heat_cDNA_P Parameter: Timepoint (hr) Value: 6
  misc_feature: MA Experiment 20000111 PARAMETER Experiment Name: At_42deg_Heat_cDNA_P Parameter: Tissue Value: Aerial
  misc_feature: MA Experiment ID: 20000113 Result: Down-regulated in Transcription
  misc_feature: MA Experiment 20000113 PARAMETER Experiment Name: At_42deg_Heat_cDNA_P Parameter: Temperature (deg C) Value: 42 vs. 22
  misc_feature: MA Experiment 20000113 PARAMETER Experiment Name: At_42deg_Heat_cDNA_P Parameter: Timepoint (hr) Value: 8
  misc_feature: MA Experiment 20000113 PARAMETER Experiment Name: At_42deg_Heat_cDNA_P Parameter: Tissue Value: Aerial
  misc_feature: MA Experiment ID: 20001557 Result: Down-regulated in Transcription
  misc_feature: MA Experiment 20001557 PARAMETER Experiment Name: At_Drought_Soil_Dry_P Parameter: Age (day) Value: 27
  misc_feature: MA Experiment 20001557 PARAMETER Experiment Name: At_Drought_Soil_Dry_P Parameter: Organism Value: A. thaliana
  misc_feature: MA Experiment 20001557 PARAMETER Experiment Name: At_Drought_Soil_Dry_P Parameter: Plant Line Value: WS
  misc_feature: MA Experiment 20001557 PARAMETER Experiment Name: At_Drought_Soil_Dry_P Parameter: Post Timepoint (hr) Value: 3
  misc_feature: MA Experiment 20001557 PARAMETER Experiment Name: At_Drought_Soil_Dry_P Parameter: Post-Treatment Value: Re-Water vs. No Drought
  misc_feature: MA Experiment 20001557 PARAMETER Experiment Name: At_Drought_Soil_Dry_P Parameter: Timepoint (day) Value: 13
  misc_feature: MA Experiment 20001557 PARAMETER Experiment Name: At_Drought_Soil_Dry_P Parameter: Treatment Value: Drought vs. No Drought
  misc_feature: MA Experiment ID: 20001558 Result: Down-regulated in Transcription
  misc_feature: MA Experiment 20001558 PARAMETER Experiment Name: At_Drought_Soil_Dry_P Parameter: Age (day) Value: 27
  misc_feature: MA Experiment 20001558 PARAMETER Experiment Name: At_Drought_Soil_Dry_P Parameter: Organism Value: A. thaliana
  misc_feature: MA Experiment 20001558 PARAMETER Experiment Name: At_Drought_Soil_Dry_P Parameter: Plant Line Value: WS
  misc_feature: MA Experiment 20001558 PARAMETER Experiment Name: At_Drought_Soil_Dry_P Parameter: Post Timepoint (hr) Value: 6
  misc_feature: MA Experiment 20001558 PARAMETER Experiment Name: At_Drought_Soil_Dry_P Parameter: Post-Treatment Value: Re-Water vs. No Drought
  misc_feature: MA Experiment 20001558 PARAMETER Experiment Name: At_Drought_Soil_Dry_P Parameter: Timepoint (day) Value: 13
  misc_feature: MA Experiment 20001558 PARAMETER Experiment Name: At_Drought_Soil_Dry_P Parameter: Treatment Value: Drought vs. No Drought
  misc_feature: MA Experiment ID: 20001560 Result: Down-regulated in Transcription
  misc_feature: MA Experiment 20001560 PARAMETER Experiment Name: At_Drought_Soil_Dry_P Parameter: Age (day) Value: 28
  misc_feature: MA Experiment 20001560 PARAMETER Experiment Name: At_Drought_Soil_Dry_P Parameter: Organism Value: A. thaliana
  misc_feature: MA Experiment 20001560 PARAMETER Experiment Name: At_Drought_Soil_Dry_P Parameter: Plant Line Value: WS
  misc_feature: MA Experiment 20001560 PARAMETER Experiment Name: At_Drought_Soil_Dry_P Parameter: Post Timepoint (hr) Value: None
  misc_feature: MA Experiment 20001560 PARAMETER Experiment Name: At_Drought_Soil_Dry_P Parameter: Post-Treatment Value: None
  misc_feature: MA Experiment 20001560 PARAMETER Experiment Name: At_Drought_Soil_Dry_P Parameter: Timepoint (day) Value: 14
  misc_feature: MA Experiment 20001560 PARAMETER Experiment Name: At_Drought_Soil_Dry_P Parameter: Treatment Value: Drought vs. No Drought
gaatctctccctctttcttccatttcccagaactctcagagtttcgccacttcttctgaagaatctgaaagatcacaaagtccaaagaaaaaaaatgagcgtgatcacaactccaatagagaccctgcacctaaagtcaacacttcgtcttctaccacgagctgtttatcgcagtcaacggattcaagttttcccgcccaacatcttctcgaacacttctctgagttctccacttcgcatcgacccaatctctcaagttggcggatcgaggaatttgtggcgtagatatgcatctgataatttctcggagatgggtttggatcctggagctgatccattcaaggttattgagaagccttctatagtggatagaatgaagaaagcaaactcaattcttcctcatgtagtgttggcgagtacaatattagctcttatctatcctccttctttcacttggtttacgtcgaggtactttgtgcccgctttaggttttttgatgtttgcggttggtatcaattcaaacgagaaagactttcttgaagctttcaaaagaccaaaagctatcctcctcggttatgttggacaatatctcgtaaagcctgtcctaggtttcatctttggcctagctgctgtttctcttttccaactcccaactccaattggtgctggaatcatgttggtatcatgtgttagtggagctcagttgtcaaactatgcgacattcctaactgatccagcattggcacctcttagcatcgtcatgacatctctatcaaccgctactgcggttcttgtcacaccgatgctatcactcctgctcattgggaagaaactacccgttgatgtaaaaggaatgatatccagcattcttcaggttgtaatcgcaccaatcgctgcaggattgctactaaacaagttgttcccaaaagtatcaaatgcaatccgaccatttctcccgattctatcggttctcgacacagcttgctgcgttggagcaccactcgcattgaacataaactcggtcatgtctccatttggagccaccatattgttactagtaacaatgtttcatctctcagctttcctcgctggatacttccttaccggttctgtctttagaaacgctccagacgctaaagccatgcaaagaacattgtcctatgaaactggaatgcagagtagccttttggctctagcgcttgctactaagttctttcaagatcctcttgtggggattcctcctgctatatctacggtggtaatgtcattgatggggttcactctcgttttgatctggtctaaggaaaagagtaacacattttaacattttgattttgtttcactccacattttgattatacatatatatatgtactacaaataattggaaaattcttcttgtaatataaataattcaatacagaatttgagatttttaatgtactaatctccattttgtcttt

SEQ ID NO: 28336 - protein, 440 aa, Arabidopsis thaliana
  peptide (1)..(440): Ceres Seq. ID no. 13487749
  misc_feature (159)..(344): Pfam Name: Sodium Bile acid symporter family Pfam Description: Sodium Bile acid symporter family
  misc_feature (57)..(432): Homolog of NCBI NO: 20269901 NR Description: putative sodium-dependent bile acid symporter
  misc_feature (57)..(432): Homolog of NCBI NO: 30683305 NR Description: bile acid:sodium symporter family [Arabidopsis
  misc_feature (93)..(420): Homolog of NCBI NO: 9279722 NR Description: contains similarity to transporter
  misc_feature (93)..(432): Homolog of NCBI NO: 21554890 NR Description: unknown [Arabidopsis thaliana]
  misc_feature (93)..(432): Homolog of NCBI NO: 18404505 NR Description: bile acid:sodium symporter family [Arabidopsis
  misc_feature (120)..(417): Homolog of NCBI NO: 7485566 NR Description: hypothetical protein F16J13.100 - Arabidopsis
  misc_feature (165)..(436): Homolog of NCBI NO: 18413732 NR Description: bile acid:sodium symporter family [Arabidopsis
  misc_feature (32)..(85): Homolog of NCBI NO: 7486890 NR Description: hypothetical protein T12H17.230 - Arabidopsis
  misc_feature (83)..(440): Homolog of NCBI NO: 7486890 NR Description: hypothetical protein T12H17.230 - Arabidopsis
  misc_feature (32)..(440): Homolog of NCBI NO: 18416020 NR Description: bile acid:sodium symporter family [Arabidopsis
NLSLFLPFPRTLRVSPLLLKNLKDHKVQRKKMSVITTPIETLHLKSTLRLLPRAVYRSQRIQVFPPNIFSNTSLSSPLRIDPISQVGGSRNLWRRYASDNFSEMGLDPGADPFKVIEKPSIVDRMKKANSILPHVVLASTILALIYPPSFTWFTSRYFVPALGFLMFAVGINSNEKDFLEAFKRPKAILLGYVGQYLVKPVLGFIFGLAAVSLFQLPTPIGAGIMLVSCVSGAQLSNYATFLTDPALAPLSIVMTSLSTATAVLVTPMLSLLLIGKKLPVDVKGMISSILQVVIAPIAAGLLLNKLFPKVSNAIRPFLPILSVLDTACCVGAPLALNINSVMSPFGATILLLVTMFHLSAFLAGYFLTGSVFRNAPDAKAMQRTLSYETGMQSSLLALALATKFFQDPLVGIPPAISTVVMSLMGFTLVLIWSKEKSNTF

SEQ ID NO: 28337 - protein, 409 aa, Arabidopsis thaliana
  peptide (1)..(409): Ceres Seq. ID no. 13487750
  misc_feature (128)..(313): Pfam Name: Sodium Bile acid symporter family Pfam Description: Sodium Bile acid symporter family
  misc_feature (26)..(401): Homolog of NCBI NO: 20269901 NR Description: putative sodium-dependent bile acid symporter
  misc_feature (26)..(401): Homolog of NCBI NO: 30683305 NR Description: bile acid:sodium symporter family [Arabidopsis
  misc_feature (62)..(389): Homolog of NCBI NO: 9279722 NR Description: contains similarity to transporter
  misc_feature (62)..(401): Homolog of NCBI NO: 21554890 NR Description: unknown [Arabidopsis thaliana]
  misc_feature (62)..(401): Homolog of NCBI NO: 18404505 NR Description: bile acid:sodium symporter family [Arabidopsis
  misc_feature (89)..(386): Homolog of NCBI NO: 7485566 NR Description: hypothetical protein F16J13.100 - Arabidopsis
  misc_feature (134)..(405): Homolog of NCBI NO: 18413732 NR Description: bile acid:sodium symporter family [Arabidopsis
  misc_feature (1)..(54): Homolog of NCBI NO: 7486890 NR Description: hypothetical protein T12H17.230 - Arabidopsis
  misc_feature (52)..(409): Homolog of NCBI NO: 7486890 NR Description: hypothetical protein T12H17.230 - Arabidopsis
  misc_feature (1)..(409): Homolog of NCBI NO: 18416020 NR Description: bile acid:sodium symporter family [Arabidopsis
MSVITTPIETLHLKSTLRLLPRAVYRSQRIQVFPPNIFSNTSLSSPLRIDPISQVGGSRNLWRRYASDNFSEMGLDPGADPFKVIEKPSIVDRMKKANSILPHVVLASTILALIYPPSFTWFTSRYFVPALGFLMFAVGINSNEKDFLEAFKRPKAILLGYVGQYLVKPVLGFIFGLAAVSLFQLPTPIGAGIMLVSCVSGAQLSNYATFLTDPALAPLSIVMTSLSTATAVLVTPMLSLLLIGKKLPVDVKGMISSILQVVIAPIAAGLLLNKLFPKVSNAIRPFLPILSVLDTACCVGAPLALNINSVMSPFGATILLLVTMFHLSAFLAGYFLTGSVFRNAPDAKAMQRTLSYETGMQSSLLALALATKFFQDPLVGIPPAISTVVMSLMGFTLVLIWSKEKSNTF

SEQ ID NO: 28338 - protein, 337 aa, Arabidopsis thaliana
  peptide (1)..(337): Ceres Seq. ID no. 13487751
  misc_feature (56)..(241): Pfam Name: Sodium Bile acid symporter family Pfam Description: Sodium Bile acid symporter family
  misc_feature (5)..(329): Homolog of NCBI NO: 34911708 NR Description: P0707D10.18 [Oryza sativa (japonica
  misc_feature (1)..(329): Homolog of NCBI NO: 20269901 NR Description: putative sodium-dependent bile acid symporter
  misc_feature (1)..(329): Homolog of NCBI NO: 30683305 NR Description: bile acid:sodium symporter family [Arabidopsis
  misc_feature (1)..(317): Homolog of NCBI NO: 9279722 NR Description: contains similarity to transporter
  misc_feature (1)..(329): Homolog of NCBI NO: 21554890 NR Description: unknown [Arabidopsis thaliana]
  misc_feature (1)..(329): Homolog of NCBI NO: 18404505 NR Description: bile acid:sodium symporter family [Arabidopsis
  misc_feature (17)..(314): Homolog of NCBI NO: 7485566 NR Description: hypothetical protein F16J13.100 - Arabidopsis
  misc_feature (62)..(333): Homolog of NCBI NO: 18413732 NR Description: bile acid:sodium symporter family [Arabidopsis
  misc_feature (1)..(337): Homolog of NCBI NO: 7486890 NR Description: hypothetical protein T12H17.230 - Arabidopsis
  misc_feature (1)..(337): Homolog of NCBI NO: 18416020 NR Description: bile acid:sodium symporter family [Arabidopsis
MGLDPGADPFKVIEKPSIVDRMKKANSILPHVVLASTILALIYPPSFTWFTSRYFVPALGFLMFAVGINSNEKDFLEAFKRPKAILLGYVGQYLVKPVLGFIFGLAAVSLFQLPTPIGAGIMLVSCVSGAQLSNYATFLTDPALAPLSIVMTSLSTATAVLVTPMLSLLLIGKKLPVDVKGMISSILQVVIAPIAAGLLLNKLFPKVSNAIRPFLPILSVLDTACCVGAPLALNINSVMSPFGATILLLVTMFHLSAFLAGYFLTGSVFRNAPDAKAMQRTLSYETGMQSSLLALALATKFFQDPLVGIPPAISTVVMSLMGFTLVLIWSKEKSNTF

SEQ ID NO: 28339 - DNA, 791 bp, Arabidopsis thaliana
  misc_feature (1)..(791): Ceres Seq. ID no. 13500319
  misc_feature: MA Experiment ID: 108572 Result: Up-regulated in Transcription
  misc_feature: MA Experiment 108572 PARAMETER Experiment Name: At_Drought_cDNA_P Parameter: Timepoint (hr) Value: 1
  misc_feature: MA Experiment 108572 PARAMETER Experiment Name: At_Drought_cDNA_P Parameter: Tissue Value: Aerial
  misc_feature: MA Experiment 108572 PARAMETER Experiment Name: At_Drought_cDNA_P Parameter: Treatment Value: Drought vs. No Drought
  misc_feature: MA Experiment ID: 108574 Result: Down-regulated in Transcription
  misc_feature: MA Experiment 108574 PARAMETER Experiment Name: At_Wounding__cDNA_P Parameter: Timepoint (hr) Value: 1
  misc_feature: MA Experiment 108574 PARAMETER Experiment Name: At_Wounding__cDNA_P Parameter: Tissue Value: Aerial
  misc_feature: MA Experiment 108574 PARAMETER Experiment Name: At_Wounding__cDNA_P Parameter: Treatment Value: Wounding vs. No Wounding
  misc_feature: MA Experiment ID: 108576 Result: Down-regulated in Transcription
  misc_feature: MA Experiment 108576 PARAMETER Experiment Name: At_42deg_Heat_cDNA_P Parameter: Temperature (deg C) Value: 42 vs. 22
  misc_feature: MA Experiment 108576 PARAMETER Experiment Name: At_42deg_Heat_cDNA_P Parameter: Timepoint (hr) Value: 1
  misc_feature: MA Experiment 108576 PARAMETER Experiment Name: At_42deg_Heat_cDNA_P Parameter: Tissue Value: Aerial
  misc_feature: MA Experiment ID: 108585 Result: Down-regulated in Transcription
  misc_feature: MA Experiment 108585 PARAMETER Experiment Name: At_5mM_NaNP_cDNA_P Parameter: Timepoint (hr) Value: 6
  misc_feature: MA Experiment 108585 PARAMETER Experiment Name: At_5mM_NaNP_cDNA_P Parameter: Tissue Value: Aerial
  misc_feature: MA Experiment 108585 PARAMETER Experiment Name: At_5mM_NaNP_cDNA_P Parameter: Treatment Value: null
  misc_feature: MA Experiment ID: 108595 Result: Down-regulated in Transcription
  misc_feature: MA Experiment 108595 PARAMETER Experiment Name: At_Ler-pi_Ovule_cDNA_P Parameter: Plant Line Value: null
  misc_feature: MA Experiment ID: 108667 Result: Down-regulated in Transcription
  misc_feature: MA Experiment 108667 PARAMETER Experiment Name: At_2mM_SA_cDNA_P Parameter: Plant Line Value: WS
  misc_feature: MA Experiment 108667 PARAMETER Experiment Name: At_2mM_SA_cDNA_P Parameter: Timepoint (hr) Value: 1
  misc_feature: MA Experiment 108667 PARAMETER Experiment Name: At_2mM_SA_cDNA_P Parameter: Treatment Value: 2mM SA vs. No Treatment
  misc_feature: MA Experiment ID: 108668 Result: Down-regulated in Transcription
  misc_feature: MA Experiment 108668 PARAMETER Experiment Name: At_2mM_SA_cDNA_P Parameter: Plant Line Value: WS
  misc_feature: MA Experiment 108668 PARAMETER Experiment Name: At_2mM_SA_cDNA_P Parameter: Timepoint (hr) Value: 6
  misc_feature: MA Experiment 108668 PARAMETER Experiment Name: At_2mM_SA_cDNA_P Parameter: Treatment Value: 2mM SA vs. No Treatment
  misc_feature: MA Experiment ID: 20000070 Result: Up-regulated in Transcription
  misc_feature: MA Experiment 20000070 PARAMETER Experiment Name: At_100uM_ABA_Mutants_cDNA_P Parameter: Plant Line Value: CS24
  misc_feature: MA Experiment 20000070 PARAMETER Experiment Name: At_100uM_ABA_Mutants_cDNA_P Parameter: Timepoint (hr) Value: 6
  misc_feature: MA Experiment 20000070 PARAMETER Experiment Name: At_100uM_ABA_Mutants_cDNA_P Parameter: Tissue Value: Aerial
  misc_feature: MA Experiment 20000070 PARAMETER Experiment Name: At_100uM_ABA_Mutants_cDNA_P Parameter: Treatment Value: 100uM ABA vs. No Treatment
  misc_feature: MA Experiment ID: 20000169 Result: Up-regulated in Transcription
  misc_feature: MA Experiment 20000169 PARAMETER Experiment Name: At_100uM_ABA_P Parameter: Age (day) Value: 14
  misc_feature: MA Experiment 20000169 PARAMETER Experiment Name: At_100uM_ABA_P Parameter: Organism Value: A. thaliana
  misc_feature: MA Experiment 20000169 PARAMETER Experiment Name: At_100uM_ABA_P Parameter: Plant Line Value: WS
  misc_feature: MA Experiment 20000169 PARAMETER Experiment Name: At_100uM_ABA_P Parameter: Timepoint (hr) Value: 6
  misc_feature: MA Experiment 20000169 PARAMETER Experiment Name: At_100uM_ABA_P Parameter: Tissue Value: Aerial
  misc_feature: MA Experiment 20000169 PARAMETER Experiment Name: At_100uM_ABA_P Parameter: Treatment Value: 100uM ABA vs. No Treatment
  misc_feature: MA Experiment ID: 20000171 Result: Down-regulated in Transcription
  misc_feature: MA Experiment 20000171 PARAMETER Experiment Name: At_42deg_Heat_P Parameter: Age (day) Value: 14
  misc_feature: MA Experiment 20000171 PARAMETER Experiment Name: At_42deg_Heat_P Parameter: Organism Value: A. thaliana
  misc_feature: MA Experiment 20000171 PARAMETER Experiment Name: At_42deg_Heat_P Parameter: Plant Line Value: WS
  misc_feature: MA Experiment 20000171 PARAMETER Experiment Name: At_42deg_Heat_P Parameter: Temperature (deg C) Value: 42 vs. 22
  misc_feature: MA Experiment 20000171 PARAMETER Experiment Name: At_42deg_Heat_P Parameter: Timepoint (hr) Value: 1
  misc_feature: MA Experiment 20000171 PARAMETER Experiment Name: At_42deg_Heat_P Parameter: Tissue Value: Aerial
  misc_feature: MA Experiment ID: 20000173 Result: Down-regulated in Transcription
  misc_feature: MA Experiment 20000173 PARAMETER Experiment Name: At_42deg_Heat_P Parameter: Age (day) Value: 14
  misc_feature: MA Experiment 20000173 PARAMETER Experiment Name: At_42deg_Heat_P Parameter: Organism Value: A. thaliana
  misc_feature: MA Experiment 20000173 PARAMETER Experiment Name: At_42deg_Heat_P Parameter: Plant Line Value: WS
  misc_feature: MA Experiment 20000173 PARAMETER Experiment Name: At_42deg_Heat_P Parameter: Temperature (deg C) Value: 42 vs. 22
  misc_feature: MA Experiment 20000173 PARAMETER Experiment Name: At_42deg_Heat_P Parameter: Timepoint (hr) Value: 6
  misc_feature: MA Experiment 20000173 PARAMETER Experiment Name: At_42deg_Heat_P Parameter: Tissue Value: Aerial
  misc_feature: MA Experiment ID: 20000182 Result: Down-regulated in Transcription
  misc_feature: MA Experiment 20000182 PARAMETER Experiment Name: At_2mM_SA_P Parameter: Age (day) Value: 14
  misc_feature: MA Experiment 20000182 PARAMETER Experiment Name: At_2mM_SA_P Parameter: Organism Value: A. thaliana
  misc_feature: MA Experiment 20000182 PARAMETER Experiment Name: At_2mM_SA_P Parameter: Plant Line Value: WS
  misc_feature: MA Experiment 20000182 PARAMETER Experiment Name: At_2mM_SA_P Parameter: Timepoint (hr) Value: 6
  misc_feature: MA Experiment 20000182 PARAMETER Experiment Name: At_2mM_SA_P Parameter: Tissue Value: Aerial
  misc_feature: MA Experiment 20000182 PARAMETER Experiment Name: At_2mM_SA_P Parameter: Treatment Value: 2mM SA vs. No Treatment
  misc_feature: MA Experiment ID: 20000184 Result: Down-regulated in Transcription
  misc_feature: MA Experiment 20000184 PARAMETER Experiment Name: At_Shoots__P Parameter: Age (day) Value: 7
  misc_feature: MA Experiment 20000184 PARAMETER Experiment Name: At_Shoots__P Parameter: Tissue Value: Shoots vs. Whole Plant
  misc_feature: MA Experiment ID: 20000185 Result: Down-regulated in Transcription
  misc_feature: MA Experiment 20000185 PARAMETER Experiment Name: At_Roots__P Parameter: Age (day) Value: 7 vs. 21
  misc_feature: MA Experiment 20000185 PARAMETER Experiment Name: At_Roots__P Parameter: Organism Value: A. thaliana
  misc_feature: MA Experiment 20000185 PARAMETER Experiment Name: At_Roots__P Parameter: Tissue Value: Roots vs. Whole Plant
  misc_feature: MA Experiment ID: 20000211 Result: Down-regulated in Transcription
  misc_feature: MA Experiment 20000211 PARAMETER Experiment Name: At_0.001percent_MeJA__P Parameter: Age (day) Value: 14
  misc_feature: MA Experiment 20000211 PARAMETER Experiment Name: At_0.001percent_MeJA__P Parameter: Organism Value: A. thaliana
  misc_feature: MA Experiment 20000211 PARAMETER Experiment Name: At_0.001percent_MeJA__P Parameter: Plant Line Value: WS
  misc_feature: MA Experiment 20000211 PARAMETER Experiment Name: At_0.001percent_MeJA__P Parameter: Timepoint (hr) Value: 1
  misc_feature: MA Experiment 20000211 PARAMETER Experiment Name: At_0.001percent_MeJA__P Parameter: Tissue Value: Aerial
  misc_feature: MA Experiment 20000211 PARAMETER Experiment Name: At_0.001percent_MeJA__P Parameter: Treatment Value: 0.001percent MeJA vs. No Treatment
  misc_feature: MA Experiment ID: 20000234 Result: Down-regulated in Transcription
  misc_feature: MA Experiment 20000234 PARAMETER Experiment Name: At_Siliques_P Parameter: Age (day) Value: 21
  misc_feature: MA Experiment 20000234 PARAMETER Experiment Name: At_Siliques_P Parameter: Organism Value: A. thaliana
  misc_feature: MA Experiment 20000234 PARAMETER Experiment Name: At_Siliques_P Parameter: Plant Line Value: WS
  misc_feature: MA Experiment 20000234 PARAMETER Experiment Name: At_Siliques_P Parameter: Tissue Value: Less Than 5mm Siliques vs. Whole Plant
  misc_feature: MA Experiment ID: 20000437 Result: Up-regulated in Transcription
  misc_feature: MA Experiment 20000437 PARAMETER Experiment Name: At_Drought_P Parameter: Age (day) Value: 8
  misc_feature: MA Experiment 20000437 PARAMETER Experiment Name: At_Drought_P Parameter: Organism Value: A. thaliana
  misc_feature: MA Experiment 20000437 PARAMETER Experiment Name: At_Drought_P Parameter: Plant Line Value: WS
  misc_feature: MA Experiment 20000437 PARAMETER Experiment Name: At_Drought_P Parameter: Timepoint (hr) Value: 24
  misc_feature: MA Experiment 20000437 PARAMETER Experiment Name: At_Drought_P Parameter: Tissue Value: Whole Plant
  misc_feature: MA Experiment 20000437 PARAMETER Experiment Name: At_Drought_P Parameter: Treatment Value: Drought vs. No Drought
  misc_feature: MA Experiment ID: 20000439 Result: Down-regulated in Transcription
  misc_feature: MA Experiment 20000439 PARAMETER Experiment Name: At_Roots__P Parameter: Age (day) Value: 14 vs. 21
  misc_feature: MA Experiment 20000439 PARAMETER Experiment Name: At_Roots__P Parameter: Organism Value: A. thaliana
  misc_feature: MA Experiment 20000439 PARAMETER Experiment Name: At_Roots__P Parameter: Tissue Value: Roots vs. Whole Plant
  misc_feature: MA Experiment ID: 20000453 Result: Up-regulated in Transcription
  misc_feature: MA Experiment 20000453 PARAMETER Experiment Name: At_100uM_ABA_P Parameter: Age (day) Value: 15
  misc_feature: MA Experiment 20000453 PARAMETER Experiment Name: At_100uM_ABA_P Parameter: Organism Value: A. thaliana
  misc_feature: MA Experiment 20000453 PARAMETER Experiment Name: At_100uM_ABA_P Parameter: Plant Line Value: WS
  misc_feature: MA Experiment 20000453 PARAMETER Experiment Name: At_100uM_ABA_P Parameter: Timepoint (hr) Value: 24
  misc_feature: MA Experiment 20000453 PARAMETER Experiment Name: At_100uM_ABA_P Parameter: Tissue Value: Aerial
  misc_feature: MA Experiment 20000453 PARAMETER Experiment Name: At_100uM_ABA_P Parameter: Treatment Value: 100uM ABA vs. No Treatment
  misc_feature: MA Experiment ID: 20000495 Result: Down-regulated in Transcription
  misc_feature: MA Experiment 20000495 PARAMETER Experiment Name: At_Guard_Cells_P Parameter: Harvest Date Value: 8/2/2002
  misc_feature: MA Experiment 20000495 PARAMETER Experiment Name: At_Guard_Cells_P Parameter: Organism Value: A. thaliana
  misc_feature: MA Experiment 20000495 PARAMETER Experiment Name: At_Guard_Cells_P Parameter: Tissue Value: Guard Cells vs. Leaves
  misc_feature: MA Experiment ID: 20000794 Result: Up-regulated in Transcription
  misc_feature: MA Experiment 20000794 PARAMETER Experiment Name: At_Petals_P Parameter: Age (day) Value: 23-25 days
  misc_feature: MA Experiment 20000794 PARAMETER Experiment Name: At_Petals_P Parameter: Plant Line Value: WS
  misc_feature: MA Experiment 20000794 PARAMETER Experiment Name: At_Petals_P Parameter: Tissue Value: Petals vs. Whole plant
  misc_feature: MA Experiment ID: 20001247 Result: Down-regulated in Transcription
  misc_feature: MA Experiment 20001247 PARAMETER Experiment Name: At_Far-red-induction_P Parameter: Age (day) Value: 7
  misc_feature: MA Experiment 20001247 PARAMETER Experiment Name: At_Far-red-induction_P Parameter: Light Value: Far-red vs. White
  misc_feature: MA Experiment 20001247 PARAMETER Experiment Name: At_Far-red-induction_P Parameter: Organism Value: A. thaliana
  misc_feature: MA Experiment 20001247 PARAMETER Experiment Name: At_Far-red-induction_P Parameter: Plant Line Value: Columbia
  misc_feature: MA Experiment 20001247 PARAMETER Experiment Name: At_Far-red-induction_P Parameter: Timepoint (hr) Value: 1
  misc_feature: MA Experiment 20001247 PARAMETER Experiment Name: At_Far-red-induction_P Parameter: Tissue Value: Whole Plant
  misc_feature: MA Experiment ID: 20001248 Result: Up-regulated in Transcription
  misc_feature: MA Experiment 20001248 PARAMETER Experiment Name: At_Far-red-induction_P Parameter: Age (day) Value: 7
  misc_feature: MA Experiment 20001248 PARAMETER Experiment Name: At_Far-red-induction_P Parameter: Light Value: Far-red vs. White
  misc_feature: MA Experiment 20001248 PARAMETER Experiment Name: At_Far-red-induction_P Parameter: Organism Value: A. thaliana
  misc_feature: MA Experiment 20001248 PARAMETER Experiment Name: At_Far-red-induction_P Parameter: Plant Line Value: Columbia
  misc_feature: MA Experiment 20001248 PARAMETER Experiment Name: At_Far-red-induction_P Parameter: Timepoint (hr) Value: 4
  misc_feature: MA Experiment 20001248 PARAMETER Experiment Name: At_Far-red-induction_P Parameter: Tissue Value: Whole Plant
  misc_feature: MA Experiment ID: 20001459 Result: Down-regulated in Transcription
  misc_feature: MA Experiment 20001459 PARAMETER Experiment Name: At_50mM_NH4NO3_L-to-H_P Parameter: Age (day) Value: Undefined
  misc_feature: MA Experiment 20001459 PARAMETER Experiment Name: At_50mM_NH4NO3_L-to-H_P Parameter: Organism Value: Undefined
  misc_feature: MA Experiment 20001459 PARAMETER Experiment Name: At_50mM_NH4NO3_L-to-H_P Parameter: Plant Line Value: Undefined
  misc_feature: MA Experiment 20001459 PARAMETER Experiment Name: At_50mM_NH4NO3_L-to-H_P Parameter: Timepoint (hr) Value: 4
  misc_feature: MA Experiment 20001459 PARAMETER Experiment Name: At_50mM_NH4NO3_L-to-H_P Parameter: Tissue Value: Siliques
  misc_feature: MA Experiment 20001459 PARAMETER Experiment Name: At_50mM_NH4NO3_L-to-H_P Parameter: Treatment Value: 50mM NH4NO3 vs. 100mM Manitol
  misc_feature: MA Experiment ID: 20001557 Result: Down-regulated in Transcription
  misc_feature: MA Experiment 20001557 PARAMETER Experiment Name: At_Drought_Soil_Dry_P Parameter: Age (day) Value: 27
  misc_feature: MA Experiment 20001557 PARAMETER Experiment Name: At_Drought_Soil_Dry_P Parameter: Organism Value: A. thaliana
  misc_feature: MA Experiment 20001557 PARAMETER Experiment Name: At_Drought_Soil_Dry_P Parameter: Plant Line Value: WS
  misc_feature: MA Experiment 20001557 PARAMETER Experiment Name: At_Drought_Soil_Dry_P Parameter: Post Timepoint (hr) Value: 3
  misc_feature: MA Experiment 20001557 PARAMETER Experiment Name: At_Drought_Soil_Dry_P Parameter: Post-Treatment Value: Re-Water vs. No Drought
  misc_feature: MA Experiment 20001557 PARAMETER Experiment Name: At_Drought_Soil_Dry_P Parameter: Timepoint (day) Value: 13
  misc_feature: MA Experiment 20001557 PARAMETER Experiment Name: At_Drought_Soil_Dry_P Parameter: Treatment Value: Drought vs. No Drought
  misc_feature: MA Experiment ID: 20001558 Result: Down-regulated in Transcription
  misc_feature: MA Experiment 20001558 PARAMETER Experiment Name: At_Drought_Soil_Dry_P Parameter: Age (day) Value: 27
  misc_feature: MA Experiment 20001558 PARAMETER Experiment Name: At_Drought_Soil_Dry_P Parameter: Organism Value: A. thaliana
  misc_feature: MA Experiment 20001558 PARAMETER Experiment Name: At_Drought_Soil_Dry_P Parameter: Plant Line Value: WS
  misc_feature: MA Experiment 20001558 PARAMETER Experiment Name: At_Drought_Soil_Dry_P Parameter: Post Timepoint (hr) Value: 6
  misc_feature: MA Experiment 20001558 PARAMETER Experiment Name: At_Drought_Soil_Dry_P Parameter: Post-Treatment Value: Re-Water vs. No Drought
  misc_feature: MA Experiment 20001558 PARAMETER Experiment Name: At_Drought_Soil_Dry_P Parameter: Timepoint (day) Value: 13
  misc_feature: MA Experiment 20001558 PARAMETER Experiment Name: At_Drought_Soil_Dry_P Parameter: Treatment Value: Drought vs. No Drought
  misc_feature: MA Experiment ID: 20001560 Result: Down-regulated in Transcription
  misc_feature: MA Experiment 20001560 PARAMETER Experiment Name: At_Drought_Soil_Dry_P Parameter: Age (day) Value: 28
  misc_feature: MA Experiment 20001560 PARAMETER Experiment Name: At_Drought_Soil_Dry_P Parameter: Organism Value: A. thaliana
  misc_feature: MA Experiment 20001560 PARAMETER Experiment Name: At_Drought_Soil_Dry_P Parameter: Plant Line Value: WS
  misc_feature: MA Experiment 20001560 PARAMETER Experiment Name: At_Drought_Soil_Dry_P Parameter: Post Timepoint (hr) Value: None
  misc_feature: MA Experiment 20001560 PARAMETER Experiment Name: At_Drought_Soil_Dry_P Parameter: Post-Treatment Value: None
  misc_feature: MA Experiment 20001560 PARAMETER Experiment Name: At_Drought_Soil_Dry_P Parameter: Timepoint (day) Value: 14
  misc_feature: MA Experiment 20001560 PARAMETER Experiment Name: At_Drought_Soil_Dry_P Parameter: Treatment Value: Drought vs. No Drought
  misc_feature: MA Experiment ID: 20001757 Result: Up-regulated in Transcription
  misc_feature: MA Experiment 20001757 PARAMETER Experiment Name: At_50mM_NH4NO3_L-to-H_P Parameter: Timepoint (hr) Value: 6
  misc_feature: MA Experiment 20001757 PARAMETER Experiment Name: At_50mM_NH4NO3_L-to-H_P Parameter: Tissue Value: Leaf
  misc_feature: MA Experiment 20001757 PARAMETER Experiment Name: At_50mM_NH4NO3_L-to-H_P Parameter: Treatment Value: 50mM NH4NO3 vs 100mM Mannitol
  misc_feature: MA Experiment ID: 20001772 Result: Up-regulated in Transcription
  misc_feature: MA Experiment 20001772 PARAMETER Experiment Name: At_Far-red-enriched-adult_P Parameter: Age (day) Value: 29
  misc_feature: MA Experiment 20001772 PARAMETER Experiment Name: At_Far-red-enriched-adult_P Parameter: Light Value: Far-red enriched vs. White
  misc_feature: MA Experiment 20001772 PARAMETER Experiment Name: At_Far-red-enriched-adult_P Parameter: Organism Value: A. thaliana
  misc_feature: MA Experiment 20001772 PARAMETER Experiment Name: At_Far-red-enriched-adult_P Parameter: Plant Line Value: Columbia
  misc_feature: MA Experiment 20001772 PARAMETER Experiment Name: At_Far-red-enriched-adult_P Parameter: Timepoint (hr) Value: 24
  misc_feature: MA Experiment 20001772 PARAMETER Experiment Name: At_Far-red-enriched-adult_P Parameter: Tissue Value: Aerial
  misc_feature: MA Experiment ID: 20001773 Result: Up-regulated in Transcription
  misc_feature: MA Experiment 20001773 PARAMETER Experiment Name: At_Far-red-enriched-adult_P Parameter: Age (day) Value: 30
  misc_feature: MA Experiment 20001773 PARAMETER Experiment Name: At_Far-red-enriched-adult_P Parameter: Light Value: Far-red enriched vs. White
  misc_feature: MA Experiment 20001773 PARAMETER Experiment Name: At_Far-red-enriched-adult_P Parameter: Organism Value: A. thaliana
  misc_feature: MA Experiment 20001773 PARAMETER Experiment Name: At_Far-red-enriched-adult_P Parameter: Plant Line Value: Columbia
  misc_feature: MA Experiment 20001773 PARAMETER Experiment Name: At_Far-red-enriched-adult_P Parameter: Timepoint (hr) Value: 48
  misc_feature: MA Experiment 20001773 PARAMETER Experiment Name: At_Far-red-enriched-adult_P Parameter: Tissue Value: Aerial
gtaaaaattacacaaaggatagtgtctgcaaatatctaaatgaaaacacttaattccaaaatgagaaatcaagtgggttttgcctagctaattgtataaatagtaacacaatcataatctcttcttccatcaggtcttcttcataatatatttcttctctaataattgaaagcaaaagaaaacagtttttttttttagaaaggtaaagaaatggaggaaacaaaggagagaaagatagtagtagcagtagacgaaagcgaagagagcatggaagctctgtcatggagtcttgacaatctttttccatatggttccaataatacactcatcctcctctacgtcaagccccctcttcccgtttactcttccctcgatgccgcagggtttatagtgacaggagacccggttgcagctttgaagaagtatgaatacgagctcgtggaatcggtcatggctcggtctcgaaccgtgtaccaagattatgagtctgatattaatatagagagacgagttggaagaggagatgctaaggaagttatatgcaacgcagttcagaaacttagagttgatatgttagtaatgggcactcatgactatggcttcttcaaaagggctttgctagggagtgtgagcgagtattgcgccaaacgagtcaagtgtcctgtggttatcgtcaagaagcaagctcaagataattaagctcatatgattgcattgtgtatatgtttcgaaagaactggtgtaacacttgaatcaatcttcgtatgcgataataaaatacataacggttt

SEQ ID NO: 28340 - protein, 162 aa, Arabidopsis thaliana
  peptide (1)..(162): Ceres Seq. ID no. 13500320
  misc_feature (6)..(156): Pfam Name: Universal stress protein family Pfam Description: Universal stress protein family
  misc_feature (7)..(156): Homolog of NCBI NO: 30681955 NR Description: ethylene-responsive protein -related [Arabidopsis
  misc_feature (7)..(156): Homolog of NCBI NO: 18399413 NR Description: ethylene-responsive protein -related [Arabidopsis
  misc_feature (5)..(156): Homolog of NCBI NO: 30694811 NR Description: expressed protein [Arabidopsis thaliana]
  misc_feature (8)..(161): Homolog of NCBI NO: 40539010 NR Description: putative stress-related protein
  misc_feature (4)..(156): Homolog of NCBI NO: 5669654 NR Description: ER6 protein [Lycopersicon esculentum]
  misc_feature (5)..(158): Homolog of NCBI NO: 34914610 NR Description: P0520B06.18 [Oryza sativa (japonica
  misc_feature (9)..(156): Homolog of NCBI NO: 25402571 NR Description: hypothetical protein [imported] - Arabidopsis
  misc_feature (9)..(156): Homolog of NCBI NO: 30681321 NR Description: ER6 protein -related [Arabidopsis thaliana]
  misc_feature (3)..(134): Homolog of NCBI NO: 34905540 NR Description: B1146F03.27 [Oryza sativa (japonica
  misc_feature (1)..(162): Homolog of NCBI NO: 15228790 NR Description: expressed protein [Arabidopsis thaliana]
MEETKERKIVVAVDESEESMEALSWSLDNLFPYGSNNTLILLYVKPPLPVYSSLDAAGFIVTGDPVAALKKYEYELVESVMARSRTVYQDYESDINIERRVGRGDAKEVICNAVQKLRVDMLVMGTHDYGFFKRALLGSVSEYCAKRVKCPVVIVKKQAQDN

SEQ ID NO: 28341 - protein, 143 aa, Arabidopsis thaliana
  peptide (1)..(143): Ceres Seq. ID no. 13500321
  misc_feature (1)..(137): Pfam Name: Universal stress protein family Pfam Description: Universal stress protein family
  misc_feature (1)..(137): Homolog of NCBI NO: 30681955 NR Description: ethylene-responsive protein -related [Arabidopsis
  misc_feature (1)..(137): Homolog of NCBI NO: 18399413 NR Description: ethylene-responsive protein -related [Arabidopsis
  misc_feature (1)..(137): Homolog of NCBI NO: 30694811 NR Description: expressed protein [Arabidopsis thaliana]
  misc_feature (1)..(142): Homolog of NCBI NO: 40539010 NR Description: putative stress-related protein
  misc_feature (1)..(137): Homolog of NCBI NO: 5669654 NR Description: ER6 protein [Lycopersicon esculentum]
  misc_feature (1)..(139): Homolog of NCBI NO: 34914610 NR Description: P0520B06.18 [Oryza sativa (japonica
  misc_feature (1)..(137): Homolog of NCBI NO: 25402571 NR Description: hypothetical protein [imported] - Arabidopsis
  misc_feature (1)..(137): Homolog of NCBI NO: 30681321 NR Description: ER6 protein -related [Arabidopsis thaliana]
  misc_feature (1)..(115): Homolog of NCBI NO: 34905540 NR Description: B1146F03.27 [Oryza sativa (japonica
  misc_feature (1)..(143): Homolog of NCBI NO: 15228790 NR Description: expressed protein [Arabidopsis thaliana]
MEALSWSLDNLFPYGSNNTLILLYVKPPLPVYSSLDAAGFIVTGDPVAALKKYEYELVESVMARSRTVYQDYESDINIERRVGRGDAKEVICNAVQKLRVDMLVMGTHDYGFFKRALLGSVSEYCAKRVKCPVVIVKKQAQDN

SEQ ID NO: 28342 - protein, 82 aa, Arabidopsis thaliana
  peptide (1)..(82): Ceres Seq. ID no. 13500322
  misc_feature (1)..(76): Pfam Name: Universal stress protein family Pfam Description: Universal stress protein family
  misc_feature (1)..(76): Homolog of NCBI NO: 30681955 NR Description: ethylene-responsive protein -related [Arabidopsis
  misc_feature (1)..(76): Homolog of NCBI NO: 18399413 NR Description: ethylene-responsive protein -related [Arabidopsis
  misc_feature (1)..(76): Homolog of NCBI NO: 30694811 NR Description: expressed protein [Arabidopsis thaliana]
  misc_feature (1)..(81): Homolog of NCBI NO: 40539010 NR Description: putative stress-related protein
  misc_feature (1)..(76): Homolog of NCBI NO: 5669654 NR Description: ER6 protein [Lycopersicon esculentum]
  misc_feature (1)..(78): Homolog of NCBI NO: 34914610 NR Description: P0520B06.18 [Oryza sativa (japonica
  misc_feature (1)..(76): Homolog of NCBI NO: 25402571 NR Description: hypothetical protein [imported] - Arabidopsis
  misc_feature (1)..(76): Homolog of NCBI NO: 30681321 NR Description: ER6 protein -related [Arabidopsis thaliana]
  misc_feature (1)..(54): Homolog of NCBI NO: 34905540 NR Description: B1146F03.27 [Oryza sativa (japonica
  misc_feature (1)..(82): Homolog of NCBI NO: 15228790 NR Description: expressed protein [Arabidopsis thaliana]
MARSRTVYQDYESDINIERRVGRGDAKEVICNAVQKLRVDMLVMGTHDYGFFKRALLGSVSEYCAKRVKCPVVIVKKQAQDN

SEQ ID NO: 28343 - DNA, 1649 bp, Arabidopsis thaliana
  misc_feature (1)..(1649): Ceres Seq. ID no. 13645741
  misc_feature: MA Experiment ID: 108434 Result: Up-regulated in Transcription
  misc_feature: MA Experiment 108434 PARAMETER Experiment Name: At_Root_Tips_cDNA_P Parameter: Tissue Value: Root Tips
  misc_feature: MA Experiment ID: 108461 Result: Down-regulated in Transcription
  misc_feature: MA Experiment 108461 PARAMETER Experiment Name: At_Germinating_Seeds_cDNA_P Parameter: Age (day) Value: 1 vs. 0
  misc_feature: MA Experiment 108461 PARAMETER Experiment Name: At_Germinating_Seeds_cDNA_P Parameter: Tissue Value: Germinating Seeds
  misc_feature: MA Experiment ID: 108462 Result: Down-regulated in Transcription
  misc_feature: MA Experiment 108462 PARAMETER Experiment Name: At_Germinating_Seeds_cDNA_P Parameter: Age (day) Value: 2 vs. 0
  misc_feature: MA Experiment 108462 PARAMETER Experiment Name: At_Germinating_Seeds_cDNA_P Parameter: Tissue Value: Germinating Seeds
  misc_feature: MA Experiment ID: 108463 Result: Down-regulated in Transcription
  misc_feature: MA Experiment 108463 PARAMETER Experiment Name: At_Germinating_Seeds_cDNA_P Parameter: Age (day) Value: 3 vs. 0
  misc_feature: MA Experiment 108463 PARAMETER Experiment Name: At_Germinating_Seeds_cDNA_P Parameter: Tissue Value: Germinating Seeds
  misc_feature: MA Experiment ID: 108464 Result: Down-regulated in Transcription
  misc_feature: MA Experiment 108464 PARAMETER Experiment Name: At_Germinating_Seeds_cDNA_P Parameter: Age (day) Value: 4 vs. 0
  misc_feature: MA Experiment 108464 PARAMETER Experiment Name: At_Germinating_Seeds_cDNA_P Parameter: Tissue Value: Germinating Seeds
  misc_feature: MA Experiment ID: 108488 Result: Up-regulated in Transcription
  misc_feature: MA Experiment ID: 108489 Result: Up-regulated in Transcription
  misc_feature: MA Experiment ID: 108572 Result: Down-regulated in Transcription
  misc_feature: MA Experiment 108572 PARAMETER Experiment Name: At_Drought_cDNA_P Parameter: Timepoint (hr) Value: 1
  misc_feature: MA Experiment 108572 PARAMETER Experiment Name: At_Drought_cDNA_P Parameter: Tissue Value: Aerial
  misc_feature: MA Experiment 108572 PARAMETER Experiment Name: At_Drought_cDNA_P Parameter: Treatment Value: Drought vs. No Drought
  misc_feature: MA Experiment ID: 108573 Result: Down-regulated in Transcription
  misc_feature: MA Experiment 108573 PARAMETER Experiment Name: At_Drought_cDNA_P Parameter: Timepoint (hr) Value: 6
  misc_feature: MA Experiment 108573 PARAMETER Experiment Name: At_Drought_cDNA_P Parameter: Tissue Value: Aerial
  misc_feature: MA Experiment 108573 PARAMETER Experiment Name: At_Drought_cDNA_P Parameter: Treatment Value: Drought vs. No Drought
  misc_feature: MA Experiment ID: 108595 Result: Down-regulated in Transcription
  misc_feature: MA Experiment 108595 PARAMETER Experiment Name: At_Ler-pi_Ovule_cDNA_P Parameter: Plant Line Value: null
  misc_feature: MA Experiment ID: 20000179 Result: Down-regulated in Transcription
  misc_feature: MA Experiment 20000179 PARAMETER Experiment Name: At_Germinating_Seeds_P Parameter: Age (hr) Value: 6 vs. 0
  misc_feature: MA Experiment 20000179 PARAMETER Experiment Name: At_Germinating_Seeds_P Parameter: Tissue Value: Germinating Seeds
  misc_feature: MA Experiment ID: 20000180 Result: Down-regulated in Transcription
  misc_feature: MA Experiment 20000180 PARAMETER Experiment Name: At_Germinating_Seeds_P Parameter: Age (hr) Value: 24 vs. 0
  misc_feature: MA Experiment 20000180 PARAMETER Experiment Name: At_Germinating_Seeds_P Parameter: Tissue Value: Germinating Seeds
  misc_feature: MA Experiment ID: 20000227 Result: Up-regulated in Transcription
  misc_feature: MA Experiment 20000227 PARAMETER Experiment Name: At_Root-Tips-vs-Tops_P Parameter: Tissue Value: Root Tips vs. Root Tops
  misc_feature: MA Experiment ID: 20001451 Result: Down-regulated in Transcription
  misc_feature: MA Experiment 20001451 PARAMETER Experiment Name: At_Far-red-induction_P Parameter: Age (day) Value: 7
  misc_feature: MA Experiment 20001451 PARAMETER Experiment Name: At_Far-red-induction_P Parameter: Light Value: Far-red vs. White
  misc_feature: MA Experiment 20001451 PARAMETER Experiment Name: At_Far-red-induction_P Parameter: Organism Value: A. thaliana
  misc_feature: MA Experiment 20001451 PARAMETER Experiment Name: At_Far-red-induction_P Parameter: Plant Line Value: Columbia
  misc_feature: MA Experiment 20001451 PARAMETER Experiment Name: At_Far-red-induction_P Parameter: Timepoint (hr) Value: 24
  misc_feature: MA Experiment 20001451 PARAMETER Experiment Name: At_Far-red-induction_P Parameter: Tissue Value: Whole Plant
  misc_feature: MA Experiment ID: 20001458 Result: Up-regulated in Transcription
  misc_feature: MA Experiment 20001458 PARAMETER Experiment Name: At_50mM_NH4NO3_L-to-H_P Parameter: Age (day) Value: Undefined
  misc_feature: MA Experiment 20001458 PARAMETER Experiment Name: At_50mM_NH4NO3_L-to-H_P Parameter: Organism Value: Undefined
  misc_feature: MA Experiment 20001458 PARAMETER Experiment Name: At_50mM_NH4NO3_L-to-H_P Parameter: Plant Line Value: Undefined
  misc_feature: MA Experiment 20001458 PARAMETER Experiment Name: At_50mM_NH4NO3_L-to-H_P Parameter: Timepoint (hr) Value: 2
  misc_feature: MA Experiment 20001458 PARAMETER Experiment Name: At_50mM_NH4NO3_L-to-H_P Parameter: Tissue Value: Siliques
  misc_feature: MA Experiment 20001458 PARAMETER Experiment Name: At_50mM_NH4NO3_L-to-H_P Parameter: Treatment Value: 50mM NH4NO3 vs. 100mM Manitol
  misc_feature: MA Experiment ID: 20001556 Result: Up-regulated in Transcription
  misc_feature: MA Experiment 20001556 PARAMETER Experiment Name: At_Drought_Soil_Dry_P Parameter: Age (day) Value: 26
  misc_feature: MA Experiment 20001556 PARAMETER Experiment Name: At_Drought_Soil_Dry_P Parameter: Organism Value: A. thaliana
  misc_feature: MA Experiment 20001556 PARAMETER Experiment Name: At_Drought_Soil_Dry_P Parameter: Plant Line Value: WS
  misc_feature: MA Experiment 20001556 PARAMETER Experiment Name: At_Drought_Soil_Dry_P Parameter: Post Timepoint (hr) Value: None
  misc_feature: MA Experiment 20001556 PARAMETER Experiment Name: At_Drought_Soil_Dry_P Parameter: Post-Treatment Value: None
  misc_feature: MA Experiment 20001556 PARAMETER Experiment Name: At_Drought_Soil_Dry_P Parameter: Timepoint (day) Value: 12
  misc_feature: MA Experiment 20001556 PARAMETER Experiment Name: At_Drought_Soil_Dry_P Parameter: Treatment Value: Drought vs. No Drought
  misc_feature: MA Experiment ID: 20001557 Result: Up-regulated in Transcription
  misc_feature: MA Experiment 20001557 PARAMETER Experiment Name: At_Drought_Soil_Dry_P Parameter: Age (day) Value: 27
  misc_feature: MA Experiment 20001557 PARAMETER Experiment Name: At_Drought_Soil_Dry_P Parameter: Organism Value: A. thaliana
  misc_feature: MA Experiment 20001557 PARAMETER Experiment Name: At_Drought_Soil_Dry_P Parameter: Plant Line Value: WS
  misc_feature: MA Experiment 20001557 PARAMETER Experiment Name: At_Drought_Soil_Dry_P Parameter: Post Timepoint (hr) Value: 3
  misc_feature: MA Experiment 20001557 PARAMETER Experiment Name: At_Drought_Soil_Dry_P Parameter: Post-Treatment Value: Re-Water vs. No Drought
  misc_feature: MA Experiment 20001557 PARAMETER Experiment Name: At_Drought_Soil_Dry_P Parameter: Timepoint (day) Value: 13
  misc_feature: MA Experiment 20001557 PARAMETER Experiment Name: At_Drought_Soil_Dry_P Parameter: Treatment Value: Drought vs. No Drought
  misc_feature: MA Experiment ID: 20001558 Result: Up-regulated in Transcription
  misc_feature: MA Experiment 20001558 PARAMETER Experiment Name: At_Drought_Soil_Dry_P Parameter: Age (day) Value: 27
  misc_feature: MA Experiment 20001558 PARAMETER Experiment Name: At_Drought_Soil_Dry_P Parameter: Organism Value: A. thaliana
  misc_feature: MA Experiment 20001558 PARAMETER Experiment Name: At_Drought_Soil_Dry_P Parameter: Plant Line Value: WS
  misc_feature: MA Experiment 20001558 PARAMETER Experiment Name: At_Drought_Soil_Dry_P Parameter: Post Timepoint (hr) Value: 6
  misc_feature: MA Experiment 20001558 PARAMETER Experiment Name: At_Drought_Soil_Dry_P Parameter: Post-Treatment Value: Re-Water vs. No Drought
  misc_feature: MA Experiment 20001558 PARAMETER Experiment Name: At_Drought_Soil_Dry_P Parameter: Timepoint (day) Value: 13
  misc_feature: MA Experiment 20001558 PARAMETER Experiment Name: At_Drought_Soil_Dry_P Parameter: Treatment Value: Drought vs. No Drought
  misc_feature: MA Experiment ID: 20001560 Result: Up-regulated in Transcription
  misc_feature: MA Experiment 20001560 PARAMETER Experiment Name: At_Drought_Soil_Dry_P Parameter: Age (day) Value: 28
  misc_feature: MA Experiment 20001560 PARAMETER Experiment Name: At_Drought_Soil_Dry_P Parameter: Organism Value: A. thaliana
  misc_feature: MA Experiment 20001560 PARAMETER Experiment Name: At_Drought_Soil_Dry_P Parameter: Plant Line Value: WS
  misc_feature: MA Experiment 20001560 PARAMETER Experiment Name: At_Drought_Soil_Dry_P Parameter: Post Timepoint (hr) Value: None
  misc_feature: MA Experiment 20001560 PARAMETER Experiment Name: At_Drought_Soil_Dry_P Parameter: Post-Treatment Value: None
  misc_feature: MA Experiment 20001560 PARAMETER Experiment Name: At_Drought_Soil_Dry_P Parameter: Timepoint (day) Value: 14
  misc_feature: MA Experiment 20001560 PARAMETER Experiment Name: At_Drought_Soil_Dry_P Parameter: Treatment Value: Drought vs. No Drought
  misc_feature: MA Experiment ID: 20001757 Result: Up-regulated in Transcription
  misc_feature: MA Experiment 20001757 PARAMETER Experiment Name: At_50mM_NH4NO3_L-to-H_P Parameter: Timepoint (hr) Value: 6
  misc_feature: MA Experiment 20001757 PARAMETER Experiment Name: At_50mM_NH4NO3_L-to-H_P Parameter: Tissue Value: Leaf
  misc_feature: MA Experiment 20001757 PARAMETER Experiment Name: At_50mM_NH4NO3_L-to-H_P Parameter: Treatment Value: 50mM NH4NO3 vs 100mM Mannitol
aaaaatcaattagggttttaacaaaaggttttagatttctggattgctgctctttctcccctgtgccgtcctgtggaaaacatcgttctttcaccaacaatggcgaagaagcgagatcgaattgtcaacactcaaccttttatctccgatgacgcctccctcgcttcttccaggaaacgatcaaaggttccaaaaacccatcagaaacaggaaaagttgattgaagctggtatgagcgagaagatcatgaaacaagctcttgcacaacaaaaggaagttgctgatgaagagaacgccgagagaaaccctagtagcgccgcttttgctgttgccggcgctgcgactgctggagaggagcagaaaattctggaggaggaagaagatgatattgatgattttgatggaacctttgaaaaccagagccaattcaataagcaagaggagattaatgaggatgatgagaagttgtttgagtcattcttaaataagaatgctcctcctcaacgtacgcttactgatatcattatcaagaagctcaaagataaggatgctgacttagctgaagaagagcgtcccgatcctaaaatggaccctgcaataactaagttatataaaggtgttggcaagtttatgagtgagtatacagttgggaaattgccaaaagcatttaagcttgttacttcaatggaacactgggaggatgttttatacttgactgagccagagaaatggtcacctaacgcattgtatcaagccacaaggatctttgcttccaacttgaaagacagacaagttcaacggttttataactatgttttgcttccgcgagtgagagaggatattagaaagcacaagaagctgcactttgctctgtaccaggctctgaaaaagtcactgtataagcctagtgctttcaatcaagggatactattcccgctttgtaagtcggggacatgcaatctcagagaagctgtaattatagggagcattcttgaaaagtgttcgatccctatgcttcactcatgtgttgccttgaacagactggctgagatggattattgtggcacaacaagttactttataaaagttcttttggagaagaaatattgtatgccgtatcgggtgcttgatgcattggttgctcacttcatgagatttgttgacgatataagagttatgcctgtgatttggcaccagtctcttcttacctttgtgcaacggtacaattatgaaatactaaaggaagataaagaacatctccaaactctcctccagaggcaaaaacaccatcttgttactcctgagattctgagagagcttaaggatagcagaaaccgtggagagaaagaagatcctatggtggataattttgccccagtaccggctaaagaagataggtttgacattcctgaagtaccaatggaagaagactgatgattcatggtgtttggtattgaaagaggactgatgattcatagcagcagagataaaccctgaaactgggtgggtatgattctggttttccagttttgacatcgttgtattattatttcttatttgagtaagatttgaaatttttattactacatgatagtgtatctttaaacatggtttaatctttttgatataatccaaatttggtcttgtct

SEQ ID NO: 28344 - protein, 444 aa, Arabidopsis thaliana
  peptide (1)..(444): Ceres Seq. ID no. 13645742
  misc_feature (127)..(423): Pfam Name: Bystin Pfam Description: Bystin
  misc_feature (127)..(423): Pfam Name: Bystin Pfam Description: Bystin
  misc_feature (128)..(420): Homolog of NCBI NO: 15011984 NR Description: bystin [Homo sapiens]
  misc_feature (128)..(420): Homolog of NCBI NO: 15208645 NR Description: bystin [Homo sapiens]
  misc_feature (127)..(420): Homolog of NCBI NO: 21264404 NR Description: Bystin
  misc_feature (116)..(420): Homolog of NCBI NO: 33873575 NR Description: BYSL protein [Homo sapiens]
  misc_feature (116)..(420): Homolog of NCBI NO: 38566213 NR Description: BYSL protein [Homo sapiens]
  misc_feature (128)..(420): Homolog of NCBI NO: 15011984 NR Description: bystin [Homo sapiens]
  misc_feature (127)..(420): Homolog of NCBI NO: 21264404 NR Description: Bystin
  misc_feature (116)..(420): Homolog of NCBI NO: 38566213 NR Description: BYSL protein [Homo sapiens]
  misc_feature (1)..(444): Homolog of NCBI NO: 20268780 NR Description: putative bystin [Arabidopsis thaliana]
  misc_feature (1)..(444): Homolog of NCBI NO: 15222394 NR Description: bystin -related [Arabidopsis thaliana]
  misc_feature (12)..(418): Homolog of NCBI NO: 31419416 NR Description: Unknown (protein for MGC:63889) [Danio rerio]
  misc_feature (15)..(420): Homolog of NCBI NO: 29792064 NR Description: bystin-like [Homo sapiens]
  misc_feature (111)..(421): Homolog of NCBI NO: 32996727 NR Description: bystin-like [Rattus norvegicus]
  misc_feature (116)..(420): Homolog of NCBI NO: 33873575 NR Description: BYSL protein [Homo sapiens]
  misc_feature (128)..(420): Homolog of NCBI NO: 15208645 NR Description: bystin [Homo sapiens]
  misc_feature (111)..(421): Homolog of NCBI NO: 32996727 NR Description: bystin-like [Rattus norvegicus]
  misc_feature (15)..(420): Homolog of NCBI NO: 29792064 NR Description: bystin-like [Homo sapiens]
  misc_feature (12)..(418): Homolog of NCBI NO: 31419416 NR Description: Unknown (protein for MGC:63889) [Danio rerio]
  misc_feature (1)..(444): Homolog of NCBI NO: 15222394 NR Description: bystin -related [Arabidopsis thaliana]
  misc_feature (1)..(444): Homolog of NCBI NO: 20268780 NR Description: putative bystin [Arabidopsis thaliana]
MAKKRDRIVNTQPFISDDASLASSRKRSKVPKTHQKQEKLIEAGMSEKIMKQALAQQKEVADEENAERNPSSAAFAVAGAATAGEEQKILEEEEDDIDDFDGTFENQSQFNKQEEINEDDEKLFESFLNKNAPPQRTLTDIIIKKLKDKDADLAEEERPDPKMDPAITKLYKGVGKFMSEYTVGKLPKAFKLVTSMEHWEDVLYLTEPEKWSPNALYQATRIFASNLKDRQVQRFYNYVLLPRVREDIRKHKKLHFALYQALKKSLYKPSAFNQGILFPLCKSGTCNLREAVIIGSILEKCSIPMLHSCVALNRLAEMDYCGTTSYFIKVLLEKKYCMPYRVLDALVAHFMRFVDDIRVMPVIWHQSLLTFVQRYNYEILKEDKEHLQTLLQRQKHHLVTPEILRELKDSRNRGEKEDPMVDNFAPVPAKEDRFDIPEVPMEED

SEQ ID NO: 28345 - protein, 400 aa, Arabidopsis thaliana
  peptide (1)..(400): Ceres Seq. ID no. 13645743
  misc_feature (83)..(379): Pfam Name: Bystin Pfam Description: Bystin
  misc_feature (83)..(379): Pfam Name: Bystin Pfam Description: Bystin
  misc_feature (84)..(376): Homolog of NCBI NO: 15011984 NR Description: bystin [Homo sapiens]
  misc_feature (84)..(376): Homolog of NCBI NO: 15208645 NR Description: bystin [Homo sapiens]
  misc_feature (83)..(376): Homolog of NCBI NO: 21264404 NR Description: Bystin
  misc_feature (72)..(376): Homolog of NCBI NO: 33873575 NR Description: BYSL protein [Homo sapiens]
  misc_feature (72)..(376): Homolog of NCBI NO: 38566213 NR Description: BYSL protein [Homo sapiens]
  misc_feature (84)..(376): Homolog of NCBI NO: 15011984 NR Description: bystin [Homo sapiens]
  misc_feature (83)..(376): Homolog of NCBI NO: 21264404 NR Description: Bystin
  misc_feature (72)..(376): Homolog of NCBI NO: 38566213 NR Description: BYSL protein [Homo sapiens]
  misc_feature (1)..(400): Homolog of NCBI NO: 20268780 NR Description: putative bystin [Arabidopsis thaliana]
  misc_feature (1)..(400): Homolog of NCBI NO: 15222394 NR Description: bystin -related [Arabidopsis thaliana]
  misc_feature (1)..(374): Homolog of NCBI NO: 31419416 NR Description: Unknown (protein for MGC:63889) [Danio rerio]
  misc_feature (1)..(376): Homolog of NCBI NO: 29792064 NR Description: bystin-like [Homo sapiens]
  misc_feature (67)..(377): Homolog of NCBI NO: 32996727 NR Description: bystin-like [Rattus norvegicus]
  misc_feature (72)..(376): Homolog of NCBI NO: 33873575 NR Description: BYSL protein [Homo sapiens]
  misc_feature (84)..(376): Homolog of NCBI NO: 15208645 NR Description: bystin [Homo sapiens]
  misc_feature (67)..(377): Homolog of NCBI NO: 32996727 NR Description: bystin-like [Rattus norvegicus]
  misc_feature (1)..(376): Homolog of NCBI NO: 29792064 NR Description: bystin-like [Homo sapiens]
  misc_feature (1)..(374): Homolog of NCBI NO: 31419416 NR Description: Unknown (protein for MGC:63889) [Danio rerio]
  misc_feature (1)..(400): Homolog of NCBI NO: 15222394 NR Description: bystin -related [Arabidopsis thaliana]
  misc_feature (1)..(400): Homolog of NCBI NO: 20268780 NR Description: putative bystin [Arabidopsis thaliana]
MSEKIMKQALAQQKEVADEENAERNPSSAAFAVAGAATAGEEQKILEEEEDDIDDFDGTFENQSQFNKQEEINEDDEKLFESFLNKNAPPQRTLTDIIIKKLKDKDADLAEEERPDPKMDPAITKLYKGVGKFMSEYTVGKLPKAFKLVTSMEHWEDVLYLTEPEKWSPNALYQATRIFASNLKDRQVQRFYNYVLLPRVREDIRKHKKLHFALYQALKKSLYKPSAFNQGILFPLCKSGTCNLREAVIIGSILEKCSIPMLHSCVALNRLAEMDYCGTTSYFIKVLLEKKYCMPYRVLDALVAHFMRFVDDIRVMPVIWHQSLLTFVQRYNYEILKEDKEHLQTLLQRQKHHLVTPEILRELKDSRNRGEKEDPMVDNFAPVPAKEDRFDIPEVPMEED

SEQ ID NO: 28346 - protein, 395 aa, Arabidopsis thaliana
  peptide (1)..(395): Ceres Seq. ID no. 13645744
  misc_feature (78)..(374): Pfam Name: Bystin Pfam Description: Bystin
  misc_feature (78)..(374): Pfam Name: Bystin Pfam Description: Bystin
  misc_feature (79)..(371): Homolog of NCBI NO: 15011984 NR Description: bystin [Homo sapiens]
  misc_feature (79)..(371): Homolog of NCBI NO: 15208645 NR Description: bystin [Homo sapiens]
  misc_feature (78)..(371): Homolog of NCBI NO: 21264404 NR Description: Bystin
  misc_feature (67)..(371): Homolog of NCBI NO: 33873575 NR Description: BYSL protein [Homo sapiens]
  misc_feature (67)..(371): Homolog of NCBI NO: 38566213 NR Description: BYSL protein [Homo sapiens]
  misc_feature (79)..(371): Homolog of NCBI NO: 15011984 NR Description: bystin [Homo sapiens]
  misc_feature (78)..(371): Homolog of NCBI NO: 21264404 NR Description: Bystin
  misc_feature (67)..(371): Homolog of NCBI NO: 38566213 NR Description: BYSL protein [Homo sapiens]
  misc_feature (1)..(395): Homolog of NCBI NO: 20268780 NR Description: putative bystin [Arabidopsis thaliana]
  misc_feature (1)..(395): Homolog of NCBI NO: 15222394 NR Description: bystin -related [Arabidopsis thaliana]
  misc_feature (1)..(369): Homolog of NCBI NO: 31419416 NR Description: Unknown (protein for MGC:63889) [Danio rerio]
  misc_feature (1)..(371): Homolog of NCBI NO: 29792064 NR Description: bystin-like [Homo sapiens]
  misc_feature (62)..(372): Homolog of NCBI NO: 32996727 NR Description: bystin-like [Rattus norvegicus]
  misc_feature (67)..(371): Homolog of NCBI NO: 33873575 NR Description: BYSL protein [Homo sapiens]
  misc_feature (79)..(371): Homolog of NCBI NO: 15208645 NR Description: bystin [Homo sapiens]
  misc_feature (62)..(372): Homolog of NCBI NO: 32996727 NR Description: bystin-like [Rattus norvegicus]
  misc_feature (1)..(371): Homolog of NCBI NO: 29792064 NR Description: bystin-like [Homo sapiens]
  misc_feature (1)..(369): Homolog of NCBI NO: 31419416 NR Description: Unknown (protein for MGC:63889) [Danio rerio]
  misc_feature (1)..(395): Homolog of NCBI NO: 15222394 NR Description: bystin -related [Arabidopsis thaliana]
  misc_feature (1)..(395): Homolog of NCBI NO: 20268780 NR Description: putative bystin [Arabidopsis thaliana]
MKQALAQQKEVADEENAERNPSSAAFAVAGAATAGEEQKILEEEEDDIDDFDGTFENQSQFNKQEEINEDDEKLFESFLNKNAPPQRTLTDIIIKKLKDKDADLAEEERPDPKMDPAITKLYKGVGKFMSEYTVGKLPKAFKLVTSMEHWEDVLYLTEPEKWSPNALYQATRIFASNLKDRQVQRFYNYVLLPRVREDIRKHKKLHFALYQALKKSLYKPSAFNQGILFPLCKSGTCNLREAVIIGSILEKCSIPMLHSCVALNRLAEMDYCGTTSYFIKVLLEKKYCMPYRVLDALVAHFMRFVDDIRVMPVIWHQSLLTFVQRYNYEILKEDKEHLQTLLQRQKHHLVTPEILRELKDSRNRGEKEDPMVDNFAPVPAKEDRFDIPEVPMEED

SEQ ID NO: 28347 - DNA, 1041 bp, Arabidopsis thaliana
  misc_feature (1)..(1041): Ceres Seq. ID no. 13504928
  misc_feature: MA Experiment ID: 20000234 Result: Down-regulated in Transcription
  misc_feature: MA Experiment 20000234 PARAMETER Experiment Name: At_Siliques_P Parameter: Age (day) Value: 21
  misc_feature: MA Experiment 20000234 PARAMETER Experiment Name: At_Siliques_P Parameter: Organism Value: A. thaliana
  misc_feature: MA Experiment 20000234 PARAMETER Experiment Name: At_Siliques_P Parameter: Plant Line Value: WS
  misc_feature: MA Experiment 20000234 PARAMETER Experiment Name: At_Siliques_P Parameter: Tissue Value: Less Than 5mm Siliques vs. Whole Plant
  misc_feature: MA Experiment ID: 20000235 Result: Down-regulated in Transcription
  misc_feature: MA Experiment 20000235 PARAMETER Experiment Name: At_Siliques_P Parameter: Age (day) Value: 21
  misc_feature: MA Experiment 20000235 PARAMETER Experiment Name: At_Siliques_P Parameter: Organism Value: A. thaliana
  misc_feature: MA Experiment 20000235 PARAMETER Experiment Name: At_Siliques_P Parameter: Plant Line Value: WS
  misc_feature: MA Experiment 20000235 PARAMETER Experiment Name: At_Siliques_P Parameter: Tissue Value: 5-10mm Siliques vs. Whole Plant
  misc_feature: MA Experiment ID: 20000264 Result: Down-regulated in Transcription
  misc_feature: MA Experiment 20000264 PARAMETER Experiment Name: At_Open_Flower_P Parameter: Age (day) Value: 21
  misc_feature: MA Experiment 20000264 PARAMETER Experiment Name: At_Open_Flower_P Parameter: Plant Line Value: WS
  misc_feature: MA Experiment 20000264 PARAMETER Experiment Name: At_Open_Flower_P Parameter: Tissue Value: Open Flower vs. Whole Plant
  misc_feature: MA Experiment ID: 20000265 Result: Down-regulated in Transcription
  misc_feature: MA Experiment 20000265 PARAMETER Experiment Name: At_Open_Flower_P Parameter: Age (day) Value: 21
  misc_feature: MA Experiment 20000265 PARAMETER Experiment Name: At_Open_Flower_P Parameter: Plant Line Value: WS
  misc_feature: MA Experiment 20000265 PARAMETER Experiment Name: At_Open_Flower_P Parameter: Tissue Value: Closed Flower vs. Whole Plant
  misc_feature: MA Experiment ID: 20000286 Result: Down-regulated in Transcription
  misc_feature: MA Experiment 20000286 PARAMETER Experiment Name: At_Open_Flower_P Parameter: Age (day) Value: 21
  misc_feature: MA Experiment 20000286 PARAMETER Experiment Name: At_Open_Flower_P Parameter: Plant Line Value: WS
  misc_feature: MA Experiment 20000286 PARAMETER Experiment Name: At_Open_Flower_P Parameter: Tissue Value: Half Open vs. Whole Plant
  misc_feature: MA Experiment ID: 20000438 Result: Down-regulated in Transcription
  misc_feature: MA Experiment 20000438 PARAMETER Experiment Name: At_Shoots__P Parameter: Age (day) Value: 14
  misc_feature: MA Experiment 20000438 PARAMETER Experiment Name: At_Shoots__P Parameter: Tissue Value: Shoots vs. Whole Plant
  misc_feature: MA Experiment ID: 20001248 Result: Up-regulated in Transcription
  misc_feature: MA Experiment 20001248 PARAMETER Experiment Name: At_Far-red-induction_P Parameter: Age (day) Value: 7
  misc_feature: MA Experiment 20001248 PARAMETER Experiment Name: At_Far-red-induction_P Parameter: Light Value: Far-red vs. White
  misc_feature: MA Experiment 20001248 PARAMETER Experiment Name: At_Far-red-induction_P Parameter: Organism Value: A. thaliana
  misc_feature: MA Experiment 20001248 PARAMETER Experiment Name: At_Far-red-induction_P Parameter: Plant Line Value: Columbia
  misc_feature: MA Experiment 20001248 PARAMETER Experiment Name: At_Far-red-induction_P Parameter: Timepoint (hr) Value: 4
  misc_feature: MA Experiment 20001248 PARAMETER Experiment Name: At_Far-red-induction_P Parameter: Tissue Value: Whole Plant
  misc_feature: MA Experiment ID: 20001450 Result: Up-regulated in Transcription
  misc_feature: MA Experiment 20001450 PARAMETER Experiment Name: At_Far-red-induction_P Parameter: Age (day) Value: 7
  misc_feature: MA Experiment 20001450 PARAMETER Experiment Name: At_Far-red-induction_P Parameter: Light Value: Far-red vs. White
  misc_feature: MA Experiment 20001450 PARAMETER Experiment Name: At_Far-red-induction_P Parameter: Organism Value: A. thaliana
  misc_feature: MA Experiment 20001450 PARAMETER Experiment Name: At_Far-red-induction_P Parameter: Plant Line Value: Columbia
  misc_feature: MA Experiment 20001450 PARAMETER Experiment Name: At_Far-red-induction_P Parameter: Timepoint (hr) Value: 8
  misc_feature: MA Experiment 20001450 PARAMETER Experiment Name: At_Far-red-induction_P Parameter: Tissue Value: Whole Plant
  misc_feature: MA Experiment ID: 20001451 Result: Up-regulated in Transcription
  misc_feature: MA Experiment 20001451 PARAMETER Experiment Name: At_Far-red-induction_P Parameter: Age (day) Value: 7
  misc_feature: MA Experiment 20001451 PARAMETER Experiment Name: At_Far-red-induction_P Parameter: Light Value: Far-red vs. White
  misc_feature: MA Experiment 20001451 PARAMETER Experiment Name: At_Far-red-induction_P Parameter: Organism Value: A. thaliana
  misc_feature: MA Experiment 20001451 PARAMETER Experiment Name: At_Far-red-induction_P Parameter: Plant Line Value: Columbia
  misc_feature: MA Experiment 20001451 PARAMETER Experiment Name: At_Far-red-induction_P Parameter: Timepoint (hr) Value: 24
  misc_feature: MA Experiment 20001451 PARAMETER Experiment Name: At_Far-red-induction_P Parameter: Tissue Value: Whole Plant
  misc_feature: MA Experiment ID: 20001905 Result: Down-regulated in Transcription
  misc_feature: MA Experiment 20001905 PARAMETER Experiment Name: At_Drought_Reproduction_P Parameter: Age (day) Value: 40
  misc_feature: MA Experiment 20001905 PARAMETER Experiment Name: At_Drought_Reproduction_P Parameter: Organism Value: A. thaliana
  misc_feature: MA Experiment 20001905 PARAMETER Experiment Name: At_Drought_Reproduction_P Parameter: Plant Line Value: WS
  misc_feature: MA Experiment 20001905 PARAMETER Experiment Name: At_Drought_Reproduction_P Parameter: Timepoint (day) Value: 10
  misc_feature: MA Experiment 20001905 PARAMETER Experiment Name: At_Drought_Reproduction_P Parameter: Tissue Value: Rosettes
  misc_feature: MA Experiment 20001905 PARAMETER Experiment Name: At_Drought_Reproduction_P Parameter: Treatment Value: Drought vs. No Drought
aaaaaaactctccactcaactctctctggtcagctgtctcttccccattctctagggttttcaagctcaacctcaagctccactacgatctcttcttcttctctaatctcagttgacagttgaaagatgcaaggtgtgattcgatccttcgtctccggtggaaatgttgtgaaaggctctgtgctgcaacatctccgtgtgattaacccggcgattcagccttctgtgttttgttcacgctatgaatcaactcaacctgcacgtatggaggaatctggattcgagagcacaactatttccgatgtcatgaaatccaaaggcaaaagtgctgatggatcttggctttggtgtactactgatgacactgtttatgatgctgttaaatccatgacacaacacaatgttggtgccttggtggttgtgaaacctggtgagcaacaagctcttgctggtatcattacagagagagattatctacggaagatcattgtgcaagggagatcatccaaatcaacaaaagttggagacattatgactgaagagaataagcttatcactgtgacaccggagaccaaggtcttgcgtgctatgcaactgatgacagataaccgaatcaggcatattccggtaatcaaagacaagggcatgattggaatggtgtccataggagatgttgtccgtgcagtggttcatgagcatagagaggagcttcaacgcctaaatgcgtatattcagggaggttactagatcttgaataatggaaagaaaagagttccctgttgtgtcgtctggtcttgtgctgctgaatctgaaaagcttccagatcagtgtaaatatgcagtcctcgttgttattgttgttgttgttgtgtttgatgttttgtgttgtttcgttgtttaacttgtcaaaactaaggccttgtgctgcttctcttcttgcgcttacttagcaagagaataaaaccaaagacatgatgtttgtttttgttatcaaatcttgcgtcaagtatccatgtgtgttatgaaataatagaattacttc

SEQ ID NO: 28348 - protein, 206 aa, Arabidopsis thaliana
  peptide (1)..(206): Ceres Seq. ID no. 13504929
  misc_feature (66)..(121): Pfam Name: CBS domain Pfam Description: CBS domain
  misc_feature (78)..(204): Homolog of NCBI NO: 15595447 NR Description: conserved hypothetical protein [Pseudomonas
  misc_feature (56)..(204): Homolog of NCBI NO: 26986946 NR Description: CBS domain protein [Pseudomonas putida KT2440]
  misc_feature (66)..(206): Homolog of NCBI NO: 22988916 NR Description: hypothetical protein [Burkholderia fungorum]
  misc_feature (48)..(202): Homolog of NCBI NO: 28850322 NR Description: similar to putative protein
  misc_feature (36)..(204): Homolog of NCBI NO: 22984734 NR Description: hypothetical protein [Burkholderia fungorum]
  misc_feature (56)..(203): Homolog of NCBI NO: 34499375 NR Description: conserved hypothetical protein
  misc_feature (1)..(110): Homolog of NCBI NO: 18266206 NR Description: senescence-associated putative protein [Narcissus
  misc_feature (1)..(206): Homolog of NCBI NO: 34913008 NR Description: P0663E10.18 [Oryza sativa (japonica
  misc_feature (1)..(206): Homolog of NCBI NO: 29788876 NR Description: unknown protein [Oryza sativa (japonica
  misc_feature (1)..(206): Homolog of NCBI NO: 15238284 NR Description: CBS domain containing protein [Arabidopsis
MQGVIRSFVSGGNVVKGSVLQHLRVINPAIQPSVFCSRYESTQPARMEESGFESTTISDVMKSKGKSADGSWLWCTTDDTVYDAVKSMTQHNVGALVVVKPGEQQALAGIITERDYLRKIIVQGRSSKSTKVGDIMTEENKLITVTPETKVLRAMQLMTDNRIRHIPVIKDKGMIGMVSIGDVVRAVVHEHREELQRLNAYIQGGY

SEQ ID NO: 28349 - protein, 160 aa, Arabidopsis thaliana; identical to SEQ ID NO: 25659
  peptide (1)..(160): Ceres Seq. ID no. 13504930
  misc_feature (20)..(75): Pfam Name: CBS domain Pfam Description: CBS domain
  misc_feature (32)..(158): Homolog of NCBI NO: 15595447 NR Description: conserved hypothetical protein [Pseudomonas
  misc_feature (10)..(158): Homolog of NCBI NO: 26986946 NR Description: CBS domain protein [Pseudomonas putida KT2440]
  misc_feature (20)..(160): Homolog of NCBI NO: 22988916 NR Description: hypothetical protein [Burkholderia fungorum]
  misc_feature (2)..(156): Homolog of NCBI NO: 28850322 NR Description: similar to putative protein
  misc_feature (1)..(158): Homolog of NCBI NO: 22984734 NR Description: hypothetical protein [Burkholderia fungorum]
  misc_feature (10)..(157): Homolog of NCBI NO: 34499375 NR Description: conserved hypothetical protein
  misc_feature (1)..(64): Homolog of NCBI NO: 18266206 NR Description: senescence-associated putative protein [Narcissus
  misc_feature (1)..(160): Homolog of NCBI NO: 34913008 NR Description: P0663E10.18 [Oryza sativa (japonica
  misc_feature (1)..(160): Homolog of NCBI NO: 29788876 NR Description: unknown protein [Oryza sativa (japonica
  misc_feature (1)..(160): Homolog of NCBI NO: 15238284 NR Description: CBS domain containing protein [Arabidopsis

SEQ ID NO: 28350 - protein, 146 aa, Arabidopsis thaliana; identical to SEQ ID NO: 25660
  peptide (1)..(146): Ceres Seq. ID no. 13504931
  misc_feature (6)..(61): Pfam Name: CBS domain Pfam Description: CBS domain
  misc_feature (18)..(144): Homolog of NCBI NO: 15595447 NR Description: conserved hypothetical protein [Pseudomonas
  misc_feature (1)..(144): Homolog of NCBI NO: 26986946 NR Description: CBS domain protein [Pseudomonas putida KT2440]
  misc_feature (6)..(146): Homolog of NCBI NO: 22988916 NR Description: hypothetical protein [Burkholderia fungorum]
  misc_feature (1)..(142): Homolog of NCBI NO: 28850322 NR Description: similar to putative protein
  misc_feature (1)..(144): Homolog of NCBI NO: 22984734 NR Description: hypothetical protein [Burkholderia fungorum]
  misc_feature (1)..(143): Homolog of NCBI NO: 34499375 NR Description: conserved hypothetical protein
  misc_feature (1)..(50): Homolog of NCBI NO: 18266206 NR Description: senescence-associated putative protein [Narcissus
  misc_feature (1)..(146): Homolog of NCBI NO: 34913008 NR Description: P0663E10.18 [Oryza sativa (japonica
  misc_feature (1)..(146): Homolog of NCBI NO: 29788876 NR Description: unknown protein [Oryza sativa (japonica
  misc_feature (1)..(146): Homolog of NCBI NO: 15238284 NR Description: CBS domain containing protein [Arabidopsis

SEQ ID NO: 28351 - DNA, 1596 bp, Arabidopsis thaliana
  misc_feature (1)..(1596): Ceres Seq. ID no. 13496758
  misc_feature: MA Experiment ID: 20000171 Result: Down-regulated in Transcription
  misc_feature: MA Experiment 20000171 PARAMETER Experiment Name: At_42deg_Heat_P Parameter: Age (day) Value: 14
  misc_feature: MA Experiment 20000171 PARAMETER Experiment Name: At_42deg_Heat_P Parameter: Organism Value: A. thaliana
  misc_feature: MA Experiment 20000171 PARAMETER Experiment Name: At_42deg_Heat_P Parameter: Plant Line Value: WS
  misc_feature: MA Experiment 20000171 PARAMETER Experiment Name: At_42deg_Heat_P Parameter: Temperature (deg C) Value: 42 vs. 22
  misc_feature: MA Experiment 20000171 PARAMETER Experiment Name: At_42deg_Heat_P Parameter: Timepoint (hr) Value: 1
  misc_feature: MA Experiment 20000171 PARAMETER Experiment Name: At_42deg_Heat_P Parameter: Tissue Value: Aerial
  misc_feature: MA Experiment ID: 20000173 Result: Down-regulated in Transcription
  misc_feature: MA Experiment 20000173 PARAMETER Experiment Name: At_42deg_Heat_P Parameter: Age (day) Value: 14
  misc_feature: MA Experiment 20000173 PARAMETER Experiment Name: At_42deg_Heat_P Parameter: Organism Value: A. thaliana
  misc_feature: MA Experiment 20000173 PARAMETER Experiment Name: At_42deg_Heat_P Parameter: Plant Line Value: WS
  misc_feature: MA Experiment 20000173 PARAMETER Experiment Name: At_42deg_Heat_P Parameter: Temperature (deg C) Value: 42 vs. 22
  misc_feature: MA Experiment 20000173 PARAMETER Experiment Name: At_42deg_Heat_P Parameter: Timepoint (hr) Value: 6
  misc_feature: MA Experiment 20000173 PARAMETER Experiment Name: At_42deg_Heat_P Parameter: Tissue Value: Aerial
  misc_feature: MA Experiment ID: 20000179 Result: Down-regulated in Transcription
  misc_feature: MA Experiment 20000179 PARAMETER Experiment Name: At_Germinating_Seeds_P Parameter: Age (hr) Value: 6 vs. 0
  misc_feature: MA Experiment 20000179 PARAMETER Experiment Name: At_Germinating_Seeds_P Parameter: Tissue Value: Germinating Seeds
  misc_feature: MA Experiment ID: 20000185 Result: Up-regulated in Transcription
  misc_feature: MA Experiment 20000185 PARAMETER Experiment Name: At_Roots__P Parameter: Age (day) Value: 7 vs. 21
  misc_feature: MA Experiment 20000185 PARAMETER Experiment Name: At_Roots__P Parameter: Organism Value: A. thaliana
  misc_feature: MA Experiment 20000185 PARAMETER Experiment Name: At_Roots__P Parameter: Tissue Value: Roots vs. Whole Plant
  misc_feature: MA Experiment ID: 20000234 Result: Up-regulated in Transcription
  misc_feature: MA Experiment 20000234 PARAMETER Experiment Name: At_Siliques_P Parameter: Age (day) Value: 21
  misc_feature: MA Experiment 20000234 PARAMETER Experiment Name: At_Siliques_P Parameter: Organism Value: A. thaliana
  misc_feature: MA Experiment 20000234 PARAMETER Experiment Name: At_Siliques_P Parameter: Plant Line Value: WS
  misc_feature: MA Experiment 20000234 PARAMETER Experiment Name: At_Siliques_P Parameter: Tissue Value: Less Than 5mm Siliques vs. Whole Plant
  misc_feature: MA Experiment ID: 20000235 Result: Up-regulated in Transcription
  misc_feature: MA Experiment 20000235 PARAMETER Experiment Name: At_Siliques_P Parameter: Age (day) Value: 21
  misc_feature: MA Experiment 20000235 PARAMETER Experiment Name: At_Siliques_P Parameter: Organism Value: A. thaliana
  misc_feature: MA Experiment 20000235 PARAMETER Experiment Name: At_Siliques_P Parameter: Plant Line Value: WS
  misc_feature: MA Experiment 20000235 PARAMETER Experiment Name: At_Siliques_P Parameter: Tissue Value: 5-10mm Siliques vs. Whole Plant
  misc_feature: MA Experiment ID: 20000264 Result: Up-regulated in Transcription
  misc_feature: MA Experiment 20000264 PARAMETER Experiment Name: At_Open_Flower_P Parameter: Age (day) Value: 21
  misc_feature: MA Experiment 20000264 PARAMETER Experiment Name: At_Open_Flower_P Parameter: Plant Line Value: WS
  misc_feature: MA Experiment 20000264 PARAMETER Experiment Name: At_Open_Flower_P Parameter: Tissue Value: Open Flower vs. Whole Plant
  misc_feature: MA Experiment ID: 20000265 Result: Up-regulated in Transcription
  misc_feature: MA Experiment 20000265 PARAMETER Experiment Name: At_Open_Flower_P Parameter: Age (day) Value: 21
  misc_feature: MA Experiment 20000265 PARAMETER Experiment Name: At_Open_Flower_P Parameter: Plant Line Value: WS
  misc_feature: MA Experiment 20000265 PARAMETER Experiment Name: At_Open_Flower_P Parameter: Tissue Value: Closed Flower vs. Whole Plant
  misc_feature: MA Experiment ID: 20000286 Result: Up-regulated in Transcription
  misc_feature: MA Experiment 20000286 PARAMETER Experiment Name: At_Open_Flower_P Parameter: Age (day) Value: 21
  misc_feature: MA Experiment 20000286 PARAMETER Experiment Name: At_Open_Flower_P Parameter: Plant Line Value: WS
  misc_feature: MA Experiment 20000286 PARAMETER Experiment Name: At_Open_Flower_P Parameter: Tissue Value: Half Open vs. Whole Plant
  misc_feature: MA Experiment ID: 20000439 Result: Up-regulated in Transcription
  misc_feature: MA Experiment 20000439 PARAMETER Experiment Name: At_Roots__P Parameter: Age (day) Value: 14 vs. 21
  misc_feature: MA Experiment 20000439 PARAMETER Experiment Name: At_Roots__P Parameter: Organism Value: A. thaliana
  misc_feature: MA Experiment 20000439 PARAMETER Experiment Name: At_Roots__P Parameter: Tissue Value: Roots vs. Whole Plant
  misc_feature: MA Experiment ID: 20000495 Result: Up-regulated in Transcription
  misc_feature: MA Experiment 20000495 PARAMETER Experiment Name: At_Guard_Cells_P Parameter: Harvest Date Value: 8/2/2002
  misc_feature: MA Experiment 20000495 PARAMETER Experiment Name: At_Guard_Cells_P Parameter: Organism Value: A. thaliana
  misc_feature: MA Experiment 20000495 PARAMETER Experiment Name: At_Guard_Cells_P Parameter: Tissue Value: Guard Cells vs. Leaves
  misc_feature: MA Experiment ID: 20000496 Result: Up-regulated in Transcription
  misc_feature: MA Experiment 20000496 PARAMETER Experiment Name: At_Guard_Cells_P Parameter: Harvest Date Value: 7/19/2002
  misc_feature: MA Experiment 20000496 PARAMETER Experiment Name: At_Guard_Cells_P Parameter: Organism Value: Canola
  misc_feature: MA Experiment 20000496 PARAMETER Experiment Name: At_Guard_Cells_P Parameter: Tissue Value: Guard Cells vs. Leaves
  misc_feature: MA Experiment ID: 20000794 Result: Up-regulated in Transcription
  misc_feature: MA Experiment 20000794 PARAMETER Experiment Name: At_Petals_P Parameter: Age (day) Value: 23-25 days
  misc_feature: MA Experiment 20000794 PARAMETER Experiment Name: At_Petals_P Parameter: Plant Line Value: WS
  misc_feature: MA Experiment 20000794 PARAMETER Experiment Name: At_Petals_P Parameter: Tissue Value: Petals vs. Whole plant
atgacctctctctccaccgccggttaccttcttctccttctccttctccctataagctacgacggtggcttcatcggagccgccgatgcagaacatgacctcagagccactgatctccataatcatcgccatcgtcgccaccgtaaccaccatcgcggagaagagtttgagtactcagccatatcatgtagagcttactcagcctcattggacgagtttggcgccgtaggagacggtgtaacttcaaatacagcggcgtttcgcgacgcggtgtcacaacttagccgtttcgcagactacggtggctcattgttatttgttcccgccggacggtggctcaccggaaactttaacctgaccagccattttacgcttttcctccaccgtgatgctgttatcctcgcctctcaagaagagagtgactatgaagtgatagagccactgccttcgtacggaagagggcgagacacagatggtggaaggttcatcagtctactttttggttcaaacttaaccgatgttgttatcaccggtgagaatgggacaattgatggacaaggagaaccatggtgggggaaattcaagagaggagaactaaaatacacaagaccttatttgattgagattatgcattctgatggtatccaaatctccaatctcactttcttgaattctccttcttggcatattcacccggtctacagcagcaatatatatatccaaggtttgacgatattagcaccggtcacggtaccaaacactgacggtatcaacccagattcttgtaccaacacgaggattgaggactgctacattgtctccggcgacgattgtatcgccgttaaaagtggatgggatcaatacggaatcaactacggcatgcctacgaaacagctcttgatccgacggctcacatgcatttctcctgatagtgccgtgatcgctctcggcagtgaaatgtccggtggaattgaagatgttcgagctgaagatattgttgccattaactctgaatctggaatcaggattaaaacagctatcggacgaggaggttacgtgaaggatgtatacgtaagaggaatgacaatgatgacaatgaaatatgtgttttggatgaccggaagttacggttcgcatccggacgatcattatgatccgaaagcgttaccggtgattcagaacattaattatcaagacatggtcgccgagaacgtgacgatgcctgctcagttagctggaatatcgggagatcagtttactggaatttgtatctctaacgtgactatcactctatcgaagaaacctaagaaagtgctttggaattgtactgatgtttcgggttatactagtggtgtgactccgcagccgtgtcagttgttaccggagaagcagccggggacggttgtgccgtgtaatttcccggaagatccgattcctattgatgaagtgaagcttcaacgttgctactccagaagaaggaatatgtgaacatgtaataagatcttcttttttttaacaaatacttttcttgggttataagtaaatgtgttatcaaatggggacatatttgattgaataatagacaaagcttcaagg

SEQ ID NO: 28352 - protein, 495 aa, Arabidopsis thaliana
  peptide (1)..(495): Ceres Seq. ID no. 13496759
  misc_feature (101)..(457): Pfam Name: Glycosyl hydrolases family 28 Pfam Description: Glycosyl hydrolases family 28
  misc_feature (81)..(468): Homolog of NCBI NO: 34393209 NR Description: putative polygalacturonase
  misc_feature (64)..(460): Homolog of NCBI NO: 40714685 NR Description: putative polygalacturonase
  misc_feature (57)..(462): Homolog of NCBI NO: 11263971 NR Description: hypothetical protein T17J13.70 - Arabidopsis
  misc_feature (57)..(462): Homolog of NCBI NO: 18412253 NR Description: polygalacturonase, putative [Arabidopsis
  misc_feature (57)..(488): Homolog of NCBI NO: 15224072 NR Description: polygalacturonase, putative [Arabidopsis
  misc_feature (58)..(490): Homolog of NCBI NO: 34897760 NR Description: ESTs AU029388(E30287),D49277(S16474) correspond a region of the predicted gene.~Similar to Arabidopsis thaliana
  misc_feature (45)..(489): Homolog of NCBI NO: 15229058 NR Description: polygalacturonase, putative [Arabidopsis
  misc_feature (54)..(488): Homolog of NCBI NO: 15233124 NR Description: polygalacturonase, putative [Arabidopsis
  misc_feature (34)..(488): Homolog of NCBI NO: 30692538 NR Description: polygalacturonase-like protein [Fragaria x
  misc_feature (1)..(495): Homolog of NCBI NO: 15236514 NR Description: polygalacturonase, putative [Arabidopsis
MTSLSTAGYLLLLLLLPISYDGGFIGAADAEHDLRATDLHNHRHRRHRNHHRGEEFEYSAISCRAYSASLDEFGAVGDGVTSNTAAFRDAVSQLSRFADYGGSLLFVPAGRWLTGNFNLTSHFTLFLHRDAVILASQEESDYEVIEPLPSYGRGRDTDGGRFISLLFGSNLTDVVITGENGTIDGQGEPWWGKFKRGELKYTRPYLIEIMHSDGIQISNLTFLNSPSWHIHPVYSSNIYIQGLTILAPVTVPNTDGINPDSCTNTRIEDCYIVSGDDCIAVKSGWDQYGINYGMPTKQLLIRRLTCISPDSAVIALGSEMSGGIEDVRAEDIVAINSESGIRIKTAIGRGGYVKDVYVRGMTMMTMKYVFWMTGSYGSHPDDHYDPKALPVIQNINYQDMVAENVTMPAQLAGISGDQFTGICISNVTITLSKKPKKVLWNCTDVSGYTSGVTPQPCQLLPEKQPGTVVPCNFPEDPIPIDEVKLQRCYSRRRNM

SEQ ID NO: 28353 - protein, 286 aa, Arabidopsis thaliana
  peptide (1)..(286): Ceres Seq. ID no. 13496760
  misc_feature (1)..(248): Pfam Name: Glycosyl hydrolases family 28 Pfam Description: Glycosyl hydrolases family 28
  misc_feature (1)..(259): Homolog of NCBI NO: 34393209 NR Description: putative polygalacturonase
  misc_feature (1)..(251): Homolog of NCBI NO: 40714685 NR Description: putative polygalacturonase
  misc_feature (1)..(253): Homolog of NCBI NO: 11263971 NR Description: hypothetical protein T17J13.70 - Arabidopsis
  misc_feature (1)..(253): Homolog of NCBI NO: 18412253 NR Description: polygalacturonase, putative [Arabidopsis
  misc_feature (1)..(279): Homolog of NCBI NO: 15224072 NR Description: polygalacturonase, putative [Arabidopsis
  misc_feature (1)..(281): Homolog of NCBI NO: 34897760 NR Description: ESTs AU029388(E30287),D49277(S16474) correspond a region of the predicted gene.~Similar to Arabidopsis thaliana
  misc_feature (1)..(280): Homolog of NCBI NO: 15229058 NR Description: polygalacturonase, putative [Arabidopsis
  misc_feature (1)..(279): Homolog of NCBI NO: 15233124 NR Description: polygalacturonase, putative [Arabidopsis
  misc_feature (1)..(279): Homolog of NCBI NO: 30692538 NR Description: polygalacturonase-like protein [Fragaria x
  misc_feature (1)..(286): Homolog of NCBI NO: 15236514 NR Description: polygalacturonase, putative [Arabidopsis
MHSDGIQISNLTFLNSPSWHIHPVYSSNIYIQGLTILAPVTVPNTDGINPDSCTNTRIEDCYIVSGDDCIAVKSGWDQYGINYGMPTKQLLIRRLTCISPDSAVIALGSEMSGGIEDVRAEDIVAINSESGIRIKTAIGRGGYVKDVYVRGMTMMTMKYVFWMTGSYGSHPDDHYDPKALPVIQNINYQDMVAENVTMPAQLAGISGDQFTGICISNVTITLSKKPKKVLWNCTDVSGYTSGVTPQPCQLLPEKQPGTVVPCNFPEDPIPIDEVKLQRCYSRRRNM

SEQ ID NO: 28354 - DNA, 591 bp, Arabidopsis thaliana
  misc_feature (1)..(591): Ceres Seq. ID no. 12393038
  misc_feature: MA Experiment ID: 108434 Result: Up-regulated in Transcription
  misc_feature: MA Experiment 108434 PARAMETER Experiment Name: At_Root_Tips_cDNA_P Parameter: Tissue Value: Root Tips
  misc_feature: MA Experiment ID: 108462 Result: Down-regulated in Transcription
  misc_feature: MA Experiment 108462 PARAMETER Experiment Name: At_Germinating_Seeds_cDNA_P Parameter: Age (day) Value: 2 vs. 0
  misc_feature: MA Experiment 108462 PARAMETER Experiment Name: At_Germinating_Seeds_cDNA_P Parameter: Tissue Value: Germinating Seeds
  misc_feature: MA Experiment ID: 108463 Result: Down-regulated in Transcription
  misc_feature: MA Experiment 108463 PARAMETER Experiment Name: At_Germinating_Seeds_cDNA_P Parameter: Age (day) Value: 3 vs. 0
  misc_feature: MA Experiment 108463 PARAMETER Experiment Name: At_Germinating_Seeds_cDNA_P Parameter: Tissue Value: Germinating Seeds
  misc_feature: MA Experiment ID: 108464 Result: Down-regulated in Transcription
  misc_feature: MA Experiment 108464 PARAMETER Experiment Name: At_Germinating_Seeds_cDNA_P Parameter: Age (day) Value: 4 vs. 0
  misc_feature: MA Experiment 108464 PARAMETER Experiment Name: At_Germinating_Seeds_cDNA_P Parameter: Tissue Value: Germinating Seeds
  misc_feature: MA Experiment ID: 108573 Result: Down-regulated in Transcription
  misc_feature: MA Experiment 108573 PARAMETER Experiment Name: At_Drought_cDNA_P Parameter: Timepoint (hr) Value: 6
  misc_feature: MA Experiment 108573 PARAMETER Experiment Name: At_Drought_cDNA_P Parameter: Tissue Value: Aerial
  misc_feature: MA Experiment 108573 PARAMETER Experiment Name: At_Drought_cDNA_P Parameter: Treatment Value: Drought vs. No Drought
  misc_feature: MA Experiment ID: 20000117 Result: Down-regulated in Transcription
  misc_feature: MA Experiment 20000117 PARAMETER Experiment Name: At_100uM_ABA_Mutants_cDNA_P Parameter: Plant Line Value: Columbia
  misc_feature: MA Experiment 20000117 PARAMETER Experiment Name: At_100uM_ABA_Mutants_cDNA_P Parameter: Timepoint (hr) Value: 6
  misc_feature: MA Experiment 20000117 PARAMETER Experiment Name: At_100uM_ABA_Mutants_cDNA_P Parameter: Tissue Value: Aerial
  misc_feature: MA Experiment 20000117 PARAMETER Experiment Name: At_100uM_ABA_Mutants_cDNA_P Parameter: Treatment Value: 100uM ABA vs. No Treatment
acttcttcatcgccgtctgcacaaaaccctgatgttctaggtaatgggtctcctacgagatccatcagtctccacgaaaatgaaggttgttgccgcatacttgctcgctgttttgagcggaaaagcttcaccaaccagtgccgatatcaagactatccttggatcagttggtgctgagacagaggattctcagattgagcttttgttgaaggaagtgaaaggaaaagatttggctgagttgattgctgctggaagggagaagttagcttcagtgccgtctggtggcggaggtggtgttgcggttgcttctgctacatctggaggtggaggaggtggtggtgctcctgctgctgagtccaagaaagaagagaagaaggaagaaaaggaagaatccgatgatgacatgggtttcagtctattcgagtaagctggtagtagcatgaaaagtccggttttgttgtcctcttttaatattgtaaccttttgaaatctatatgttgttgttgtttagtttgtattcgatcatcttttttagacattgctgaaattctcaagagtttttgacccgaatgtcatttgcactttgttgtt

SEQ ID NO: 28355 - protein, 127 aa, Arabidopsis thaliana
  peptide (1)..(127): Ceres Seq. ID no. 12393039
  misc_feature (29)..(126): Pfam Name: 60s Acidic ribosomal protein Pfam Description: 60s Acidic ribosomal protein
  misc_feature (13)..(127): Homolog of NCBI NO: 730583 NR Description: 60S acidic ribosomal protein P2
  misc_feature (13)..(127): Homolog of NCBI NO: 4204372 NR Description: acidic ribosomal protein P2a-2 [Zea mays]
  misc_feature (13)..(127): Homolog of NCBI NO: 899610 NR Description: acidic ribosomal protein P2
  misc_feature (13)..(127): Homolog of NCBI NO: 1173073 NR Description: 60S ACIDIC RIBOSOMAL PROTEIN P2A (P2)
  misc_feature (13)..(127): Homolog of NCBI NO: 15230454 NR Description: acidic ribosomal protein P2 -like; protein id:
  misc_feature (13)..(127): Homolog of NCBI NO: 34906408 NR Description: putative 60S acidic ribosomal protein P2A
  misc_feature (13)..(127): Homolog of NCBI NO: 24473796 NR Description: 60s acidic ribosomal protein [Prunus dulcis]
  misc_feature (13)..(127): Homolog of NCBI NO: 15226231 NR Description: 60S acidic ribosomal protein P2
  misc_feature (13)..(127): Homolog of NCBI NO: 15226230 NR Description: 60S acidic ribosomal protein P2
  misc_feature (13)..(127): Homolog of NCBI NO: 21593095 NR Description: 60S acidic ribosomal protein P2 [Arabidopsis
MGLLRDPSVSTKMKVVAAYLLAVLSGKASPTSADIKTILGSVGAETEDSQIELLLKEVKGKDLAELIAAGREKLASVPSGGGGGVAVASATSGGGGGGGAPAAESKKEEKKEEKEESDDDMGFSLFE

SEQ ID NO: 28356 - protein, 115 aa, Arabidopsis thaliana
  peptide (1)..(115): Ceres Seq. ID no. 12393040
  misc_feature (17)..(114): Pfam Name: 60s Acidic ribosomal protein Pfam Description: 60s Acidic ribosomal protein
  misc_feature (1)..(115): Homolog of NCBI NO: 730583 NR Description: 60S acidic ribosomal protein P2
  misc_feature (1)..(115): Homolog of NCBI NO: 4204372 NR Description: acidic ribosomal protein P2a-2 [Zea mays]
  misc_feature (1)..(115): Homolog of NCBI NO: 899610 NR Description: acidic ribosomal protein P2
  misc_feature (1)..(115): Homolog of NCBI NO: 1173073 NR Description: 60S ACIDIC RIBOSOMAL PROTEIN P2A (P2)
  misc_feature (1)..(115): Homolog of NCBI NO: 15230454 NR Description: acidic ribosomal protein P2 -like; protein id:
  misc_feature (1)..(115): Homolog of NCBI NO: 34906408 NR Description: putative 60S acidic ribosomal protein P2A
  misc_feature (1)..(115): Homolog of NCBI NO: 24473796 NR Description: 60s acidic ribosomal protein [Prunus dulcis]
  misc_feature (1)..(115): Homolog of NCBI NO: 15226231 NR Description: 60S acidic ribosomal protein P2
  misc_feature (1)..(115): Homolog of NCBI NO: 15226230 NR Description: 60S acidic ribosomal protein P2
  misc_feature (1)..(115): Homolog of NCBI NO: 21593095 NR Description: 60S acidic ribosomal protein P2 [Arabidopsis
MKVVAAYLLAVLSGKASPTSADIKTILGSVGAETEDSQIELLLKEVKGKDLAELIAAGREKLASVPSGGGGGVAVASATSGGGGGGGAPAAESKKEEKKEEKEESDDDMGFSLFE

SEQ ID NO: 28357 - DNA, 1046 bp, Arabidopsis thaliana
  misc_feature (1)..(1046): Ceres Seq. ID no. 12640901
  misc_feature: MA Experiment ID: 108569 Result: Down-regulated in Transcription
  misc_feature: MA Experiment 108569 PARAMETER Experiment Name: At_0.001%_MeJA__cDNA_P Parameter: Timepoint (hr) Value: 6
  misc_feature: MA Experiment 108569 PARAMETER Experiment Name: At_0.001%_MeJA__cDNA_P Parameter: Tissue Value: Aerial
  misc_feature: MA Experiment 108569 PARAMETER Experiment Name: At_0.001%_MeJA__cDNA_P Parameter: Treatment Value: 0.001% MeJA vs. No Treatment
  misc_feature: MA Experiment ID: 108668 Result: Up-regulated in Transcription
  misc_feature: MA Experiment 108668 PARAMETER Experiment Name: At_2mM_SA_cDNA_P Parameter: Plant Line Value: WS
  misc_feature: MA Experiment 108668 PARAMETER Experiment Name: At_2mM_SA_cDNA_P Parameter: Timepoint (hr) Value: 6
  misc_feature: MA Experiment 108668 PARAMETER Experiment Name: At_2mM_SA_cDNA_P Parameter: Treatment Value: 2mM SA vs. No Treatment
  misc_feature: MA Experiment ID: 20000173 Result: Up-regulated in Transcription
  misc_feature: MA Experiment 20000173 PARAMETER Experiment Name: At_42deg_Heat_P Parameter: Age (day) Value: 14
  misc_feature: MA Experiment 20000173 PARAMETER Experiment Name: At_42deg_Heat_P Parameter: Organism Value: A. thaliana
  misc_feature: MA Experiment 20000173 PARAMETER Experiment Name: At_42deg_Heat_P Parameter: Plant Line Value: WS
  misc_feature: MA Experiment 20000173 PARAMETER Experiment Name: At_42deg_Heat_P Parameter: Temperature (deg C) Value: 42 vs. 22
  misc_feature: MA Experiment 20000173 PARAMETER Experiment Name: At_42deg_Heat_P Parameter: Timepoint (hr) Value: 6
  misc_feature: MA Experiment 20000173 PARAMETER Experiment Name: At_42deg_Heat_P Parameter: Tissue Value: Aerial
  misc_feature: MA Experiment ID: 20000182 Result: Up-regulated in Transcription
  misc_feature: MA Experiment 20000182 PARAMETER Experiment Name: At_2mM_SA_P Parameter: Age (day) Value: 14
  misc_feature: MA Experiment 20000182 PARAMETER Experiment Name: At_2mM_SA_P Parameter: Organism Value: A. thaliana
  misc_feature: MA Experiment 20000182 PARAMETER Experiment Name: At_2mM_SA_P Parameter: Plant Line Value: WS
  misc_feature: MA Experiment 20000182 PARAMETER Experiment Name: At_2mM_SA_P Parameter: Timepoint (hr) Value: 6
  misc_feature: MA Experiment 20000182 PARAMETER Experiment Name: At_2mM_SA_P Parameter: Tissue Value: Aerial
  misc_feature: MA Experiment 20000182 PARAMETER Experiment Name: At_2mM_SA_P Parameter: Treatment Value: 2mM SA vs. No Treatment
  misc_feature: MA Experiment ID: 20000184 Result: Down-regulated in Transcription
  misc_feature: MA Experiment 20000184 PARAMETER Experiment Name: At_Shoots__P Parameter: Age (day) Value: 7
  misc_feature: MA Experiment 20000184 PARAMETER Experiment Name: At_Shoots__P Parameter: Tissue Value: Shoots vs. Whole Plant
  misc_feature: MA Experiment ID: 20000227 Result: Down-regulated in Transcription
  misc_feature: MA Experiment 20000227 PARAMETER Experiment Name: At_Root-Tips-vs-Tops_P Parameter: Tissue Value: Root Tips vs. Root Tops
aaaaattcaaaaacttaattactaagcaaaagtgtgcacgaagaacaaagcgacgcatccgattttatttgtttgataagttcgtgtcgtcttcgtctctctaacccaattctgtggtgtctgaagaaagcagaatcaaatccatgtctttcagaggacttagcaggccaaatgcaatatctggaatgggtgttgcagatgagagcaaaaccacatttctagagcttcaaaggaaaaaaactcatcgctatgtggtcttcaagattgatgaatccaaaaaagaagttgttgttgagaaaactggaaatcctacagagagctacgatgatttcttagcttcacttcctgataatgactgcagatacgctgtttatgactttgatttcgttacttctgagaattgtcaaaagagcaaaatcttcttctttgcttggtctccttcgacctctggaattcgagccaaggtgctttactcgacttctaaagaccagttaagtagggagcttcaagggattcactatgagattcaagctactgatcctactgaggttgatcttgaagtgttacgcgaacgagcgaactgagagcaagcaagattgctatgtctattcaaaacttatggtaatgtaatgaataattcgtattctctgtggattgatttgtgtaaacacagtttcatgttctatgtcaaactgtataacctctggtgtttcagattgcacaacctaaagcttaggtaaactgaatatggtttaagatcgtaaaaggttgatatattagtaatgttaagagggagaagaaacttctctttagtagataacgagaatgttgatgagcatgatgagagagttcttaaactagtctagcaaattctgtataagctcttgttgtagccatcttgaattcgagtctaatccttgcgaacaatatagaaagtggtagtgtgtaaagtttccctcatcatttgtggtttctttttctcactttcttcggtgtagtaaaatttaagttgtatgtataatagttctatcatatacctgctttct

SEQ ID NO: 28358 - protein, 146 aa, Arabidopsis thaliana
  peptide (1)..(146): Ceres Seq. ID no. 12640902
  misc_feature (19)..(146): Pfam Name: Cofilin/tropomyosin-type actin-binding protein Pfam Description: Cofilin/tropomyosin-type actin-binding protein
  misc_feature (17)..(146): Homolog of NCBI NO: 37536154 NR Description: putative actin depolymerizing factor
  misc_feature (10)..(146): Homolog of NCBI NO: 30697300 NR Description: actin depolymerizing factor 4 - like protein
  misc_feature (10)..(146): Homolog of NCBI NO: 17366768 NR Description: Actin-depolymerizing factor 1 (ADF 1)
  misc_feature (7)..(146): Homolog of NCBI NO: 34897072 NR Description: putative actin-depolymerizing factor
  misc_feature (12)..(145): Homolog of NCBI NO: 7330254 NR Description: actin depolymerizing factor [Elaeis guineensis]
  misc_feature (1)..(145): Homolog of NCBI NO: 24745620 NR Description: actin depolymerizing factor 6 [Solanum tuberosum]
  misc_feature (9)..(146): Homolog of NCBI NO: 4566614 NR Description: actin depolymerizing factor [Populus x canescens]
  misc_feature (15)..(146): Homolog of NCBI NO: 25295741 NR Description: actin depolymerizing factor 6 [imported] -
  misc_feature (1)..(146): Homolog of NCBI NO: 21554405 NR Description: Actin-depolymerizing factor ADF-6 [Arabidopsis
  misc_feature (1)..(146): Homolog of NCBI NO: 18402587 NR Description: actin depolymerizing factor 6
MSFRGLSRPNAISGMGVADESKTTFLELQRKKTHRYVVFKIDESKKEVVVEKTGNPTESYDDFLASLPDNDCRYAVYDFDFVTSENCQKSKIFFFAWSPSTSGIRAKVLYSTSKDQLSRELQGIHYEIQATDPTEVDLEVLRERAN

SEQ ID NO: 28359 - protein, 132 aa, Arabidopsis thaliana
  peptide (1)..(132): Ceres Seq. ID no. 12640903
  misc_feature (5)..(132): Pfam Name: Cofilin/tropomyosin-type actin-binding protein Pfam Description: Cofilin/tropomyosin-type actin-binding protein
  misc_feature (3)..(132): Homolog of NCBI NO: 37536154 NR Description: putative actin depolymerizing factor
  misc_feature (1)..(132): Homolog of NCBI NO: 30697300 NR Description: actin depolymerizing factor 4 - like protein
  misc_feature (1)..(132): Homolog of NCBI NO: 17366768 NR Description: Actin-depolymerizing factor 1 (ADF 1)
  misc_feature (1)..(132): Homolog of NCBI NO: 34897072 NR Description: putative actin-depolymerizing factor
  misc_feature (1)..(131): Homolog of NCBI NO: 7330254 NR Description: actin depolymerizing factor [Elaeis guineensis]
  misc_feature (1)..(131): Homolog of NCBI NO: 24745620 NR Description: actin depolymerizing factor 6 [Solanum tuberosum]
  misc_feature (1)..(132): Homolog of NCBI NO: 4566614 NR Description: actin depolymerizing factor [Populus x canescens]
  misc_feature (1)..(132): Homolog of NCBI NO: 25295741 NR Description: actin depolymerizing factor 6 [imported] -
  misc_feature (1)..(132): Homolog of NCBI NO: 21554405 NR Description: Actin-depolymerizing factor ADF-6 [Arabidopsis
  misc_feature (1)..(132): Homolog of NCBI NO: 18402587 NR Description: actin depolymerizing factor 6
MGVADESKTTFLELQRKKTHRYVVFKIDESKKEVVVEKTGNPTESYDDFLASLPDNDCRYAVYDFDFVTSENCQKSKIFFFAWSPSTSGIRAKVLYSTSKDQLSRELQGIHYEIQATDPTEVDLEVLRERAN

SEQ ID NO: 28360 - DNA, 701 bp, Arabidopsis thaliana
  misc_feature (1)..(701): Ceres Seq. ID no. 12322232
  misc_feature: MA Experiment ID: 108434 Result: Down-regulated in Transcription
  misc_feature: MA Experiment 108434 PARAMETER Experiment Name: At_Root_Tips_cDNA_P Parameter: Tissue Value: Root Tips
  misc_feature: MA Experiment ID: 108488 Result: Down-regulated in Transcription
  misc_feature: MA Experiment ID: 108573 Result: Up-regulated in Transcription
  misc_feature: MA Experiment 108573 PARAMETER Experiment Name: At_Drought_cDNA_P Parameter: Timepoint (hr) Value: 6
  misc_feature: MA Experiment 108573 PARAMETER Experiment Name: At_Drought_cDNA_P Parameter: Tissue Value: Aerial
  misc_feature: MA Experiment 108573 PARAMETER Experiment Name: At_Drought_cDNA_P Parameter: Treatment Value: Drought vs. No Drought
  misc_feature: MA Experiment ID: 108576 Result: Up-regulated in Transcription
  misc_feature: MA Experiment 108576 PARAMETER Experiment Name: At_42deg_Heat_cDNA_P Parameter: Temperature (deg C) Value: 42 vs. 22
  misc_feature: MA Experiment 108576 PARAMETER Experiment Name: At_42deg_Heat_cDNA_P Parameter: Timepoint (hr) Value: 1
  misc_feature: MA Experiment 108576 PARAMETER Experiment Name: At_42deg_Heat_cDNA_P Parameter: Tissue Value: Aerial
  misc_feature: MA Experiment ID: 108579 Result: Up-regulated in Transcription
  misc_feature: MA Experiment 108579 PARAMETER Experiment Name: At_4deg_Cold_cDNA_P Parameter: Temperature (deg C) Value: 4 vs. 22
  misc_feature: MA Experiment 108579 PARAMETER Experiment Name: At_4deg_Cold_cDNA_P Parameter: Timepoint (hr) Value: 6
  misc_feature: MA Experiment 108579 PARAMETER Experiment Name: At_4deg_Cold_cDNA_P Parameter: Tissue Value: Aerial
  misc_feature: MA Experiment ID: 108585 Result: Up-regulated in Transcription
  misc_feature: MA Experiment 108585 PARAMETER Experiment Name: At_5mM_NaNP_cDNA_P Parameter: Timepoint (hr) Value: 6
  misc_feature: MA Experiment 108585 PARAMETER Experiment Name: At_5mM_NaNP_cDNA_P Parameter: Tissue Value: Aerial
  misc_feature: MA Experiment 108585 PARAMETER Experiment Name: At_5mM_NaNP_cDNA_P Parameter: Treatment Value: null
  misc_feature: MA Experiment ID: 108608 Result: Down-regulated in Transcription
  misc_feature: MA Experiment 108608 PARAMETER Experiment Name: At_100uM_ABA_cDNA_P Parameter: Timepoint (hr) Value: 1
  misc_feature: MA Experiment 108608 PARAMETER Experiment Name: At_100uM_ABA_cDNA_P Parameter: Tissue Value: Aerial
  misc_feature: MA Experiment 108608 PARAMETER Experiment Name: At_100uM_ABA_cDNA_P Parameter: Treatment Value: 100uM ABA vs. No Treatment
  misc_feature: MA Experiment ID: 108667 Result: Up-regulated in Transcription
  misc_feature: MA Experiment 108667 PARAMETER Experiment Name: At_2mM_SA_cDNA_P Parameter: Plant Line Value: WS
  misc_feature: MA Experiment 108667 PARAMETER Experiment Name: At_2mM_SA_cDNA_P Parameter: Timepoint (hr) Value: 1
  misc_feature: MA Experiment 108667 PARAMETER Experiment Name: At_2mM_SA_cDNA_P Parameter: Treatment Value: 2mM SA vs. No Treatment
  misc_feature: MA Experiment ID: 108668 Result: Up-regulated in Transcription
  misc_feature: MA Experiment 108668 PARAMETER Experiment Name: At_2mM_SA_cDNA_P Parameter: Plant Line Value: WS
  misc_feature: MA Experiment 108668 PARAMETER Experiment Name: At_2mM_SA_cDNA_P Parameter: Timepoint (hr) Value: 6
  misc_feature: MA Experiment 108668 PARAMETER Experiment Name: At_2mM_SA_cDNA_P Parameter: Treatment Value: 2mM SA vs. No Treatment
  misc_feature: MA Experiment ID: 20000068 Result: Up-regulated in Transcription
  misc_feature: MA Experiment ID: 20000069 Result: Up-regulated in Transcription
  misc_feature: MA Experiment 20000069 PARAMETER Experiment Name: At_100uM_ABA_Mutants_cDNA_P Parameter: Plant Line Value: CS23
  misc_feature: MA Experiment 20000069 PARAMETER Experiment Name: At_100uM_ABA_Mutants_cDNA_P Parameter: Timepoint (hr) Value: 6
  misc_feature: MA Experiment 20000069 PARAMETER Experiment Name: At_100uM_ABA_Mutants_cDNA_P Parameter: Tissue Value: Aerial
  misc_feature: MA Experiment 20000069 PARAMETER Experiment Name: At_100uM_ABA_Mutants_cDNA_P Parameter: Treatment Value: 100uM ABA vs. No Treatment
  misc_feature: MA Experiment ID: 20000086 Result: Up-regulated in Transcription
  misc_feature: MA Experiment 20000086 PARAMETER Experiment Name: At_100uM_ABA_Mutants_cDNA_P Parameter: Plant Line Value: CS22
  misc_feature: MA Experiment 20000086 PARAMETER Experiment Name: At_100uM_ABA_Mutants_cDNA_P Parameter: Timepoint (hr) Value: 6
  misc_feature: MA Experiment 20000086 PARAMETER Experiment Name: At_100uM_ABA_Mutants_cDNA_P Parameter: Tissue Value: Aerial
  misc_feature: MA Experiment 20000086 PARAMETER Experiment Name: At_100uM_ABA_Mutants_cDNA_P Parameter: Treatment Value: 100uM ABA vs. No Treatment
  misc_feature: MA Experiment ID: 20000087 Result: Up-regulated in Transcription
  misc_feature: MA Experiment 20000087 PARAMETER Experiment Name: At_100uM_ABA_Mutants_cDNA_P Parameter: Plant Line Value: WS
  misc_feature: MA Experiment 20000087 PARAMETER Experiment Name: At_100uM_ABA_Mutants_cDNA_P Parameter: Timepoint (hr) Value: 6
  misc_feature: MA Experiment 20000087 PARAMETER Experiment Name: At_100uM_ABA_Mutants_cDNA_P Parameter: Tissue Value: Aerial
  misc_feature: MA Experiment 20000087 PARAMETER Experiment Name: At_100uM_ABA_Mutants_cDNA_P Parameter: Treatment Value: 100uM ABA vs. No Treatment
  misc_feature: MA Experiment ID: 20000093 Result: Up-regulated in Transcription
  misc_feature: MA Experiment 20000093 PARAMETER Experiment Name: At_42deg_Heat_cDNA_P Parameter: Temperature (deg C) Value: 42 vs. 22
  misc_feature: MA Experiment 20000093 PARAMETER Experiment Name: At_42deg_Heat_cDNA_P Parameter: Timepoint (hr) Value: 0.5
  misc_feature: MA Experiment 20000093 PARAMETER Experiment Name: At_42deg_Heat_cDNA_P Parameter: Tissue Value: Aerial
  misc_feature: MA Experiment ID: 20000112 Result: Up-regulated in Transcription
  misc_feature: MA Experiment 20000112 PARAMETER Experiment Name: At_42deg_Heat_cDNA_P Parameter: Temperature (deg C) Value: 42 vs. 22
  misc_feature: MA Experiment 20000112 PARAMETER Experiment Name: At_42deg_Heat_cDNA_P Parameter: Timepoint (hr) Value: 2
  misc_feature: MA Experiment 20000112 PARAMETER Experiment Name: At_42deg_Heat_cDNA_P Parameter: Tissue Value: Aerial
  misc_feature: MA Experiment ID: 20000144 Result: Up-regulated in Transcription
  misc_feature: MA Experiment 20000144 PARAMETER Experiment Name: At_42deg_Heat_cDNA_P Parameter: Temperature (deg C) Value: 42 vs. 22
  misc_feature: MA Experiment 20000144 PARAMETER Experiment Name: At_42deg_Heat_cDNA_P Parameter: Timepoint (hr) Value: 1
  misc_feature: MA Experiment 20000144 PARAMETER Experiment Name: At_42deg_Heat_cDNA_P Parameter: Tissue Value: Aerial
  misc_feature: MA Experiment ID: 20000166 Result: Down-regulated in Transcription
  misc_feature: MA Experiment 20000166 PARAMETER Experiment Name: At_100uM_ABA_P Parameter: Age (day) Value: 14
  misc_feature: MA Experiment 20000166 PARAMETER Experiment Name: At_100uM_ABA_P Parameter: Organism Value: A. thaliana
  misc_feature: MA Experiment 20000166 PARAMETER Experiment Name: At_100uM_ABA_P Parameter: Plant Line Value: WS
  misc_feature: MA Experiment 20000166 PARAMETER Experiment Name: At_100uM_ABA_P Parameter: Timepoint (hr) Value: 1
  misc_feature: MA Experiment 20000166 PARAMETER Experiment Name: At_100uM_ABA_P Parameter: Tissue Value: Aerial
  misc_feature: MA Experiment 20000166 PARAMETER Experiment Name: At_100uM_ABA_P Parameter: Treatment Value: 100uM ABA vs. No Treatment
  misc_feature: MA Experiment ID: 20000171 Result: Up-regulated in Transcription
  misc_feature: MA Experiment 20000171 PARAMETER Experiment Name: At_42deg_Heat_P Parameter: Age (day) Value: 14
  misc_feature: MA Experiment 20000171 PARAMETER Experiment Name: At_42deg_Heat_P Parameter: Organism Value: A. thaliana
  misc_feature: MA Experiment 20000171 PARAMETER Experiment Name: At_42deg_Heat_P Parameter: Plant Line Value: WS
  misc_feature: MA Experiment 20000171 PARAMETER Experiment Name: At_42deg_Heat_P Parameter: Temperature (deg C) Value: 42 vs. 22
  misc_feature: MA Experiment 20000171 PARAMETER Experiment Name: At_42deg_Heat_P Parameter: Timepoint (hr) Value: 1
  misc_feature: MA Experiment 20000171 PARAMETER Experiment Name: At_42deg_Heat_P Parameter: Tissue Value: Aerial
  misc_feature: MA Experiment ID: 20000173 Result: Up-regulated in Transcription
  misc_feature: MA Experiment 20000173 PARAMETER Experiment Name: At_42deg_Heat_P Parameter: Age (day) Value: 14
  misc_feature: MA Experiment 20000173 PARAMETER Experiment Name: At_42deg_Heat_P Parameter: Organism Value: A. thaliana
  misc_feature: MA Experiment 20000173 PARAMETER Experiment Name: At_42deg_Heat_P Parameter: Plant Line Value: WS
  misc_feature: MA Experiment 20000173 PARAMETER Experiment Name: At_42deg_Heat_P Parameter: Temperature (deg C) Value: 42 vs. 22
  misc_feature: MA Experiment 20000173 PARAMETER Experiment Name: At_42deg_Heat_P Parameter: Timepoint (hr) Value: 6
  misc_feature: MA Experiment 20000173 PARAMETER Experiment Name: At_42deg_Heat_P Parameter: Tissue Value: Aerial
  misc_feature: MA Experiment ID: 20000182 Result: Up-regulated in Transcription
  misc_feature: MA Experiment 20000182 PARAMETER Experiment Name: At_2mM_SA_P Parameter: Age (day) Value: 14
  misc_feature: MA Experiment 20000182 PARAMETER Experiment Name: At_2mM_SA_P Parameter: Organism Value: A. thaliana
  misc_feature: MA Experiment 20000182 PARAMETER Experiment Name: At_2mM_SA_P Parameter: Plant Line Value: WS
  misc_feature: MA Experiment 20000182 PARAMETER Experiment Name: At_2mM_SA_P Parameter: Timepoint (hr) Value: 6
  misc_feature: MA Experiment 20000182 PARAMETER Experiment Name: At_2mM_SA_P Parameter: Tissue Value: Aerial
  misc_feature: MA Experiment 20000182 PARAMETER Experiment Name: At_2mM_SA_P Parameter: Treatment Value: 2mM SA vs. No Treatment
  misc_feature: MA Experiment ID: 20000213 Result: Up-regulated in Transcription
  misc_feature: MA Experiment 20000213 PARAMETER Experiment Name: At_4deg_Cold_P Parameter: Timepoint (hr) Value: 2
  misc_feature: MA Experiment ID: 20000224 Result: Down-regulated in Transcription
  misc_feature: MA Experiment ID: 20000437 Result: Down-regulated in Transcription
  misc_feature: MA Experiment 20000437 PARAMETER Experiment Name: At_Drought_P Parameter: Age (day) Value: 8
  misc_feature: MA Experiment 20000437 PARAMETER Experiment Name: At_Drought_P Parameter: Organism Value: A. thaliana
  misc_feature: MA Experiment 20000437 PARAMETER Experiment Name: At_Drought_P Parameter: Plant Line Value: WS
  misc_feature: MA Experiment 20000437 PARAMETER Experiment Name: At_Drought_P Parameter: Timepoint (hr) Value: 24
  misc_feature: MA Experiment 20000437 PARAMETER Experiment Name: At_Drought_P Parameter: Tissue Value: Whole Plant
  misc_feature: MA Experiment 20000437 PARAMETER Experiment Name: At_Drought_P Parameter: Treatment Value: Drought vs. No Drought
  misc_feature: MA Experiment ID: 20000439 Result: Up-regulated in Transcription
  misc_feature: MA Experiment 20000439 PARAMETER Experiment Name: At_Roots__P Parameter: Age (day) Value: 14 vs. 21
  misc_feature: MA Experiment 20000439 PARAMETER Experiment Name: At_Roots__P Parameter: Organism Value: A. thaliana
  misc_feature: MA Experiment 20000439 PARAMETER Experiment Name: At_Roots__P Parameter: Tissue Value: Roots vs. Whole Plant
  misc_feature: MA Experiment ID: 20000452 Result: Down-regulated in Transcription
  misc_feature: MA Experiment 20000452 PARAMETER Experiment Name: At_CS6879_Shoots-Roots_P Parameter: Age (day) Value: 14
  misc_feature: MA Experiment 20000452 PARAMETER Experiment Name: At_CS6879_Shoots-Roots_P Parameter: Organism Value: A. thaliana
  misc_feature: MA Experiment 20000452 PARAMETER Experiment Name: At_CS6879_Shoots-Roots_P Parameter: Plant Line Value: CS6879 vs. WS
  misc_feature: MA Experiment 20000452 PARAMETER Experiment Name: At_CS6879_Shoots-Roots_P Parameter: Tissue Value: Shoots
  misc_feature: MA Experiment ID: 20000794 Result: Up-regulated in Transcription
  misc_feature: MA Experiment 20000794 PARAMETER Experiment Name: At_Petals_P Parameter: Age (day) Value: 23-25 days
  misc_feature: MA Experiment 20000794 PARAMETER Experiment Name: At_Petals_P Parameter: Plant Line Value: WS
  misc_feature: MA Experiment 20000794 PARAMETER Experiment Name: At_Petals_P Parameter: Tissue Value: Petals vs. Whole plant
  misc_feature: MA Experiment ID: 20001247 Result: Up-regulated in Transcription
  misc_feature: MA Experiment 20001247 PARAMETER Experiment Name: At_Far-red-induction_P Parameter: Age (day) Value: 7
  misc_feature: MA Experiment 20001247 PARAMETER Experiment Name: At_Far-red-induction_P Parameter: Light Value: Far-red vs. White
  misc_feature: MA Experiment 20001247 PARAMETER Experiment Name: At_Far-red-induction_P Parameter: Organism Value: A. thaliana
  misc_feature: MA Experiment 20001247 PARAMETER Experiment Name: At_Far-red-induction_P Parameter: Plant Line Value: Columbia
  misc_feature: MA Experiment 20001247 PARAMETER Experiment Name: At_Far-red-induction_P Parameter: Timepoint (hr) Value: 1
  misc_feature: MA Experiment 20001247 PARAMETER Experiment Name: At_Far-red-induction_P Parameter: Tissue Value: Whole Plant
  misc_feature: MA Experiment ID: 20001248 Result: Up-regulated in Transcription
  misc_feature: MA Experiment 20001248 PARAMETER Experiment Name: At_Far-red-induction_P Parameter: Age (day) Value: 7
  misc_feature: MA Experiment 20001248 PARAMETER Experiment Name: At_Far-red-induction_P Parameter: Light Value: Far-red vs. White
  misc_feature: MA Experiment 20001248 PARAMETER Experiment Name: At_Far-red-induction_P Parameter: Organism Value: A. thaliana
  misc_feature: MA Experiment 20001248 PARAMETER Experiment Name: At_Far-red-induction_P Parameter: Plant Line Value: Columbia
  misc_feature: MA Experiment 20001248 PARAMETER Experiment Name: At_Far-red-induction_P Parameter: Timepoint (hr) Value: 4
  misc_feature: MA Experiment 20001248 PARAMETER Experiment Name: At_Far-red-induction_P Parameter: Tissue Value: Whole Plant
  misc_feature: MA Experiment ID: 20001556 Result: Down-regulated in Transcription
  misc_feature: MA Experiment 20001556 PARAMETER Experiment Name: At_Drought_Soil_Dry_P Parameter: Age (day) Value: 26
  misc_feature: MA Experiment 20001556 PARAMETER Experiment Name: At_Drought_Soil_Dry_P Parameter: Organism Value: A. thaliana
  misc_feature: MA Experiment 20001556 PARAMETER Experiment Name: At_Drought_Soil_Dry_P Parameter: Plant Line Value: WS
  misc_feature: MA Experiment 20001556 PARAMETER Experiment Name: At_Drought_Soil_Dry_P Parameter: Post Timepoint (hr) Value: None
  misc_feature: MA Experiment 20001556 PARAMETER Experiment Name: At_Drought_Soil_Dry_P Parameter: Post-Treatment Value: None
  misc_feature: MA Experiment 20001556 PARAMETER Experiment Name: At_Drought_Soil_Dry_P Parameter: Timepoint (day) Value: 12
  misc_feature: MA Experiment 20001556 PARAMETER Experiment Name: At_Drought_Soil_Dry_P Parameter: Treatment Value: Drought vs. No Drought
  misc_feature: MA Experiment ID: 20001557 Result: Up-regulated in Transcription
  misc_feature: MA Experiment 20001557 PARAMETER Experiment Name: At_Drought_Soil_Dry_P Parameter: Age (day) Value: 27
  misc_feature: MA Experiment 20001557 PARAMETER Experiment Name: At_Drought_Soil_Dry_P Parameter: Organism Value: A. thaliana
  misc_feature: MA Experiment 20001557 PARAMETER Experiment Name: At_Drought_Soil_Dry_P Parameter: Plant Line Value: WS
  misc_feature: MA Experiment 20001557 PARAMETER Experiment Name: At_Drought_Soil_Dry_P Parameter: Post Timepoint (hr) Value: 3
  misc_feature: MA Experiment 20001557 PARAMETER Experiment Name: At_Drought_Soil_Dry_P Parameter: Post-Treatment Value: Re-Water vs. No Drought
  misc_feature: MA Experiment 20001557 PARAMETER Experiment Name: At_Drought_Soil_Dry_P Parameter: Timepoint (day) Value: 13
  misc_feature: MA Experiment 20001557 PARAMETER Experiment Name: At_Drought_Soil_Dry_P Parameter: Treatment Value: Drought vs. No Drought
  misc_feature: MA Experiment ID: 20001558 Result: Up-regulated in Transcription
  misc_feature: MA Experiment 20001558 PARAMETER Experiment Name: At_Drought_Soil_Dry_P Parameter: Age (day) Value: 27
  misc_feature: MA Experiment 20001558 PARAMETER Experiment Name: At_Drought_Soil_Dry_P Parameter: Organism Value: A. thaliana
  misc_feature: MA Experiment 20001558 PARAMETER Experiment Name: At_Drought_Soil_Dry_P Parameter: Plant Line Value: WS
  misc_feature: MA Experiment 20001558 PARAMETER Experiment Name: At_Drought_Soil_Dry_P Parameter: Post Timepoint (hr) Value: 6
  misc_feature: MA Experiment 20001558 PARAMETER Experiment Name: At_Drought_Soil_Dry_P Parameter: Post-Treatment Value: Re-Water vs. No Drought
  misc_feature: MA Experiment 20001558 PARAMETER Experiment Name: At_Drought_Soil_Dry_P Parameter: Timepoint (day) Value: 13
  misc_feature: MA Experiment 20001558 PARAMETER Experiment Name: At_Drought_Soil_Dry_P Parameter: Treatment Value: Drought vs. No Drought
aacttttctaccaatggctcttgaagctcttaattcaccaagattggtcgaggatcccttaagattcaatggcgttgagcagtggaccaaatgtaagaaacgatccaaacgttcgagatctgatcttcatcataaccaccgtctcactgaggaagagtatctagctttctgtctcatgcttcttgctcgtgatggcggcgatcttgattctgtgacggttgaggagaagccgagttataagtgtggcgtttgttacaagacgttttcgtcttaccaagctctcggtggtcacaaagcgagtcaccggagtttatacggtggtggagataacgataagtcgacaccatccaccgccgtgaaatctcacgtttgttcggtttgcgggaaatctttcgccaccggtcaagctctcggcggccacaaggcggtgccactatgatggtggcgtttcgaactcggaaggtgtggggtctactagccacgttagtagtagtagccaccgtggatttgaccttaatattttaccggtgcagggattctcgcgggacgacgaagtgatgagtccgatggcgactaagaagcctcgcctgaagtaagtctttgttgaagacttggaagtttatcaaatgtaaatatcaaatttcaatttcaaggaacaattttgttgattctattaccaatacacaatacgattcaattgc

SEQ ID NO: 28361 - protein, 145 aa, Arabidopsis thaliana
  peptide (1)..(145): Ceres Seq. ID no. 12322233
  misc_feature (79)..(101): Pfam Name: Zinc finger, C2H2 type Pfam Description: Zinc finger, C2H2 type
  misc_feature (5)..(141): Homolog of NCBI NO: 1418323 NR Description: zinc finger protein [Arabidopsis thaliana]
  misc_feature (5)..(141): Homolog of NCBI NO: 15217692 NR Description: salt-tolerance zinc finger protein
  misc_feature (5)..(141): Homolog of NCBI NO: 6693033 NR Description: T22C5.18 [Arabidopsis thaliana]
  misc_feature (5)..(141): Homolog of NCBI NO: 15239195 NR Description: Cys2/His2-type zinc finger protein 3
  misc_feature (5)..(141): Homolog of NCBI NO: 21618143 NR Description: Cys2/His2-type zinc finger protein 3 [Arabidopsis
TFLPMALEALNSPRLVEDPLRFNGVEQWTKCKKRSKRSRSDLHHNHRLTEEEYLAFCLMLLARDGGDLDSVTVEEKPSYKCGVCYKTFSSYQALGGHKASHRSLYGGGDNDKSTPSTAVKSHVCSVCGKSFATGQALGGHKAVPL

SEQ ID NO: 28362 - protein, 141 aa, Arabidopsis thaliana
  peptide (1)..(141): Ceres Seq. ID no. 12322234
  misc_feature (75)..(97): Pfam Name: Zinc finger, C2H2 type Pfam Description: Zinc finger, C2H2 type
  misc_feature (1)..(137): Homolog of NCBI NO: 1418323 NR Description: zinc finger protein [Arabidopsis thaliana]
  misc_feature (1)..(137): Homolog of NCBI NO: 15217692 NR Description: salt-tolerance zinc finger protein
  misc_feature (1)..(137): Homolog of NCBI NO: 6693033 NR Description: T22C5.18 [Arabidopsis thaliana]
  misc_feature (1)..(137): Homolog of NCBI NO: 15239195 NR Description: Cys2/His2-type zinc finger protein 3
  misc_feature (1)..(137): Homolog of NCBI NO: 21618143 NR Description: Cys2/His2-type zinc finger protein 3 [Arabidopsis
MALEALNSPRLVEDPLRFNGVEQWTKCKKRSKRSRSDLHHNHRLTEEEYLAFCLMLLARDGGDLDSVTVEEKPSYKCGVCYKTFSSYQALGGHKASHRSLYGGGDNDKSTPSTAVKSHVCSVCGKSFATGQALGGHKAVPL

SEQ ID NO: 28363 - protein, 87 aa, Arabidopsis thaliana
  peptide (1)..(87): Ceres Seq. ID no. 12322235
  misc_feature (21)..(43): Pfam Name: Zinc finger, C2H2 type Pfam Description: Zinc finger, C2H2 type
  misc_feature (1)..(83): Homolog of NCBI NO: 1418323 NR Description: zinc finger protein [Arabidopsis thaliana]
  misc_feature (1)..(83): Homolog of NCBI NO: 15217692 NR Description: salt-tolerance zinc finger protein
  misc_feature (1)..(83): Homolog of NCBI NO: 6693033 NR Description: T22C5.18 [Arabidopsis thaliana]
  misc_feature (1)..(83): Homolog of NCBI NO: 15239195 NR Description: Cys2/His2-type zinc finger protein 3
  misc_feature (1)..(83): Homolog of NCBI NO: 21618143 NR Description: Cys2/His2-type zinc finger protein 3 [Arabidopsis
MLLARDGGDLDSVTVEEKPSYKCGVCYKTFSSYQALGGHKASHRSLYGGGDNDKSTPSTAVKSHVCSVCGKSFATGQALGGHKAVPL

SEQ ID NO: 28364 - DNA, 678 bp, Arabidopsis thaliana
  misc_feature (1)..(678): Ceres Seq. ID no. 12396573
  misc_feature: MA Experiment ID: 108435 Result: Down-regulated in Transcription
  misc_feature: MA Experiment 108435 PARAMETER Experiment Name: At_stm_Mutants_cDNA_P Parameter: Plant Line Value: wt Landsburg vs stm
  misc_feature: MA Experiment 108435 PARAMETER Experiment Name: At_stm_Mutants_cDNA_P Parameter: Tissue Value: Shoot Apical Meristem Region
  misc_feature: MA Experiment ID: 108579 Result: Down-regulated in Transcription
  misc_feature: MA Experiment 108579 PARAMETER Experiment Name: At_4deg_Cold_cDNA_P Parameter: Temperature (deg C) Value: 4 vs. 22
  misc_feature: MA Experiment 108579 PARAMETER Experiment Name: At_4deg_Cold_cDNA_P Parameter: Timepoint (hr) Value: 6
  misc_feature: MA Experiment 108579 PARAMETER Experiment Name: At_4deg_Cold_cDNA_P Parameter: Tissue Value: Aerial
  misc_feature: MA Experiment ID: 108595 Result: Down-regulated in Transcription
  misc_feature: MA Experiment 108595 PARAMETER Experiment Name: At_Ler-pi_Ovule_cDNA_P Parameter: Plant Line Value: null
  misc_feature: MA Experiment ID: 20000111 Result: Down-regulated in Transcription
  misc_feature: MA Experiment 20000111 PARAMETER Experiment Name: At_42deg_Heat_cDNA_P Parameter: Temperature (deg C) Value: 42 vs. 22
  misc_feature: MA Experiment 20000111 PARAMETER Experiment Name: At_42deg_Heat_cDNA_P Parameter: Timepoint (hr) Value: 6
  misc_feature: MA Experiment 20000111 PARAMETER Experiment Name: At_42deg_Heat_cDNA_P Parameter: Tissue Value: Aerial
  misc_feature: MA Experiment ID: 20000173 Result: Down-regulated in Transcription
  misc_feature: MA Experiment 20000173 PARAMETER Experiment Name: At_42deg_Heat_P Parameter: Age (day) Value: 14
  misc_feature: MA Experiment 20000173 PARAMETER Experiment Name: At_42deg_Heat_P Parameter: Organism Value: A. thaliana
  misc_feature: MA Experiment 20000173 PARAMETER Experiment Name: At_42deg_Heat_P Parameter: Plant Line Value: WS
  misc_feature: MA Experiment 20000173 PARAMETER Experiment Name: At_42deg_Heat_P Parameter: Temperature (deg C) Value: 42 vs. 22
  misc_feature: MA Experiment 20000173 PARAMETER Experiment Name: At_42deg_Heat_P Parameter: Timepoint (hr) Value: 6
  misc_feature: MA Experiment 20000173 PARAMETER Experiment Name: At_42deg_Heat_P Parameter: Tissue Value: Aerial
  misc_feature: MA Experiment ID: 20000180 Result: Up-regulated in Transcription
  misc_feature: MA Experiment 20000180 PARAMETER Experiment Name: At_Germinating_Seeds_P Parameter: Age (hr) Value: 24 vs. 0
  misc_feature: MA Experiment 20000180 PARAMETER Experiment Name: At_Germinating_Seeds_P Parameter: Tissue Value: Germinating Seeds
  misc_feature: MA Experiment ID: 20000182 Result: Down-regulated in Transcription
  misc_feature: MA Experiment 20000182 PARAMETER Experiment Name: At_2mM_SA_P Parameter: Age (day) Value: 14
  misc_feature: MA Experiment 20000182 PARAMETER Experiment Name: At_2mM_SA_P Parameter: Organism Value: A. thaliana
  misc_feature: MA Experiment 20000182 PARAMETER Experiment Name: At_2mM_SA_P Parameter: Plant Line Value: WS
  misc_feature: MA Experiment 20000182 PARAMETER Experiment Name: At_2mM_SA_P Parameter: Timepoint (hr) Value: 6
  misc_feature: MA Experiment 20000182 PARAMETER Experiment Name: At_2mM_SA_P Parameter: Tissue Value: Aerial
  misc_feature: MA Experiment 20000182 PARAMETER Experiment Name: At_2mM_SA_P Parameter: Treatment Value: 2mM SA vs. No Treatment
  misc_feature: MA Experiment ID: 20000185 Result: Down-regulated in Transcription
  misc_feature: MA Experiment 20000185 PARAMETER Experiment Name: At_Roots__P Parameter: Age (day) Value: 7 vs. 21
  misc_feature: MA Experiment 20000185 PARAMETER Experiment Name: At_Roots__P Parameter: Organism Value: A. thaliana
  misc_feature: MA Experiment 20000185 PARAMETER Experiment Name: At_Roots__P Parameter: Tissue Value: Roots vs. Whole Plant
  misc_feature: MA Experiment ID: 20000224 Result: Down-regulated in Transcription
  misc_feature: MA Experiment ID: 20000227 Result: Down-regulated in Transcription
  misc_feature: MA Experiment 20000227 PARAMETER Experiment Name: At_Root-Tips-vs-Tops_P Parameter: Tissue Value: Root Tips vs. Root Tops
  misc_feature: MA Experiment ID: 20000234 Result: Up-regulated in Transcription
  misc_feature: MA Experiment 20000234 PARAMETER Experiment Name: At_Siliques_P Parameter: Age (day) Value: 21
  misc_feature: MA Experiment 20000234 PARAMETER Experiment Name: At_Siliques_P Parameter: Organism Value: A. thaliana
  misc_feature: MA Experiment 20000234 PARAMETER Experiment Name: At_Siliques_P Parameter: Plant Line Value: WS
  misc_feature: MA Experiment 20000234 PARAMETER Experiment Name: At_Siliques_P Parameter: Tissue Value: Less Than 5mm Siliques vs. Whole Plant
  misc_feature: MA Experiment ID: 20000235 Result: Up-regulated in Transcription
  misc_feature: MA Experiment 20000235 PARAMETER Experiment Name: At_Siliques_P Parameter: Age (day) Value: 21
  misc_feature: MA Experiment 20000235 PARAMETER Experiment Name: At_Siliques_P Parameter: Organism Value: A. thaliana
  misc_feature: MA Experiment 20000235 PARAMETER Experiment Name: At_Siliques_P Parameter: Plant Line Value: WS
  misc_feature: MA Experiment 20000235 PARAMETER Experiment Name: At_Siliques_P Parameter: Tissue Value: 5-10mm Siliques vs. Whole Plant
  misc_feature: MA Experiment ID: 20000265 Result: Up-regulated in Transcription
  misc_feature: MA Experiment 20000265 PARAMETER Experiment Name: At_Open_Flower_P Parameter: Age (day) Value: 21
  misc_feature: MA Experiment 20000265 PARAMETER Experiment Name: At_Open_Flower_P Parameter: Plant Line Value: WS
  misc_feature: MA Experiment 20000265 PARAMETER Experiment Name: At_Open_Flower_P Parameter: Tissue Value: Closed Flower vs. Whole Plant
  misc_feature: MA Experiment ID: 20000436 Result: Down-regulated in Transcription
  misc_feature: MA Experiment 20000436 PARAMETER Experiment Name: At_Drought_P Parameter: Age (day) Value: 7
  misc_feature: MA Experiment 20000436 PARAMETER Experiment Name: At_Drought_P Parameter: Organism Value: A. thaliana
  misc_feature: MA Experiment 20000436 PARAMETER Experiment Name: At_Drought_P Parameter: Plant Line Value: WS
  misc_feature: MA Experiment 20000436 PARAMETER Experiment Name: At_Drought_P Parameter: Timepoint (hr) Value: 12
  misc_feature: MA Experiment 20000436 PARAMETER Experiment Name: At_Drought_P Parameter: Tissue Value: Whole Plant
  misc_feature: MA Experiment 20000436 PARAMETER Experiment Name: At_Drought_P Parameter: Treatment Value: Drought vs. No Drought
  misc_feature: MA Experiment ID: 20000439 Result: Down-regulated in Transcription
  misc_feature: MA Experiment 20000439 PARAMETER Experiment Name: At_Roots__P Parameter: Age (day) Value: 14 vs. 21
  misc_feature: MA Experiment 20000439 PARAMETER Experiment Name: At_Roots__P Parameter: Organism Value: A. thaliana
  misc_feature: MA Experiment 20000439 PARAMETER Experiment Name: At_Roots__P Parameter: Tissue Value: Roots vs. Whole Plant
  misc_feature: MA Experiment ID: 20000451 Result: Down-regulated in Transcription
  misc_feature: MA Experiment 20000451 PARAMETER Experiment Name: At_CS6879_Shoots-Roots_P Parameter: Age (day) Value: 14
  misc_feature: MA Experiment 20000451 PARAMETER Experiment Name: At_CS6879_Shoots-Roots_P Parameter: Organism Value: A. thaliana
  misc_feature: MA Experiment 20000451 PARAMETER Experiment Name: At_CS6879_Shoots-Roots_P Parameter: Plant Line Value: CS6879 vs. WS
  misc_feature: MA Experiment 20000451 PARAMETER Experiment Name: At_CS6879_Shoots-Roots_P Parameter: Tissue Value: Roots
  misc_feature: MA Experiment ID: 20000573 Result: Up-regulated in Transcription
  misc_feature: MA Experiment 20000573 PARAMETER Experiment Name: At_100uM_ABA_Mutants__P Parameter: Organism Value: A. thaliana
  misc_feature: MA Experiment 20000573 PARAMETER Experiment Name: At_100uM_ABA_Mutants__P Parameter: Plant Line Value: CS22 vs. Ler wt
  misc_feature: MA Experiment 20000573 PARAMETER Experiment Name: At_100uM_ABA_Mutants__P Parameter: Timepoint (hr) Value: N/A
  misc_feature: MA Experiment 20000573 PARAMETER Experiment Name: At_100uM_ABA_Mutants__P Parameter: Tissue Value: Whole Plant
  misc_feature: MA Experiment 20000573 PARAMETER Experiment Name: At_100uM_ABA_Mutants__P Parameter: Treatment Value: None
  misc_feature: MA Experiment ID: 20000574 Result: Up-regulated in Transcription
  misc_feature: MA Experiment 20000574 PARAMETER Experiment Name: At_100uM_ABA_Mutants__P Parameter: Organism Value: A. thaliana
  misc_feature: MA Experiment 20000574 PARAMETER Experiment Name: At_100uM_ABA_Mutants__P Parameter: Plant Line Value: CS23 vs. Ler wt
  misc_feature: MA Experiment 20000574 PARAMETER Experiment Name: At_100uM_ABA_Mutants__P Parameter: Timepoint (hr) Value: N/A
  misc_feature: MA Experiment 20000574 PARAMETER Experiment Name: At_100uM_ABA_Mutants__P Parameter: Tissue Value: Whole Plant
  misc_feature: MA Experiment 20000574 PARAMETER Experiment Name: At_100uM_ABA_Mutants__P Parameter: Treatment Value: None
  misc_feature: MA Experiment ID: 20001451 Result: Up-regulated in Transcription
  misc_feature: MA Experiment 20001451 PARAMETER Experiment Name: At_Far-red-induction_P Parameter: Age (day) Value: 7
  misc_feature: MA Experiment 20001451 PARAMETER Experiment Name: At_Far-red-induction_P Parameter: Light Value: Far-red vs. White
  misc_feature: MA Experiment 20001451 PARAMETER Experiment Name: At_Far-red-induction_P Parameter: Organism Value: A. thaliana
  misc_feature: MA Experiment 20001451 PARAMETER Experiment Name: At_Far-red-induction_P Parameter: Plant Line Value: Columbia
  misc_feature: MA Experiment 20001451 PARAMETER Experiment Name: At_Far-red-induction_P Parameter: Timepoint (hr) Value: 24
  misc_feature: MA Experiment 20001451 PARAMETER Experiment Name: At_Far-red-induction_P Parameter: Tissue Value: Whole Plant
  misc_feature: MA Experiment ID: 20001757 Result: Up-regulated in Transcription
  misc_feature: MA Experiment 20001757 PARAMETER Experiment Name: At_50mM_NH4NO3_L-to-H_P Parameter: Timepoint (hr) Value: 6
  misc_feature: MA Experiment 20001757 PARAMETER Experiment Name: At_50mM_NH4NO3_L-to-H_P Parameter: Tissue Value: Leaf
  misc_feature: MA Experiment 20001757 PARAMETER Experiment Name: At_50mM_NH4NO3_L-to-H_P Parameter: Treatment Value: 50mM NH4NO3 vs 100mM Mannitol
  misc_feature: MA Experiment ID: 20001906 Result: Down-regulated in Transcription
  misc_feature: MA Experiment 20001906 PARAMETER Experiment Name: At_Drought_Reproduction_P Parameter: Age (day) Value: 35
  misc_feature: MA Experiment 20001906 PARAMETER Experiment Name: At_Drought_Reproduction_P Parameter: Organism Value: A. thaliana
  misc_feature: MA Experiment 20001906 PARAMETER Experiment Name: At_Drought_Reproduction_P Parameter: Plant Line Value: WS
  misc_feature: MA Experiment 20001906 PARAMETER Experiment Name: At_Drought_Reproduction_P Parameter: Timepoint (day) Value: 5
  misc_feature: MA Experiment 20001906 PARAMETER Experiment Name: At_Drought_Reproduction_P Parameter: Tissue Value: Siliques
  misc_feature: MA Experiment 20001906 PARAMETER Experiment Name: At_Drought_Reproduction_P Parameter: Treatment Value: Drought vs. No Drought
caaccttttttgttcctcccaacaggttctctatttctttctctctatgtaaacattttgttaagataatggtttcatacatgaacgtgagtttgtatctattgttcgaaaggtcaatggaagaggaaaagaactgaaaaacccaatttctctaaaccacaacaaagatttggactttctgttaaagaagttagctccgccactcacggcggttttacttgctgtttcacccatctgtttccctccagaatctcttgggcagactttggatatacagagaggagctacattgtttaatagagcttgtatcgggtgtcatgatacaggtggaaacattattcaaccgggtgcaacgcttttcacaaaagacctcgaaagaaatggagttgatactgaggaagaaatatatcgtgttacctactttggaaagggaagaatgccgggatttggtgagaaatgcacaccgagaggacaatgtacctttggaccgcggttgcaggacgaagaaatcaagcttctcgctgaatttgtaaagtttcaagctgaccaaggctggccaactgtatctaccgactagcaactaggcgttcgtcttgtgagcgtttttgtaatccaattaatccatagggttgtatctacttacacttataactattccttctgggaggtttcattgcg

SEQ ID NO: 28365 - protein, 71 aa, Arabidopsis thaliana
  peptide (1)..(71): Ceres Seq. ID no. 12396574
MIQVETLFNRVQRFSQKTSKEMELILRKKYIVLPTLEREECRDLVRNAHREDNVPLDRGCRTKKSSFSLNL

SEQ ID NO: 28366 - protein, 50 aa, Arabidopsis thaliana
  peptide (1)..(50): Ceres Seq. ID no. 12396575
MELILRKKYIVLPTLEREECRDLVRNAHREDNVPLDRGCRTKKSSFSLNL

SEQ ID NO: 28367 - protein, 46 aa, Arabidopsis thaliana
  peptide (1)..(46): Ceres Seq. ID no. 12396576
  misc_feature (1)..(40): Homolog of NCBI NO: 22298826 NR Description: cytochrome c553 [Thermosynechococcus elongatus
  misc_feature (1)..(40): Homolog of NCBI NO: 23040173 NR Description: hypothetical protein [Trichodesmium erythraeum
  misc_feature (1)..(40): Homolog of NCBI NO: 20141074 NR Description: Cytochrome C6 precursor (Soluble cytochrome f)
  misc_feature (1)..(40): Homolog of NCBI NO: 22652035 NR Description: putative cytochrome c6-2 [Synechococcus sp. PCC
  misc_feature (1)..(40): Homolog of NCBI NO: 117923 NR Description: Cytochrome C6 (Soluble cytochrome f) (Cytochrome
  misc_feature (1)..(40): Homolog of NCBI NO: 37521549 NR Description: cytochrome c6 [Gloeobacter violaceus]
  misc_feature (1)..(46): Homolog of NCBI NO: 34393286 NR Description: cytochrome C6, chloroplast precursor-like protein
  misc_feature (1)..(46): Homolog of NCBI NO: 34899810 NR Description: putative c6 type cytochrome
  misc_feature (1)..(46): Homolog of NCBI NO: 10177496 NR Description: gene_id:K21C13.23~unknown protein [Arabidopsis
  misc_feature (1)..(46): Homolog of NCBI NO: 18422509 NR Description: expressed protein
MPGFGEKCTPRGQCTFGPRLQDEEIKLLAEFVKFQADQGWPTVSTD

SEQ ID NO: 28368 - DNA, 1746 bp, Arabidopsis thaliana
  misc_feature (1)..(1746): Ceres Seq. ID no. 12738795
  misc_feature: MA Experiment ID: 108461 Result: Up-regulated in Transcription
  misc_feature: MA Experiment 108461 PARAMETER Experiment Name: At_Germinating_Seeds_cDNA_P Parameter: Age (day) Value: 1 vs. 0
  misc_feature: MA Experiment 108461 PARAMETER Experiment Name: At_Germinating_Seeds_cDNA_P Parameter: Tissue Value: Germinating Seeds
  misc_feature: MA Experiment ID: 108462 Result: Up-regulated in Transcription
  misc_feature: MA Experiment 108462 PARAMETER Experiment Name: At_Germinating_Seeds_cDNA_P Parameter: Age (day) Value: 2 vs. 0
  misc_feature: MA Experiment 108462 PARAMETER Experiment Name: At_Germinating_Seeds_cDNA_P Parameter: Tissue Value: Germinating Seeds
  misc_feature: MA Experiment ID: 108501 Result: Up-regulated in Transcription
  misc_feature: MA Experiment 108501 PARAMETER Experiment Name: At_ap2_floral_buds_cDNA_P Parameter: Plant Line Value: ap2 (Ler.)
  misc_feature: MA Experiment 108501 PARAMETER Experiment Name: At_ap2_floral_buds_cDNA_P Parameter: Tissue Value: Closed Flower
  misc_feature: MA Experiment ID: 108569 Result: Up-regulated in Transcription
  misc_feature: MA Experiment 108569 PARAMETER Experiment Name: At_0.001%_MeJA__cDNA_P Parameter: Timepoint (hr) Value: 6
  misc_feature: MA Experiment 108569 PARAMETER Experiment Name: At_0.001%_MeJA__cDNA_P Parameter: Tissue Value: Aerial
  misc_feature: MA Experiment 108569 PARAMETER Experiment Name: At_0.001%_MeJA__cDNA_P Parameter: Treatment Value: 0.001% MeJA vs. No Treatment
  misc_feature: MA Experiment ID: 108573 Result: Up-regulated in Transcription
  misc_feature: MA Experiment 108573 PARAMETER Experiment Name: At_Drought_cDNA_P Parameter: Timepoint (hr) Value: 6
  misc_feature: MA Experiment 108573 PARAMETER Experiment Name: At_Drought_cDNA_P Parameter: Tissue Value: Aerial
  misc_feature: MA Experiment 108573 PARAMETER Experiment Name: At_Drought_cDNA_P Parameter: Treatment Value: Drought vs. No Drought
  misc_feature: MA Experiment ID: 108577 Result: Down-regulated in Transcription
  misc_feature: MA Experiment 108577 PARAMETER Experiment Name: At_42deg_Heat_cDNA_P Parameter: Temperature (deg C) Value: 42 vs. 22
  misc_feature: MA Experiment 108577 PARAMETER Experiment Name: At_42deg_Heat_cDNA_P Parameter: Timepoint (hr) Value: 6
  misc_feature: MA Experiment 108577 PARAMETER Experiment Name: At_42deg_Heat_cDNA_P Parameter: Tissue Value: Aerial
  misc_feature: MA Experiment ID: 108579 Result: Up-regulated in Transcription
  misc_feature: MA Experiment 108579 PARAMETER Experiment Name: At_4deg_Cold_cDNA_P Parameter: Temperature (deg C) Value: 4 vs. 22
  misc_feature: MA Experiment 108579 PARAMETER Experiment Name: At_4deg_Cold_cDNA_P Parameter: Timepoint (hr) Value: 6
  misc_feature: MA Experiment 108579 PARAMETER Experiment Name: At_4deg_Cold_cDNA_P Parameter: Tissue Value: Aerial
  misc_feature: MA Experiment ID: 20000113 Result: Down-regulated in Transcription
  misc_feature: MA Experiment 20000113 PARAMETER Experiment Name: At_42deg_Heat_cDNA_P Parameter: Temperature (deg C) Value: 42 vs. 22
  misc_feature: MA Experiment 20000113 PARAMETER Experiment Name: At_42deg_Heat_cDNA_P Parameter: Timepoint (hr) Value: 8
  misc_feature: MA Experiment 20000113 PARAMETER Experiment Name: At_42deg_Heat_cDNA_P Parameter: Tissue Value: Aerial
  misc_feature: MA Experiment ID: 20000173 Result: Down-regulated in Transcription
  misc_feature: MA Experiment 20000173 PARAMETER Experiment Name: At_42deg_Heat_P Parameter: Age (day) Value: 14
  misc_feature: MA Experiment 20000173 PARAMETER Experiment Name: At_42deg_Heat_P Parameter: Organism Value: A. thaliana
  misc_feature: MA Experiment 20000173 PARAMETER Experiment Name: At_42deg_Heat_P Parameter: Plant Line Value: WS
  misc_feature: MA Experiment 20000173 PARAMETER Experiment Name: At_42deg_Heat_P Parameter: Temperature (deg C) Value: 42 vs. 22
  misc_feature: MA Experiment 20000173 PARAMETER Experiment Name: At_42deg_Heat_P Parameter: Timepoint (hr) Value: 6
  misc_feature: MA Experiment 20000173 PARAMETER Experiment Name: At_42deg_Heat_P Parameter: Tissue Value: Aerial
  misc_feature: MA Experiment ID: 20000179 Result: Up-regulated in Transcription
  misc_feature: MA Experiment 20000179 PARAMETER Experiment Name: At_Germinating_Seeds_P Parameter: Age (hr) Value: 6 vs. 0
  misc_feature: MA Experiment 20000179 PARAMETER Experiment Name: At_Germinating_Seeds_P Parameter: Tissue Value: Germinating Seeds
  misc_feature: MA Experiment ID: 20000180 Result: Up-regulated in Transcription
  misc_feature: MA Experiment 20000180 PARAMETER Experiment Name: At_Germinating_Seeds_P Parameter: Age (hr) Value: 24 vs. 0
  misc_feature: MA Experiment 20000180 PARAMETER Experiment Name: At_Germinating_Seeds_P Parameter: Tissue Value: Germinating Seeds
  misc_feature: MA Experiment ID: 20000213 Result: Up-regulated in Transcription
  misc_feature: MA Experiment 20000213 PARAMETER Experiment Name: At_4deg_Cold_P Parameter: Timepoint (hr) Value: 2
  misc_feature: MA Experiment ID: 20000224 Result: Down-regulated in Transcription
  misc_feature: MA Experiment ID: 20000227 Result: Up-regulated in Transcription
  misc_feature: MA Experiment 20000227 PARAMETER Experiment Name: At_Root-Tips-vs-Tops_P Parameter: Tissue Value: Root Tips vs. Root Tops
  misc_feature: MA Experiment ID: 20000794 Result: Down-regulated in Transcription
  misc_feature: MA Experiment 20000794 PARAMETER Experiment Name: At_Petals_P Parameter: Age (day) Value: 23-25 days
  misc_feature: MA Experiment 20000794 PARAMETER Experiment Name: At_Petals_P Parameter: Plant Line Value: WS
  misc_feature: MA Experiment 20000794 PARAMETER Experiment Name: At_Petals_P Parameter: Tissue Value: Petals vs. Whole plant
atcattgtccctcagacaaatttcactcgctcatctctgtctgaatctcacaagaagaagtgaaagatggtgaagatatgttgtattggagctgggtatgttggtggaccaacaatggcagtgattgcattgaaatgtccagacgttgaagtagcggttgttgatatctctgtaccacgtatcaacgcttggaacagtgacacgcttccgatttacgagcctggtcttgatgatgttgtgaagcaatgccgtggcaagaaccttttctttagtactgatgttgagaaacatgttagggaagctgatattgtgtttgtttctgtcaacacaccgactaagactagaggtcttggtgctggtaaagctgcggatcttacgtactgggagagcgctgcgcgtatgatcgctgatgtttcggtatcggataagattgtcgttgagaaatcgactgttccggttaaaacagctgaagctattgagaagattttgacacataacagtaaagggattaagtttcagattctttcgaatcccgagtttttggcggaaggaaccgcgattaaggacctatttaatccggaccgtgttcttatcggagggcgggaaaccccagaagggtttaaagcggtgcagactctcaaggatgtgtatgcacactgggttcctgaaggccaaatcataacaaccaatctctggtctgctgagctgtccaagcttgcggcaaacgctttcttggctcaaaggatttcatcagtgaatgctatgtcggctctgtgtgaagccacaggcgcagatgtcacgcaagtgtcttacgcggttggtacagactcaaggattggtcccaagttcttgaactcgagtgttggattcggtggttcgtgtttccagaaggacattctaaatcttgtctacatctgtgagtgcaacggactcccggaagtggcagagtactggaagcaagtcatcaagatcaatgactaccagaagagccggttcgtgaaccgtgttgtttcctccatgttcaactctgtatcaaacaagaagattgcggttctcggtttcgcattcaagaaagacaccggtgacacaagggagactccagccatcgatgtgtgcaagggtcttttagaagacaaagcaaggctaagcatttacgacccacaagtgactgaggatcagatccagagggatttatccatgaacaagttcgactgggaccatcctctacatttgcagccaatgagcccaacaacagtgaaacaagtgaccgttacttgggacgcatacgaagcaactaaggacgctcacggtatctgcatcatgaccgagtgggatgagttcaagaatcttgatttccagaagatctttgacaacatgcagaaaccagctttcgtgttcgatggaagaaacattatgaatctgcaaaagctaagggagattggtttcattgtttactccattggtaagcctctcgacgactggctcaaggacatgcctgccgttgcctaatgatgttcattgctgactctttcgtcctccatcatttgtgctttttttcttcttgtggtttgtctttaagacttgttatatttcttacaatatgtttgttatgttctctggtgtgtgttttgttttttttggtattactttcatatttttttggtcgaagaggacttgtattcgacaatgtcgcttcaattttgttgtttccttagaaactaaataaatattggtttatattggagt

SEQ ID NO: 28369 - protein, 480 aa, Arabidopsis thaliana
  peptide (1)..(480): Ceres Seq. ID no. 12738796
  misc_feature (2)..(200): Pfam Name: UDP-glucose/GDP-mannose dehydrogenase family, Pfam Description: UDP-glucose/GDP-mannose dehydrogenase family,
  misc_feature (1)..(480): Homolog of NCBI NO: 15242316 NR Description: UDP-glucose dehydrogenase-like protein
  misc_feature (1)..(478): Homolog of NCBI NO: 30102540 NR Description: At5g39320 [Arabidopsis thaliana]
  misc_feature (1)..(478): Homolog of NCBI NO: 15241704 NR Description: UDP-glucose dehydrogenase-like protein; protein
  misc_feature (1)..(480): Homolog of NCBI NO: 15983404 NR Description: AT3g29360/MUO10_6 [Arabidopsis thaliana]
  misc_feature (1)..(480): Homolog of NCBI NO: 15228687 NR Description: UDP-glucose dehydrogenase, putative
  misc_feature (1)..(480): Homolog of NCBI NO: 21618158 NR Description: UDP-glucose dehydrogenase, putative [Arabidopsis
MVKICCIGAGYVGGPTMAVIALKCPDVEVAVVDISVPRINAWNSDTLPIYEPGLDDVVKQCRGKNLFFSTDVEKHVREADIVFVSVNTPTKTRGLGAGKAADLTYWESAARMIADVSVSDKIVVEKSTVPVKTAEAIEKILTHNSKGIKFQILSNPEFLAEGTAIKDLFNPDRVLIGGRETPEGFKAVQTLKDVYAHWVPEGQIITTNLWSAELSKLAANAFLAQRISSVNAMSALCEATGADVTQVSYAVGTDSRIGPKFLNSSVGFGGSCFQKDILNLVYICECNGLPEVAEYWKQVIKINDYQKSRFVNRVVSSMFNSVSNKKIAVLGFAFKKDTGDTRETPAIDVCKGLLEDKARLSIYDPQVTEDQIQRDLSMNKFDWDHPLHLQPMSPTTVKQVTVTWDAYEATKDAHGICIMTEWDEFKNLDFQKIFDNMQKPAFVFDGRNIMNLQKLREIGFIVYSIGKPLDDWLKDMPAVA

SEQ ID NO: 28370 - protein, 464 aa, Arabidopsis thaliana
  peptide (1)..(464): Ceres Seq. ID no. 12738797
  misc_feature (1)..(184): Pfam Name: UDP-glucose/GDP-mannose dehydrogenase family, Pfam Description: UDP-glucose/GDP-mannose dehydrogenase family,
  misc_feature (1)..(464): Homolog of NCBI NO: 15242316 NR Description: UDP-glucose dehydrogenase-like protein
  misc_feature (1)..(462): Homolog of NCBI NO: 30102540 NR Description: At5g39320 [Arabidopsis thaliana]
  misc_feature (1)..(462): Homolog of NCBI NO: 15241704 NR Description: UDP-glucose dehydrogenase-like protein; protein
  misc_feature (1)..(464): Homolog of NCBI NO: 15983404 NR Description: AT3g29360/MUO10_6 [Arabidopsis thaliana]
  misc_feature (1)..(464): Homolog of NCBI NO: 15228687 NR Description: UDP-glucose dehydrogenase, putative
  misc_feature (1)..(464): Homolog of NCBI NO: 21618158 NR Description: UDP-glucose dehydrogenase, putative [Arabidopsis
MAVIALKCPDVEVAVVDISVPRINAWNSDTLPIYEPGLDDVVKQCRGKNLFFSTDVEKHVREADIVFVSVNTPTKTRGLGAGKAADLTYWESAARMIADVSVSDKIVVEKSTVPVKTAEAIEKILTHNSKGIKFQILSNPEFLAEGTAIKDLFNPDRVLIGGRETPEGFKAVQTLKDVYAHWVPEGQIITTNLWSAELSKLAANAFLAQRISSVNAMSALCEATGADVTQVSYAVGTDSRIGPKFLNSSVGFGGSCFQKDILNLVYICECNGLPEVAEYWKQVIKINDYQKSRFVNRVVSSMFNSVSNKKIAVLGFAFKKDTGDTRETPAIDVCKGLLEDKARLSIYDPQVTEDQIQRDLSMNKFDWDHPLHLQPMSPTTVKQVTVTWDAYEATKDAHGICIMTEWDEFKNLDFQKIFDNMQKPAFVFDGRNIMNLQKLREIGFIVYSIGKPLDDWLKDMPAVA

SEQ ID NO: 28371 - protein, 369 aa, Arabidopsis thaliana
  peptide (1)..(369): Ceres Seq. ID no. 12738798
  misc_feature (1)..(89): Pfam Name: UDP-glucose/GDP-mannose dehydrogenase family, Pfam Description: UDP-glucose/GDP-mannose dehydrogenase family,
  misc_feature (1)..(369): Homolog of NCBI NO: 15242316 NR Description: UDP-glucose dehydrogenase-like protein
  misc_feature (1)..(367): Homolog of NCBI NO: 30102540 NR Description: At5g39320 [Arabidopsis thaliana]
  misc_feature (1)..(367): Homolog of NCBI NO: 15241704 NR Description: UDP-glucose dehydrogenase-like protein; protein
  misc_feature (1)..(369): Homolog of NCBI NO: 15983404 NR Description: AT3g29360/MUO10_6 [Arabidopsis thaliana]
  misc_feature (1)..(369): Homolog of NCBI NO: 15228687 NR Description: UDP-glucose dehydrogenase, putative
  misc_feature (1)..(369): Homolog of NCBI NO: 21618158 NR Description: UDP-glucose dehydrogenase, putative [Arabidopsis
MIADVSVSDKIVVEKSTVPVKTAEAIEKILTHNSKGIKFQILSNPEFLAEGTAIKDLFNPDRVLIGGRETPEGFKAVQTLKDVYAHWVPEGQIITTNLWSAELSKLAANAFLAQRISSVNAMSALCEATGADVTQVSYAVGTDSRIGPKFLNSSVGFGGSCFQKDILNLVYICECNGLPEVAEYWKQVIKINDYQKSRFVNRVVSSMFNSVSNKKIAVLGFAFKKDTGDTRETPAIDVCKGLLEDKARLSIYDPQVTEDQIQRDLSMNKFDWDHPLHLQPMSPTTVKQVTVTWDAYEATKDAHGICIMTEWDEFKNLDFQKIFDNMQKPAFVFDGRNIMNLQKLREIGFIVYSIGKPLDDWLKDMPAVA

SEQ ID NO: 28372 - DNA, 1084 bp, Arabidopsis thaliana
  misc_feature (1)..(1084): Ceres Seq. ID no. 13488418
  misc_feature: MA Experiment ID: 108464 Result: Up-regulated in Transcription
  misc_feature: MA Experiment 108464 PARAMETER Experiment Name: At_Germinating_Seeds_cDNA_P Parameter: Age (day) Value: 4 vs. 0
  misc_feature: MA Experiment 108464 PARAMETER Experiment Name: At_Germinating_Seeds_cDNA_P Parameter: Tissue Value: Germinating Seeds
  misc_feature: MA Experiment ID: 108473 Result: Up-regulated in Transcription
  misc_feature: MA Experiment 108473 PARAMETER Experiment Name: At_Drought_Flowers_cDNA_P Parameter: Timepoint (hr) Value: 7 d
  misc_feature: MA Experiment 108473 PARAMETER Experiment Name: At_Drought_Flowers_cDNA_P Parameter: Tissue Value: Flower
  misc_feature: MA Experiment 108473 PARAMETER Experiment Name: At_Drought_Flowers_cDNA_P Parameter: Treatment Value: Drought vs. No Drought
  misc_feature: MA Experiment ID: 108489 Result: Up-regulated in Transcription
  misc_feature: MA Experiment ID: 108501 Result: Down-regulated in Transcription
  misc_feature: MA Experiment 108501 PARAMETER Experiment Name: At_ap2_floral_buds_cDNA_P Parameter: Plant Line Value: ap2 (Ler.)
  misc_feature: MA Experiment 108501 PARAMETER Experiment Name: At_ap2_floral_buds_cDNA_P Parameter: Tissue Value: Closed Flower
  misc_feature: MA Experiment ID: 108572 Result: Up-regulated in Transcription
  misc_feature: MA Experiment 108572 PARAMETER Experiment Name: At_Drought_cDNA_P Parameter: Timepoint (hr) Value: 1
  misc_feature: MA Experiment 108572 PARAMETER Experiment Name: At_Drought_cDNA_P Parameter: Tissue Value: Aerial
  misc_feature: MA Experiment 108572 PARAMETER Experiment Name: At_Drought_cDNA_P Parameter: Treatment Value: Drought vs. No Drought
  misc_feature: MA Experiment ID: 108573 Result: Up-regulated in Transcription
  misc_feature: MA Experiment 108573 PARAMETER Experiment Name: At_Drought_cDNA_P Parameter: Timepoint (hr) Value: 6
  misc_feature: MA Experiment 108573 PARAMETER Experiment Name: At_Drought_cDNA_P Parameter: Tissue Value: Aerial
  misc_feature: MA Experiment 108573 PARAMETER Experiment Name: At_Drought_cDNA_P Parameter: Treatment Value: Drought vs. No Drought
  misc_feature: MA Experiment ID: 108574 Result: Down-regulated in Transcription
  misc_feature: MA Experiment 108574 PARAMETER Experiment Name: At_Wounding__cDNA_P Parameter: Timepoint (hr) Value: 1
  misc_feature: MA Experiment 108574 PARAMETER Experiment Name: At_Wounding__cDNA_P Parameter: Tissue Value: Aerial
  misc_feature: MA Experiment 108574 PARAMETER Experiment Name: At_Wounding__cDNA_P Parameter: Treatment Value: Wounding vs. No Wounding
  misc_feature: MA Experiment ID: 108594 Result: Up-regulated in Transcription
  misc_feature: MA Experiment 108594 PARAMETER Experiment Name: At_Ler-rhl_Root_cDNA_P Parameter: Plant Line Value: null
  misc_feature: MA Experiment ID: 20000068 Result: Down-regulated in Transcription
  misc_feature: MA Experiment ID: 20000112 Result: Up-regulated in Transcription
  misc_feature: MA Experiment 20000112 PARAMETER Experiment Name: At_42deg_Heat_cDNA_P Parameter: Temperature (deg C) Value: 42 vs. 22
  misc_feature: MA Experiment 20000112 PARAMETER Experiment Name: At_42deg_Heat_cDNA_P Parameter: Timepoint (hr) Value: 2
  misc_feature: MA Experiment 20000112 PARAMETER Experiment Name: At_42deg_Heat_cDNA_P Parameter: Tissue Value: Aerial
  misc_feature: MA Experiment ID: 20000224 Result: Down-regulated in Transcription
  misc_feature: MA Experiment ID: 20000227 Result: Down-regulated in Transcription
  misc_feature: MA Experiment 20000227 PARAMETER Experiment Name: At_Root-Tips-vs-Tops_P Parameter: Tissue Value: Root Tips vs. Root Tops
  misc_feature: MA Experiment ID: 20000234 Result: Down-regulated in Transcription
  misc_feature: MA Experiment 20000234 PARAMETER Experiment Name: At_Siliques_P Parameter: Age (day) Value: 21
  misc_feature: MA Experiment 20000234 PARAMETER Experiment Name: At_Siliques_P Parameter: Organism Value: A. thaliana
  misc_feature: MA Experiment 20000234 PARAMETER Experiment Name: At_Siliques_P Parameter: Plant Line Value: WS
  misc_feature: MA Experiment 20000234 PARAMETER Experiment Name: At_Siliques_P Parameter: Tissue Value: Less Than 5mm Siliques vs. Whole Plant
  misc_feature: MA Experiment ID: 20000264 Result: Down-regulated in Transcription
  misc_feature: MA Experiment 20000264 PARAMETER Experiment Name: At_Open_Flower_P Parameter: Age (day) Value: 21
  misc_feature: MA Experiment 20000264 PARAMETER Experiment Name: At_Open_Flower_P Parameter: Plant Line Value: WS
  misc_feature: MA Experiment 20000264 PARAMETER Experiment Name: At_Open_Flower_P Parameter: Tissue Value: Open Flower vs. Whole Plant
  misc_feature: MA Experiment ID: 20000265 Result: Down-regulated in Transcription
  misc_feature: MA Experiment 20000265 PARAMETER Experiment Name: At_Open_Flower_P Parameter: Age (day) Value: 21
  misc_feature: MA Experiment 20000265 PARAMETER Experiment Name: At_Open_Flower_P Parameter: Plant Line Value: WS
  misc_feature: MA Experiment 20000265 PARAMETER Experiment Name: At_Open_Flower_P Parameter: Tissue Value: Closed Flower vs. Whole Plant
  misc_feature: MA Experiment ID: 20000269 Result: Down-regulated in Transcription
  misc_feature: MA Experiment 20000269 PARAMETER Experiment Name: At_1mM_KNO3_L-vs-H_Roots_P Parameter: Age (day) Value: 7,10,12
  misc_feature: MA Experiment 20000269 PARAMETER Experiment Name: At_1mM_KNO3_L-vs-H_Roots_P Parameter: Organism Value: A. thaliana
  misc_feature: MA Experiment 20000269 PARAMETER Experiment Name: At_1mM_KNO3_L-vs-H_Roots_P Parameter: Plant Line Value: WS
  misc_feature: MA Experiment 20000269 PARAMETER Experiment Name: At_1mM_KNO3_L-vs-H_Roots_P Parameter: Timepoint (day) Value: 7,10,12
  misc_feature: MA Experiment 20000269 PARAMETER Experiment Name: At_1mM_KNO3_L-vs-H_Roots_P Parameter: Tissue Value: Roots
  misc_feature: MA Experiment 20000269 PARAMETER Experiment Name: At_1mM_KNO3_L-vs-H_Roots_P Parameter: Treatment Value: 1mM KNO3 vs. 50mM KNO3
  misc_feature: MA Experiment ID: 20000286 Result: Down-regulated in Transcription
  misc_feature: MA Experiment 20000286 PARAMETER Experiment Name: At_Open_Flower_P Parameter: Age (day) Value: 21
  misc_feature: MA Experiment 20000286 PARAMETER Experiment Name: At_Open_Flower_P Parameter: Plant Line Value: WS
  misc_feature: MA Experiment 20000286 PARAMETER Experiment Name: At_Open_Flower_P Parameter: Tissue Value: Half Open vs. Whole Plant
  misc_feature: MA Experiment ID: 20000439 Result: Down-regulated in Transcription
  misc_feature: MA Experiment 20000439 PARAMETER Experiment Name: At_Roots__P Parameter: Age (day) Value: 14 vs. 21
  misc_feature: MA Experiment 20000439 PARAMETER Experiment Name: At_Roots__P Parameter: Organism Value: A. thaliana
  misc_feature: MA Experiment 20000439 PARAMETER Experiment Name: At_Roots__P Parameter: Tissue Value: Roots vs. Whole Plant
  misc_feature: MA Experiment ID: 20000441 Result: Up-regulated in Transcription
  misc_feature: MA Experiment 20000441 PARAMETER Experiment Name: At_1uM_BR-BRZ__P Parameter: Tissue Value: Shoot Apices
  misc_feature: MA Experiment 20000441 PARAMETER Experiment Name: At_1uM_BR-BRZ__P Parameter: Treatment Value: 1uM BR vs. No Treatment
  misc_feature: MA Experiment ID: 20000443 Result: Up-regulated in Transcription
  misc_feature: MA Experiment 20000443 PARAMETER Experiment Name: At_1uM_BR-BRZ__P Parameter: Tissue Value: Shoot Apices
  misc_feature: MA Experiment 20000443 PARAMETER Experiment Name: At_1uM_BR-BRZ__P Parameter: Treatment Value: 1uM BRZ vs. No Treatment
  misc_feature: MA Experiment ID: 20000451 Result: Down-regulated in Transcription
  misc_feature: MA Experiment 20000451 PARAMETER Experiment Name: At_CS6879_Shoots-Roots_P Parameter: Age (day) Value: 14
  misc_feature: MA Experiment 20000451 PARAMETER Experiment Name: At_CS6879_Shoots-Roots_P Parameter: Organism Value: A. thaliana
  misc_feature: MA Experiment 20000451 PARAMETER Experiment Name: At_CS6879_Shoots-Roots_P Parameter: Plant Line Value: CS6879 vs. WS
  misc_feature: MA Experiment 20000451 PARAMETER Experiment Name: At_CS6879_Shoots-Roots_P Parameter: Tissue Value: Roots
  misc_feature: MA Experiment ID: 20000495 Result: Up-regulated in Transcription
  misc_feature: MA Experiment 20000495 PARAMETER Experiment Name: At_Guard_Cells_P Parameter: Harvest Date Value: 8/2/2002
  misc_feature: MA Experiment 20000495 PARAMETER Experiment Name: At_Guard_Cells_P Parameter: Organism Value: A. thaliana
  misc_feature: MA Experiment 20000495 PARAMETER Experiment Name: At_Guard_Cells_P Parameter: Tissue Value: Guard Cells vs. Leaves
  misc_feature: MA Experiment ID: 20000527 Result: Up-regulated in Transcription
  misc_feature: MA Experiment 20000527 PARAMETER Experiment Name: At_10percent_PEG_P Parameter: Age (day) Value: 20
  misc_feature: MA Experiment 20000527 PARAMETER Experiment Name: At_10percent_PEG_P Parameter: Organism Value: A. thaliana
  misc_feature: MA Experiment 20000527 PARAMETER Experiment Name: At_10percent_PEG_P Parameter: Plant Line Value: WS
  misc_feature: MA Experiment 20000527 PARAMETER Experiment Name: At_10percent_PEG_P Parameter: Timepoint (day) Value: 20
  misc_feature: MA Experiment 20000527 PARAMETER Experiment Name: At_10percent_PEG_P Parameter: Tissue Value: Whole Plant
  misc_feature: MA Experiment 20000527 PARAMETER Experiment Name: At_10percent_PEG_P Parameter: Treatment Value: 10percent PEG vs. No Treatment
  misc_feature: MA Experiment ID: 20000574 Result: Down-regulated in Transcription
  misc_feature: MA Experiment 20000574 PARAMETER Experiment Name: At_100uM_ABA_Mutants__P Parameter: Organism Value: A. thaliana
  misc_feature: MA Experiment 20000574 PARAMETER Experiment Name: At_100uM_ABA_Mutants__P Parameter: Plant Line Value: CS23 vs. Ler wt
  misc_feature: MA Experiment 20000574 PARAMETER Experiment Name: At_100uM_ABA_Mutants__P Parameter: Timepoint (hr) Value: N/A
  misc_feature: MA Experiment 20000574 PARAMETER Experiment Name: At_100uM_ABA_Mutants__P Parameter: Tissue Value: Whole Plant
  misc_feature: MA Experiment 20000574 PARAMETER Experiment Name: At_100uM_ABA_Mutants__P Parameter: Treatment Value: None
  misc_feature: MA Experiment ID: 20001248 Result: Up-regulated in Transcription
  misc_feature: MA Experiment 20001248 PARAMETER Experiment Name: At_Far-red-induction_P Parameter: Age (day) Value: 7
  misc_feature: MA Experiment 20001248 PARAMETER Experiment Name: At_Far-red-induction_P Parameter: Light Value: Far-red vs. White
  misc_feature: MA Experiment 20001248 PARAMETER Experiment Name: At_Far-red-induction_P Parameter: Organism Value: A. thaliana
  misc_feature: MA Experiment 20001248 PARAMETER Experiment Name: At_Far-red-induction_P Parameter: Plant Line Value: Columbia
  misc_feature: MA Experiment 20001248 PARAMETER Experiment Name: At_Far-red-induction_P Parameter: Timepoint (hr) Value: 4
  misc_feature: MA Experiment 20001248 PARAMETER Experiment Name: At_Far-red-induction_P Parameter: Tissue Value: Whole Plant
  misc_feature: MA Experiment ID: 20001450 Result: Up-regulated in Transcription
  misc_feature: MA Experiment 20001450 PARAMETER Experiment Name: At_Far-red-induction_P Parameter: Age (day) Value: 7
  misc_feature: MA Experiment 20001450 PARAMETER Experiment Name: At_Far-red-induction_P Parameter: Light Value: Far-red vs. White
  misc_feature: MA Experiment 20001450 PARAMETER Experiment Name: At_Far-red-induction_P Parameter: Organism Value: A. thaliana
  misc_feature: MA Experiment 20001450 PARAMETER Experiment Name: At_Far-red-induction_P Parameter: Plant Line Value: Columbia
  misc_feature: MA Experiment 20001450 PARAMETER Experiment Name: At_Far-red-induction_P Parameter: Timepoint (hr) Value: 8
  misc_feature: MA Experiment 20001450 PARAMETER Experiment Name: At_Far-red-induction_P Parameter: Tissue Value: Whole Plant
  misc_feature: MA Experiment ID: 20001451 Result: Up-regulated in Transcription
  misc_feature: MA Experiment 20001451 PARAMETER Experiment Name: At_Far-red-induction_P Parameter: Age (day) Value: 7
  misc_feature: MA Experiment 20001451 PARAMETER Experiment Name: At_Far-red-induction_P Parameter: Light Value: Far-red vs. White
  misc_feature: MA Experiment 20001451 PARAMETER Experiment Name: At_Far-red-induction_P Parameter: Organism Value: A. thaliana
  misc_feature: MA Experiment 20001451 PARAMETER Experiment Name: At_Far-red-induction_P Parameter: Plant Line Value: Columbia
  misc_feature: MA Experiment 20001451 PARAMETER Experiment Name: At_Far-red-induction_P Parameter: Timepoint (hr) Value: 24
  misc_feature: MA Experiment 20001451 PARAMETER Experiment Name: At_Far-red-induction_P Parameter: Tissue Value: Whole Plant
  misc_feature: MA Experiment ID: 20001757 Result: Up-regulated in Transcription
  misc_feature: MA Experiment 20001757 PARAMETER Experiment Name: At_50mM_NH4NO3_L-to-H_P Parameter: Timepoint (hr) Value: 6
  misc_feature: MA Experiment 20001757 PARAMETER Experiment Name: At_50mM_NH4NO3_L-to-H_P Parameter: Tissue Value: Leaf
  misc_feature: MA Experiment 20001757 PARAMETER Experiment Name: At_50mM_NH4NO3_L-to-H_P Parameter: Treatment Value: 50mM NH4NO3 vs 100mM Mannitol
  misc_feature: MA Experiment ID: 20001911 Result: Up-regulated in Transcription
  misc_feature: MA Experiment 20001911 PARAMETER Experiment Name: At_Drought_Reproduction_P Parameter: Age (day) Value: 40
  misc_feature: MA Experiment 20001911 PARAMETER Experiment Name: At_Drought_Reproduction_P Parameter: Organism Value: A. thaliana
  misc_feature: MA Experiment 20001911 PARAMETER Experiment Name: At_Drought_Reproduction_P Parameter: Plant Line Value: WS
  misc_feature: MA Experiment 20001911 PARAMETER Experiment Name: At_Drought_Reproduction_P Parameter: Timepoint (day) Value: 10
  misc_feature: MA Experiment 20001911 PARAMETER Experiment Name: At_Drought_Reproduction_P Parameter: Tissue Value: Flowers
  misc_feature: MA Experiment 20001911 PARAMETER Experiment Name: At_Drought_Reproduction_P Parameter: Treatment Value: Drought vs. No Drought
acatagacaagaagatcacattataaagatctcatctttctcttctccttcttccctcctgtatctgtattctcttatcagacaaaaagttccaagatttttctaatagcgatggattgtgttgaatcttatttatccggagataattctgatgaatctccggtgatgcatacttggttttctccgtctccgtctccgtctgactcttcctcttctccttcatcttctgcttcttcttccattgggaggaatagcgacgacggtgagaaatcgtcggaggacggtggagatgacgccggagagaatgaagttgagtctccgtataaaggtcctcttgaaatgatggaatctctcgaacaagtcttacctgttaggaaagggatatcgaagtattacagtggaaagtcaaagtcttttactaatttaacggcggaggcagcttcggcgttgacttcttcttcgtcgatgaaagatttagcgaagccggagaatccttacagtaggaggaggaggaatctcctctgccatcagatttgggaaaataacaagacgactccacgtggtgggatctcgaagaaacacgttatgagttctagcagaagcgctttgacgctagctatggctgttgcggctggtgtgatgaccggagaaggatcttcttccggaggtgactcgtcgccgggatcaagtccgacgacttctggatctcctccgaggcagctacatcatcatcaacatcagatgaagaagcttcctccgttgtatcctaggagtcaagggtcttttggtaatttgacttcgtctcagtcgtcgttgggtttttgtgcctggagatcgttttcggtggctgattttccgaggtgttttccggcgacggcgagtgggattgggtttaatgactcgtaggaaatgatgataacaattgttttgttaaatttttatattttgaagttagtaacaaccacatccggagaatgtatgtgtatagaagagtttcaaaacttttgaatggatcatccacatcttttttttccattttggttttttgttctatcaattacatcttttcaaaaatctttgtcat

SEQ ID NO: 28373 - protein, 264 aa, Arabidopsis thaliana
  peptide (1)..(264): Ceres Seq. ID no. 13488419
  misc_feature (30)..(141): Homolog of NCBI NO: 15724184 NR Description: At2g24550/F25P17.15 [Arabidopsis thaliana]
  misc_feature (30)..(141): Homolog of NCBI NO: 25412223 NR Description: hypothetical protein At2g24550 [imported] -
  misc_feature (30)..(141): Homolog of NCBI NO: 18400574 NR Description: expressed protein [Arabidopsis thaliana]
  misc_feature (38)..(149): Homolog of NCBI NO: 28393161 NR Description: unknown protein [Arabidopsis thaliana]
  misc_feature (38)..(149): Homolog of NCBI NO: 15238642 NR Description: expressed protein [Arabidopsis thaliana]
  misc_feature (30)..(136): Homolog of NCBI NO: 34905120 NR Description: P0686C03.43 [Oryza sativa (japonica
  misc_feature (37)..(156): Homolog of NCBI NO: 15229793 NR Description: hypothetical protein [Arabidopsis thaliana]
  misc_feature (24)..(228): Homolog of NCBI NO: 9294810 NR Description: MTD1 [Medicago truncatula]
  misc_feature (170)..(264): Homolog of NCBI NO: 26451772 NR Description: unknown protein [Arabidopsis thaliana]
  misc_feature (1)..(264): Homolog of NCBI NO: 22326936 NR Description: expressed protein [Arabidopsis thaliana]
MDCVESYLSGDNSDESPVMHTWFSPSPSPSDSSSSPSSSASSSIGRNSDDGEKSSEDGGDDAGENEVESPYKGPLEMMESLEQVLPVRKGISKYYSGKSKSFTNLTAEAASALTSSSSMKDLAKPENPYSRRRRNLLCHQIWENNKTTPRGGISKKHVMSSSRSALTLAMAVAAGVMTGEGSSSGGDSSPGSSPTTSGSPPRQLHHHQHQMKKLPPLYPRSQGSFGNLTSSQSSLGFCAWRSFSVADFPRCFPATASGIGFNDS

SEQ ID NO: 28374 - protein, 246 aa, Arabidopsis thaliana
  peptide (1)..(246): Ceres Seq. ID no. 13488420
  misc_feature (12)..(123): Homolog of NCBI NO: 15724184 NR Description: At2g24550/F25P17.15 [Arabidopsis thaliana]
  misc_feature (12)..(123): Homolog of NCBI NO: 25412223 NR Description: hypothetical protein At2g24550 [imported] -
  misc_feature (12)..(123): Homolog of NCBI NO: 18400574 NR Description: expressed protein [Arabidopsis thaliana]
  misc_feature (20)..(131): Homolog of NCBI NO: 28393161 NR Description: unknown protein [Arabidopsis thaliana]
  misc_feature (20)..(131): Homolog of NCBI NO: 15238642 NR Description: expressed protein [Arabidopsis thaliana]
  misc_feature (12)..(118): Homolog of NCBI NO: 34905120 NR Description: P0686C03.43 [Oryza sativa (japonica
  misc_feature (19)..(138): Homolog of NCBI NO: 15229793 NR Description: hypothetical protein [Arabidopsis thaliana]
  misc_feature (6)..(210): Homolog of NCBI NO: 9294810 NR Description: MTD1 [Medicago truncatula]
  misc_feature (152)..(246): Homolog of NCBI NO: 26451772 NR Description: unknown protein [Arabidopsis thaliana]
  misc_feature (1)..(246): Homolog of NCBI NO: 22326936 NR Description: expressed protein [Arabidopsis thaliana]
MHTWFSPSPSPSDSSSSPSSSASSSIGRNSDDGEKSSEDGGDDAGENEVESPYKGPLEMMESLEQVLPVRKGISKYYSGKSKSFTNLTAEAASALTSSSSMKDLAKPENPYSRRRRNLLCHQIWENNKTTPRGGISKKHVMSSSRSALTLAMAVAAGVMTGEGSSSGGDSSPGSSPTTSGSPPRQLHHHQHQMKKLPPLYPRSQGSFGNLTSSQSSLGFCAWRSFSVADFPRCFPATASGIGFNDS

SEQ ID NO: 28375 - protein, 188 aa, Arabidopsis thaliana
  peptide (1)..(188): Ceres Seq. ID no. 13488421
  misc_feature (1)..(65): Homolog of NCBI NO: 15724184 NR Description: At2g24550/F25P17.15 [Arabidopsis thaliana]
  misc_feature (1)..(65): Homolog of NCBI NO: 25412223 NR Description: hypothetical protein At2g24550 [imported] -
  misc_feature (1)..(65): Homolog of NCBI NO: 18400574 NR Description: expressed protein [Arabidopsis thaliana]
  misc_feature (1)..(73): Homolog of NCBI NO: 28393161 NR Description: unknown protein [Arabidopsis thaliana]
  misc_feature (1)..(73): Homolog of NCBI NO: 15238642 NR Description: expressed protein [Arabidopsis thaliana]
  misc_feature (1)..(60): Homolog of NCBI NO: 34905120 NR Description: P0686C03.43 [Oryza sativa (japonica
  misc_feature (1)..(80): Homolog of NCBI NO: 15229793 NR Description: hypothetical protein [Arabidopsis thaliana]
  misc_feature (1)..(152): Homolog of NCBI NO: 9294810 NR Description: MTD1 [Medicago truncatula]
  misc_feature (94)..(188): Homolog of NCBI NO: 26451772 NR Description: unknown protein [Arabidopsis thaliana]
  misc_feature (1)..(188): Homolog of NCBI NO: 22326936 NR Description: expressed protein [Arabidopsis thaliana]
MMESLEQVLPVRKGISKYYSGKSKSFTNLTAEAASALTSSSSMKDLAKPENPYSRRRRNLLCHQIWENNKTTPRGGISKKHVMSSSRSALTLAMAVAAGVMTGEGSSSGGDSSPGSSPTTSGSPPRQLHHHQHQMKKLPPLYPRSQGSFGNLTSSQSSLGFCAWRSFSVADFPRCFPATASGIGFNDS

SEQ ID NO: 28376 - DNA, 810 bp, Arabidopsis thaliana
  misc_feature (1)..(810): Ceres Seq. ID no. 12343497
  misc_feature: MA Experiment ID: 108434 Result: Up-regulated in Transcription
  misc_feature: MA Experiment 108434 PARAMETER Experiment Name: At_Root_Tips_cDNA_P Parameter: Tissue Value: Root Tips
  misc_feature: MA Experiment ID: 108435 Result: Up-regulated in Transcription
  misc_feature: MA Experiment 108435 PARAMETER Experiment Name: At_stm_Mutants_cDNA_P Parameter: Plant Line Value: wt Landsburg vs stm
  misc_feature: MA Experiment 108435 PARAMETER Experiment Name: At_stm_Mutants_cDNA_P Parameter: Tissue Value: Shoot Apical Meristem Region
  misc_feature: MA Experiment ID: 108461 Result: Up-regulated in Transcription
  misc_feature: MA Experiment 108461 PARAMETER Experiment Name: At_Germinating_Seeds_cDNA_P Parameter: Age (day) Value: 1 vs. 0
  misc_feature: MA Experiment 108461 PARAMETER Experiment Name: At_Germinating_Seeds_cDNA_P Parameter: Tissue Value: Germinating Seeds
  misc_feature: MA Experiment ID: 20000144 Result: Down-regulated in Transcription
  misc_feature: MA Experiment 20000144 PARAMETER Experiment Name: At_42deg_Heat_cDNA_P Parameter: Temperature (deg C) Value: 42 vs. 22
  misc_feature: MA Experiment 20000144 PARAMETER Experiment Name: At_42deg_Heat_cDNA_P Parameter: Timepoint (hr) Value: 1
  misc_feature: MA Experiment 20000144 PARAMETER Experiment Name: At_42deg_Heat_cDNA_P Parameter: Tissue Value: Aerial
  misc_feature: MA Experiment ID: 20000171 Result: Down-regulated in Transcription
  misc_feature: MA Experiment 20000171 PARAMETER Experiment Name: At_42deg_Heat_P Parameter: Age (day) Value: 14
  misc_feature: MA Experiment 20000171 PARAMETER Experiment Name: At_42deg_Heat_P Parameter: Organism Value: A. thaliana
  misc_feature: MA Experiment 20000171 PARAMETER Experiment Name: At_42deg_Heat_P Parameter: Plant Line Value: WS
  misc_feature: MA Experiment 20000171 PARAMETER Experiment Name: At_42deg_Heat_P Parameter: Temperature (deg C) Value: 42 vs. 22
  misc_feature: MA Experiment 20000171 PARAMETER Experiment Name: At_42deg_Heat_P Parameter: Timepoint (hr) Value: 1
  misc_feature: MA Experiment 20000171 PARAMETER Experiment Name: At_42deg_Heat_P Parameter: Tissue Value: Aerial
  misc_feature: MA Experiment ID: 20000173 Result: Down-regulated in Transcription
  misc_feature: MA Experiment 20000173 PARAMETER Experiment Name: At_42deg_Heat_P Parameter: Age (day) Value: 14
  misc_feature: MA Experiment 20000173 PARAMETER Experiment Name: At_42deg_Heat_P Parameter: Organism Value: A. thaliana
  misc_feature: MA Experiment 20000173 PARAMETER Experiment Name: At_42deg_Heat_P Parameter: Plant Line Value: WS
  misc_feature: MA Experiment 20000173 PARAMETER Experiment Name: At_42deg_Heat_P Parameter: Temperature (deg C) Value: 42 vs. 22
  misc_feature: MA Experiment 20000173 PARAMETER Experiment Name: At_42deg_Heat_P Parameter: Timepoint (hr) Value: 6
  misc_feature: MA Experiment 20000173 PARAMETER Experiment Name: At_42deg_Heat_P Parameter: Tissue Value: Aerial
  misc_feature: MA Experiment ID: 20000234 Result: Up-regulated in Transcription
  misc_feature: MA Experiment 20000234 PARAMETER Experiment Name: At_Siliques_P Parameter: Age (day) Value: 21
  misc_feature: MA Experiment 20000234 PARAMETER Experiment Name: At_Siliques_P Parameter: Organism Value: A. thaliana
  misc_feature: MA Experiment 20000234 PARAMETER Experiment Name: At_Siliques_P Parameter: Plant Line Value: WS
  misc_feature: MA Experiment 20000234 PARAMETER Experiment Name: At_Siliques_P Parameter: Tissue Value: Less Than 5mm Siliques vs. Whole Plant
  misc_feature: MA Experiment ID: 20000264 Result: Up-regulated in Transcription
  misc_feature: MA Experiment 20000264 PARAMETER Experiment Name: At_Open_Flower_P Parameter: Age (day) Value: 21
  misc_feature: MA Experiment 20000264 PARAMETER Experiment Name: At_Open_Flower_P Parameter: Plant Line Value: WS
  misc_feature: MA Experiment 20000264 PARAMETER Experiment Name: At_Open_Flower_P Parameter: Tissue Value: Open Flower vs. Whole Plant
  misc_feature: MA Experiment ID: 20000265 Result: Up-regulated in Transcription
  misc_feature: MA Experiment 20000265 PARAMETER Experiment Name: At_Open_Flower_P Parameter: Age (day) Value: 21
  misc_feature: MA Experiment 20000265 PARAMETER Experiment Name: At_Open_Flower_P Parameter: Plant Line Value: WS
  misc_feature: MA Experiment 20000265 PARAMETER Experiment Name: At_Open_Flower_P Parameter: Tissue Value: Closed Flower vs. Whole Plant
  misc_feature: MA Experiment ID: 20000437 Result: Down-regulated in Transcription
  misc_feature: MA Experiment 20000437 PARAMETER Experiment Name: At_Drought_P Parameter: Age (day) Value: 8
  misc_feature: MA Experiment 20000437 PARAMETER Experiment Name: At_Drought_P Parameter: Organism Value: A. thaliana
  misc_feature: MA Experiment 20000437 PARAMETER Experiment Name: At_Drought_P Parameter: Plant Line Value: WS
  misc_feature: MA Experiment 20000437 PARAMETER Experiment Name: At_Drought_P Parameter: Timepoint (hr) Value: 24
  misc_feature: MA Experiment 20000437 PARAMETER Experiment Name: At_Drought_P Parameter: Tissue Value: Whole Plant
  misc_feature: MA Experiment 20000437 PARAMETER Experiment Name: At_Drought_P Parameter: Treatment Value: Drought vs. No Drought
  misc_feature: MA Experiment ID: 20000495 Result: Up-regulated in Transcription
  misc_feature: MA Experiment 20000495 PARAMETER Experiment Name: At_Guard_Cells_P Parameter: Harvest Date Value: 8/2/2002
  misc_feature: MA Experiment 20000495 PARAMETER Experiment Name: At_Guard_Cells_P Parameter: Organism Value: A. thaliana
  misc_feature: MA Experiment 20000495 PARAMETER Experiment Name: At_Guard_Cells_P Parameter: Tissue Value: Guard Cells vs. Leaves
  misc_feature: MA Experiment ID: 20001450 Result: Down-regulated in Transcription
  misc_feature: MA Experiment 20001450 PARAMETER Experiment Name: At_Far-red-induction_P Parameter: Age (day) Value: 7
  misc_feature: MA Experiment 20001450 PARAMETER Experiment Name: At_Far-red-induction_P Parameter: Light Value: Far-red vs. White
  misc_feature: MA Experiment 20001450 PARAMETER Experiment Name: At_Far-red-induction_P Parameter: Organism Value: A. thaliana
  misc_feature: MA Experiment 20001450 PARAMETER Experiment Name: At_Far-red-induction_P Parameter: Plant Line Value: Columbia
  misc_feature: MA Experiment 20001450 PARAMETER Experiment Name: At_Far-red-induction_P Parameter: Timepoint (hr) Value: 8
  misc_feature: MA Experiment 20001450 PARAMETER Experiment Name: At_Far-red-induction_P Parameter: Tissue Value: Whole Plant
  misc_feature: MA Experiment ID: 20001451 Result: Down-regulated in Transcription
  misc_feature: MA Experiment 20001451 PARAMETER Experiment Name: At_Far-red-induction_P Parameter: Age (day) Value: 7
  misc_feature: MA Experiment 20001451 PARAMETER Experiment Name: At_Far-red-induction_P Parameter: Light Value: Far-red vs. White
  misc_feature: MA Experiment 20001451 PARAMETER Experiment Name: At_Far-red-induction_P Parameter: Organism Value: A. thaliana
  misc_feature: MA Experiment 20001451 PARAMETER Experiment Name: At_Far-red-induction_P Parameter: Plant Line Value: Columbia
  misc_feature: MA Experiment 20001451 PARAMETER Experiment Name: At_Far-red-induction_P Parameter: Timepoint (hr) Value: 24
  misc_feature: MA Experiment 20001451 PARAMETER Experiment Name: At_Far-red-induction_P Parameter: Tissue Value: Whole Plant
  misc_feature: MA Experiment ID: 20001560 Result: Up-regulated in Transcription
  misc_feature: MA Experiment 20001560 PARAMETER Experiment Name: At_Drought_Soil_Dry_P Parameter: Age (day) Value: 28
  misc_feature: MA Experiment 20001560 PARAMETER Experiment Name: At_Drought_Soil_Dry_P Parameter: Organism Value: A. thaliana
  misc_feature: MA Experiment 20001560 PARAMETER Experiment Name: At_Drought_Soil_Dry_P Parameter: Plant Line Value: WS
  misc_feature: MA Experiment 20001560 PARAMETER Experiment Name: At_Drought_Soil_Dry_P Parameter: Post Timepoint (hr) Value: None
  misc_feature: MA Experiment 20001560 PARAMETER Experiment Name: At_Drought_Soil_Dry_P Parameter: Post-Treatment Value: None
  misc_feature: MA Experiment 20001560 PARAMETER Experiment Name: At_Drought_Soil_Dry_P Parameter: Timepoint (day) Value: 14
  misc_feature: MA Experiment 20001560 PARAMETER Experiment Name: At_Drought_Soil_Dry_P Parameter: Treatment Value: Drought vs. No Drought
  misc_feature: MA Experiment ID: 20001911 Result: Down-regulated in Transcription
  misc_feature: MA Experiment 20001911 PARAMETER Experiment Name: At_Drought_Reproduction_P Parameter: Age (day) Value: 40
  misc_feature: MA Experiment 20001911 PARAMETER Experiment Name: At_Drought_Reproduction_P Parameter: Organism Value: A. thaliana
  misc_feature: MA Experiment 20001911 PARAMETER Experiment Name: At_Drought_Reproduction_P Parameter: Plant Line Value: WS
  misc_feature: MA Experiment 20001911 PARAMETER Experiment Name: At_Drought_Reproduction_P Parameter: Timepoint (day) Value: 10
  misc_feature: MA Experiment 20001911 PARAMETER Experiment Name: At_Drought_Reproduction_P Parameter: Tissue Value: Flowers
  misc_feature: MA Experiment 20001911 PARAMETER Experiment Name: At_Drought_Reproduction_P Parameter: Treatment Value: Drought vs. No Drought
gatctctctgtctctcgcatcggaagtacgaagaaggatctttgttttcttcctcttctccttcttctactttcgatcactcgtgaatctgattctactctagtctaattgggtgctttcgatttctgaataaaaattcgattttgtctgacgattaagaaagcgaaagtgatggccgccgtaaatggatatcagggaaatactccggcagatcctccggcgtctaatggatcaaaacaacctgcggctccgaccaagactgttgacagccaatctgttctcaaaagactgcaatctgaattgatgggcttgatgatgggcggtggtccaggaatatcggctttccctgaggaagacaacatattctgctggaaagggacaataataggaagcaaagatactgtgtttgaaggaactgagtacagactctcactctctttctccaatgactatcctttcaagcctccaaaggttaagtttgagacatgttgcttccaccccaatgttgatgtctatggcaatatctgcttagacattcttcaggataagtggtcatctgcttacgatgtgaggacgatactactatcgattcagagcctcctgggagaaccgaacatcagttcaccattgaacactcaagcagctcagctttggagtaaccaagaagagtacaggaagatggttgagaagctttacaagcctccaagtgcatgatttctgcaagctgttctgattcataaatctccaatgcctctgatgatttcacataaaacgatttttcagaagaaaacactgtcattcatttgcttt

SEQ ID NO: 28377 - protein, 180 aa, Arabidopsis thaliana
  peptide (1)..(180): Ceres Seq. ID no. 12343498
  misc_feature (20)..(176): Homolog of NCBI NO: 24663332 NR Description: vihar CG10682-PA
  misc_feature (8)..(176): Homolog of NCBI NO: 31216813 NR Description: ENSANGP00000020629 [Anopheles gambiae]
  misc_feature (28)..(176): Homolog of NCBI NO: 4388942 NR Description: E2-C, An Ubiquitin Conjugating Enzyme Required
  misc_feature (16)..(176): Homolog of NCBI NO: 3915196 NR Description: Ubiquitin-conjugating enzyme E2-C
  misc_feature (10)..(177): Homolog of NCBI NO: 34903234 NR Description: unnamed protein product [Oryza sativa (japonica
  misc_feature (1)..(180): Homolog of NCBI NO: 18402475 NR Description: E2, ubiquitin-conjugating enzyme, putative
  misc_feature (36)..(180): Homolog of NCBI NO: 9454557 NR Description: Putative ubiquitin carrier protein [Arabidopsis
  misc_feature (1)..(180): Homolog of NCBI NO: 25293673 NR Description: hypothetical protein F17J6.3 [imported] -
  misc_feature (1)..(180): Homolog of NCBI NO: 18403097 NR Description: E2, ubiquitin-conjugating enzyme, putative
  misc_feature (1)..(180): Homolog of NCBI NO: 21618179 NR Description: E2, ubiquitin-conjugating enzyme, putative
MAAVNGYQGNTPADPPASNGSKQPAAPTKTVDSQSVLKRLQSELMGLMMGGGPGISAFPEEDNIFCWKGTIIGSKDTVFEGTEYRLSLSFSNDYPFKPPKVKFETCCFHPNVDVYGNICLDILQDKWSSAYDVRTILLSIQSLLGEPNISSPLNTQAAQLWSNQEEYRKMVEKLYKPPSA

SEQ ID NO: 28378 - protein, 136 aa, Arabidopsis thaliana
  peptide (1)..(136): Ceres Seq. ID no. 12343499
  misc_feature (1)..(132): Homolog of NCBI NO: 24663332 NR Description: vihar CG10682-PA
  misc_feature (1)..(132): Homolog of NCBI NO: 31216813 NR Description: ENSANGP00000020629 [Anopheles gambiae]
  misc_feature (1)..(132): Homolog of NCBI NO: 4388942 NR Description: E2-C, An Ubiquitin Conjugating Enzyme Required
  misc_feature (1)..(132): Homolog of NCBI NO: 3915196 NR Description: Ubiquitin-conjugating enzyme E2-C
  misc_feature (1)..(133): Homolog of NCBI NO: 34903234 NR Description: unnamed protein product [Oryza sativa (japonica
  misc_feature (1)..(136): Homolog of NCBI NO: 18402475 NR Description: E2, ubiquitin-conjugating enzyme, putative
  misc_feature (1)..(136): Homolog of NCBI NO: 9454557 NR Description: Putative ubiquitin carrier protein [Arabidopsis
  misc_feature (1)..(136): Homolog of NCBI NO: 25293673 NR Description: hypothetical protein F17J6.3 [imported] -
  misc_feature (1)..(136): Homolog of NCBI NO: 18403097 NR Description: E2, ubiquitin-conjugating enzyme, putative
  misc_feature (1)..(136): Homolog of NCBI NO: 21618179 NR Description: E2, ubiquitin-conjugating enzyme, putative
MGLMMGGGPGISAFPEEDNIFCWKGTIIGSKDTVFEGTEYRLSLSFSNDYPFKPPKVKFETCCFHPNVDVYGNICLDILQDKWSSAYDVRTILLSIQSLLGEPNISSPLNTQAAQLWSNQEEYRKMVEKLYKPPSA

SEQ ID NO: 28379 - protein, 133 aa, Arabidopsis thaliana
  peptide (1)..(133): Ceres Seq. ID no. 12343500
  misc_feature (1)..(129): Homolog of NCBI NO: 24663332 NR Description: vihar CG10682-PA
  misc_feature (1)..(129): Homolog of NCBI NO: 31216813 NR Description: ENSANGP00000020629 [Anopheles gambiae]
  misc_feature (1)..(129): Homolog of NCBI NO: 4388942 NR Description: E2-C, An Ubiquitin Conjugating Enzyme Required
  misc_feature (1)..(129): Homolog of NCBI NO: 3915196 NR Description: Ubiquitin-conjugating enzyme E2-C
  misc_feature (1)..(130): Homolog of NCBI NO: 34903234 NR Description: unnamed protein product [Oryza sativa (japonica
  misc_feature (1)..(133): Homolog of NCBI NO: 18402475 NR Description: E2, ubiquitin-conjugating enzyme, putative
  misc_feature (1)..(133): Homolog of NCBI NO: 9454557 NR Description: Putative ubiquitin carrier protein [Arabidopsis
  misc_feature (1)..(133): Homolog of NCBI NO: 25293673 NR Description: hypothetical protein F17J6.3 [imported] -
  misc_feature (1)..(133): Homolog of NCBI NO: 18403097 NR Description: E2, ubiquitin-conjugating enzyme, putative
  misc_feature (1)..(133): Homolog of NCBI NO: 21618179 NR Description: E2, ubiquitin-conjugating enzyme, putative
MMGGGPGISAFPEEDNIFCWKGTIIGSKDTVFEGTEYRLSLSFSNDYPFKPPKVKFETCCFHPNVDVYGNICLDILQDKWSSAYDVRTILLSIQSLLGEPNISSPLNTQAAQLWSNQEEYRKMVEKLYKPPSA

SEQ ID NO: 28380 - DNA, 1008 bp, Arabidopsis thaliana
  misc_feature (1)..(1008): Ceres Seq. ID no. 13496808
  misc_feature: MA Experiment ID: 108434 Result: Up-regulated in Transcription
  misc_feature: MA Experiment 108434 PARAMETER Experiment Name: At_Root_Tips_cDNA_P Parameter: Tissue Value: Root Tips
  misc_feature: MA Experiment ID: 108461 Result: Down-regulated in Transcription
  misc_feature: MA Experiment 108461 PARAMETER Experiment Name: At_Germinating_Seeds_cDNA_P Parameter: Age (day) Value: 1 vs. 0
  misc_feature: MA Experiment 108461 PARAMETER Experiment Name: At_Germinating_Seeds_cDNA_P Parameter: Tissue Value: Germinating Seeds
  misc_feature: MA Experiment ID: 108462 Result: Down-regulated in Transcription
  misc_feature: MA Experiment 108462 PARAMETER Experiment Name: At_Germinating_Seeds_cDNA_P Parameter: Age (day) Value: 2 vs. 0
  misc_feature: MA Experiment 108462 PARAMETER Experiment Name: At_Germinating_Seeds_cDNA_P Parameter: Tissue Value: Germinating Seeds
  misc_feature: MA Experiment ID: 108463 Result: Down-regulated in Transcription
  misc_feature: MA Experiment 108463 PARAMETER Experiment Name: At_Germinating_Seeds_cDNA_P Parameter: Age (day) Value: 3 vs. 0
  misc_feature: MA Experiment 108463 PARAMETER Experiment Name: At_Germinating_Seeds_cDNA_P Parameter: Tissue Value: Germinating Seeds
  misc_feature: MA Experiment ID: 108464 Result: Down-regulated in Transcription
  misc_feature: MA Experiment 108464 PARAMETER Experiment Name: At_Germinating_Seeds_cDNA_P Parameter: Age (day) Value: 4 vs. 0
  misc_feature: MA Experiment 108464 PARAMETER Experiment Name: At_Germinating_Seeds_cDNA_P Parameter: Tissue Value: Germinating Seeds
  misc_feature: MA Experiment ID: 20000179 Result: Down-regulated in Transcription
  misc_feature: MA Experiment 20000179 PARAMETER Experiment Name: At_Germinating_Seeds_P Parameter: Age (hr) Value: 6 vs. 0
  misc_feature: MA Experiment 20000179 PARAMETER Experiment Name: At_Germinating_Seeds_P Parameter: Tissue Value: Germinating Seeds
atatacacatctctgattcaactccaccgaattcagaagatcgaagaagatgagtagaggaagcggcgctggttatgatcgtcacatcactatcttctcaccggaaggtcgtctctttcaagttgaatatgccttcaaggccgtgaaaacagctggtattacttcaatcggagttcgtgggaaagattcggtttgcgtcgttacccagaaggaagttcctgacaagcttttggatcagtctagtgttacacatctgttccctatcaccaagtacattggattggtagctactggcattacagctgatgcaaggtctttggttcaacaagcaaggaatcaagcagctgaatttcggttcacttatggatatgagatgcctgttgacattcttgctaaatggatagcggacaagtcacaggtctacactcaacatgcttacatgagaccccttggagttgtcgctatggtaatgggtgttgatgaagagaatggtcccttactttacaaatgtgacccagctggacatttttacggtcacaaggcaactagtgctggtatgaaggaacaagaagcagtcaatttcttggagaagaaaatgaaagaaaacccatctttcacatttgatgaaaccgtgcagactgccatatcggctttgcaatctgttcttcaagaagacttcaaggctactgagattgaggtaggtgtggtgagagcagagaacccggaattccgtgcattgacaacggaggagattgaggagcatttgacagccattagtgaacgagactgatcaacttagtgaaacaagtgtgagttacgttgcttcgcttctatcagacattcctctaaagtgaccactctccatcgatcttttgtttggtcttccttccataatttaatttacttagtcaacccagcaaacttgaaaaacaaaaatgcactgtaatgcttaaggctgtgagagtttccgagtcttttgactcttcagaaatgacaccaactttactc

SEQ ID NO: 28381 - protein, 246 aa, Arabidopsis thaliana
  peptide (1)..(246): Ceres Seq. ID no. 13496809
  misc_feature (32)..(220): Pfam Name: Proteasome A-type and B-type Pfam Description: Proteasome A-type and B-type
  misc_feature (1)..(246): Homolog of NCBI NO: 15224993 NR Description: 20S proteasome alpha subunit A2 (PAA2)
  misc_feature (1)..(246): Homolog of NCBI NO: 3421070 NR Description: 20S proteasome subunit PAA1 [Arabidopsis thaliana]
  misc_feature (2)..(246): Homolog of NCBI NO: 2511588 NR Description: multicatalytic endopeptidase complex, proteasome
  misc_feature (1)..(246): Homolog of NCBI NO: 15238554 NR Description: 20S proteasome alpha subunit A1 (PAA1)
  misc_feature (1)..(246): Homolog of NCBI NO: 20260140 NR Description: multicatalytic endopeptidase complex alpha
MSRGSGAGYDRHITIFSPEGRLFQVEYAFKAVKTAGITSIGVRGKDSVCVVTQKEVPDKLLDQSSVTHLFPITKYIGLVATGITADARSLVQQARNQAAEFRFTYGYEMPVDILAKWIADKSQVYTQHAYMRPLGVVAMVMGVDEENGPLLYKCDPAGHFYGHKATSAGMKEQEAVNFLEKKMKENPSFTFDETVQTAISALQSVLQEDFKATEIEVGVVRAENPEFRALTTEEIEEHLTAISERD

SEQ ID NO: 28382 - protein, 138 aa, Arabidopsis thaliana
  peptide (1)..(138): Ceres Seq. ID no. 13496810
  misc_feature (1)..(112): Pfam Name: Proteasome A-type and B-type Pfam Description: Proteasome A-type and B-type
  misc_feature (1)..(138): Homolog of NCBI NO: 15224993 NR Description: 20S proteasome alpha subunit A2 (PAA2)
  misc_feature (1)..(138): Homolog of NCBI NO: 3421070 NR Description: 20S proteasome subunit PAA1 [Arabidopsis thaliana]
  misc_feature (1)..(138): Homolog of NCBI NO: 2511588 NR Description: multicatalytic endopeptidase complex, proteasome
  misc_feature (1)..(138): Homolog of NCBI NO: 15238554 NR Description: 20S proteasome alpha subunit A1 (PAA1)
  misc_feature (1)..(138): Homolog of NCBI NO: 20260140 NR Description: multicatalytic endopeptidase complex alpha
MPVDILAKWIADKSQVYTQHAYMRPLGVVAMVMGVDEENGPLLYKCDPAGHFYGHKATSAGMKEQEAVNFLEKKMKENPSFTFDETVQTAISALQSVLQEDFKATEIEVGVVRAENPEFRALTTEEIEEHLTAISERD

SEQ ID NO: 28383 - DNA, 772 bp, Arabidopsis thaliana
  misc_feature (1)..(772): Ceres Seq. ID no. 12394403
  misc_feature: MA Experiment ID: 108435 Result: Down-regulated in Transcription
  misc_feature: MA Experiment 108435 PARAMETER Experiment Name: At_stm_Mutants_cDNA_P Parameter: Plant Line Value: wt Landsburg vs stm
  misc_feature: MA Experiment 108435 PARAMETER Experiment Name: At_stm_Mutants_cDNA_P Parameter: Tissue Value: Shoot Apical Meristem Region
  misc_feature: MA Experiment ID: 108462 Result: Up-regulated in Transcription
  misc_feature: MA Experiment 108462 PARAMETER Experiment Name: At_Germinating_Seeds_cDNA_P Parameter: Age (day) Value: 2 vs. 0
  misc_feature: MA Experiment 108462 PARAMETER Experiment Name: At_Germinating_Seeds_cDNA_P Parameter: Tissue Value: Germinating Seeds
  misc_feature: MA Experiment ID: 108463 Result: Up-regulated in Transcription
  misc_feature: MA Experiment 108463 PARAMETER Experiment Name: At_Germinating_Seeds_cDNA_P Parameter: Age (day) Value: 3 vs. 0
  misc_feature: MA Experiment 108463 PARAMETER Experiment Name: At_Germinating_Seeds_cDNA_P Parameter: Tissue Value: Germinating Seeds
  misc_feature: MA Experiment ID: 108488 Result: Up-regulated in Transcription
  misc_feature: MA Experiment ID: 108489 Result: Down-regulated in Transcription
  misc_feature: MA Experiment ID: 108585 Result: Down-regulated in Transcription
  misc_feature: MA Experiment 108585 PARAMETER Experiment Name: At_5mM_NaNP_cDNA_P Parameter: Timepoint (hr) Value: 6
  misc_feature: MA Experiment 108585 PARAMETER Experiment Name: At_5mM_NaNP_cDNA_P Parameter: Tissue Value: Aerial
  misc_feature: MA Experiment 108585 PARAMETER Experiment Name: At_5mM_NaNP_cDNA_P Parameter: Treatment Value: null
  misc_feature: MA Experiment ID: 108594 Result: Down-regulated in Transcription
  misc_feature: MA Experiment 108594 PARAMETER Experiment Name: At_Ler-rhl_Root_cDNA_P Parameter: Plant Line Value: null
  misc_feature: MA Experiment ID: 108595 Result: Down-regulated in Transcription
  misc_feature: MA Experiment 108595 PARAMETER Experiment Name: At_Ler-pi_Ovule_cDNA_P Parameter: Plant Line Value: null
  misc_feature: MA Experiment ID: 20000184 Result: Up-regulated in Transcription
  misc_feature: MA Experiment 20000184 PARAMETER Experiment Name: At_Shoots__P Parameter: Age (day) Value: 7
  misc_feature: MA Experiment 20000184 PARAMETER Experiment Name: At_Shoots__P Parameter: Tissue Value: Shoots vs. Whole Plant
  misc_feature: MA Experiment ID: 20000224 Result: Down-regulated in Transcription
  misc_feature: MA Experiment ID: 20000438 Result: Up-regulated in Transcription
  misc_feature: MA Experiment 20000438 PARAMETER Experiment Name: At_Shoots__P Parameter: Age (day) Value: 14
  misc_feature: MA Experiment 20000438 PARAMETER Experiment Name: At_Shoots__P Parameter: Tissue Value: Shoots vs. Whole Plant
  misc_feature: MA Experiment ID: 20000439 Result: Down-regulated in Transcription
  misc_feature: MA Experiment 20000439 PARAMETER Experiment Name: At_Roots__P Parameter: Age (day) Value: 14 vs. 21
  misc_feature: MA Experiment 20000439 PARAMETER Experiment Name: At_Roots__P Parameter: Organism Value: A. thaliana
  misc_feature: MA Experiment 20000439 PARAMETER Experiment Name: At_Roots__P Parameter: Tissue Value: Roots vs. Whole Plant
  misc_feature: MA Experiment ID: 20000794 Result: Down-regulated in Transcription
  misc_feature: MA Experiment 20000794 PARAMETER Experiment Name: At_Petals_P Parameter: Age (day) Value: 23-25 days
  misc_feature: MA Experiment 20000794 PARAMETER Experiment Name: At_Petals_P Parameter: Plant Line Value: WS
  misc_feature: MA Experiment 20000794 PARAMETER Experiment Name: At_Petals_P Parameter: Tissue Value: Petals vs. Whole plant
  misc_feature: MA Experiment ID: 20001557 Result: Down-regulated in Transcription
  misc_feature: MA Experiment 20001557 PARAMETER Experiment Name: At_Drought_Soil_Dry_P Parameter: Age (day) Value: 27
  misc_feature: MA Experiment 20001557 PARAMETER Experiment Name: At_Drought_Soil_Dry_P Parameter: Organism Value: A. thaliana
  misc_feature: MA Experiment 20001557 PARAMETER Experiment Name: At_Drought_Soil_Dry_P Parameter: Plant Line Value: WS
  misc_feature: MA Experiment 20001557 PARAMETER Experiment Name: At_Drought_Soil_Dry_P Parameter: Post Timepoint (hr) Value: 3
  misc_feature: MA Experiment 20001557 PARAMETER Experiment Name: At_Drought_Soil_Dry_P Parameter: Post-Treatment Value: Re-Water vs. No Drought
  misc_feature: MA Experiment 20001557 PARAMETER Experiment Name: At_Drought_Soil_Dry_P Parameter: Timepoint (day) Value: 13
  misc_feature: MA Experiment 20001557 PARAMETER Experiment Name: At_Drought_Soil_Dry_P Parameter: Treatment Value: Drought vs. No Drought
  misc_feature: MA Experiment ID: 20001757 Result: Up-regulated in Transcription
  misc_feature: MA Experiment 20001757 PARAMETER Experiment Name: At_50mM_NH4NO3_L-to-H_P Parameter: Timepoint (hr) Value: 6
  misc_feature: MA Experiment 20001757 PARAMETER Experiment Name: At_50mM_NH4NO3_L-to-H_P Parameter: Tissue Value: Leaf
  misc_feature: MA Experiment 20001757 PARAMETER Experiment Name: At_50mM_NH4NO3_L-to-H_P Parameter: Treatment Value: 50mM NH4NO3 vs 100mM Mannitol
agactctgttttagaccaaagtcgagtgagtgctttcatcttcttcttaagcatctatggccgcgtctctaacatctcttccgaccggtttttgtcttagccatggtgatgaatgttgcaaccgttcacctaccaaatcaccatttccaggccatcatcctctggctgggaggaggaagggtcacttgctccattacgaacgtagtacagtgaggagattggttgtgacggcggcgacggagggatctaaaaaatctaaagaaagtgaaccgtcttgggcgaatcctgactcagatgagccacctccttgggctagaaacgaaggtcgttcttctacgtcccaagagagctttgaggttcctttctttgtttatctgctagcttccgcgattactgccattgctgctattggttctgttttcgagtacacaagcaagaatccagttttcgggatcttggaatctgacagcatcttttatactcctgtgcttggattctttgctcttactggaatccccacttctgtgttcctatggttcaaatccgttgaagctgctaataaggaagctcaagaacaagataaaagagatggctttctttaaaatccttttgtgtgattctgcaactcatacagtgatgattgttgtctccacatatactttgaatataattctgcatttacaaaggagcttgcttctgttcactgtttatcacccgctagattttgtttgtaatttcaacaatatgccatgttccaacgagtaagtgcctg

SEQ ID NO: 28384 - protein, 181 aa, Arabidopsis thaliana
  peptide (1)..(181): Ceres Seq. ID no. 12394404
  misc_feature (1)..(181): Homolog of NCBI NO: 15230505 NR Description: putative protein
MAASLTSLPTGFCLSHGDECCNRSPTKSPFPGHHPLAGRRKGHLLHYERSTVRRLVVTAATEGSKKSKESEPSWANPDSDEPPPWARNEGRSSTSQESFEVPFFVYLLASAITAIAAIGSVFEYTSKNPVFGILESDSIFYTPVLGFFALTGIPTSVFLWFKSVEAANKEAQEQDKRDGFL

SEQ ID NO: 28385 - DNA, 2336 bp, Arabidopsis thaliana
  misc_feature (1)..(2336): Ceres Seq. ID no. 13491856
  misc_feature: MA Experiment ID: 20000173 Result: Down-regulated in Transcription
  misc_feature: MA Experiment 20000173 PARAMETER Experiment Name: At_42deg_Heat_P Parameter: Age (day) Value: 14
  misc_feature: MA Experiment 20000173 PARAMETER Experiment Name: At_42deg_Heat_P Parameter: Organism Value: A. thaliana
  misc_feature: MA Experiment 20000173 PARAMETER Experiment Name: At_42deg_Heat_P Parameter: Plant Line Value: WS
  misc_feature: MA Experiment 20000173 PARAMETER Experiment Name: At_42deg_Heat_P Parameter: Temperature (deg C) Value: 42 vs. 22
  misc_feature: MA Experiment 20000173 PARAMETER Experiment Name: At_42deg_Heat_P Parameter: Timepoint (hr) Value: 6
  misc_feature: MA Experiment 20000173 PARAMETER Experiment Name: At_42deg_Heat_P Parameter: Tissue Value: Aerial
aaagtctctctctctctctctctgcaaacactgattcaacaaagaagaatcaaaatctccagaaattcgatcgtcgttgaagattcgtctcagtttgtgtagtttctagcttagtgttttggaatcgaaaatggcgggtcgagttaaagaagacgagaagaacgagaagattattaggagtcttcttaaacttcctgagaataagaggtgtataaactgtaacagccttggaccacaatatgtttgcactactttctggacttttgtttgtaccaactgcagtggaatacatcgtgagtttacacatcgtgttaaatcgatatcaatggcgaaatttacctcacaagaagttactgctttgaaagaaggtggaaatcagcatgctaaggatatttattttaaaggattggatcaacagcggcaatcagtgcctgacggaagtaatgttgagcggttaagggacttcatcagacatgtgtatgtaaataaaaggtatacgaatgagaagaatgatgataagtctccaagtgagacacgtagttctagtggttctcggagtccaccttatgaagatggatatgaccgtcgttacggcgacagatcaagtcctggtgggagaagtccagggttcgagacgggtagtaggaatgctgttaataacagaaaaagccctgctcgtcctgagatcctgaatgattggcgcagagaggataggtttgggggtagaaaaacatcagaagagggctcccagtcacctgagcaagtaaaagacttgggttcagctagccctcctgtagctcgacctgttagggaaattttgggtgacagtgttattcctcttcgtgtgggagagcctccaaaaccccctgtcagtagaaataccgatgcttcagcacatgcaaagtcaggtacatcattgagtagtttaatgtccacaaatgagaagccaccagaagtgaagctggagactgctttaagcctgattgattttgatactgattttgaaactcctgctccatctgttgcaattcaagcaccactatcgaccacatctcagcctgctccacagccaacaacttcatctaatgataactgggcatctttcgatgctgcacccagtgcccctagtttaaatgtatcgcaaccaccacccagtggaaacacactggattcacttctctcccagttggcagtgacttcttctgtgccaggtcaggcgtctacaccatctaacggacctgtgaatcttggtcattccacgtcacaaatctttgcaccctttcagaatgagcattcgagtgaacagccatggaacacagcacttgcatctaatgtacagaggtcaatgagtgcaccgtcattgcaacctcttcaaggagtcccttctggtggcctgcagtcttctgaagttaaaccttcgggaagatcagaattacctgcggatttattcgctgtaaactacccatcataccatgcaccagtgcctggatggcaagctggtccacctcatgctatgcactatggcatgcagcagtataataaccccgtgccgtatcagaatgttccgcagccaggcaagtcaatgaacccttttgacttcagccctgggccgccatcacaaacacaaacggaaaatatgttcccttccatggctcctctgcaaggtgcattacctccttcaggcatgatgccttctcaaggagtacacaatcaattcaatataccttctcaaggctcagcccatccatctgcaatgccaccaaggtacatgccttctcaaataccaggaagcatgccacctagcaatgtaaacccaattggcgacataaacacgtcatatgacactcaacaaacatatcaaaattttggaagctcgtttgctgctgcagttcctttgaacccaccttctttccaatcaggaggaaacccatttgggtaagaaagagcgagaatattagctcacgagagctatgttatgcatgaggattgcgtttgtgttctaaggtgtagtataagactataaggaggtattaaatcgaatacaaacatgggttaaatagggtgaacgagggaaggtacgggccatgaacctgaagaagaattgggttttgtgagagtgttagattactgtattttttataagcatcaaaatgatttgaaataggtttgatatttattctttggtgtttctatattccatttccattttgttgtttgtccttcagaaaatcttcaggctcctcctgtgttgtatgattttgtataacagtttacacattgaccataaagtcttgtcaaaattgaataaggtaatttagaattgcttttatgagact

SEQ ID NO: 28386 - protein, 602 aa, Arabidopsis thaliana
  peptide (1)..(602): Ceres Seq. ID no. 13491857
  misc_feature (12)..(130): Pfam Name: Putative GTPase activating protein for Arf Pfam Description: Putative GTPase activating protein for Arf
  misc_feature (6)..(141): Homolog of NCBI NO: 38570132 NR Description: HIV-1 Rev binding protein
  misc_feature (6)..(141): Homolog of NCBI NO: 950051 NR Description: nucleoporin-like protein [Homo sapiens]
  misc_feature (6)..(141): Homolog of NCBI NO: 26325842 NR Description: unnamed protein product [Mus musculus]
  misc_feature (9)..(146): Homolog of NCBI NO: 28850338 NR Description: hypothetical protein [Dictyostelium discoideum]
  misc_feature (5)..(508): Homolog of NCBI NO: 15233867 NR Description: hypothetical protein [Arabidopsis thaliana]
  misc_feature (1)..(102): Homolog of NCBI NO: 7485983 NR Description: hypothetical protein F22O13.17 - Arabidopsis
  misc_feature (3)..(53): Homolog of NCBI NO: 9802557 NR Description: F22O13.16 [Arabidopsis thaliana]
  misc_feature (53)..(134): Homolog of NCBI NO: 9802557 NR Description: F22O13.16 [Arabidopsis thaliana]
  misc_feature (1)..(597): Homolog of NCBI NO: 30680774 NR Description: ARF GAP-like zinc finger-containing protein
  misc_feature (1)..(597): Homolog of NCBI NO: 30680768 NR Description: ARF GAP-like zinc finger-containing protein
MAGRVKEDEKNEKIIRSLLKLPENKRCINCNSLGPQYVCTTFWTFVCTNCSGIHREFTHRVKSISMAKFTSQEVTALKEGGNQHAKDIYFKGLDQQRQSVPDGSNVERLRDFIRHVYVNKRYTNEKNDDKSPSETRSSSGSRSPPYEDGYDRRYGDRSSPGGRSPGFETGSRNAVNNRKSPARPEILNDWRREDRFGGRKTSEEGSQSPEQVKDLGSASPPVARPVREILGDSVIPLRVGEPPKPPVSRNTDASAHAKSGTSLSSLMSTNEKPPEVKLETALSLIDFDTDFETPAPSVAIQAPLSTTSQPAPQPTTSSNDNWASFDAAPSAPSLNVSQPPPSGNTLDSLLSQLAVTSSVPGQASTPSNGPVNLGHSTSQIFAPFQNEHSSEQPWNTALASNVQRSMSAPSLQPLQGVPSGGLQSSEVKPSGRSELPADLFAVNYPSYHAPVPGWQAGPPHAMHYGMQQYNNPVPYQNVPQPGKSMNPFDFSPGPPSQTQTENMFPSMAPLQGALPPSGMMPSQGVHNQFNIPSQGSAHPSAMPPRYMPSQIPGSMPPSNVNPIGDINTSYDTQQTYQNFGSSFAAAVPLNPPSFQSGGNPFG

SEQ ID NO: 28387 - protein, 537 aa, Arabidopsis thaliana
  peptide (1)..(537): Ceres Seq. ID no. 13491858
  misc_feature (1)..(65): Pfam Name: Putative GTPase activating protein for Arf Pfam Description: Putative GTPase activating protein for Arf
  misc_feature (1)..(67): Homolog of NCBI NO: 29245305 NR Description: GLP_333_15386_14190 [Giardia lamblia ATCC 50803]
  misc_feature (1)..(76): Homolog of NCBI NO: 38570132 NR Description: HIV-1 Rev binding protein
  misc_feature (1)..(76): Homolog of NCBI NO: 950051 NR Description: nucleoporin-like protein [Homo sapiens]
  misc_feature (1)..(76): Homolog of NCBI NO: 26325842 NR Description: unnamed protein product [Mus musculus]
  misc_feature (1)..(81): Homolog of NCBI NO: 28850338 NR Description: hypothetical protein [Dictyostelium discoideum]
  misc_feature (1)..(443): Homolog of NCBI NO: 15233867 NR Description: hypothetical protein [Arabidopsis thaliana]
  misc_feature (1)..(37): Homolog of NCBI NO: 7485983 NR Description: hypothetical protein F22O13.17 - Arabidopsis
  misc_feature (1)..(69): Homolog of NCBI NO: 9802557 NR Description: F22O13.16 [Arabidopsis thaliana]
  misc_feature (1)..(532): Homolog of NCBI NO: 30680774 NR Description: ARF GAP-like zinc finger-containing protein
  misc_feature (1)..(532): Homolog of NCBI NO: 30680768 NR Description: ARF GAP-like zinc finger-containing protein
MAKFTSQEVTALKEGGNQHAKDIYFKGLDQQRQSVPDGSNVERLRDFIRHVYVNKRYTNEKNDDKSPSETRSSSGSRSPPYEDGYDRRYGDRSSPGGRSPGFETGSRNAVNNRKSPARPEILNDWRREDRFGGRKTSEEGSQSPEQVKDLGSASPPVARPVREILGDSVIPLRVGEPPKPPVSRNTDASAHAKSGTSLSSLMSTNEKPPEVKLETALSLIDFDTDFETPAPSVAIQAPLSTTSQPAPQPTTSSNDNWASFDAAPSAPSLNVSQPPPSGNTLDSLLSQLAVTSSVPGQASTPSNGPVNLGHSTSQIFAPFQNEHSSEQPWNTALASNVQRSMSAPSLQPLQGVPSGGLQSSEVKPSGRSELPADLFAVNYPSYHAPVPGWQAGPPHAMHYGMQQYNNPVPYQNVPQPGKSMNPFDFSPGPPSQTQTENMFPSMAPLQGALPPSGMMPSQGVHNQFNIPSQGSAHPSAMPPRYMPSQIPGSMPPSNVNPIGDINTSYDTQQTYQNFGSSFAAAVPLNPPSFQSGGNPFG

SEQ ID NO: 28388 - protein, 336 aa, Arabidopsis thaliana
  peptide (1)..(336): Ceres Seq. ID no. 13491859
  misc_feature (1)..(251): Homolog of NCBI NO: 34909220 NR Description: putative ARF GAP-like zinc finger-containing
  misc_feature (1)..(237): Homolog of NCBI NO: 24651922 NR Description: CG8243-PA [Drosophila melanogaster]
  misc_feature (1)..(33): Homolog of NCBI NO: 16303736 NR Description: stromal membrane-associated protein SMAP1A [Homo
  misc_feature (1)..(37): Homolog of NCBI NO: 18423615 NR Description: ARF GAP-like zinc finger-containing protein
  misc_feature (1)..(37): Homolog of NCBI NO: 10441352 NR Description: ARF GAP-like zinc finger-containing protein ZIGA3
  misc_feature (1)..(37): Homolog of NCBI NO: 21618169 NR Description: ARF GAP-like zinc finger-containing protein ZIGA3
  misc_feature (1)..(104): Homolog of NCBI NO: 30039690 NR Description: RIKEN cDNA A630095P14
  misc_feature (1)..(242): Homolog of NCBI NO: 15233867 NR Description: hypothetical protein [Arabidopsis thaliana]
  misc_feature (1)..(331): Homolog of NCBI NO: 30680774 NR Description: ARF GAP-like zinc finger-containing protein
  misc_feature (1)..(331): Homolog of NCBI NO: 30680768 NR Description: ARF GAP-like zinc finger-containing protein
MSTNEKPPEVKLETALSLIDFDTDFETPAPSVAIQAPLSTTSQPAPQPTTSSNDNWASFDAAPSAPSLNVSQPPPSGNTLDSLLSQLAVTSSVPGQASTPSNGPVNLGHSTSQIFAPFQNEHSSEQPWNTALASNVQRSMSAPSLQPLQGVPSGGLQSSEVKPSGRSELPADLFAVNYPSYHAPVPGWQAGPPHAMHYGMQQYNNPVPYQNVPQPGKSMNPFDFSPGPPSQTQTENMFPSMAPLQGALPPSGMMPSQGVHNQFNIPSQGSAHPSAMPPRYMPSQIPGSMPPSNVNPIGDINTSYDTQQTYQNFGSSFAAAVPLNPPSFQSGGNPFG

SEQ ID NO: 28389 - DNA, 750 bp, Arabidopsis thaliana
  misc_feature (1)..(750): Ceres Seq. ID no. 12394399
  misc_feature: MA Experiment ID: 108488 Result: Down-regulated in Transcription
  misc_feature: MA Experiment ID: 108561 Result: Up-regulated in Transcription
  misc_feature: MA Experiment 108561 PARAMETER Experiment Name: At_100uM_ABA_cDNA_P Parameter: Timepoint (hr) Value: 6
  misc_feature: MA Experiment 108561 PARAMETER Experiment Name: At_100uM_ABA_cDNA_P Parameter: Tissue Value: Aerial
  misc_feature: MA Experiment 108561 PARAMETER Experiment Name: At_100uM_ABA_cDNA_P Parameter: Treatment Value: 100uM ABA vs. No Treatment
  misc_feature: MA Experiment ID: 108573 Result: Up-regulated in Transcription
  misc_feature: MA Experiment 108573 PARAMETER Experiment Name: At_Drought_cDNA_P Parameter: Timepoint (hr) Value: 6
  misc_feature: MA Experiment 108573 PARAMETER Experiment Name: At_Drought_cDNA_P Parameter: Tissue Value: Aerial
  misc_feature: MA Experiment 108573 PARAMETER Experiment Name: At_Drought_cDNA_P Parameter: Treatment Value: Drought vs. No Drought
  misc_feature: MA Experiment ID: 108585 Result: Up-regulated in Transcription
  misc_feature: MA Experiment 108585 PARAMETER Experiment Name: At_5mM_NaNP_cDNA_P Parameter: Timepoint (hr) Value: 6
  misc_feature: MA Experiment 108585 PARAMETER Experiment Name: At_5mM_NaNP_cDNA_P Parameter: Tissue Value: Aerial
  misc_feature: MA Experiment 108585 PARAMETER Experiment Name: At_5mM_NaNP_cDNA_P Parameter: Treatment Value: null
  misc_feature: MA Experiment ID: 108605 Result: Up-regulated in Transcription
  misc_feature: MA Experiment 108605 PARAMETER Experiment Name: At_100uM_ABA_cDNA_P Parameter: Timepoint (hr) Value: 6
  misc_feature: MA Experiment 108605 PARAMETER Experiment Name: At_100uM_ABA_cDNA_P Parameter: Tissue Value: Aerial
  misc_feature: MA Experiment 108605 PARAMETER Experiment Name: At_100uM_ABA_cDNA_P Parameter: Treatment Value: 100uM ABA vs. No Treatment
  misc_feature: MA Experiment ID: 108607 Result: Up-regulated in Transcription
  misc_feature: MA Experiment 108607 PARAMETER Experiment Name: At_100uM_ABA_cDNA_P Parameter: Timepoint (hr) Value: 4
  misc_feature: MA Experiment 108607 PARAMETER Experiment Name: At_100uM_ABA_cDNA_P Parameter: Tissue Value: Aerial
  misc_feature: MA Experiment 108607 PARAMETER Experiment Name: At_100uM_ABA_cDNA_P Parameter: Treatment Value: 100uM ABA vs. No Treatment
  misc_feature: MA Experiment ID: 20000069 Result: Up-regulated in Transcription
  misc_feature: MA Experiment 20000069 PARAMETER Experiment Name: At_100uM_ABA_Mutants_cDNA_P Parameter: Plant Line Value: CS23
  misc_feature: MA Experiment 20000069 PARAMETER Experiment Name: At_100uM_ABA_Mutants_cDNA_P Parameter: Timepoint (hr) Value: 6
  misc_feature: MA Experiment 20000069 PARAMETER Experiment Name: At_100uM_ABA_Mutants_cDNA_P Parameter: Tissue Value: Aerial
  misc_feature: MA Experiment 20000069 PARAMETER Experiment Name: At_100uM_ABA_Mutants_cDNA_P Parameter: Treatment Value: 100uM ABA vs. No Treatment
  misc_feature: MA Experiment ID: 20000070 Result: Up-regulated in Transcription
  misc_feature: MA Experiment 20000070 PARAMETER Experiment Name: At_100uM_ABA_Mutants_cDNA_P Parameter: Plant Line Value: CS24
  misc_feature: MA Experiment 20000070 PARAMETER Experiment Name: At_100uM_ABA_Mutants_cDNA_P Parameter: Timepoint (hr) Value: 6
  misc_feature: MA Experiment 20000070 PARAMETER Experiment Name: At_100uM_ABA_Mutants_cDNA_P Parameter: Tissue Value: Aerial
  misc_feature: MA Experiment 20000070 PARAMETER Experiment Name: At_100uM_ABA_Mutants_cDNA_P Parameter: Treatment Value: 100uM ABA vs. No Treatment
  misc_feature: MA Experiment ID: 20000071 Result: Up-regulated in Transcription
  misc_feature: MA Experiment 20000071 PARAMETER Experiment Name: At_100uM_ABA_Mutants_cDNA_P Parameter: Plant Line Value: CS8104
  misc_feature: MA Experiment 20000071 PARAMETER Experiment Name: At_100uM_ABA_Mutants_cDNA_P Parameter: Timepoint (hr) Value: 6
  misc_feature: MA Experiment 20000071 PARAMETER Experiment Name: At_100uM_ABA_Mutants_cDNA_P Parameter: Tissue Value: Aerial
  misc_feature: MA Experiment 20000071 PARAMETER Experiment Name: At_100uM_ABA_Mutants_cDNA_P Parameter: Treatment Value: 100uM ABA vs. No Treatment
  misc_feature: MA Experiment ID: 20000072 Result: Up-regulated in Transcription
  misc_feature: MA Experiment 20000072 PARAMETER Experiment Name: At_100uM_ABA_Mutants_cDNA_P Parameter: Plant Line Value: CS8105
  misc_feature: MA Experiment 20000072 PARAMETER Experiment Name: At_100uM_ABA_Mutants_cDNA_P Parameter: Timepoint (hr) Value: 6
  misc_feature: MA Experiment 20000072 PARAMETER Experiment Name: At_100uM_ABA_Mutants_cDNA_P Parameter: Tissue Value: Aerial
  misc_feature: MA Experiment 20000072 PARAMETER Experiment Name: At_100uM_ABA_Mutants_cDNA_P Parameter: Treatment Value: 100uM ABA vs. No Treatment
  misc_feature: MA Experiment ID: 20000087 Result: Up-regulated in Transcription
  misc_feature: MA Experiment 20000087 PARAMETER Experiment Name: At_100uM_ABA_Mutants_cDNA_P Parameter: Plant Line Value: WS
  misc_feature: MA Experiment 20000087 PARAMETER Experiment Name: At_100uM_ABA_Mutants_cDNA_P Parameter: Timepoint (hr) Value: 6
  misc_feature: MA Experiment 20000087 PARAMETER Experiment Name: At_100uM_ABA_Mutants_cDNA_P Parameter: Tissue Value: Aerial
  misc_feature: MA Experiment 20000087 PARAMETER Experiment Name: At_100uM_ABA_Mutants_cDNA_P Parameter: Treatment Value: 100uM ABA vs. No Treatment
  misc_feature: MA Experiment ID: 20000117 Result: Up-regulated in Transcription
  misc_feature: MA Experiment 20000117 PARAMETER Experiment Name: At_100uM_ABA_Mutants_cDNA_P Parameter: Plant Line Value: Columbia
  misc_feature: MA Experiment 20000117 PARAMETER Experiment Name: At_100uM_ABA_Mutants_cDNA_P Parameter: Timepoint (hr) Value: 6
  misc_feature: MA Experiment 20000117 PARAMETER Experiment Name: At_100uM_ABA_Mutants_cDNA_P Parameter: Tissue Value: Aerial
  misc_feature: MA Experiment 20000117 PARAMETER Experiment Name: At_100uM_ABA_Mutants_cDNA_P Parameter: Treatment Value: 100uM ABA vs. No Treatment
  misc_feature: MA Experiment ID: 20000437 Result: Up-regulated in Transcription
  misc_feature: MA Experiment 20000437 PARAMETER Experiment Name: At_Drought_P Parameter: Age (day) Value: 8
  misc_feature: MA Experiment 20000437 PARAMETER Experiment Name: At_Drought_P Parameter: Organism Value: A. thaliana
  misc_feature: MA Experiment 20000437 PARAMETER Experiment Name: At_Drought_P Parameter: Plant Line Value: WS
  misc_feature: MA Experiment 20000437 PARAMETER Experiment Name: At_Drought_P Parameter: Timepoint (hr) Value: 24
  misc_feature: MA Experiment 20000437 PARAMETER Experiment Name: At_Drought_P Parameter: Tissue Value: Whole Plant
  misc_feature: MA Experiment 20000437 PARAMETER Experiment Name: At_Drought_P Parameter: Treatment Value: Drought vs. No Drought
  misc_feature: MA Experiment ID: 20000496 Result: Up-regulated in Transcription
  misc_feature: MA Experiment 20000496 PARAMETER Experiment Name: At_Guard_Cells_P Parameter: Harvest Date Value: 7/19/2002
  misc_feature: MA Experiment 20000496 PARAMETER Experiment Name: At_Guard_Cells_P Parameter: Organism Value: Canola
  misc_feature: MA Experiment 20000496 PARAMETER Experiment Name: At_Guard_Cells_P Parameter: Tissue Value: Guard Cells vs. Leaves
  misc_feature: MA Experiment ID: 20001906 Result: Up-regulated in Transcription
  misc_feature: MA Experiment 20001906 PARAMETER Experiment Name: At_Drought_Reproduction_P Parameter: Age (day) Value: 35
  misc_feature: MA Experiment 20001906 PARAMETER Experiment Name: At_Drought_Reproduction_P Parameter: Organism Value: A. thaliana
  misc_feature: MA Experiment 20001906 PARAMETER Experiment Name: At_Drought_Reproduction_P Parameter: Plant Line Value: WS
  misc_feature: MA Experiment 20001906 PARAMETER Experiment Name: At_Drought_Reproduction_P Parameter: Timepoint (day) Value: 5
  misc_feature: MA Experiment 20001906 PARAMETER Experiment Name: At_Drought_Reproduction_P Parameter: Tissue Value: Siliques
  misc_feature: MA Experiment 20001906 PARAMETER Experiment Name: At_Drought_Reproduction_P Parameter: Treatment Value: Drought vs. No Drought
aaaacaaccccttgagatttccgaagatcatcaaatccaaaaccctagaaaccgaacaaaagctagcagaagctaggactattcaatggcgtcgaaaagaattaacaaagagcttagggacttgcaaagagatcctcctgtgtcctgcagtgcaggtcctacgggagatgatatgttccaatggcaagcaactatcatgggtccagcagatagcccgtttgccggaggtgtgtttcttgttaccattcacttcccaccagattaccctttcaagccaccaaaggttgccttccggaccaaggtttatcacccaaacatcaacagtaatggaagtatctgtcttgacattctgaaagagcagtggagccctgcacttaccgtatccaaggttcttctgtcgatatgctcattgctgacggatccaaaccctgacgatcctttggttcctgaaatagcgcacatctacaagacagaccgagtcaagtacgagtccacagctcaatcctggactcagaagtatgcaatgggatgataacaagcaataatacccaccaccagtacattgcgtattaaacaggagaaataagaaagaaagaaaaaaactcagtttggcttttactttggctacttttgcttattagtttttttttttaattatatcttgaagctgtgtgttgggtgtgtacatgagctttatgccttatttgaaacattgagatcttgcaaatgcttttaagccaataatccgct

SEQ ID NO: 28390 - protein, 148 aa, Arabidopsis thaliana
  peptide (1)..(148): Ceres Seq. ID no. 12394400
  misc_feature (1)..(148): Homolog of NCBI NO: 18408001 NR Description: E2, ubiquitin-conjugating enzyme, putative
  misc_feature (1)..(148): Homolog of NCBI NO: 456568 NR Description: ubiquitin conjugating enzyme
  misc_feature (1)..(148): Homolog of NCBI NO: 5762457 NR Description: ubiquitin-conjugating enzyme UBC2
  misc_feature (1)..(148): Homolog of NCBI NO: 18423829 NR Description: E2, ubiquitin-conjugating enzyme, putative
MASKRINKELRDLQRDPPVSCSAGPTGDDMFQWQATIMGPADSPFAGGVFLVTIHFPPDYPFKPPKVAFRTKVYHPNINSNGSICLDILKEQWSPALTVSKVLLSICSLLTDPNPDDPLVPEIAHIYKTDRVKYESTAQSWTQKYAMG

SEQ ID NO: 28391 - protein, 119 aa, Arabidopsis thaliana
  peptide (1)..(119): Ceres Seq. ID no. 12394401
  misc_feature (1)..(119): Homolog of NCBI NO: 18408001 NR Description: E2, ubiquitin-conjugating enzyme, putative
  misc_feature (1)..(119): Homolog of NCBI NO: 456568 NR Description: ubiquitin conjugating enzyme
  misc_feature (1)..(119): Homolog of NCBI NO: 5762457 NR Description: ubiquitin-conjugating enzyme UBC2
  misc_feature (1)..(119): Homolog of NCBI NO: 18423829 NR Description: E2, ubiquitin-conjugating enzyme, putative
MFQWQATIMGPADSPFAGGVFLVTIHFPPDYPFKPPKVAFRTKVYHPNINSNGSICLDILKEQWSPALTVSKVLLSICSLLTDPNPDDPLVPEIAHIYKTDRVKYESTAQSWTQKYAMG

SEQ ID NO: 28392 - protein, 116 aa, Arabidopsis thaliana
  peptide (1)..(116): Ceres Seq. ID no. 12394402
NNPLRFPKIIKSKTLETEQKLAEARTIQWRRKELTKSLGTCKEILLCPAVQVLREMICSNGKQLSWVQQIARLPEVCFLLPFTSHQITLSSHQRLPSGPRFITQTSTVMEVSVLTF

SEQ ID NO: 28393 - DNA, 964 bp, Arabidopsis thaliana; identical to SEQ ID NO: 22782
  misc_feature (1)..(964): Ceres Seq. ID no. 13509136
  misc_feature: MA Experiment ID: 108434 Result: Up-regulated in Transcription
  misc_feature: MA Experiment 108434 PARAMETER Experiment Name: At_Root_Tips_cDNA_P Parameter: Tissue Value: Root Tips
  misc_feature: MA Experiment ID: 108462 Result: Down-regulated in Transcription
  misc_feature: MA Experiment 108462 PARAMETER Experiment Name: At_Germinating_Seeds_cDNA_P Parameter: Age (day) Value: 2 vs. 0
  misc_feature: MA Experiment 108462 PARAMETER Experiment Name: At_Germinating_Seeds_cDNA_P Parameter: Tissue Value: Germinating Seeds
  misc_feature: MA Experiment ID: 108463 Result: Down-regulated in Transcription
  misc_feature: MA Experiment 108463 PARAMETER Experiment Name: At_Germinating_Seeds_cDNA_P Parameter: Age (day) Value: 3 vs. 0
  misc_feature: MA Experiment 108463 PARAMETER Experiment Name: At_Germinating_Seeds_cDNA_P Parameter: Tissue Value: Germinating Seeds
  misc_feature: MA Experiment ID: 108464 Result: Down-regulated in Transcription
  misc_feature: MA Experiment 108464 PARAMETER Experiment Name: At_Germinating_Seeds_cDNA_P Parameter: Age (day) Value: 4 vs. 0
  misc_feature: MA Experiment 108464 PARAMETER Experiment Name: At_Germinating_Seeds_cDNA_P Parameter: Tissue Value: Germinating Seeds
  misc_feature: MA Experiment ID: 108488 Result: Up-regulated in Transcription
  misc_feature: MA Experiment ID: 20000113 Result: Up-regulated in Transcription
  misc_feature: MA Experiment 20000113 PARAMETER Experiment Name: At_42deg_Heat_cDNA_P Parameter: Temperature (deg C) Value: 42 vs. 22
  misc_feature: MA Experiment 20000113 PARAMETER Experiment Name: At_42deg_Heat_cDNA_P Parameter: Timepoint (hr) Value: 8
  misc_feature: MA Experiment 20000113 PARAMETER Experiment Name: At_42deg_Heat_cDNA_P Parameter: Tissue Value: Aerial

SEQ ID NO: 28394 - protein, 233 aa, Arabidopsis thaliana; identical to SEQ ID NO: 22783
  peptide (1)..(233): Ceres Seq. ID no. 13509137
  misc_feature (126)..(233): Pfam Name: Ribosomal protein L6e Pfam Description: Ribosomal protein L6e
  misc_feature (126)..(233): Pfam Name: Ribosomal protein L6e Pfam Description: Ribosomal protein L6e
  misc_feature (4)..(61): Homolog of NCBI NO: 18088374 NR Description: Similar to ribosomal protein L6 [Homo sapiens]
  misc_feature (58)..(233): Homolog of NCBI NO: 18088374 NR Description: Similar to ribosomal protein L6 [Homo sapiens]
  misc_feature (49)..(233): Homolog of NCBI NO: 6012952 NR Description: 60S ribosomal protein L6 (YL 16 like) [Cyanophora
  misc_feature (16)..(233): Homolog of NCBI NO: 38344818 NR Description: OSJNBb0022F23.11 [Oryza sativa (japonica
  misc_feature (1)..(233): Homolog of NCBI NO: 7208784 NR Description: 60S ribosomal protein L6 [Cicer arietinum]
  misc_feature (4)..(61): Homolog of NCBI NO: 18088374 NR Description: Similar to ribosomal protein L6 [Homo sapiens]
  misc_feature (49)..(233): Homolog of NCBI NO: 6012952 NR Description: 60S ribosomal protein L6 (YL 16 like) [Cyanophora
  misc_feature (1)..(233): Homolog of NCBI NO: 7208784 NR Description: 60S ribosomal protein L6 [Cicer arietinum]
  misc_feature (1)..(233): Homolog of NCBI NO: 15221126 NR Description: 60S ribosomal protein L6 (RPL6C) [Arabidopsis
  misc_feature (1)..(233): Homolog of NCBI NO: 15221127 NR Description: 60S ribosomal protein L6 (RPL6B) [Arabidopsis
  misc_feature (1)..(233): Homolog of NCBI NO: 15221798 NR Description: 60S ribosomal protein L6 (RPL6A) [Arabidopsis
  misc_feature (1)..(233): Homolog of NCBI NO: 21593910 NR Description: 60S ribosomal protein L6, putative [Arabidopsis
  misc_feature (3)..(233): Homolog of NCBI NO: 464621 NR Description: 60S RIBOSOMAL PROTEIN L6 (YL16-LIKE)
  misc_feature (16)..(233): Homolog of NCBI NO: 38344818 NR Description: OSJNBb0022F23.11 [Oryza sativa (japonica
  misc_feature (58)..(233): Homolog of NCBI NO: 18088374 NR Description: Similar to ribosomal protein L6 [Homo sapiens]
  misc_feature (3)..(233): Homolog of NCBI NO: 464621 NR Description: 60S RIBOSOMAL PROTEIN L6 (YL16-LIKE)
  misc_feature (1)..(233): Homolog of NCBI NO: 21593910 NR Description: 60S ribosomal protein L6, putative [Arabidopsis
  misc_feature (1)..(233): Homolog of NCBI NO: 15221798 NR Description: 60S ribosomal protein L6 (RPL6A) [Arabidopsis
  misc_feature (1)..(233): Homolog of NCBI NO: 15221127 NR Description: 60S ribosomal protein L6 (RPL6B) [Arabidopsis
  misc_feature (1)..(233): Homolog of NCBI NO: 15221126 NR Description: 60S ribosomal protein L6 (RPL6C) [Arabidopsis

SEQ ID NO: 28395 - protein, 206 aa, Arabidopsis thaliana; identical to SEQ ID NO: 22784
  peptide (1)..(206): Ceres Seq. ID no. 13509138
  misc_feature (99)..(206): Pfam Name: Ribosomal protein L6e Pfam Description: Ribosomal protein L6e
  misc_feature (99)..(206): Pfam Name: Ribosomal protein L6e Pfam Description: Ribosomal protein L6e
  misc_feature (1)..(34): Homolog of NCBI NO: 18088374 NR Description: Similar to ribosomal protein L6 [Homo sapiens]
  misc_feature (31)..(206): Homolog of NCBI NO: 18088374 NR Description: Similar to ribosomal protein L6 [Homo sapiens]
  misc_feature (22)..(206): Homolog of NCBI NO: 6012952 NR Description: 60S ribosomal protein L6 (YL 16 like) [Cyanophora
  misc_feature (1)..(206): Homolog of NCBI NO: 38344818 NR Description: OSJNBb0022F23.11 [Oryza sativa (japonica
  misc_feature (1)..(206): Homolog of NCBI NO: 7208784 NR Description: 60S ribosomal protein L6 [Cicer arietinum]
  misc_feature (1)..(34): Homolog of NCBI NO: 18088374 NR Description: Similar to ribosomal protein L6 [Homo sapiens]
  misc_feature (22)..(206): Homolog of NCBI NO: 6012952 NR Description: 60S ribosomal protein L6 (YL 16 like) [Cyanophora
  misc_feature (1)..(206): Homolog of NCBI NO: 7208784 NR Description: 60S ribosomal protein L6 [Cicer arietinum]
  misc_feature (1)..(206): Homolog of NCBI NO: 15221126 NR Description: 60S ribosomal protein L6 (RPL6C) [Arabidopsis
  misc_feature (1)..(206): Homolog of NCBI NO: 15221127 NR Description: 60S ribosomal protein L6 (RPL6B) [Arabidopsis
  misc_feature (1)..(206): Homolog of NCBI NO: 15221798 NR Description: 60S ribosomal protein L6 (RPL6A) [Arabidopsis
  misc_feature (1)..(206): Homolog of NCBI NO: 21593910 NR Description: 60S ribosomal protein L6, putative [Arabidopsis
  misc_feature (1)..(206): Homolog of NCBI NO: 464621 NR Description: 60S RIBOSOMAL PROTEIN L6 (YL16-LIKE)
  misc_feature (1)..(206): Homolog of NCBI NO: 38344818 NR Description: OSJNBb0022F23.11 [Oryza sativa (japonica
  misc_feature (31)..(206): Homolog of NCBI NO: 18088374 NR Description: Similar to ribosomal protein L6 [Homo sapiens]
  misc_feature (1)..(206): Homolog of NCBI NO: 464621 NR Description: 60S RIBOSOMAL PROTEIN L6 (YL16-LIKE)
  misc_feature (1)..(206): Homolog of NCBI NO: 21593910 NR Description: 60S ribosomal protein L6, putative [Arabidopsis
  misc_feature (1)..(206): Homolog of NCBI NO: 15221798 NR Description: 60S ribosomal protein L6 (RPL6A) [Arabidopsis
  misc_feature (1)..(206): Homolog of NCBI NO: 15221127 NR Description: 60S ribosomal protein L6 (RPL6B) [Arabidopsis
  misc_feature (1)..(206): Homolog of NCBI NO: 15221126 NR Description: 60S ribosomal protein L6 (RPL6C) [Arabidopsis

SEQ ID NO: 28396 - DNA, 971 bp, Arabidopsis thaliana
  misc_feature (1)..(971): Ceres Seq. ID no. 12332975
  misc_feature: MA Experiment ID: 108462 Result: Down-regulated in Transcription
  misc_feature: MA Experiment 108462 PARAMETER Experiment Name: At_Germinating_Seeds_cDNA_P Parameter: Age (day) Value: 2 vs. 0
  misc_feature: MA Experiment 108462 PARAMETER Experiment Name: At_Germinating_Seeds_cDNA_P Parameter: Tissue Value: Germinating Seeds
  misc_feature: MA Experiment ID: 108463 Result: Down-regulated in Transcription
  misc_feature: MA Experiment 108463 PARAMETER Experiment Name: At_Germinating_Seeds_cDNA_P Parameter: Age (day) Value: 3 vs. 0
  misc_feature: MA Experiment 108463 PARAMETER Experiment Name: At_Germinating_Seeds_cDNA_P Parameter: Tissue Value: Germinating Seeds
  misc_feature: MA Experiment ID: 108501 Result: Down-regulated in Transcription
  misc_feature: MA Experiment 108501 PARAMETER Experiment Name: At_ap2_floral_buds_cDNA_P Parameter: Plant Line Value: ap2 (Ler.)
  misc_feature: MA Experiment 108501 PARAMETER Experiment Name: At_ap2_floral_buds_cDNA_P Parameter: Tissue Value: Closed Flower
  misc_feature: MA Experiment ID: 108585 Result: Down-regulated in Transcription
  misc_feature: MA Experiment 108585 PARAMETER Experiment Name: At_5mM_NaNP_cDNA_P Parameter: Timepoint (hr) Value: 6
  misc_feature: MA Experiment 108585 PARAMETER Experiment Name: At_5mM_NaNP_cDNA_P Parameter: Tissue Value: Aerial
  misc_feature: MA Experiment 108585 PARAMETER Experiment Name: At_5mM_NaNP_cDNA_P Parameter: Treatment Value: null
  misc_feature: MA Experiment ID: 20000173 Result: Down-regulated in Transcription
  misc_feature: MA Experiment 20000173 PARAMETER Experiment Name: At_42deg_Heat_P Parameter: Age (day) Value: 14
  misc_feature: MA Experiment 20000173 PARAMETER Experiment Name: At_42deg_Heat_P Parameter: Organism Value: A. thaliana
  misc_feature: MA Experiment 20000173 PARAMETER Experiment Name: At_42deg_Heat_P Parameter: Plant Line Value: WS
  misc_feature: MA Experiment 20000173 PARAMETER Experiment Name: At_42deg_Heat_P Parameter: Temperature (deg C) Value: 42 vs. 22
  misc_feature: MA Experiment 20000173 PARAMETER Experiment Name: At_42deg_Heat_P Parameter: Timepoint (hr) Value: 6
  misc_feature: MA Experiment 20000173 PARAMETER Experiment Name: At_42deg_Heat_P Parameter: Tissue Value: Aerial
  misc_feature: MA Experiment ID: 20000184 Result: Down-regulated in Transcription
  misc_feature: MA Experiment 20000184 PARAMETER Experiment Name: At_Shoots__P Parameter: Age (day) Value: 7
  misc_feature: MA Experiment 20000184 PARAMETER Experiment Name: At_Shoots__P Parameter: Tissue Value: Shoots vs. Whole Plant
  misc_feature: MA Experiment ID: 20000185 Result: Down-regulated in Transcription
  misc_feature: MA Experiment 20000185 PARAMETER Experiment Name: At_Roots__P Parameter: Age (day) Value: 7 vs. 21
  misc_feature: MA Experiment 20000185 PARAMETER Experiment Name: At_Roots__P Parameter: Organism Value: A. thaliana
  misc_feature: MA Experiment 20000185 PARAMETER Experiment Name: At_Roots__P Parameter: Tissue Value: Roots vs. Whole Plant
  misc_feature: MA Experiment ID: 20000234 Result: Down-regulated in Transcription
  misc_feature: MA Experiment 20000234 PARAMETER Experiment Name: At_Siliques_P Parameter: Age (day) Value: 21
  misc_feature: MA Experiment 20000234 PARAMETER Experiment Name: At_Siliques_P Parameter: Organism Value: A. thaliana
  misc_feature: MA Experiment 20000234 PARAMETER Experiment Name: At_Siliques_P Parameter: Plant Line Value: WS
  misc_feature: MA Experiment 20000234 PARAMETER Experiment Name: At_Siliques_P Parameter: Tissue Value: Less Than 5mm Siliques vs. Whole Plant
  misc_feature: MA Experiment ID: 20000235 Result: Down-regulated in Transcription
  misc_feature: MA Experiment 20000235 PARAMETER Experiment Name: At_Siliques_P Parameter: Age (day) Value: 21
  misc_feature: MA Experiment 20000235 PARAMETER Experiment Name: At_Siliques_P Parameter: Organism Value: A. thaliana
  misc_feature: MA Experiment 20000235 PARAMETER Experiment Name: At_Siliques_P Parameter: Plant Line Value: WS
  misc_feature: MA Experiment 20000235 PARAMETER Experiment Name: At_Siliques_P Parameter: Tissue Value: 5-10mm Siliques vs. Whole Plant
  misc_feature: MA Experiment ID: 20000265 Result: Up-regulated in Transcription
  misc_feature: MA Experiment 20000265 PARAMETER Experiment Name: At_Open_Flower_P Parameter: Age (day) Value: 21
  misc_feature: MA Experiment 20000265 PARAMETER Experiment Name: At_Open_Flower_P Parameter: Plant Line Value: WS
  misc_feature: MA Experiment 20000265 PARAMETER Experiment Name: At_Open_Flower_P Parameter: Tissue Value: Closed Flower vs. Whole Plant
  misc_feature: MA Experiment ID: 20000439 Result: Down-regulated in Transcription
  misc_feature: MA Experiment 20000439 PARAMETER Experiment Name: At_Roots__P Parameter: Age (day) Value: 14 vs. 21
  misc_feature: MA Experiment 20000439 PARAMETER Experiment Name: At_Roots__P Parameter: Organism Value: A. thaliana
  misc_feature: MA Experiment 20000439 PARAMETER Experiment Name: At_Roots__P Parameter: Tissue Value: Roots vs. Whole Plant
  misc_feature: MA Experiment ID: 20001247 Result: Down-regulated in Transcription
  misc_feature: MA Experiment 20001247 PARAMETER Experiment Name: At_Far-red-induction_P Parameter: Age (day) Value: 7
  misc_feature: MA Experiment 20001247 PARAMETER Experiment Name: At_Far-red-induction_P Parameter: Light Value: Far-red vs. White
  misc_feature: MA Experiment 20001247 PARAMETER Experiment Name: At_Far-red-induction_P Parameter: Organism Value: A. thaliana
  misc_feature: MA Experiment 20001247 PARAMETER Experiment Name: At_Far-red-induction_P Parameter: Plant Line Value: Columbia
  misc_feature: MA Experiment 20001247 PARAMETER Experiment Name: At_Far-red-induction_P Parameter: Timepoint (hr) Value: 1
  misc_feature: MA Experiment 20001247 PARAMETER Experiment Name: At_Far-red-induction_P Parameter: Tissue Value: Whole Plant
  misc_feature: MA Experiment ID: 20001556 Result: Up-regulated in Transcription
  misc_feature: MA Experiment 20001556 PARAMETER Experiment Name: At_Drought_Soil_Dry_P Parameter: Age (day) Value: 26
  misc_feature: MA Experiment 20001556 PARAMETER Experiment Name: At_Drought_Soil_Dry_P Parameter: Organism Value: A. thaliana
  misc_feature: MA Experiment 20001556 PARAMETER Experiment Name: At_Drought_Soil_Dry_P Parameter: Plant Line Value: WS
  misc_feature: MA Experiment 20001556 PARAMETER Experiment Name: At_Drought_Soil_Dry_P Parameter: Post Timepoint (hr) Value: None
  misc_feature: MA Experiment 20001556 PARAMETER Experiment Name: At_Drought_Soil_Dry_P Parameter: Post-Treatment Value: None
  misc_feature: MA Experiment 20001556 PARAMETER Experiment Name: At_Drought_Soil_Dry_P Parameter: Timepoint (day) Value: 12
  misc_feature: MA Experiment 20001556 PARAMETER Experiment Name: At_Drought_Soil_Dry_P Parameter: Treatment Value: Drought vs. No Drought
  misc_feature: MA Experiment ID: 20001910 Result: Down-regulated in Transcription
  misc_feature: MA Experiment 20001910 PARAMETER Experiment Name: At_Drought_Reproduction_P Parameter: Age (day) Value: 37
  misc_feature: MA Experiment 20001910 PARAMETER Experiment Name: At_Drought_Reproduction_P Parameter: Organism Value: A. thaliana
  misc_feature: MA Experiment 20001910 PARAMETER Experiment Name: At_Drought_Reproduction_P Parameter: Plant Line Value: WS
  misc_feature: MA Experiment 20001910 PARAMETER Experiment Name: At_Drought_Reproduction_P Parameter: Timepoint (day) Value: 7
  misc_feature: MA Experiment 20001910 PARAMETER Experiment Name: At_Drought_Reproduction_P Parameter: Tissue Value: Flowers
  misc_feature: MA Experiment 20001910 PARAMETER Experiment Name: At_Drought_Reproduction_P Parameter: Treatment Value: Drought vs. No Drought
aattcaaaattatataaaatgggaagcagcagcgacgagacgccagtggttctcatcacaggatgttctcagggaggaatcggtcacgcgttggcgcgtgagttctcggctaatggttgtcgtgtggtggcgacgagtcgatcgcagaagacgatgactgaattggagaaagattccaagttctttgtgcaagagctcgatgttcagtctgagcagagcgtgagtaaagttgtgtcgaaagttatcgacaaatttggtcagattgatgttttggttaataacgccggagttcagtgtatcggacctttggcggagattccaatttcagccatggattacaccttcaacaccaatgtgctcggttccatgaggatgactcaagctgttgtacctcacatggcgtctaagaaaaagggaaagattgtgaacataggaagtattagcataatggcaccaggaccatgggctggggtttatactgcatcaaaagctgctcttcatgctcttaccgacactttaaggttggagcttaagccatttgggattgatgtaatcaacattgtaccaggaggtattcaatcaaacatagctaactcagggatatcgagtttcaacaatttacctgaattgaaactatacaaaccgttcgaggacgctatccgtgagagagcgtttctgtcgcaaaacataaagccgatacccacagagacttttgcgaaagagactgtttccgtggtgctgaagaaaaacccaccggcttggtactctacaggtaggttatctacagtcatggcgatcatgcaccatataccgattttcatgaaagattttctgttgactaagagttttatgaaaaagggagtaaaacctgaatagttgtgttcttggttagaaactgttttaaatgtatccaacaaagtaaatgtgttgcctaaccatgttacatctttagtaaaaggattaatcaaggt

SEQ ID NO: 28397 - protein, 291 aa, Arabidopsis thaliana
  peptide (1)..(291): Ceres Seq. ID no. 12332976
  misc_feature (15)..(283): Homolog of NCBI NO: 28868436 NR Description: oxidoreductase, short chain
  misc_feature (15)..(283): Homolog of NCBI NO: 23058177 NR Description: hypothetical protein [Pseudomonas fluorescens
  misc_feature (52)..(285): Homolog of NCBI NO: 38567881 NR Description: OSJNBa0036B21.7 [Oryza sativa (japonica
  misc_feature (10)..(122): Homolog of NCBI NO: 11358313 NR Description: hypothetical protein T31P16.40 - Arabidopsis
  misc_feature (113)..(286): Homolog of NCBI NO: 11358313 NR Description: hypothetical protein T31P16.40 - Arabidopsis
  misc_feature (10)..(286): Homolog of NCBI NO: 26453106 NR Description: unknown protein [Arabidopsis thaliana]
  misc_feature (10)..(286): Homolog of NCBI NO: 30682984 NR Description: short-chain dehydrogenase/reductase family
  misc_feature (52)..(291): Homolog of NCBI NO: 26450169 NR Description: unknown protein [Arabidopsis thaliana]
  misc_feature (7)..(291): Homolog of NCBI NO: 10178182 NR Description: contains similarity to
  misc_feature (7)..(291): Homolog of NCBI NO: 18424923 NR Description: Expressed protein
NSKLYKMGSSSDETPVVLITGCSQGGIGHALAREFSANGCRVVATSRSQKTMTELEKDSKFFVQELDVQSEQSVSKVVSKVIDKFGQIDVLVNNAGVQCIGPLAEIPISAMDYTFNTNVLGSMRMTQAVVPHMASKKKGKIVNIGSISIMAPGPWAGVYTASKAALHALTDTLRLELKPFGIDVINIVPGGIQSNIANSGISSFNNLPELKLYKPFEDAIRERAFLSQNIKPIPTETFAKETVSVVLKKNPPAWYSTGRLSTVMAIMHHIPIFMKDFLLTKSFMKKGVKPE

SEQ ID NO: 28398 - protein, 285 aa, Arabidopsis thaliana
  peptide (1)..(285): Ceres Seq. ID no. 12332977
  misc_feature (9)..(277): Homolog of NCBI NO: 28868436 NR Description: oxidoreductase, short chain
  misc_feature (9)..(277): Homolog of NCBI NO: 23058177 NR Description: hypothetical protein [Pseudomonas fluorescens
  misc_feature (46)..(279): Homolog of NCBI NO: 38567881 NR Description: OSJNBa0036B21.7 [Oryza sativa (japonica
  misc_feature (4)..(116): Homolog of NCBI NO: 11358313 NR Description: hypothetical protein T31P16.40 - Arabidopsis
  misc_feature (107)..(280): Homolog of NCBI NO: 11358313 NR Description: hypothetical protein T31P16.40 - Arabidopsis
  misc_feature (4)..(280): Homolog of NCBI NO: 26453106 NR Description: unknown protein [Arabidopsis thaliana]
  misc_feature (4)..(280): Homolog of NCBI NO: 30682984 NR Description: short-chain dehydrogenase/reductase family
  misc_feature (46)..(285): Homolog of NCBI NO: 26450169 NR Description: unknown protein [Arabidopsis thaliana]
  misc_feature (1)..(285): Homolog of NCBI NO: 10178182 NR Description: contains similarity to
  misc_feature (1)..(285): Homolog of NCBI NO: 18424923 NR Description: Expressed protein
MGSSSDETPVVLITGCSQGGIGHALAREFSANGCRVVATSRSQKTMTELEKDSKFFVQELDVQSEQSVSKVVSKVIDKFGQIDVLVNNAGVQCIGPLAEIPISAMDYTFNTNVLGSMRMTQAVVPHMASKKKGKIVNIGSISIMAPGPWAGVYTASKAALHALTDTLRLELKPFGIDVINIVPGGIQSNIANSGISSFNNLPELKLYKPFEDAIRERAFLSQNIKPIPTETFAKETVSVVLKKNPPAWYSTGRLSTVMAIMHHIPIFMKDFLLTKSFMKKGVKPE

SEQ ID NO: 28399 - protein, 240 aa, Arabidopsis thaliana
  peptide (1)..(240): Ceres Seq. ID no. 12332978
  misc_feature (1)..(232): Homolog of NCBI NO: 28868436 NR Description: oxidoreductase, short chain
  misc_feature (1)..(232): Homolog of NCBI NO: 23058177 NR Description: hypothetical protein [Pseudomonas fluorescens
  misc_feature (1)..(234): Homolog of NCBI NO: 38567881 NR Description: OSJNBa0036B21.7 [Oryza sativa (japonica
  misc_feature (1)..(71): Homolog of NCBI NO: 11358313 NR Description: hypothetical protein T31P16.40 - Arabidopsis
  misc_feature (62)..(235): Homolog of NCBI NO: 11358313 NR Description: hypothetical protein T31P16.40 - Arabidopsis
  misc_feature (1)..(235): Homolog of NCBI NO: 26453106 NR Description: unknown protein [Arabidopsis thaliana]
  misc_feature (1)..(235): Homolog of NCBI NO: 30682984 NR Description: short-chain dehydrogenase/reductase family
  misc_feature (1)..(240): Homolog of NCBI NO: 26450169 NR Description: unknown protein [Arabidopsis thaliana]
  misc_feature (1)..(240): Homolog of NCBI NO: 10178182 NR Description: contains similarity to
  misc_feature (1)..(240): Homolog of NCBI NO: 18424923 NR Description: Expressed protein
MTELEKDSKFFVQELDVQSEQSVSKVVSKVIDKFGQIDVLVNNAGVQCIGPLAEIPISAMDYTFNTNVLGSMRMTQAVVPHMASKKKGKIVNIGSISIMAPGPWAGVYTASKAALHALTDTLRLELKPFGIDVINIVPGGIQSNIANSGISSFNNLPELKLYKPFEDAIRERAFLSQNIKPIPTETFAKETVSVVLKKNPPAWYSTGRLSTVMAIMHHIPIFMKDFLLTKSFMKKGVKPE

SEQ ID NO: 28400 - DNA, 908 bp, Arabidopsis thaliana
  misc_feature (1)..(908): Ceres Seq. ID no. 13491283
  misc_feature: MA Experiment ID: 108434 Result: Down-regulated in Transcription
  misc_feature: MA Experiment 108434 PARAMETER Experiment Name: At_Root_Tips_cDNA_P Parameter: Tissue Value: Root Tips
  misc_feature: MA Experiment ID: 108595 Result: Up-regulated in Transcription
  misc_feature: MA Experiment 108595 PARAMETER Experiment Name: At_Ler-pi_Ovule_cDNA_P Parameter: Plant Line Value: null
  misc_feature: MA Experiment ID: 20000185 Result: Down-regulated in Transcription
  misc_feature: MA Experiment 20000185 PARAMETER Experiment Name: At_Roots__P Parameter: Age (day) Value: 7 vs. 21
  misc_feature: MA Experiment 20000185 PARAMETER Experiment Name: At_Roots__P Parameter: Organism Value: A. thaliana
  misc_feature: MA Experiment 20000185 PARAMETER Experiment Name: At_Roots__P Parameter: Tissue Value: Roots vs. Whole Plant
  misc_feature: MA Experiment ID: 20000234 Result: Down-regulated in Transcription
  misc_feature: MA Experiment 20000234 PARAMETER Experiment Name: At_Siliques_P Parameter: Age (day) Value: 21
  misc_feature: MA Experiment 20000234 PARAMETER Experiment Name: At_Siliques_P Parameter: Organism Value: A. thaliana
  misc_feature: MA Experiment 20000234 PARAMETER Experiment Name: At_Siliques_P Parameter: Plant Line Value: WS
  misc_feature: MA Experiment 20000234 PARAMETER Experiment Name: At_Siliques_P Parameter: Tissue Value: Less Than 5mm Siliques vs. Whole Plant
  misc_feature: MA Experiment ID: 20000264 Result: Down-regulated in Transcription
  misc_feature: MA Experiment 20000264 PARAMETER Experiment Name: At_Open_Flower_P Parameter: Age (day) Value: 21
  misc_feature: MA Experiment 20000264 PARAMETER Experiment Name: At_Open_Flower_P Parameter: Plant Line Value: WS
  misc_feature: MA Experiment 20000264 PARAMETER Experiment Name: At_Open_Flower_P Parameter: Tissue Value: Open Flower vs. Whole Plant
  misc_feature: MA Experiment ID: 20000265 Result: Down-regulated in Transcription
  misc_feature: MA Experiment 20000265 PARAMETER Experiment Name: At_Open_Flower_P Parameter: Age (day) Value: 21
  misc_feature: MA Experiment 20000265 PARAMETER Experiment Name: At_Open_Flower_P Parameter: Plant Line Value: WS
  misc_feature: MA Experiment 20000265 PARAMETER Experiment Name: At_Open_Flower_P Parameter: Tissue Value: Closed Flower vs. Whole Plant
  misc_feature: MA Experiment ID: 20000286 Result: Down-regulated in Transcription
  misc_feature: MA Experiment 20000286 PARAMETER Experiment Name: At_Open_Flower_P Parameter: Age (day) Value: 21
  misc_feature: MA Experiment 20000286 PARAMETER Experiment Name: At_Open_Flower_P Parameter: Plant Line Value: WS
  misc_feature: MA Experiment 20000286 PARAMETER Experiment Name: At_Open_Flower_P Parameter: Tissue Value: Half Open vs. Whole Plant
  misc_feature: MA Experiment ID: 20000438 Result: Down-regulated in Transcription
  misc_feature: MA Experiment 20000438 PARAMETER Experiment Name: At_Shoots__P Parameter: Age (day) Value: 14
  misc_feature: MA Experiment 20000438 PARAMETER Experiment Name: At_Shoots__P Parameter: Tissue Value: Shoots vs. Whole Plant
  misc_feature: MA Experiment ID: 20000439 Result: Down-regulated in Transcription
  misc_feature: MA Experiment 20000439 PARAMETER Experiment Name: At_Roots__P Parameter: Age (day) Value: 14 vs. 21
  misc_feature: MA Experiment 20000439 PARAMETER Experiment Name: At_Roots__P Parameter: Organism Value: A. thaliana
  misc_feature: MA Experiment 20000439 PARAMETER Experiment Name: At_Roots__P Parameter: Tissue Value: Roots vs. Whole Plant
  misc_feature: MA Experiment ID: 20000794 Result: Down-regulated in Transcription
  misc_feature: MA Experiment 20000794 PARAMETER Experiment Name: At_Petals_P Parameter: Age (day) Value: 23-25 days
  misc_feature: MA Experiment 20000794 PARAMETER Experiment Name: At_Petals_P Parameter: Plant Line Value: WS
  misc_feature: MA Experiment 20000794 PARAMETER Experiment Name: At_Petals_P Parameter: Tissue Value: Petals vs. Whole plant
  misc_feature: MA Experiment ID: 20001556 Result: Down-regulated in Transcription
  misc_feature: MA Experiment 20001556 PARAMETER Experiment Name: At_Drought_Soil_Dry_P Parameter: Age (day) Value: 26
  misc_feature: MA Experiment 20001556 PARAMETER Experiment Name: At_Drought_Soil_Dry_P Parameter: Organism Value: A. thaliana
  misc_feature: MA Experiment 20001556 PARAMETER Experiment Name: At_Drought_Soil_Dry_P Parameter: Plant Line Value: WS
  misc_feature: MA Experiment 20001556 PARAMETER Experiment Name: At_Drought_Soil_Dry_P Parameter: Post Timepoint (hr) Value: None
  misc_feature: MA Experiment 20001556 PARAMETER Experiment Name: At_Drought_Soil_Dry_P Parameter: Post-Treatment Value: None
  misc_feature: MA Experiment 20001556 PARAMETER Experiment Name: At_Drought_Soil_Dry_P Parameter: Timepoint (day) Value: 12
  misc_feature: MA Experiment 20001556 PARAMETER Experiment Name: At_Drought_Soil_Dry_P Parameter: Treatment Value: Drought vs. No Drought
  misc_feature: MA Experiment ID: 20001773 Result: Up-regulated in Transcription
  misc_feature: MA Experiment 20001773 PARAMETER Experiment Name: At_Far-red-enriched-adult_P Parameter: Age (day) Value: 30
  misc_feature: MA Experiment 20001773 PARAMETER Experiment Name: At_Far-red-enriched-adult_P Parameter: Light Value: Far-red enriched vs. White
  misc_feature: MA Experiment 20001773 PARAMETER Experiment Name: At_Far-red-enriched-adult_P Parameter: Organism Value: A. thaliana
  misc_feature: MA Experiment 20001773 PARAMETER Experiment Name: At_Far-red-enriched-adult_P Parameter: Plant Line Value: Columbia
  misc_feature: MA Experiment 20001773 PARAMETER Experiment Name: At_Far-red-enriched-adult_P Parameter: Timepoint (hr) Value: 48
  misc_feature: MA Experiment 20001773 PARAMETER Experiment Name: At_Far-red-enriched-adult_P Parameter: Tissue Value: Aerial
  misc_feature: MA Experiment ID: 20001906 Result: Down-regulated in Transcription
  misc_feature: MA Experiment 20001906 PARAMETER Experiment Name: At_Drought_Reproduction_P Parameter: Age (day) Value: 35
  misc_feature: MA Experiment 20001906 PARAMETER Experiment Name: At_Drought_Reproduction_P Parameter: Organism Value: A. thaliana
  misc_feature: MA Experiment 20001906 PARAMETER Experiment Name: At_Drought_Reproduction_P Parameter: Plant Line Value: WS
  misc_feature: MA Experiment 20001906 PARAMETER Experiment Name: At_Drought_Reproduction_P Parameter: Timepoint (day) Value: 5
  misc_feature: MA Experiment 20001906 PARAMETER Experiment Name: At_Drought_Reproduction_P Parameter: Tissue Value: Siliques
  misc_feature: MA Experiment 20001906 PARAMETER Experiment Name: At_Drought_Reproduction_P Parameter: Treatment Value: Drought vs. No Drought
  misc_feature: MA Experiment ID: 20001908 Result: Down-regulated in Transcription
  misc_feature: MA Experiment 20001908 PARAMETER Experiment Name: At_Drought_Reproduction_P Parameter: Age (day) Value: 40
  misc_feature: MA Experiment 20001908 PARAMETER Experiment Name: At_Drought_Reproduction_P Parameter: Organism Value: A. thaliana
  misc_feature: MA Experiment 20001908 PARAMETER Experiment Name: At_Drought_Reproduction_P Parameter: Plant Line Value: WS
  misc_feature: MA Experiment 20001908 PARAMETER Experiment Name: At_Drought_Reproduction_P Parameter: Timepoint (day) Value: 10
  misc_feature: MA Experiment 20001908 PARAMETER Experiment Name: At_Drought_Reproduction_P Parameter: Tissue Value: Siliques
  misc_feature: MA Experiment 20001908 PARAMETER Experiment Name: At_Drought_Reproduction_P Parameter: Treatment Value: Drought vs. No Drought
atggtaacgtgtctttttcattaggcgagactagccaatctaagcaaacagagtcgtctttatatctaaacgaacattttgtgaaagaaagagagactaaggtgaatccatggcgtccaagattgtctcagccatagtatttgtgtttaacctcattgcctttggtttagccgttgctgctgaacaaagaagaagcactgcaagggttgtgcaggacactgaggtgcaatataactactgtgtgtatgactcggacagagctacagggtatggagttggagcctttttgttctcagtggctagtcaaatccttatcatgctcgttagccgttgcttctgttgtggaaagcctctcaagcctggcggttcacgcgctcttgccctcattctcttcattgttagctggatgttcttcttgatagcggagatatgtctattagctggatcggtagagaatgcataccacacaaagtacaggacaatgttcatggacaatcctcctgattgtcaaactctacgtaaaggcgtctttgcagcaggcgcctcattcgtcttcttcaacgccattgtctctcagttctactatttcttctatttctctgctgctgaggcctctctttcaccttactagaggttcttaaccaacaaataagttttattttttttctctctaaatgtgctatttgatatgctaatatcatattttgaggtgggttttctatgtacaactatgatgaaatgttacaactatgacaaaattatttgaaagtgatggtacacatgagatttgtagatttatttgtatggttattagatcgagttgaaatgttgttttaaaaagagtggatgtaatttgacgattttgtgacatatgacataatgctcttattcattgaataaggtttgag

SEQ ID NO: 28401 - protein, 173 aa, Arabidopsis thaliana; identical to SEQ ID NO: 22629
  peptide (1)..(173): Ceres Seq. ID no. 13491284
  misc_feature (1)..(169): Homolog of NCBI NO: 18391509 NR Description: expressed protein [Arabidopsis thaliana]
  misc_feature (6)..(169): Homolog of NCBI NO: 22748411 NR Description: hypothetical protein [Oryza sativa (japonica
  misc_feature (1)..(172): Homolog of NCBI NO: 38344206 NR Description: OSJNBa0064G10.22 [Oryza sativa (japonica
  misc_feature (1)..(159): Homolog of NCBI NO: 21554630 NR Description: unknown [Arabidopsis thaliana]
  misc_feature (1)..(159): Homolog of NCBI NO: 18407003 NR Description: expressed protein [Arabidopsis thaliana]
  misc_feature (1)..(173): Homolog of NCBI NO: 34394069 NR Description: unknown protein [Oryza sativa (japonica
  misc_feature (1)..(172): Homolog of NCBI NO: 18400781 NR Description: expressed protein [Arabidopsis thaliana]
  misc_feature (1)..(173): Homolog of NCBI NO: 18404242 NR Description: expressed protein [Arabidopsis thaliana]
  misc_feature (1)..(173): Homolog of NCBI NO: 38016521 NR Description: fiber protein Fb34 [Gossypium barbadense]
  misc_feature (1)..(173): Homolog of NCBI NO: 18416991 NR Description: expressed protein [Arabidopsis thaliana]

SEQ ID NO: 28402 - protein, 104 aa, Arabidopsis thaliana; identical to SEQ ID NO: 22630
  peptide (1)..(104): Ceres Seq. ID no. 13491285
  misc_feature (1)..(100): Homolog of NCBI NO: 18391509 NR Description: expressed protein [Arabidopsis thaliana]
  misc_feature (1)..(100): Homolog of NCBI NO: 22748411 NR Description: hypothetical protein [Oryza sativa (japonica
  misc_feature (1)..(103): Homolog of NCBI NO: 38344206 NR Description: OSJNBa0064G10.22 [Oryza sativa (japonica
  misc_feature (1)..(90): Homolog of NCBI NO: 21554630 NR Description: unknown [Arabidopsis thaliana]
  misc_feature (1)..(90): Homolog of NCBI NO: 18407003 NR Description: expressed protein [Arabidopsis thaliana]
  misc_feature (1)..(104): Homolog of NCBI NO: 34394069 NR Description: unknown protein [Oryza sativa (japonica
  misc_feature (1)..(103): Homolog of NCBI NO: 18400781 NR Description: expressed protein [Arabidopsis thaliana]
  misc_feature (1)..(104): Homolog of NCBI NO: 18404242 NR Description: expressed protein [Arabidopsis thaliana]
  misc_feature (1)..(104): Homolog of NCBI NO: 38016521 NR Description: fiber protein Fb34 [Gossypium barbadense]
  misc_feature (1)..(104): Homolog of NCBI NO: 18416991 NR Description: expressed protein [Arabidopsis thaliana]

SEQ ID NO: 28403 - DNA, 1701 bp, Arabidopsis thaliana
  misc_feature (1)..(1701): Ceres Seq. ID no. 13496299
  misc_feature: MA Experiment ID: 108434 Result: Up-regulated in Transcription
  misc_feature: MA Experiment 108434 PARAMETER Experiment Name: At_Root_Tips_cDNA_P Parameter: Tissue Value: Root Tips
  misc_feature: MA Experiment ID: 108435 Result: Up-regulated in Transcription
  misc_feature: MA Experiment 108435 PARAMETER Experiment Name: At_stm_Mutants_cDNA_P Parameter: Plant Line Value: wt Landsburg vs stm
  misc_feature: MA Experiment 108435 PARAMETER Experiment Name: At_stm_Mutants_cDNA_P Parameter: Tissue Value: Shoot Apical Meristem Region
  misc_feature: MA Experiment ID: 20000184 Result: Up-regulated in Transcription
  misc_feature: MA Experiment 20000184 PARAMETER Experiment Name: At_Shoots__P Parameter: Age (day) Value: 7
  misc_feature: MA Experiment 20000184 PARAMETER Experiment Name: At_Shoots__P Parameter: Tissue Value: Shoots vs. Whole Plant
  misc_feature: MA Experiment ID: 20000185 Result: Up-regulated in Transcription
  misc_feature: MA Experiment 20000185 PARAMETER Experiment Name: At_Roots__P Parameter: Age (day) Value: 7 vs. 21
  misc_feature: MA Experiment 20000185 PARAMETER Experiment Name: At_Roots__P Parameter: Organism Value: A. thaliana
  misc_feature: MA Experiment 20000185 PARAMETER Experiment Name: At_Roots__P Parameter: Tissue Value: Roots vs. Whole Plant
  misc_feature: MA Experiment ID: 20000234 Result: Up-regulated in Transcription
  misc_feature: MA Experiment 20000234 PARAMETER Experiment Name: At_Siliques_P Parameter: Age (day) Value: 21
  misc_feature: MA Experiment 20000234 PARAMETER Experiment Name: At_Siliques_P Parameter: Organism Value: A. thaliana
  misc_feature: MA Experiment 20000234 PARAMETER Experiment Name: At_Siliques_P Parameter: Plant Line Value: WS
  misc_feature: MA Experiment 20000234 PARAMETER Experiment Name: At_Siliques_P Parameter: Tissue Value: Less Than 5mm Siliques vs. Whole Plant
  misc_feature: MA Experiment ID: 20000235 Result: Up-regulated in Transcription
  misc_feature: MA Experiment 20000235 PARAMETER Experiment Name: At_Siliques_P Parameter: Age (day) Value: 21
  misc_feature: MA Experiment 20000235 PARAMETER Experiment Name: At_Siliques_P Parameter: Organism Value: A. thaliana
  misc_feature: MA Experiment 20000235 PARAMETER Experiment Name: At_Siliques_P Parameter: Plant Line Value: WS
  misc_feature: MA Experiment 20000235 PARAMETER Experiment Name: At_Siliques_P Parameter: Tissue Value: 5-10mm Siliques vs. Whole Plant
  misc_feature: MA Experiment ID: 20000264 Result: Up-regulated in Transcription
  misc_feature: MA Experiment 20000264 PARAMETER Experiment Name: At_Open_Flower_P Parameter: Age (day) Value: 21
  misc_feature: MA Experiment 20000264 PARAMETER Experiment Name: At_Open_Flower_P Parameter: Plant Line Value: WS
  misc_feature: MA Experiment 20000264 PARAMETER Experiment Name: At_Open_Flower_P Parameter: Tissue Value: Open Flower vs. Whole Plant
  misc_feature: MA Experiment ID: 20000265 Result: Up-regulated in Transcription
  misc_feature: MA Experiment 20000265 PARAMETER Experiment Name: At_Open_Flower_P Parameter: Age (day) Value: 21
  misc_feature: MA Experiment 20000265 PARAMETER Experiment Name: At_Open_Flower_P Parameter: Plant Line Value: WS
  misc_feature: MA Experiment 20000265 PARAMETER Experiment Name: At_Open_Flower_P Parameter: Tissue Value: Closed Flower vs. Whole Plant
  misc_feature: MA Experiment ID: 20000286 Result: Up-regulated in Transcription
  misc_feature: MA Experiment 20000286 PARAMETER Experiment Name: At_Open_Flower_P Parameter: Age (day) Value: 21
  misc_feature: MA Experiment 20000286 PARAMETER Experiment Name: At_Open_Flower_P Parameter: Plant Line Value: WS
  misc_feature: MA Experiment 20000286 PARAMETER Experiment Name: At_Open_Flower_P Parameter: Tissue Value: Half Open vs. Whole Plant
  misc_feature: MA Experiment ID: 20000439 Result: Up-regulated in Transcription
  misc_feature: MA Experiment 20000439 PARAMETER Experiment Name: At_Roots__P Parameter: Age (day) Value: 14 vs. 21
  misc_feature: MA Experiment 20000439 PARAMETER Experiment Name: At_Roots__P Parameter: Organism Value: A. thaliana
  misc_feature: MA Experiment 20000439 PARAMETER Experiment Name: At_Roots__P Parameter: Tissue Value: Roots vs. Whole Plant
  misc_feature: MA Experiment ID: 20000495 Result: Up-regulated in Transcription
  misc_feature: MA Experiment 20000495 PARAMETER Experiment Name: At_Guard_Cells_P Parameter: Harvest Date Value: 8/2/2002
  misc_feature: MA Experiment 20000495 PARAMETER Experiment Name: At_Guard_Cells_P Parameter: Organism Value: A. thaliana
  misc_feature: MA Experiment 20000495 PARAMETER Experiment Name: At_Guard_Cells_P Parameter: Tissue Value: Guard Cells vs. Leaves
gcgaacattttggattcttcacgtttgtttatattttgggttggctctacacctactctcagaagtcataagccaagcaaagggggttttagggtttttgaccgcgagccagatctctttcttttgtttctcccacttccgaatcaatggccttctcttctctcctcagatctgccgcctcctacacggttgccgctcctcgccctgactttttctcgtcgccggcgtctgatcattctaaggtgttgtcaagtcttggatttagtcgcaacctgaagccatcaagattttcttctgggatatcttcatctctacaaaatggcaatgcaagaagtgtgcaacccatcaaggccacggctacagaagtgccatctgcagttcgaaggtcaagtagcagtggaaagacaaaggttgggatcaacggttttggtcggattggaaggttggtcctccgcattgcaacatcaagggatgatattgaggttgtagcagtgaatgacccattcattgatgccaagtacatggcttacatgttgaagtatgattctactcatggaaatttcaagggaagcatcaatgtcattgatgattctactttggagatcaatgggaagaaggtcaatgttgtcagcaagagagatccatctgagatcccatgggctgatcttggagctgattatgttgttgagtcttccggtgtattcaccaccctgtcaaaggctgcatcccatttgaagggcggtgccaagaaagttataatttctgccccttctgctgacgcacctatgtttgttgttggagtaaacgagcacacataccaaccaaacatggatatagtctccaatgcaagttgtaccaccaattgtcttgcccctcttgccaaggtggtgcatgaggaatttggtattcttgaaggcttgatgacaactgtccacgcaactacagctactcagaaaactgttgatgggccatcaatgaaggactggagaggaggtcggggcgctagtcaaaacatcattcctagctcaaccggcgccgcgaaggctgtaggtaaagttcttccagaactgaatgggaaacttacgggaatggccttccgtgtaccaacatcgaatgtttctgtggtggatttaacttgtcgacttgagaagggtgcctcttacgaagatgttaaggcagccattaagcatgcctcagaaggacctcttaaaggcattctcgggtacacagatgaagatgtcgtctccaatgatttcgtcggtgattcaaggtccagtatctttgacgccaatgctggtattggattgagcaagtcctttgtgaaacttgtctcttggtacgacaacgaatggggttacagcaaccgagttcttgaccttatagagcacatggctttggtagctgccagccactaaatacacacaccagttcttgcagaagcttgagtctttctgctttttgcgtaacctgctctacaaagccggtttggatttgttcggttcaattaggtgccactgtgctaggtgttttgaaatatttggcttgaatctcgagcctttactctatttttgttctgttccagtatcagcaaccatgatttggtccaaaagactgaaaaactgtgcgacttacatctatgaataaggggctaagctagttgtactttaccaaaaatagcttaccagtataagcaacgtttgg

SEQ ID NO: 28404 - protein, 422 aa, Arabidopsis thaliana
  peptide (1)..(422): Ceres Seq. ID no. 13496300
  misc_feature (237)..(398): Pfam Name: Glyceraldehyde 3-phosphate dehydrogenase, Pfam Description: Glyceraldehyde 3-phosphate dehydrogenase,
  misc_feature (67)..(422): Homolog of NCBI NO: 3059122 NR Description: glyeraldehyde-3-phosphate dehydrogenase [Marsilea
  misc_feature (60)..(420): Homolog of NCBI NO: 3059140 NR Description: NAD-dependent glyceraldehyde-3-phosphate
  misc_feature (1)..(420): Homolog of NCBI NO: 2129472 NR Description: glyceraldehyde-3-phosphate dehydrogenase
  misc_feature (1)..(420): Homolog of NCBI NO: 2129471 NR Description: glyceraldehyde-3-phosphate dehydrogenase
  misc_feature (1)..(421): Homolog of NCBI NO: 18072805 NR Description: glyceraldehyde-3-phosphate dehydrogenase
  misc_feature (1)..(421): Homolog of NCBI NO: 25284351 NR Description: hypothetical protein F3O9.10 - Arabidopsis
  misc_feature (1)..(421): Homolog of NCBI NO: 27754473 NR Description: putative glyceraldehyde-3-phosphate dehydrogenase
  misc_feature (1)..(421): Homolog of NCBI NO: 21618027 NR Description: putative glyceraldehyde-3-phosphate dehydrogenase
  misc_feature (1)..(421): Homolog of NCBI NO: 15219206 NR Description: glyceraldehyde-3-phosphate dehydrogenase -related
  misc_feature (1)..(422): Homolog of NCBI NO: 15219406 NR Description: glyceraldehyde-3-phosphate dehydrogenase -related
MAFSSLLRSAASYTVAAPRPDFFSSPASDHSKVLSSLGFSRNLKPSRFSSGISSSLQNGNARSVQPIKATATEVPSAVRRSSSSGKTKVGINGFGRIGRLVLRIATSRDDIEVVAVNDPFIDAKYMAYMLKYDSTHGNFKGSINVIDDSTLEINGKKVNVVSKRDPSEIPWADLGADYVVESSGVFTTLSKAASHLKGGAKKVIISAPSADAPMFVVGVNEHTYQPNMDIVSNASCTTNCLAPLAKVVHEEFGILEGLMTTVHATTATQKTVDGPSMKDWRGGRGASQNIIPSSTGAAKAVGKVLPELNGKLTGMAFRVPTSNVSVVDLTCRLEKGASYEDVKAAIKHASEGPLKGILGYTDEDVVSNDFVGDSRSSIFDANAGIGLSKSFVKLVSWYDNEWGYSNRVLDLIEHMALVAASH

SEQ ID NO: 28405 - protein, 297 aa, Arabidopsis thaliana
  peptide (1)..(297): Ceres Seq. ID no. 13496301
  misc_feature (112)..(273): Pfam Name: Glyceraldehyde 3-phosphate dehydrogenase, Pfam Description: Glyceraldehyde 3-phosphate dehydrogenase,
  misc_feature (1)..(297): Homolog of NCBI NO: 3059122 NR Description: glyeraldehyde-3-phosphate dehydrogenase [Marsilea
  misc_feature (1)..(295): Homolog of NCBI NO: 3059140 NR Description: NAD-dependent glyceraldehyde-3-phosphate
  misc_feature (1)..(295): Homolog of NCBI NO: 2129472 NR Description: glyceraldehyde-3-phosphate dehydrogenase
  misc_feature (1)..(295): Homolog of NCBI NO: 2129471 NR Description: glyceraldehyde-3-phosphate dehydrogenase
  misc_feature (1)..(296): Homolog of NCBI NO: 18072805 NR Description: glyceraldehyde-3-phosphate dehydrogenase
  misc_feature (1)..(296): Homolog of NCBI NO: 25284351 NR Description: hypothetical protein F3O9.10 - Arabidopsis
  misc_feature (1)..(296): Homolog of NCBI NO: 27754473 NR Description: putative glyceraldehyde-3-phosphate dehydrogenase
  misc_feature (1)..(296): Homolog of NCBI NO: 21618027 NR Description: putative glyceraldehyde-3-phosphate dehydrogenase
  misc_feature (1)..(296): Homolog of NCBI NO: 15219206 NR Description: glyceraldehyde-3-phosphate dehydrogenase -related
  misc_feature (1)..(297): Homolog of NCBI NO: 15219406 NR Description: glyceraldehyde-3-phosphate dehydrogenase -related
MAYMLKYDSTHGNFKGSINVIDDSTLEINGKKVNVVSKRDPSEIPWADLGADYVVESSGVFTTLSKAASHLKGGAKKVIISAPSADAPMFVVGVNEHTYQPNMDIVSNASCTTNCLAPLAKVVHEEFGILEGLMTTVHATTATQKTVDGPSMKDWRGGRGASQNIIPSSTGAAKAVGKVLPELNGKLTGMAFRVPTSNVSVVDLTCRLEKGASYEDVKAAIKHASEGPLKGILGYTDEDVVSNDFVGDSRSSIFDANAGIGLSKSFVKLVSWYDNEWGYSNRVLDLIEHMALVAASH

SEQ ID NO: 28406 - protein, 294 aa, Arabidopsis thaliana
  peptide (1)..(294): Ceres Seq. ID no. 13496302
  misc_feature (109)..(270): Pfam Name: Glyceraldehyde 3-phosphate dehydrogenase, Pfam Description: Glyceraldehyde 3-phosphate dehydrogenase,
  misc_feature (1)..(294): Homolog of NCBI NO: 3059122 NR Description: glyeraldehyde-3-phosphate dehydrogenase [Marsilea
  misc_feature (1)..(292): Homolog of NCBI NO: 3059140 NR Description: NAD-dependent glyceraldehyde-3-phosphate
  misc_feature (1)..(292): Homolog of NCBI NO: 2129472 NR Description: glyceraldehyde-3-phosphate dehydrogenase
  misc_feature (1)..(292): Homolog of NCBI NO: 2129471 NR Description: glyceraldehyde-3-phosphate dehydrogenase
  misc_feature (1)..(293): Homolog of NCBI NO: 18072805 NR Description: glyceraldehyde-3-phosphate dehydrogenase
  misc_feature (1)..(293): Homolog of NCBI NO: 25284351 NR Description: hypothetical protein F3O9.10 - Arabidopsis
  misc_feature (1)..(293): Homolog of NCBI NO: 27754473 NR Description: putative glyceraldehyde-3-phosphate dehydrogenase
  misc_feature (1)..(293): Homolog of NCBI NO: 21618027 NR Description: putative glyceraldehyde-3-phosphate dehydrogenase
  misc_feature (1)..(293): Homolog of NCBI NO: 15219206 NR Description: glyceraldehyde-3-phosphate dehydrogenase -related
  misc_feature (1)..(294): Homolog of NCBI NO: 15219406 NR Description: glyceraldehyde-3-phosphate dehydrogenase -related
MLKYDSTHGNFKGSINVIDDSTLEINGKKVNVVSKRDPSEIPWADLGADYVVESSGVFTTLSKAASHLKGGAKKVIISAPSADAPMFVVGVNEHTYQPNMDIVSNASCTTNCLAPLAKVVHEEFGILEGLMTTVHATTATQKTVDGPSMKDWRGGRGASQNIIPSSTGAAKAVGKVLPELNGKLTGMAFRVPTSNVSVVDLTCRLEKGASYEDVKAAIKHASEGPLKGILGYTDEDVVSNDFVGDSRSSIFDANAGIGLSKSFVKLVSWYDNEWGYSNRVLDLIEHMALVAASH

SEQ ID NO: 28407 - DNA, 1134 bp, Arabidopsis thaliana
  misc_feature (1)..(1134): Ceres Seq. ID no. 12370160
  misc_feature: MA Experiment ID: 108434 Result: Down-regulated in Transcription
  misc_feature: MA Experiment 108434 PARAMETER Experiment Name: At_Root_Tips_cDNA_P Parameter: Tissue Value: Root Tips
  misc_feature: MA Experiment ID: 108463 Result: Up-regulated in Transcription
  misc_feature: MA Experiment 108463 PARAMETER Experiment Name: At_Germinating_Seeds_cDNA_P Parameter: Age (day) Value: 3 vs. 0
  misc_feature: MA Experiment 108463 PARAMETER Experiment Name: At_Germinating_Seeds_cDNA_P Parameter: Tissue Value: Germinating Seeds
  misc_feature: MA Experiment ID: 108489 Result: Up-regulated in Transcription
  misc_feature: MA Experiment ID: 108594 Result: Down-regulated in Transcription
  misc_feature: MA Experiment 108594 PARAMETER Experiment Name: At_Ler-rhl_Root_cDNA_P Parameter: Plant Line Value: null
  misc_feature: MA Experiment ID: 20000439 Result: Up-regulated in Transcription
  misc_feature: MA Experiment 20000439 PARAMETER Experiment Name: At_Roots__P Parameter: Age (day) Value: 14 vs. 21
  misc_feature: MA Experiment 20000439 PARAMETER Experiment Name: At_Roots__P Parameter: Organism Value: A. thaliana
  misc_feature: MA Experiment 20000439 PARAMETER Experiment Name: At_Roots__P Parameter: Tissue Value: Roots vs. Whole Plant
  misc_feature: MA Experiment ID: 20000451 Result: Up-regulated in Transcription
  misc_feature: MA Experiment 20000451 PARAMETER Experiment Name: At_CS6879_Shoots-Roots_P Parameter: Age (day) Value: 14
  misc_feature: MA Experiment 20000451 PARAMETER Experiment Name: At_CS6879_Shoots-Roots_P Parameter: Organism Value: A. thaliana
  misc_feature: MA Experiment 20000451 PARAMETER Experiment Name: At_CS6879_Shoots-Roots_P Parameter: Plant Line Value: CS6879 vs. WS
  misc_feature: MA Experiment 20000451 PARAMETER Experiment Name: At_CS6879_Shoots-Roots_P Parameter: Tissue Value: Roots
  misc_feature: MA Experiment ID: 20000527 Result: Down-regulated in Transcription
  misc_feature: MA Experiment 20000527 PARAMETER Experiment Name: At_10percent_PEG_P Parameter: Age (day) Value: 20
  misc_feature: MA Experiment 20000527 PARAMETER Experiment Name: At_10percent_PEG_P Parameter: Organism Value: A. thaliana
  misc_feature: MA Experiment 20000527 PARAMETER Experiment Name: At_10percent_PEG_P Parameter: Plant Line Value: WS
  misc_feature: MA Experiment 20000527 PARAMETER Experiment Name: At_10percent_PEG_P Parameter: Timepoint (day) Value: 20
  misc_feature: MA Experiment 20000527 PARAMETER Experiment Name: At_10percent_PEG_P Parameter: Tissue Value: Whole Plant
  misc_feature: MA Experiment 20000527 PARAMETER Experiment Name: At_10percent_PEG_P Parameter: Treatment Value: 10percent PEG vs. No Treatment
atataggcatcgtttatatttttttgtctcataccagctgataaaacaaagtaagaagaagatgaagatgaacgtatgttttagtgtgattttgatgtttctaagcatcttcttcatcaatggtgctttgtcgaagcttgaaaggttgaaacatccggtgaagaagaaatctgatggctctctgagttttcttgttatcggagactggggacgcaaaggtgggtttaatcaatctctcgttgcacatcagatgggagttgtgggagagaaattagacatagattttgtgatatcagtaggagataatttctacgacgacggattaaaaggagtcaatgatccttcctttgaagcctctttctctcatatctacactcatcctagtctccaaaaacaatggtattcagttttgggtaaccatgattacagaggaaatgttgaagcacaactaagtaaagttctcacccaaaaagattggagatggttttgtcgcagatcttgtgtcttatcctcaggaatggtggattttttcttcgcggacacaaatccttttgtagaaaaatacttcactgaaccagaagatcacacttatgattggagaaatgtcttaccaagaaataaatacatctcaaacctcttacatgatttagatttagagattaaaaactcacgtgcgacatggaaatttgtcgtgggacatcacgggatcaaaaccgcaggagaataaagtggacttgtacataaatggacatgatcactgcttgcaacacattggttctcacggtaaaacccaatttcttacaagtggaggaggatcaaaggcatggagaggagatgttcagccatgggatccaaaagaactcaaactgtattacgatggacaaggtttcatgtctcttcacatcactcactccaaagctaaattcatctactatgatgtttccggcaatgttcttcaccgatcctcattgtccaaaagatctgctcatctttaaataacatttctaagaataaaatttgcacacaatttaatttaagtttttatttacaataaatttattgatgtatgattattgaacacaatggtcttgaataatatagagttttttcacgttctgaaaacgtggttccgtt

SEQ ID NO: 28408 - protein, 241 aa, Arabidopsis thaliana
  peptide (1)..(241): Ceres Seq. ID no. 12370161
  misc_feature (61)..(240): Pfam Name: Calcineurin-like phosphoesterase Pfam Description: Calcineurin-like phosphoesterase
  misc_feature (21)..(240): Homolog of NCBI NO: 26452681 NR Description: putative purple acid phosphatase [Arabidopsis
  misc_feature (21)..(240): Homolog of NCBI NO: 22325417 NR Description: putative purple acid phosphatase
  misc_feature (21)..(171): Homolog of NCBI NO: 25752252 NR Description: probable acid phosphatase (EC 3.1.3.2) At2g01880
YRHRLYFFVSYQLIKQSKKKMKMNVCFSVILMFLSIFFINGALSKLERLKHPVKKKSDGSLSFLVIGDWGRKGGFNQSLVAHQMGVVGEKLDIDFVISVGDNFYDDGLKGVNDPSFEASFSHIYTHPSLQKQWYSVLGNHDYRGNVEAQLSKVLTQKDWRWFCRRSCVLSSGMVDFFFADTNPFVEKYFTEPEDHTYDWRNVLPRNKYISNLLHDLDLEIKNSRATWKFVVGHHGIKTAGE

SEQ ID NO: 28409 - protein, 221 aa, Arabidopsis thaliana
  peptide (1)..(221): Ceres Seq. ID no. 12370162
  misc_feature (41)..(220): Pfam Name: Calcineurin-like phosphoesterase Pfam Description: Calcineurin-like phosphoesterase
  misc_feature (1)..(220): Homolog of NCBI NO: 26452681 NR Description: putative purple acid phosphatase [Arabidopsis
  misc_feature (1)..(220): Homolog of NCBI NO: 22325417 NR Description: putative purple acid phosphatase
  misc_feature (1)..(151): Homolog of NCBI NO: 25752252 NR Description: probable acid phosphatase (EC 3.1.3.2) At2g01880
MKMNVCFSVILMFLSIFFINGALSKLERLKHPVKKKSDGSLSFLVIGDWGRKGGFNQSLVAHQMGVVGEKLDIDFVISVGDNFYDDGLKGVNDPSFEASFSHIYTHPSLQKQWYSVLGNHDYRGNVEAQLSKVLTQKDWRWFCRRSCVLSSGMVDFFFADTNPFVEKYFTEPEDHTYDWRNVLPRNKYISNLLHDLDLEIKNSRATWKFVVGHHGIKTAGE

SEQ ID NO: 28410 - protein, 219 aa, Arabidopsis thaliana
  peptide (1)..(219): Ceres Seq. ID no. 12370163
  misc_feature (39)..(218): Pfam Name: Calcineurin-like phosphoesterase Pfam Description: Calcineurin-like phosphoesterase
  misc_feature (1)..(218): Homolog of NCBI NO: 26452681 NR Description: putative purple acid phosphatase [Arabidopsis
  misc_feature (1)..(218): Homolog of NCBI NO: 22325417 NR Description: putative purple acid phosphatase
  misc_feature (1)..(149): Homolog of NCBI NO: 25752252 NR Description: probable acid phosphatase (EC 3.1.3.2) At2g01880
MNVCFSVILMFLSIFFINGALSKLERLKHPVKKKSDGSLSFLVIGDWGRKGGFNQSLVAHQMGVVGEKLDIDFVISVGDNFYDDGLKGVNDPSFEASFSHIYTHPSLQKQWYSVLGNHDYRGNVEAQLSKVLTQKDWRWFCRRSCVLSSGMVDFFFADTNPFVEKYFTEPEDHTYDWRNVLPRNKYISNLLHDLDLEIKNSRATWKFVVGHHGIKTAGE

SEQ ID NO: 28411 - DNA, 741 bp, Arabidopsis thaliana
  misc_feature (1)..(741): Ceres Seq. ID no. 13497018
  misc_feature: MA Experiment ID: 108462 Result: Down-regulated in Transcription
  misc_feature: MA Experiment 108462 PARAMETER Experiment Name: At_Germinating_Seeds_cDNA_P Parameter: Age (day) Value: 2 vs. 0
  misc_feature: MA Experiment 108462 PARAMETER Experiment Name: At_Germinating_Seeds_cDNA_P Parameter: Tissue Value: Germinating Seeds
  misc_feature: MA Experiment ID: 108463 Result: Down-regulated in Transcription
  misc_feature: MA Experiment 108463 PARAMETER Experiment Name: At_Germinating_Seeds_cDNA_P Parameter: Age (day) Value: 3 vs. 0
  misc_feature: MA Experiment 108463 PARAMETER Experiment Name: At_Germinating_Seeds_cDNA_P Parameter: Tissue Value: Germinating Seeds
  misc_feature: MA Experiment ID: 108464 Result: Down-regulated in Transcription
  misc_feature: MA Experiment 108464 PARAMETER Experiment Name: At_Germinating_Seeds_cDNA_P Parameter: Age (day) Value: 4 vs. 0
  misc_feature: MA Experiment 108464 PARAMETER Experiment Name: At_Germinating_Seeds_cDNA_P Parameter: Tissue Value: Germinating Seeds
  misc_feature: MA Experiment ID: 20000315 Result: Down-regulated in Transcription
  misc_feature: MA Experiment 20000315 PARAMETER Experiment Name: At_14day_Shoots-Roots_Sub_P Parameter: Age (day) Value: 14
  misc_feature: MA Experiment 20000315 PARAMETER Experiment Name: At_14day_Shoots-Roots_Sub_P Parameter: Organism Value: A. thaliana
  misc_feature: MA Experiment 20000315 PARAMETER Experiment Name: At_14day_Shoots-Roots_Sub_P Parameter: Plant Line Value: WS
  misc_feature: MA Experiment 20000315 PARAMETER Experiment Name: At_14day_Shoots-Roots_Sub_P Parameter: Tissue Value: Shoots vs. Whole Plant
agagaatctgacgaagctcgaagggatttgagaaaaagaagagatgacgacgatacgtagattcagctgcaatgaccttctccgattcacttccgtgaatctggaccacctcactgaaacattcaatatgtccttctacatgacctatttagcgagatggcctgactattttcatgttgctgaaggtcccggcaatcgtgtcatgggttatattatgggtaaagttgaaggacagggtgaatcttggcatggtcatgtgacagccgtcactgtctctccagaataccgcaggcagcaacttgcaaagaaactgatgaaccttctggaagatataagtgataagattgataaagcctactttgtggatctttttgtaagagcttccaacacaccagccatcaagatgtatgaaaagcttggatacataatttataggcgggttttacgctattattcaggagaggaagatggattagatatgaggaaggcattatcaagaaatgtagagaaaaagtctgtgattcctctcaagagacctatcacacctgatgaattagagtatgattaagaccctaacttggttcacaattgttatctgcattaaaaatttctccaagagcctttagatgatgttactattcctgttgtttcgtatttgaactattatgtttcgttttcttccacacaaatttataattagttttgattaaactttaatctatatatacatttttggagggt

SEQ ID NO: 28412 - protein, 174 aa, Arabidopsis thaliana
  peptide (1)..(174): Ceres Seq. ID no. 13497019
  misc_feature (45)..(128): Pfam Name: Acetyltransferase (GNAT) family Pfam Description: Acetyltransferase (GNAT) family
  misc_feature (1)..(172): Homolog of NCBI NO: 38566006 NR Description: N-acetyltransferase 5 [Silurana tropicalis]
  misc_feature (1)..(172): Homolog of NCBI NO: 28278699 NR Description: Unknown (protein for MGC:53877) [Xenopus laevis]
  misc_feature (1)..(172): Homolog of NCBI NO: 7705823 NR Description: N-terminal acetyltransferase complex ard1subunit
  misc_feature (1)..(172): Homolog of NCBI NO: 19920354 NR Description: CG14222-PA [Drosophila melanogaster]
  misc_feature (1)..(174): Homolog of NCBI NO: 28273362 NR Description: silencing group B protein [Oryza sativa (japonica
  misc_feature (1)..(174): Homolog of NCBI NO: 14550118 NR Description: silencing group B protein [Zea mays]
  misc_feature (116)..(174): Homolog of NCBI NO: 25518612 NR Description: hypothetical protein F10O3.2 [imported] -
  misc_feature (1)..(124): Homolog of NCBI NO: 25518612 NR Description: hypothetical protein F10O3.2 [imported] -
  misc_feature (1)..(174): Homolog of NCBI NO: 18379062 NR Description: GCN5-related N-acetyltransferase (GNAT) family
  misc_feature (1)..(174): Homolog of NCBI NO: 14423552 NR Description: Unknown protein [Arabidopsis thaliana]
MTTIRRFSCNDLLRFTSVNLDHLTETFNMSFYMTYLARWPDYFHVAEGPGNRVMGYIMGKVEGQGESWHGHVTAVTVSPEYRRQQLAKKLMNLLEDISDKIDKAYFVDLFVRASNTPAIKMYEKLGYIIYRRVLRYYSGEEDGLDMRKALSRNVEKKSVIPLKRPITPDELEYD

SEQ ID NO: 28413 - protein, 146 aa, Arabidopsis thaliana
  peptide (1)..(146): Ceres Seq. ID no. 13497020
  misc_feature (17)..(100): Pfam Name: Acetyltransferase (GNAT) family Pfam Description: Acetyltransferase (GNAT) family
  misc_feature (1)..(144): Homolog of NCBI NO: 38566006 NR Description: N-acetyltransferase 5 [Silurana tropicalis]
  misc_feature (1)..(144): Homolog of NCBI NO: 28278699 NR Description: Unknown (protein for MGC:53877) [Xenopus laevis]
  misc_feature (1)..(144): Homolog of NCBI NO: 7705823 NR Description: N-terminal acetyltransferase complex ard1subunit
  misc_feature (1)..(144): Homolog of NCBI NO: 19920354 NR Description: CG14222-PA [Drosophila melanogaster]
  misc_feature (1)..(146): Homolog of NCBI NO: 28273362 NR Description: silencing group B protein [Oryza sativa (japonica
  misc_feature (1)..(146): Homolog of NCBI NO: 14550118 NR Description: silencing group B protein [Zea mays]
  misc_feature (88)..(146): Homolog of NCBI NO: 25518612 NR Description: hypothetical protein F10O3.2 [imported] -
  misc_feature (1)..(96): Homolog of NCBI NO: 25518612 NR Description: hypothetical protein F10O3.2 [imported] -
  misc_feature (1)..(146): Homolog of NCBI NO: 18379062 NR Description: GCN5-related N-acetyltransferase (GNAT) family
  misc_feature (1)..(146): Homolog of NCBI NO: 14423552 NR Description: Unknown protein [Arabidopsis thaliana]
MSFYMTYLARWPDYFHVAEGPGNRVMGYIMGKVEGQGESWHGHVTAVTVSPEYRRQQLAKKLMNLLEDISDKIDKAYFVDLFVRASNTPAIKMYEKLGYIIYRRVLRYYSGEEDGLDMRKALSRNVEKKSVIPLKRPITPDELEYD

SEQ ID NO: 28414 - protein, 142 aa, Arabidopsis thaliana
  peptide (1)..(142): Ceres Seq. ID no. 13497021
  misc_feature (13)..(96): Pfam Name: Acetyltransferase (GNAT) family Pfam Description: Acetyltransferase (GNAT) family
  misc_feature (1)..(140): Homolog of NCBI NO: 38566006 NR Description: N-acetyltransferase 5 [Silurana tropicalis]
  misc_feature (1)..(140): Homolog of NCBI NO: 28278699 NR Description: Unknown (protein for MGC:53877) [Xenopus laevis]
  misc_feature (1)..(140): Homolog of NCBI NO: 7705823 NR Description: N-terminal acetyltransferase complex ard1subunit
  misc_feature (1)..(140): Homolog of NCBI NO: 19920354 NR Description: CG14222-PA [Drosophila melanogaster]
  misc_feature (1)..(142): Homolog of NCBI NO: 28273362 NR Description: silencing group B protein [Oryza sativa (japonica
  misc_feature (1)..(142): Homolog of NCBI NO: 14550118 NR Description: silencing group B protein [Zea mays]
  misc_feature (84)..(142): Homolog of NCBI NO: 25518612 NR Description: hypothetical protein F10O3.2 [imported] -
  misc_feature (1)..(92): Homolog of NCBI NO: 25518612 NR Description: hypothetical protein F10O3.2 [imported] -
  misc_feature (1)..(142): Homolog of NCBI NO: 18379062 NR Description: GCN5-related N-acetyltransferase (GNAT) family
  misc_feature (1)..(142): Homolog of NCBI NO: 14423552 NR Description: Unknown protein [Arabidopsis thaliana]
MTYLARWPDYFHVAEGPGNRVMGYIMGKVEGQGESWHGHVTAVTVSPEYRRQQLAKKLMNLLEDISDKIDKAYFVDLFVRASNTPAIKMYEKLGYIIYRRVLRYYSGEEDGLDMRKALSRNVEKKSVIPLKRPITPDELEYD

SEQ ID NO: 28415 - DNA, 1195 bp, Arabidopsis thaliana
  misc_feature (1)..(1195): Ceres Seq. ID no. 13486843
  misc_feature: MA Experiment ID: 20000227 Result: Up-regulated in Transcription
  misc_feature: MA Experiment 20000227 PARAMETER Experiment Name: At_Root-Tips-vs-Tops_P Parameter: Tissue Value: Root Tips vs. Root Tops
  misc_feature: MA Experiment ID: 20000234 Result: Up-regulated in Transcription
  misc_feature: MA Experiment 20000234 PARAMETER Experiment Name: At_Siliques_P Parameter: Age (day) Value: 21
  misc_feature: MA Experiment 20000234 PARAMETER Experiment Name: At_Siliques_P Parameter: Organism Value: A. thaliana
  misc_feature: MA Experiment 20000234 PARAMETER Experiment Name: At_Siliques_P Parameter: Plant Line Value: WS
  misc_feature: MA Experiment 20000234 PARAMETER Experiment Name: At_Siliques_P Parameter: Tissue Value: Less Than 5mm Siliques vs. Whole Plant
  misc_feature: MA Experiment ID: 20001451 Result: Down-regulated in Transcription
  misc_feature: MA Experiment 20001451 PARAMETER Experiment Name: At_Far-red-induction_P Parameter: Age (day) Value: 7
  misc_feature: MA Experiment 20001451 PARAMETER Experiment Name: At_Far-red-induction_P Parameter: Light Value: Far-red vs. White
  misc_feature: MA Experiment 20001451 PARAMETER Experiment Name: At_Far-red-induction_P Parameter: Organism Value: A. thaliana
  misc_feature: MA Experiment 20001451 PARAMETER Experiment Name: At_Far-red-induction_P Parameter: Plant Line Value: Columbia
  misc_feature: MA Experiment 20001451 PARAMETER Experiment Name: At_Far-red-induction_P Parameter: Timepoint (hr) Value: 24
  misc_feature: MA Experiment 20001451 PARAMETER Experiment Name: At_Far-red-induction_P Parameter: Tissue Value: Whole Plant
  misc_feature: MA Experiment ID: 20001557 Result: Up-regulated in Transcription
  misc_feature: MA Experiment 20001557 PARAMETER Experiment Name: At_Drought_Soil_Dry_P Parameter: Age (day) Value: 27
  misc_feature: MA Experiment 20001557 PARAMETER Experiment Name: At_Drought_Soil_Dry_P Parameter: Organism Value: A. thaliana
  misc_feature: MA Experiment 20001557 PARAMETER Experiment Name: At_Drought_Soil_Dry_P Parameter: Plant Line Value: WS
  misc_feature: MA Experiment 20001557 PARAMETER Experiment Name: At_Drought_Soil_Dry_P Parameter: Post Timepoint (hr) Value: 3
  misc_feature: MA Experiment 20001557 PARAMETER Experiment Name: At_Drought_Soil_Dry_P Parameter: Post-Treatment Value: Re-Water vs. No Drought
  misc_feature: MA Experiment 20001557 PARAMETER Experiment Name: At_Drought_Soil_Dry_P Parameter: Timepoint (day) Value: 13
  misc_feature: MA Experiment 20001557 PARAMETER Experiment Name: At_Drought_Soil_Dry_P Parameter: Treatment Value: Drought vs. No Drought
  misc_feature: MA Experiment ID: 20001558 Result: Up-regulated in Transcription
  misc_feature: MA Experiment 20001558 PARAMETER Experiment Name: At_Drought_Soil_Dry_P Parameter: Age (day) Value: 27
  misc_feature: MA Experiment 20001558 PARAMETER Experiment Name: At_Drought_Soil_Dry_P Parameter: Organism Value: A. thaliana
  misc_feature: MA Experiment 20001558 PARAMETER Experiment Name: At_Drought_Soil_Dry_P Parameter: Plant Line Value: WS
  misc_feature: MA Experiment 20001558 PARAMETER Experiment Name: At_Drought_Soil_Dry_P Parameter: Post Timepoint (hr) Value: 6
  misc_feature: MA Experiment 20001558 PARAMETER Experiment Name: At_Drought_Soil_Dry_P Parameter: Post-Treatment Value: Re-Water vs. No Drought
  misc_feature: MA Experiment 20001558 PARAMETER Experiment Name: At_Drought_Soil_Dry_P Parameter: Timepoint (day) Value: 13
  misc_feature: MA Experiment 20001558 PARAMETER Experiment Name: At_Drought_Soil_Dry_P Parameter: Treatment Value: Drought vs. No Drought
  misc_feature: MA Experiment ID: 20001757 Result: Up-regulated in Transcription
  misc_feature: MA Experiment 20001757 PARAMETER Experiment Name: At_50mM_NH4NO3_L-to-H_P Parameter: Timepoint (hr) Value: 6
  misc_feature: MA Experiment 20001757 PARAMETER Experiment Name: At_50mM_NH4NO3_L-to-H_P Parameter: Tissue Value: Leaf
  misc_feature: MA Experiment 20001757 PARAMETER Experiment Name: At_50mM_NH4NO3_L-to-H_P Parameter: Treatment Value: 50mM NH4NO3 vs 100mM Mannitol
tgactgcaatttctctctttcgcttctaaaaaaaaacctaacaacctctcttctctcttcctcgttcaacaacaatggagttctggggagttgcggtgacaccaaaaaacgctactaaggtgactcctgaagaagacagccttgtccacatttctcaggcttcacttgactgcacagtgaaatctggagaatctgtggttttgagtgtgactgttggtggggctaaacttgttattggaacactttcacaagacaagttccctcagattagctttgatttggtttttgataaagagtttgagctttcacacagcggtaccaaagcaaatgttcatttcattggctacaaatcccccaacatcgagcaggatgacttcactagttcggatgatgaggatgttcctgaagctgttcctgctcctgcccctactgctgttactgccaacggaaatgctggagcagctgttgtcaaggctgacacaaagccaaaggccaaacctgccgaagtgaagcctgcagaagagaagcctgaatcagacgaggaagatgagtctgatgatgaagatgagtctgaagaggatgatgactctgagaaaggaatggatgttgatgaagatgactcagatgatgacgaggaggaggattctgaggatgaagaagaggaggagactcctaagaagcctgagccaatcaacaagaagaggccaaatgaatctgtatccaaaacacccgtctctggaaagaaggcaaaaccagcagcagcaccagcttctactcctcagaagacagaagagaagaagaaaggaggacacaccgccacaccacacccagctaagaagggtggaaagtctcctgtgaatgctaaccagagccccaagtctggaggtcaatcatccggtggtaacaacaacaagaagccattcaactcaggcaaacaatttggtggttccaacaacaagggttctaacaagggcaagggaaagggtagagcttaaggacgtggatcaaggagaggttttgggttttcgagtagatgatgaaaacacttggaagtgtggttttggatttttatcttattttattagtataacttgttatcggatgagctattttgagtatttgcaatttctactttcctatgtaattcagtatatgaatatttgctgaaatgagaaagaagactcgaattgcaaac

SEQ ID NO: 28416 - protein, 306 aa, Arabidopsis thaliana
  peptide (1)..(306): Ceres Seq. ID no. 13486844
  misc_feature (124)..(243): Pfam Name: AMP-binding enzyme Pfam Description: AMP-binding enzyme
  misc_feature (124)..(243): Pfam Name: AMP-binding enzyme Pfam Description: AMP-binding enzyme
  misc_feature (1)..(269): Homolog of NCBI NO: 7716950 NR Description: histone deacetylase 2 isoform c [Zea mays]
  misc_feature (1)..(285): Homolog of NCBI NO: 7716948 NR Description: histone deacetylase 2 isoform b [Zea mays]
  misc_feature (1)..(282): Homolog of NCBI NO: 7489751 NR Description: histone deacetylase (EC 3.5.1.-) HD2-p39,
  misc_feature (1)..(301): Homolog of NCBI NO: 7804960 NR Description: putative histone deacetylase HD2 [Oryza sativa]
  misc_feature (1)..(285): Homolog of NCBI NO: 7716948 NR Description: histone deacetylase 2 isoform b [Zea mays]
  misc_feature (1)..(301): Homolog of NCBI NO: 7804960 NR Description: putative histone deacetylase HD2 [Oryza sativa]
  misc_feature (1)..(306): Homolog of NCBI NO: 25352191 NR Description: probable histone deacetylase (EC 3.5.1.-)
  misc_feature (1)..(306): Homolog of NCBI NO: 30688577 NR Description: histone deacetylase-related protein [Arabidopsis
  misc_feature (95)..(306): Homolog of NCBI NO: 30688581 NR Description: histone deacetylase-related protein [Arabidopsis
  misc_feature (1)..(282): Homolog of NCBI NO: 7489751 NR Description: histone deacetylase (EC 3.5.1.-) HD2-p39,
  misc_feature (1)..(269): Homolog of NCBI NO: 7716950 NR Description: histone deacetylase 2 isoform c [Zea mays]
  misc_feature (95)..(306): Homolog of NCBI NO: 30688581 NR Description: histone deacetylase-related protein [Arabidopsis
  misc_feature (1)..(306): Homolog of NCBI NO: 25352191 NR Description: probable histone deacetylase (EC 3.5.1.-)
  misc_feature (1)..(306): Homolog of NCBI NO: 30688577 NR Description: histone deacetylase-related protein [Arabidopsis
MEFWGVAVTPKNATKVTPEEDSLVHISQASLDCTVKSGESVVLSVTVGGAKLVIGTLSQDKFPQISFDLVFDKEFELSHSGTKANVHFIGYKSPNIEQDDFTSSDDEDVPEAVPAPAPTAVTANGNAGAAVVKADTKPKAKPAEVKPAEEKPESDEEDESDDEDESEEDDDSEKGMDVDEDDSDDDEEEDSEDEEEEETPKKPEPINKKRPNESVSKTPVSGKKAKPAAAPASTPQKTEEKKKGGHTATPHPAKKGGKSPVNANQSPKSGGQSSGGNNNKKPFNSGKQFGGSNNKGSNKGKGKGRA

SEQ ID NO: 28417 - DNA, 731 bp, Arabidopsis thaliana
  misc_feature (1)..(731): Ceres Seq. ID no. 13490081
  misc_feature: MA Experiment ID: 108434 Result: Down-regulated in Transcription
  misc_feature: MA Experiment 108434 PARAMETER Experiment Name: At_Root_Tips_cDNA_P Parameter: Tissue Value: Root Tips
  misc_feature: MA Experiment ID: 108435 Result: Down-regulated in Transcription
  misc_feature: MA Experiment 108435 PARAMETER Experiment Name: At_stm_Mutants_cDNA_P Parameter: Plant Line Value: wt Landsburg vs stm
  misc_feature: MA Experiment 108435 PARAMETER Experiment Name: At_stm_Mutants_cDNA_P Parameter: Tissue Value: Shoot Apical Meristem Region
  misc_feature: MA Experiment ID: 108462 Result: Up-regulated in Transcription
  misc_feature: MA Experiment 108462 PARAMETER Experiment Name: At_Germinating_Seeds_cDNA_P Parameter: Age (day) Value: 2 vs. 0
  misc_feature: MA Experiment 108462 PARAMETER Experiment Name: At_Germinating_Seeds_cDNA_P Parameter: Tissue Value: Germinating Seeds
  misc_feature: MA Experiment ID: 108469 Result: Down-regulated in Transcription
  misc_feature: MA Experiment ID: 108489 Result: Down-regulated in Transcription
  misc_feature: MA Experiment ID: 108572 Result: Down-regulated in Transcription
  misc_feature: MA Experiment 108572 PARAMETER Experiment Name: At_Drought_cDNA_P Parameter: Timepoint (hr) Value: 1
  misc_feature: MA Experiment 108572 PARAMETER Experiment Name: At_Drought_cDNA_P Parameter: Tissue Value: Aerial
  misc_feature: MA Experiment 108572 PARAMETER Experiment Name: At_Drought_cDNA_P Parameter: Treatment Value: Drought vs. No Drought
  misc_feature: MA Experiment ID: 108573 Result: Down-regulated in Transcription
  misc_feature: MA Experiment 108573 PARAMETER Experiment Name: At_Drought_cDNA_P Parameter: Timepoint (hr) Value: 6
  misc_feature: MA Experiment 108573 PARAMETER Experiment Name: At_Drought_cDNA_P Parameter: Tissue Value: Aerial
  misc_feature: MA Experiment 108573 PARAMETER Experiment Name: At_Drought_cDNA_P Parameter: Treatment Value: Drought vs. No Drought
  misc_feature: MA Experiment ID: 108577 Result: Down-regulated in Transcription
  misc_feature: MA Experiment 108577 PARAMETER Experiment Name: At_42deg_Heat_cDNA_P Parameter: Temperature (deg C) Value: 42 vs. 22
  misc_feature: MA Experiment 108577 PARAMETER Experiment Name: At_42deg_Heat_cDNA_P Parameter: Timepoint (hr) Value: 6
  misc_feature: MA Experiment 108577 PARAMETER Experiment Name: At_42deg_Heat_cDNA_P Parameter: Tissue Value: Aerial
  misc_feature: MA Experiment ID: 108579 Result: Up-regulated in Transcription
  misc_feature: MA Experiment 108579 PARAMETER Experiment Name: At_4deg_Cold_cDNA_P Parameter: Temperature (deg C) Value: 4 vs. 22
  misc_feature: MA Experiment 108579 PARAMETER Experiment Name: At_4deg_Cold_cDNA_P Parameter: Timepoint (hr) Value: 6
  misc_feature: MA Experiment 108579 PARAMETER Experiment Name: At_4deg_Cold_cDNA_P Parameter: Tissue Value: Aerial
  misc_feature: MA Experiment ID: 108605 Result: Down-regulated in Transcription
  misc_feature: MA Experiment 108605 PARAMETER Experiment Name: At_100uM_ABA_cDNA_P Parameter: Timepoint (hr) Value: 6
  misc_feature: MA Experiment 108605 PARAMETER Experiment Name: At_100uM_ABA_cDNA_P Parameter: Tissue Value: Aerial
  misc_feature: MA Experiment 108605 PARAMETER Experiment Name: At_100uM_ABA_cDNA_P Parameter: Treatment Value: 100uM ABA vs. No Treatment
  misc_feature: MA Experiment ID: 108668 Result: Down-regulated in Transcription
  misc_feature: MA Experiment 108668 PARAMETER Experiment Name: At_2mM_SA_cDNA_P Parameter: Plant Line Value: WS
  misc_feature: MA Experiment 108668 PARAMETER Experiment Name: At_2mM_SA_cDNA_P Parameter: Timepoint (hr) Value: 6
  misc_feature: MA Experiment 108668 PARAMETER Experiment Name: At_2mM_SA_cDNA_P Parameter: Treatment Value: 2mM SA vs. No Treatment
  misc_feature: MA Experiment ID: 20000069 Result: Up-regulated in Transcription
  misc_feature: MA Experiment 20000069 PARAMETER Experiment Name: At_100uM_ABA_Mutants_cDNA_P Parameter: Plant Line Value: CS23
  misc_feature: MA Experiment 20000069 PARAMETER Experiment Name: At_100uM_ABA_Mutants_cDNA_P Parameter: Timepoint (hr) Value: 6
  misc_feature: MA Experiment 20000069 PARAMETER Experiment Name: At_100uM_ABA_Mutants_cDNA_P Parameter: Tissue Value: Aerial
  misc_feature: MA Experiment 20000069 PARAMETER Experiment Name: At_100uM_ABA_Mutants_cDNA_P Parameter: Treatment Value: 100uM ABA vs. No Treatment
  misc_feature: MA Experiment ID: 20000070 Result: Up-regulated in Transcription
  misc_feature: MA Experiment 20000070 PARAMETER Experiment Name: At_100uM_ABA_Mutants_cDNA_P Parameter: Plant Line Value: CS24
  misc_feature: MA Experiment 20000070 PARAMETER Experiment Name: At_100uM_ABA_Mutants_cDNA_P Parameter: Timepoint (hr) Value: 6
  misc_feature: MA Experiment 20000070 PARAMETER Experiment Name: At_100uM_ABA_Mutants_cDNA_P Parameter: Tissue Value: Aerial
  misc_feature: MA Experiment 20000070 PARAMETER Experiment Name: At_100uM_ABA_Mutants_cDNA_P Parameter: Treatment Value: 100uM ABA vs. No Treatment
  misc_feature: MA Experiment ID: 20000071 Result: Up-regulated in Transcription
  misc_feature: MA Experiment 20000071 PARAMETER Experiment Name: At_100uM_ABA_Mutants_cDNA_P Parameter: Plant Line Value: CS8104
  misc_feature: MA Experiment 20000071 PARAMETER Experiment Name: At_100uM_ABA_Mutants_cDNA_P Parameter: Timepoint (hr) Value: 6
  misc_feature: MA Experiment 20000071 PARAMETER Experiment Name: At_100uM_ABA_Mutants_cDNA_P Parameter: Tissue Value: Aerial
  misc_feature: MA Experiment 20000071 PARAMETER Experiment Name: At_100uM_ABA_Mutants_cDNA_P Parameter: Treatment Value: 100uM ABA vs. No Treatment
  misc_feature: MA Experiment ID: 20000072 Result: Up-regulated in Transcription
  misc_feature: MA Experiment 20000072 PARAMETER Experiment Name: At_100uM_ABA_Mutants_cDNA_P Parameter: Plant Line Value: CS8105
  misc_feature: MA Experiment 20000072 PARAMETER Experiment Name: At_100uM_ABA_Mutants_cDNA_P Parameter: Timepoint (hr) Value: 6
  misc_feature: MA Experiment 20000072 PARAMETER Experiment Name: At_100uM_ABA_Mutants_cDNA_P Parameter: Tissue Value: Aerial
  misc_feature: MA Experiment 20000072 PARAMETER Experiment Name: At_100uM_ABA_Mutants_cDNA_P Parameter: Treatment Value: 100uM ABA vs. No Treatment
  misc_feature: MA Experiment ID: 20000086 Result: Up-regulated in Transcription
  misc_feature: MA Experiment 20000086 PARAMETER Experiment Name: At_100uM_ABA_Mutants_cDNA_P Parameter: Plant Line Value: CS22
  misc_feature: MA Experiment 20000086 PARAMETER Experiment Name: At_100uM_ABA_Mutants_cDNA_P Parameter: Timepoint (hr) Value: 6
  misc_feature: MA Experiment 20000086 PARAMETER Experiment Name: At_100uM_ABA_Mutants_cDNA_P Parameter: Tissue Value: Aerial
  misc_feature: MA Experiment 20000086 PARAMETER Experiment Name: At_100uM_ABA_Mutants_cDNA_P Parameter: Treatment Value: 100uM ABA vs. No Treatment
  misc_feature: MA Experiment ID: 20000087 Result: Up-regulated in Transcription
  misc_feature: MA Experiment 20000087 PARAMETER Experiment Name: At_100uM_ABA_Mutants_cDNA_P Parameter: Plant Line Value: WS
  misc_feature: MA Experiment 20000087 PARAMETER Experiment Name: At_100uM_ABA_Mutants_cDNA_P Parameter: Timepoint (hr) Value: 6
  misc_feature: MA Experiment 20000087 PARAMETER Experiment Name: At_100uM_ABA_Mutants_cDNA_P Parameter: Tissue Value: Aerial
  misc_feature: MA Experiment 20000087 PARAMETER Experiment Name: At_100uM_ABA_Mutants_cDNA_P Parameter: Treatment Value: 100uM ABA vs. No Treatment
  misc_feature: MA Experiment ID: 20000089 Result: Up-regulated in Transcription
  misc_feature: MA Experiment ID: 20000090 Result: Up-regulated in Transcription
  misc_feature: MA Experiment ID: 20000111 Result: Down-regulated in Transcription
  misc_feature: MA Experiment 20000111 PARAMETER Experiment Name: At_42deg_Heat_cDNA_P Parameter: Temperature (deg C) Value: 42 vs. 22
  misc_feature: MA Experiment 20000111 PARAMETER Experiment Name: At_42deg_Heat_cDNA_P Parameter: Timepoint (hr) Value: 6
  misc_feature: MA Experiment 20000111 PARAMETER Experiment Name: At_42deg_Heat_cDNA_P Parameter: Tissue Value: Aerial
  misc_feature: MA Experiment ID: 20000112 Result: Down-regulated in Transcription
  misc_feature: MA Experiment 20000112 PARAMETER Experiment Name: At_42deg_Heat_cDNA_P Parameter: Temperature (deg C) Value: 42 vs. 22
  misc_feature: MA Experiment 20000112 PARAMETER Experiment Name: At_42deg_Heat_cDNA_P Parameter: Timepoint (hr) Value: 2
  misc_feature: MA Experiment 20000112 PARAMETER Experiment Name: At_42deg_Heat_cDNA_P Parameter: Tissue Value: Aerial
  misc_feature: MA Experiment ID: 20000113 Result: Down-regulated in Transcription
  misc_feature: MA Experiment 20000113 PARAMETER Experiment Name: At_42deg_Heat_cDNA_P Parameter: Temperature (deg C) Value: 42 vs. 22
  misc_feature: MA Experiment 20000113 PARAMETER Experiment Name: At_42deg_Heat_cDNA_P Parameter: Timepoint (hr) Value: 8
  misc_feature: MA Experiment 20000113 PARAMETER Experiment Name: At_42deg_Heat_cDNA_P Parameter: Tissue Value: Aerial
  misc_feature: MA Experiment ID: 20000117 Result: Up-regulated in Transcription
  misc_feature: MA Experiment 20000117 PARAMETER Experiment Name: At_100uM_ABA_Mutants_cDNA_P Parameter: Plant Line Value: Columbia
  misc_feature: MA Experiment 20000117 PARAMETER Experiment Name: At_100uM_ABA_Mutants_cDNA_P Parameter: Timepoint (hr) Value: 6
  misc_feature: MA Experiment 20000117 PARAMETER Experiment Name: At_100uM_ABA_Mutants_cDNA_P Parameter: Tissue Value: Aerial
  misc_feature: MA Experiment 20000117 PARAMETER Experiment Name: At_100uM_ABA_Mutants_cDNA_P Parameter: Treatment Value: 100uM ABA vs. No Treatment
  misc_feature: MA Experiment ID: 20000166 Result: Up-regulated in Transcription
  misc_feature: MA Experiment 20000166 PARAMETER Experiment Name: At_100uM_ABA_P Parameter: Age (day) Value: 14
  misc_feature: MA Experiment 20000166 PARAMETER Experiment Name: At_100uM_ABA_P Parameter: Organism Value: A. thaliana
  misc_feature: MA Experiment 20000166 PARAMETER Experiment Name: At_100uM_ABA_P Parameter: Plant Line Value: WS
  misc_feature: MA Experiment 20000166 PARAMETER Experiment Name: At_100uM_ABA_P Parameter: Timepoint (hr) Value: 1
  misc_feature: MA Experiment 20000166 PARAMETER Experiment Name: At_100uM_ABA_P Parameter: Tissue Value: Aerial
  misc_feature: MA Experiment 20000166 PARAMETER Experiment Name: At_100uM_ABA_P Parameter: Treatment Value: 100uM ABA vs. No Treatment
  misc_feature: MA Experiment ID: 20000173 Result: Down-regulated in Transcription
  misc_feature: MA Experiment 20000173 PARAMETER Experiment Name: At_42deg_Heat_P Parameter: Age (day) Value: 14
  misc_feature: MA Experiment 20000173 PARAMETER Experiment Name: At_42deg_Heat_P Parameter: Organism Value: A. thaliana
  misc_feature: MA Experiment 20000173 PARAMETER Experiment Name: At_42deg_Heat_P Parameter: Plant Line Value: WS
  misc_feature: MA Experiment 20000173 PARAMETER Experiment Name: At_42deg_Heat_P Parameter: Temperature (deg C) Value: 42 vs. 22
  misc_feature: MA Experiment 20000173 PARAMETER Experiment Name: At_42deg_Heat_P Parameter: Timepoint (hr) Value: 6
  misc_feature: MA Experiment 20000173 PARAMETER Experiment Name: At_42deg_Heat_P Parameter: Tissue Value: Aerial
  misc_feature: MA Experiment ID: 20000182 Result: Down-regulated in Transcription
  misc_feature: MA Experiment 20000182 PARAMETER Experiment Name: At_2mM_SA_P Parameter: Age (day) Value: 14
  misc_feature: MA Experiment 20000182 PARAMETER Experiment Name: At_2mM_SA_P Parameter: Organism Value: A. thaliana
  misc_feature: MA Experiment 20000182 PARAMETER Experiment Name: At_2mM_SA_P Parameter: Plant Line Value: WS
  misc_feature: MA Experiment 20000182 PARAMETER Experiment Name: At_2mM_SA_P Parameter: Timepoint (hr) Value: 6
  misc_feature: MA Experiment 20000182 PARAMETER Experiment Name: At_2mM_SA_P Parameter: Tissue Value: Aerial
  misc_feature: MA Experiment 20000182 PARAMETER Experiment Name: At_2mM_SA_P Parameter: Treatment Value: 2mM SA vs. No Treatment
  misc_feature: MA Experiment ID: 20000184 Result: Down-regulated in Transcription
  misc_feature: MA Experiment 20000184 PARAMETER Experiment Name: At_Shoots__P Parameter: Age (day) Value: 7
  misc_feature: MA Experiment 20000184 PARAMETER Experiment Name: At_Shoots__P Parameter: Tissue Value: Shoots vs. Whole Plant
  misc_feature: MA Experiment ID: 20000185 Result: Down-regulated in Transcription
  misc_feature: MA Experiment 20000185 PARAMETER Experiment Name: At_Roots__P Parameter: Age (day) Value: 7 vs. 21
  misc_feature: MA Experiment 20000185 PARAMETER Experiment Name: At_Roots__P Parameter: Organism Value: A. thaliana
  misc_feature: MA Experiment 20000185 PARAMETER Experiment Name: At_Roots__P Parameter: Tissue Value: Roots vs. Whole Plant
  misc_feature: MA Experiment ID: 20000224 Result: Up-regulated in Transcription
  misc_feature: MA Experiment ID: 20000234 Result: Up-regulated in Transcription
  misc_feature: MA Experiment 20000234 PARAMETER Experiment Name: At_Siliques_P Parameter: Age (day) Value: 21
  misc_feature: MA Experiment 20000234 PARAMETER Experiment Name: At_Siliques_P Parameter: Organism Value: A. thaliana
  misc_feature: MA Experiment 20000234 PARAMETER Experiment Name: At_Siliques_P Parameter: Plant Line Value: WS
  misc_feature: MA Experiment 20000234 PARAMETER Experiment Name: At_Siliques_P Parameter: Tissue Value: Less Than 5mm Siliques vs. Whole Plant
  misc_feature: MA Experiment ID: 20000235 Result: Up-regulated in Transcription
  misc_feature: MA Experiment 20000235 PARAMETER Experiment Name: At_Siliques_P Parameter: Age (day) Value: 21
  misc_feature: MA Experiment 20000235 PARAMETER Experiment Name: At_Siliques_P Parameter: Organism Value: A. thaliana
  misc_feature: MA Experiment 20000235 PARAMETER Experiment Name: At_Siliques_P Parameter: Plant Line Value: WS
  misc_feature: MA Experiment 20000235 PARAMETER Experiment Name: At_Siliques_P Parameter: Tissue Value: 5-10mm Siliques vs. Whole Plant
  misc_feature: MA Experiment ID: 20000308 Result: Up-regulated in Transcription
  misc_feature: MA Experiment 20000308 PARAMETER Experiment Name: At_100mM_NaCl__P Parameter: Age (day) Value: 17
  misc_feature: MA Experiment 20000308 PARAMETER Experiment Name: At_100mM_NaCl__P Parameter: Organism Value: A. thaliana
  misc_feature: MA Experiment 20000308 PARAMETER Experiment Name: At_100mM_NaCl__P Parameter: Plant Line Value: WS
  misc_feature: MA Experiment 20000308 PARAMETER Experiment Name: At_100mM_NaCl__P Parameter: Timepoint (hr) Value: 72
  misc_feature: MA Experiment 20000308 PARAMETER Experiment Name: At_100mM_NaCl__P Parameter: Tissue Value: Whole Plant
  misc_feature: MA Experiment 20000308 PARAMETER Experiment Name: At_100mM_NaCl__P Parameter: Treatment Value: 100mM NaCl vs. No Treatment
  misc_feature: MA Experiment ID: 20000437 Result: Up-regulated in Transcription
  misc_feature: MA Experiment 20000437 PARAMETER Experiment Name: At_Drought_P Parameter: Age (day) Value: 8
  misc_feature: MA Experiment 20000437 PARAMETER Experiment Name: At_Drought_P Parameter: Organism Value: A. thaliana
  misc_feature: MA Experiment 20000437 PARAMETER Experiment Name: At_Drought_P Parameter: Plant Line Value: WS
  misc_feature: MA Experiment 20000437 PARAMETER Experiment Name: At_Drought_P Parameter: Timepoint (hr) Value: 24
  misc_feature: MA Experiment 20000437 PARAMETER Experiment Name: At_Drought_P Parameter: Tissue Value: Whole Plant
  misc_feature: MA Experiment 20000437 PARAMETER Experiment Name: At_Drought_P Parameter: Treatment Value: Drought vs. No Drought
  misc_feature: MA Experiment ID: 20000438 Result: Down-regulated in Transcription
  misc_feature: MA Experiment 20000438 PARAMETER Experiment Name: At_Shoots__P Parameter: Age (day) Value: 14
  misc_feature: MA Experiment 20000438 PARAMETER Experiment Name: At_Shoots__P Parameter: Tissue Value: Shoots vs. Whole Plant
  misc_feature: MA Experiment ID: 20000439 Result: Down-regulated in Transcription
  misc_feature: MA Experiment 20000439 PARAMETER Experiment Name: At_Roots__P Parameter: Age (day) Value: 14 vs. 21
  misc_feature: MA Experiment 20000439 PARAMETER Experiment Name: At_Roots__P Parameter: Organism Value: A. thaliana
  misc_feature: MA Experiment 20000439 PARAMETER Experiment Name: At_Roots__P Parameter: Tissue Value: Roots vs. Whole Plant
  misc_feature: MA Experiment ID: 20000441 Result: Down-regulated in Transcription
  misc_feature: MA Experiment 20000441 PARAMETER Experiment Name: At_1uM_BR-BRZ__P Parameter: Tissue Value: Shoot Apices
  misc_feature: MA Experiment 20000441 PARAMETER Experiment Name: At_1uM_BR-BRZ__P Parameter: Treatment Value: 1uM BR vs. No Treatment
  misc_feature: MA Experiment ID: 20000443 Result: Down-regulated in Transcription
  misc_feature: MA Experiment 20000443 PARAMETER Experiment Name: At_1uM_BR-BRZ__P Parameter: Tissue Value: Shoot Apices
  misc_feature: MA Experiment 20000443 PARAMETER Experiment Name: At_1uM_BR-BRZ__P Parameter: Treatment Value: 1uM BRZ vs. No Treatment
  misc_feature: MA Experiment ID: 20000495 Result: Down-regulated in Transcription
  misc_feature: MA Experiment 20000495 PARAMETER Experiment Name: At_Guard_Cells_P Parameter: Harvest Date Value: 8/2/2002
  misc_feature: MA Experiment 20000495 PARAMETER Experiment Name: At_Guard_Cells_P Parameter: Organism Value: A. thaliana
  misc_feature: MA Experiment 20000495 PARAMETER Experiment Name: At_Guard_Cells_P Parameter: Tissue Value: Guard Cells vs. Leaves
  misc_feature: MA Experiment ID: 20000794 Result: Down-regulated in Transcription
  misc_feature: MA Experiment 20000794 PARAMETER Experiment Name: At_Petals_P Parameter: Age (day) Value: 23-25 days
  misc_feature: MA Experiment 20000794 PARAMETER Experiment Name: At_Petals_P Parameter: Plant Line Value: WS
  misc_feature: MA Experiment 20000794 PARAMETER Experiment Name: At_Petals_P Parameter: Tissue Value: Petals vs. Whole plant
  misc_feature: MA Experiment ID: 20001247 Result: Down-regulated in Transcription
  misc_feature: MA Experiment 20001247 PARAMETER Experiment Name: At_Far-red-induction_P Parameter: Age (day) Value: 7
  misc_feature: MA Experiment 20001247 PARAMETER Experiment Name: At_Far-red-induction_P Parameter: Light Value: Far-red vs. White
  misc_feature: MA Experiment 20001247 PARAMETER Experiment Name: At_Far-red-induction_P Parameter: Organism Value: A. thaliana
  misc_feature: MA Experiment 20001247 PARAMETER Experiment Name: At_Far-red-induction_P Parameter: Plant Line Value: Columbia
  misc_feature: MA Experiment 20001247 PARAMETER Experiment Name: At_Far-red-induction_P Parameter: Timepoint (hr) Value: 1
  misc_feature: MA Experiment 20001247 PARAMETER Experiment Name: At_Far-red-induction_P Parameter: Tissue Value: Whole Plant
  misc_feature: MA Experiment ID: 20001248 Result: Up-regulated in Transcription
  misc_feature: MA Experiment 20001248 PARAMETER Experiment Name: At_Far-red-induction_P Parameter: Age (day) Value: 7
  misc_feature: MA Experiment 20001248 PARAMETER Experiment Name: At_Far-red-induction_P Parameter: Light Value: Far-red vs. White
  misc_feature: MA Experiment 20001248 PARAMETER Experiment Name: At_Far-red-induction_P Parameter: Organism Value: A. thaliana
  misc_feature: MA Experiment 20001248 PARAMETER Experiment Name: At_Far-red-induction_P Parameter: Plant Line Value: Columbia
  misc_feature: MA Experiment 20001248 PARAMETER Experiment Name: At_Far-red-induction_P Parameter: Timepoint (hr) Value: 4
  misc_feature: MA Experiment 20001248 PARAMETER Experiment Name: At_Far-red-induction_P Parameter: Tissue Value: Whole Plant
  misc_feature: MA Experiment ID: 20001557 Result: Up-regulated in Transcription
  misc_feature: MA Experiment 20001557 PARAMETER Experiment Name: At_Drought_Soil_Dry_P Parameter: Age (day) Value: 27
  misc_feature: MA Experiment 20001557 PARAMETER Experiment Name: At_Drought_Soil_Dry_P Parameter: Organism Value: A. thaliana
  misc_feature: MA Experiment 20001557 PARAMETER Experiment Name: At_Drought_Soil_Dry_P Parameter: Plant Line Value: WS
  misc_feature: MA Experiment 20001557 PARAMETER Experiment Name: At_Drought_Soil_Dry_P Parameter: Post Timepoint (hr) Value: 3
  misc_feature: MA Experiment 20001557 PARAMETER Experiment Name: At_Drought_Soil_Dry_P Parameter: Post-Treatment Value: Re-Water vs. No Drought
  misc_feature: MA Experiment 20001557 PARAMETER Experiment Name: At_Drought_Soil_Dry_P Parameter: Timepoint (day) Value: 13
  misc_feature: MA Experiment 20001557 PARAMETER Experiment Name: At_Drought_Soil_Dry_P Parameter: Treatment Value: Drought vs. No Drought
  misc_feature: MA Experiment ID: 20001905 Result: Down-regulated in Transcription
  misc_feature: MA Experiment 20001905 PARAMETER Experiment Name: At_Drought_Reproduction_P Parameter: Age (day) Value: 40
  misc_feature: MA Experiment 20001905 PARAMETER Experiment Name: At_Drought_Reproduction_P Parameter: Organism Value: A. thaliana
  misc_feature: MA Experiment 20001905 PARAMETER Experiment Name: At_Drought_Reproduction_P Parameter: Plant Line Value: WS
  misc_feature: MA Experiment 20001905 PARAMETER Experiment Name: At_Drought_Reproduction_P Parameter: Timepoint (day) Value: 10
  misc_feature: MA Experiment 20001905 PARAMETER Experiment Name: At_Drought_Reproduction_P Parameter: Tissue Value: Rosettes
  misc_feature: MA Experiment 20001905 PARAMETER Experiment Name: At_Drought_Reproduction_P Parameter: Treatment Value: Drought vs. No Drought
atccaccgttaaaagcccctttatatcccaagaaataggtgaacttgttacagaacaagcaaagatcaaagagaaaaatatcccaaaaccaaaaacagaggaagaaagaagaagaaaagatgccttcaagcacattctccgggactgttagcacgccgaagctgtcggtggcagtggacatgggaaacccttttctcaatctcaccgttgatgccttcctcaagatcggagctgttggagtcactaaatctcttgcagaagacacttacaaggccatcgacaaagggagtctctccaagagcactttggagcatgcgcttaagaagttgtgtaaagaaggtgtttactggggagctgctggtggagtgtacattggaacagaatacggaatcgaacgtatccgtggcagcagagattggaaaaacgcaatgttagcaggcgcggcgacaggagcagtgctctcagcggttggtaagaaaggcaaagacactattgtgatcgatgccattcttggtggcgcgcttgcaaccgcttctcagttcgttaacaatcattatttctactgattctccatcttcctttagggaccaatttggttcatatggtgtggattcctttgtttactctttaaataataataaaaaacaatgtagtgtttttgaaatgaatacattcgagtattgttgacgttaaatatgcaatttagctattttcaatatgagaaatgcctc

SEQ ID NO: 28418 - protein, 148 aa, Arabidopsis thaliana
  peptide (1)..(148): Ceres Seq. ID no. 13490082
  misc_feature (18)..(146): Pfam Name: Tim17/Tim22/Tim23 family Pfam Description: Tim17/Tim22/Tim23 family
  misc_feature (55)..(144): Homolog of NCBI NO: 18414605 NR Description: pore protein homolog [Arabidopsis thaliana]
  misc_feature (37)..(146): Homolog of NCBI NO: 34905526 NR Description: B1146F03.20 [Oryza sativa (japonica
  misc_feature (44)..(143): Homolog of NCBI NO: 16555405 NR Description: stress-inducible membrane pore protein [Bromus
  misc_feature (20)..(144): Homolog of NCBI NO: 7485023 NR Description: hypothetical protein - Arabidopsis thaliana
  misc_feature (1)..(38): Homolog of NCBI NO: 34906056 NR Description: P0698H10.23 [Oryza sativa (japonica
  misc_feature (101)..(143): Homolog of NCBI NO: 34906056 NR Description: P0698H10.23 [Oryza sativa (japonica
  misc_feature (1)..(143): Homolog of NCBI NO: 3758827 NR Description: amino acid selective channel protein
  misc_feature (1)..(143): Homolog of NCBI NO: 7488792 NR Description: core protein - garden pea
  misc_feature (1)..(148): Homolog of NCBI NO: 21536521 NR Description: putative membrane channel protein [Arabidopsis
  misc_feature (1)..(148): Homolog of NCBI NO: 15226998 NR Description: membrane channel protein -related [Arabidopsis
MPSSTFSGTVSTPKLSVAVDMGNPFLNLTVDAFLKIGAVGVTKSLAEDTYKAIDKGSLSKSTLEHALKKLCKEGVYWGAAGGVYIGTEYGIERIRGSRDWKNAMLAGAATGAVLSAVGKKGKDTIVIDAILGGALATASQFVNNHYFY

SEQ ID NO: 28419 - protein, 128 aa, Arabidopsis thaliana
  peptide (1)..(128): Ceres Seq. ID no. 13490083
  misc_feature (1)..(126): Pfam Name: Tim17/Tim22/Tim23 family Pfam Description: Tim17/Tim22/Tim23 family
  misc_feature (35)..(124): Homolog of NCBI NO: 18414605 NR Description: pore protein homolog [Arabidopsis thaliana]
  misc_feature (17)..(126): Homolog of NCBI NO: 34905526 NR Description: B1146F03.20 [Oryza sativa (japonica
  misc_feature (24)..(123): Homolog of NCBI NO: 16555405 NR Description: stress-inducible membrane pore protein [Bromus
  misc_feature (1)..(124): Homolog of NCBI NO: 7485023 NR Description: hypothetical protein - Arabidopsis thaliana
  misc_feature (1)..(18): Homolog of NCBI NO: 34906056 NR Description: P0698H10.23 [Oryza sativa (japonica
  misc_feature (81)..(123): Homolog of NCBI NO: 34906056 NR Description: P0698H10.23 [Oryza sativa (japonica
  misc_feature (1)..(123): Homolog of NCBI NO: 3758827 NR Description: amino acid selective channel protein
  misc_feature (1)..(123): Homolog of NCBI NO: 7488792 NR Description: core protein - garden pea
  misc_feature (1)..(128): Homolog of NCBI NO: 21536521 NR Description: putative membrane channel protein [Arabidopsis
  misc_feature (1)..(128): Homolog of NCBI NO: 15226998 NR Description: membrane channel protein -related [Arabidopsis
MGNPFLNLTVDAFLKIGAVGVTKSLAEDTYKAIDKGSLSKSTLEHALKKLCKEGVYWGAAGGVYIGTEYGIERIRGSRDWKNAMLAGAATGAVLSAVGKKGKDTIVIDAILGGALATASQFVNNHYFY

SEQ ID NO: 28420 - protein, 74 aa, Arabidopsis thaliana
  peptide (1)..(74): Ceres Seq. ID no. 13490084
MPSSRSELLESLNLLQKTLTRPSTKGVSPRALWSMRLRSCVKKVFTGELLVECTLEQNTESNVSVAAEIGKTQC

SEQ ID NO: 28421 - DNA, 777 bp, Arabidopsis thaliana
  misc_feature (1)..(777): Ceres Seq. ID no. 12331800
  misc_feature: MA Experiment ID: 108434 Result: Up-regulated in Transcription
  misc_feature: MA Experiment 108434 PARAMETER Experiment Name: At_Root_Tips_cDNA_P Parameter: Tissue Value: Root Tips
  misc_feature: MA Experiment ID: 108579 Result: Down-regulated in Transcription
  misc_feature: MA Experiment 108579 PARAMETER Experiment Name: At_4deg_Cold_cDNA_P Parameter: Temperature (deg C) Value: 4 vs. 22
  misc_feature: MA Experiment 108579 PARAMETER Experiment Name: At_4deg_Cold_cDNA_P Parameter: Timepoint (hr) Value: 6
  misc_feature: MA Experiment 108579 PARAMETER Experiment Name: At_4deg_Cold_cDNA_P Parameter: Tissue Value: Aerial
  misc_feature: MA Experiment ID: 20000224 Result: Down-regulated in Transcription
  misc_feature: MA Experiment ID: 20000794 Result: Down-regulated in Transcription
  misc_feature: MA Experiment 20000794 PARAMETER Experiment Name: At_Petals_P Parameter: Age (day) Value: 23-25 days
  misc_feature: MA Experiment 20000794 PARAMETER Experiment Name: At_Petals_P Parameter: Plant Line Value: WS
  misc_feature: MA Experiment 20000794 PARAMETER Experiment Name: At_Petals_P Parameter: Tissue Value: Petals vs. Whole plant
atagatctgaatcagagaattggtaagtagtaagaaccctagctttagattcgtcagattctgattactcgaatcaaagcagggtttttgacactaaaaatccgatctcgtgaagtgtgttttgcatcgaatcggaaaatatgaaagaagggaaatcatcgaagtcgtcgagtcaacaagagcagcatgaacagatttatcatcaaaacagtcacttgggttctttcaacttcgccaaattgtttgattctgaagcttcctgggacaaggatcaactgggagatgtgttgcattggatcaggcaagtagttggtttactctgcggattgttgtggggtgcgatacctttggtaggaggcatatggcttcttctatttcttgcaatctcctctggcatagtatatggttactatgcattggttctaaagatcgatgaagaagacttcggtggtcacgcagctttgctccaggacggtctatttgcttctctaagtttattcctgcttgcgtggattctggtgtatagcttgtctagcttctgatagagacacagtatctcgcgcttgagctgctccgtgaagaagtttagcagaacgtacctttcatggtttctccaatttacgatgtgcccttcatgcttttgttttctgaagatgggaactagcattggtagattttcatttttctgatggaacttttggtttccttttgttcttgttaattactttgtgtaataaaaatgagtattattatgcaaggatacagtatgtgtttagt

SEQ ID NO: 28422 - protein, 133 aa, Arabidopsis thaliana
  peptide (1)..(133): Ceres Seq. ID no. 12331801
  misc_feature (31)..(129): Homolog of NCBI NO: 34872254 NR Description: similar to RIKEN cDNA 1110008F13 [Rattus
  misc_feature (12)..(129): Homolog of NCBI NO: 27704314 NR Description: similar to RIKEN cDNA 1110008F13
  misc_feature (12)..(129): Homolog of NCBI NO: 10047116 NR Description: putative Rab5-interacting protein [Homo sapiens]
  misc_feature (12)..(129): Homolog of NCBI NO: 13385630 NR Description: RIKEN cDNA 1110008F13 [Mus musculus]
  misc_feature (10)..(129): Homolog of NCBI NO: 27503935 NR Description: Similar to RIKEN cDNA 1110008F13 gene [Danio
  misc_feature (1)..(122): Homolog of NCBI NO: 14719336 NR Description: hypothetical protein [Oryza sativa]
  misc_feature (1)..(121): Homolog of NCBI NO: 8885547 NR Description: gb|AAF17201.1~gene_id:F2O15.9~similar to unknown
  misc_feature (1)..(133): Homolog of NCBI NO: 15238396 NR Description: putative Rab5-interacting protein - like; protein
  misc_feature (1)..(133): Homolog of NCBI NO: 18401926 NR Description: expressed protein
MKEGKSSKSSSQQEQHEQIYHQNSHLGSFNFAKLFDSEASWDKDQLGDVLHWIRQVVGLLCGLLWGAIPLVGGIWLLLFLAISSGIVYGYYALVLKIDEEDFGGHAALLQDGLFASLSLFLLAWILVYSLSSF

SEQ ID NO: 28423 - DNA, 1201 bp, Arabidopsis thaliana
  misc_feature (1)..(1201): Ceres Seq. ID no. 12680985
  misc_feature: MA Experiment ID: 108461 Result: Up-regulated in Transcription
  misc_feature: MA Experiment 108461 PARAMETER Experiment Name: At_Germinating_Seeds_cDNA_P Parameter: Age (day) Value: 1 vs. 0
  misc_feature: MA Experiment 108461 PARAMETER Experiment Name: At_Germinating_Seeds_cDNA_P Parameter: Tissue Value: Germinating Seeds
  misc_feature: MA Experiment ID: 108488 Result: Down-regulated in Transcription
  misc_feature: MA Experiment ID: 108573 Result: Up-regulated in Transcription
  misc_feature: MA Experiment 108573 PARAMETER Experiment Name: At_Drought_cDNA_P Parameter: Timepoint (hr) Value: 6
  misc_feature: MA Experiment 108573 PARAMETER Experiment Name: At_Drought_cDNA_P Parameter: Tissue Value: Aerial
  misc_feature: MA Experiment 108573 PARAMETER Experiment Name: At_Drought_cDNA_P Parameter: Treatment Value: Drought vs. No Drought
  misc_feature: MA Experiment ID: 108605 Result: Up-regulated in Transcription
  misc_feature: MA Experiment 108605 PARAMETER Experiment Name: At_100uM_ABA_cDNA_P Parameter: Timepoint (hr) Value: 6
  misc_feature: MA Experiment 108605 PARAMETER Experiment Name: At_100uM_ABA_cDNA_P Parameter: Tissue Value: Aerial
  misc_feature: MA Experiment 108605 PARAMETER Experiment Name: At_100uM_ABA_cDNA_P Parameter: Treatment Value: 100uM ABA vs. No Treatment
  misc_feature: MA Experiment ID: 108607 Result: Up-regulated in Transcription
  misc_feature: MA Experiment 108607 PARAMETER Experiment Name: At_100uM_ABA_cDNA_P Parameter: Timepoint (hr) Value: 4
  misc_feature: MA Experiment 108607 PARAMETER Experiment Name: At_100uM_ABA_cDNA_P Parameter: Tissue Value: Aerial
  misc_feature: MA Experiment 108607 PARAMETER Experiment Name: At_100uM_ABA_cDNA_P Parameter: Treatment Value: 100uM ABA vs. No Treatment
  misc_feature: MA Experiment ID: 20000071 Result: Up-regulated in Transcription
  misc_feature: MA Experiment 20000071 PARAMETER Experiment Name: At_100uM_ABA_Mutants_cDNA_P Parameter: Plant Line Value: CS8104
  misc_feature: MA Experiment 20000071 PARAMETER Experiment Name: At_100uM_ABA_Mutants_cDNA_P Parameter: Timepoint (hr) Value: 6
  misc_feature: MA Experiment 20000071 PARAMETER Experiment Name: At_100uM_ABA_Mutants_cDNA_P Parameter: Tissue Value: Aerial
  misc_feature: MA Experiment 20000071 PARAMETER Experiment Name: At_100uM_ABA_Mutants_cDNA_P Parameter: Treatment Value: 100uM ABA vs. No Treatment
  misc_feature: MA Experiment ID: 20000072 Result: Up-regulated in Transcription
  misc_feature: MA Experiment 20000072 PARAMETER Experiment Name: At_100uM_ABA_Mutants_cDNA_P Parameter: Plant Line Value: CS8105
  misc_feature: MA Experiment 20000072 PARAMETER Experiment Name: At_100uM_ABA_Mutants_cDNA_P Parameter: Timepoint (hr) Value: 6
  misc_feature: MA Experiment 20000072 PARAMETER Experiment Name: At_100uM_ABA_Mutants_cDNA_P Parameter: Tissue Value: Aerial
  misc_feature: MA Experiment 20000072 PARAMETER Experiment Name: At_100uM_ABA_Mutants_cDNA_P Parameter: Treatment Value: 100uM ABA vs. No Treatment
  misc_feature: MA Experiment ID: 20000117 Result: Up-regulated in Transcription
  misc_feature: MA Experiment 20000117 PARAMETER Experiment Name: At_100uM_ABA_Mutants_cDNA_P Parameter: Plant Line Value: Columbia
  misc_feature: MA Experiment 20000117 PARAMETER Experiment Name: At_100uM_ABA_Mutants_cDNA_P Parameter: Timepoint (hr) Value: 6
  misc_feature: MA Experiment 20000117 PARAMETER Experiment Name: At_100uM_ABA_Mutants_cDNA_P Parameter: Tissue Value: Aerial
  misc_feature: MA Experiment 20000117 PARAMETER Experiment Name: At_100uM_ABA_Mutants_cDNA_P Parameter: Treatment Value: 100uM ABA vs. No Treatment
  misc_feature: MA Experiment ID: 20000169 Result: Up-regulated in Transcription
  misc_feature: MA Experiment 20000169 PARAMETER Experiment Name: At_100uM_ABA_P Parameter: Age (day) Value: 14
  misc_feature: MA Experiment 20000169 PARAMETER Experiment Name: At_100uM_ABA_P Parameter: Organism Value: A. thaliana
  misc_feature: MA Experiment 20000169 PARAMETER Experiment Name: At_100uM_ABA_P Parameter: Plant Line Value: WS
  misc_feature: MA Experiment 20000169 PARAMETER Experiment Name: At_100uM_ABA_P Parameter: Timepoint (hr) Value: 6
  misc_feature: MA Experiment 20000169 PARAMETER Experiment Name: At_100uM_ABA_P Parameter: Tissue Value: Aerial
  misc_feature: MA Experiment 20000169 PARAMETER Experiment Name: At_100uM_ABA_P Parameter: Treatment Value: 100uM ABA vs. No Treatment
  misc_feature: MA Experiment ID: 20000180 Result: Up-regulated in Transcription
  misc_feature: MA Experiment 20000180 PARAMETER Experiment Name: At_Germinating_Seeds_P Parameter: Age (hr) Value: 24 vs. 0
  misc_feature: MA Experiment 20000180 PARAMETER Experiment Name: At_Germinating_Seeds_P Parameter: Tissue Value: Germinating Seeds
  misc_feature: MA Experiment ID: 20000267 Result: Up-regulated in Transcription
  misc_feature: MA Experiment 20000267 PARAMETER Experiment Name: At_Drought_P Parameter: Age (day) Value: 7
  misc_feature: MA Experiment 20000267 PARAMETER Experiment Name: At_Drought_P Parameter: Organism Value: A. thaliana
  misc_feature: MA Experiment 20000267 PARAMETER Experiment Name: At_Drought_P Parameter: Plant Line Value: WS
  misc_feature: MA Experiment 20000267 PARAMETER Experiment Name: At_Drought_P Parameter: Timepoint (hr) Value: 6
  misc_feature: MA Experiment 20000267 PARAMETER Experiment Name: At_Drought_P Parameter: Tissue Value: Whole Plant
  misc_feature: MA Experiment 20000267 PARAMETER Experiment Name: At_Drought_P Parameter: Treatment Value: Drought vs. No Drought
  misc_feature: MA Experiment ID: 20000436 Result: Up-regulated in Transcription
  misc_feature: MA Experiment 20000436 PARAMETER Experiment Name: At_Drought_P Parameter: Age (day) Value: 7
  misc_feature: MA Experiment 20000436 PARAMETER Experiment Name: At_Drought_P Parameter: Organism Value: A. thaliana
  misc_feature: MA Experiment 20000436 PARAMETER Experiment Name: At_Drought_P Parameter: Plant Line Value: WS
  misc_feature: MA Experiment 20000436 PARAMETER Experiment Name: At_Drought_P Parameter: Timepoint (hr) Value: 12
  misc_feature: MA Experiment 20000436 PARAMETER Experiment Name: At_Drought_P Parameter: Tissue Value: Whole Plant
  misc_feature: MA Experiment 20000436 PARAMETER Experiment Name: At_Drought_P Parameter: Treatment Value: Drought vs. No Drought
  misc_feature: MA Experiment ID: 20000437 Result: Up-regulated in Transcription
  misc_feature: MA Experiment 20000437 PARAMETER Experiment Name: At_Drought_P Parameter: Age (day) Value: 8
  misc_feature: MA Experiment 20000437 PARAMETER Experiment Name: At_Drought_P Parameter: Organism Value: A. thaliana
  misc_feature: MA Experiment 20000437 PARAMETER Experiment Name: At_Drought_P Parameter: Plant Line Value: WS
  misc_feature: MA Experiment 20000437 PARAMETER Experiment Name: At_Drought_P Parameter: Timepoint (hr) Value: 24
  misc_feature: MA Experiment 20000437 PARAMETER Experiment Name: At_Drought_P Parameter: Tissue Value: Whole Plant
  misc_feature: MA Experiment 20000437 PARAMETER Experiment Name: At_Drought_P Parameter: Treatment Value: Drought vs. No Drought
  misc_feature: MA Experiment ID: 20001558 Result: Down-regulated in Transcription
  misc_feature: MA Experiment 20001558 PARAMETER Experiment Name: At_Drought_Soil_Dry_P Parameter: Age (day) Value: 27
  misc_feature: MA Experiment 20001558 PARAMETER Experiment Name: At_Drought_Soil_Dry_P Parameter: Organism Value: A. thaliana
  misc_feature: MA Experiment 20001558 PARAMETER Experiment Name: At_Drought_Soil_Dry_P Parameter: Plant Line Value: WS
  misc_feature: MA Experiment 20001558 PARAMETER Experiment Name: At_Drought_Soil_Dry_P Parameter: Post Timepoint (hr) Value: 6
  misc_feature: MA Experiment 20001558 PARAMETER Experiment Name: At_Drought_Soil_Dry_P Parameter: Post-Treatment Value: Re-Water vs. No Drought
  misc_feature: MA Experiment 20001558 PARAMETER Experiment Name: At_Drought_Soil_Dry_P Parameter: Timepoint (day) Value: 13
  misc_feature: MA Experiment 20001558 PARAMETER Experiment Name: At_Drought_Soil_Dry_P Parameter: Treatment Value: Drought vs. No Drought
  misc_feature: MA Experiment ID: 20001559 Result: Up-regulated in Transcription
  misc_feature: MA Experiment 20001559 PARAMETER Experiment Name: At_Drought_Soil_Dry_P Parameter: Age (day) Value: 28
  misc_feature: MA Experiment 20001559 PARAMETER Experiment Name: At_Drought_Soil_Dry_P Parameter: Organism Value: A. thaliana
  misc_feature: MA Experiment 20001559 PARAMETER Experiment Name: At_Drought_Soil_Dry_P Parameter: Plant Line Value: WS
  misc_feature: MA Experiment 20001559 PARAMETER Experiment Name: At_Drought_Soil_Dry_P Parameter: Post Timepoint (hr) Value: 29
  misc_feature: MA Experiment 20001559 PARAMETER Experiment Name: At_Drought_Soil_Dry_P Parameter: Post-Treatment Value: Re-Water vs. No Drought
  misc_feature: MA Experiment 20001559 PARAMETER Experiment Name: At_Drought_Soil_Dry_P Parameter: Timepoint (day) Value: 14
  misc_feature: MA Experiment 20001559 PARAMETER Experiment Name: At_Drought_Soil_Dry_P Parameter: Treatment Value: Drought vs. No Drought
  misc_feature: MA Experiment ID: 20001904 Result: Up-regulated in Transcription
  misc_feature: MA Experiment 20001904 PARAMETER Experiment Name: At_Drought_Reproduction_P Parameter: Age (day) Value: 37
  misc_feature: MA Experiment 20001904 PARAMETER Experiment Name: At_Drought_Reproduction_P Parameter: Organism Value: A. thaliana
  misc_feature: MA Experiment 20001904 PARAMETER Experiment Name: At_Drought_Reproduction_P Parameter: Plant Line Value: WS
  misc_feature: MA Experiment 20001904 PARAMETER Experiment Name: At_Drought_Reproduction_P Parameter: Timepoint (day) Value: 7
  misc_feature: MA Experiment 20001904 PARAMETER Experiment Name: At_Drought_Reproduction_P Parameter: Tissue Value: Rosettes
  misc_feature: MA Experiment 20001904 PARAMETER Experiment Name: At_Drought_Reproduction_P Parameter: Treatment Value: Drought vs. No Drought
gtagcgctcttttcgacgttttgctgtgattattttggccgtgagcttctccatttccatttccatcgccatcggactctctcctcttacaaacttttcatttttgttagctctcatctctacgtcgaattgctttttctcttcttctccgattcgaaaatgaggacaatcgtttcgcgtttgattcgttatcaatcgtctctttcccagatacggtttgtttctgcctctggtggcgggaggtatctctcgacagactctaacaaaattgatgagcccttcaatgtggaagaagctgagactgtacatgtgcctccacctcctactgagaagctgcttgtcctgggaggaaatggttttgtgggatcacatgtctgtaaagaagctttagatcgcggcttatctgtctctagccttagcaggtcaggtaggtcgtctttacaagagtcctgggcctccagagtaacatggcatcaaggaaaccttctatcatctgatttattgaaagatgctcttgagggagtgacttctgtgatttcttgtgttggtggttttggttcaaactcatatatgtataagattaacgggactgcaaacatcaacgcaattagggctgcctcagaaaaaggtgttaaaagatttgtctatatttctgctgcggatttcggattagccaactacttgttgagaggatactatgagggaaagcgagctgctgagaccgagctgctcacaagatttgcatatggaggtataatcttgcgacctggttttatatatggaactcgcagtgttgggagcatgaagatcccgttaggagtatttggttcacccatggagatggttcttcaacaagcaaaacctctgaaccagcttccattagtcggacctttgttcacacctccggtgaatgttgaatcggttgcaaaagtcgcagttagagcagccacagatccagtgttccctcccgggattgtggatgtccatggaatacaacgttacagccaacagaaatcgagataagtccgttttgaaaagcttaagtatgctcaatgtcgttttgtagagcttggctgcttttagtactctgctggattcgaatggtgggaacaaaaatgtttacttgtttctctcgccagaaatttcccacaaataaataaagaagagaagcttttatttatttattgaactatacatctct

SEQ ID NO: 28424 - protein, 340 aa, Arabidopsis thaliana
  peptide (1)..(340): Ceres Seq. ID no. 12680986
  misc_feature (111)..(272): Pfam Name: Isoflavone reductase Pfam Description: Isoflavone reductase
  misc_feature (176)..(331): Homolog of NCBI NO: 8744993 NR Description: hypothetical protein P1295.07 [Leishmania major]
  misc_feature (111)..(310): Homolog of NCBI NO: 23037289 NR Description: hypothetical protein [Oenococcus oeni MCW]
  misc_feature (112)..(335): Homolog of NCBI NO: 37523204 NR Description: probable oxidoreductase [Gloeobacter violaceus]
  misc_feature (191)..(334): Homolog of NCBI NO: 11346175 NR Description: hypothetical protein F1N13_50 - Arabidopsis
  misc_feature (109)..(332): Homolog of NCBI NO: 18398333 NR Description: expressed protein
  misc_feature (109)..(321): Homolog of NCBI NO: 38346147 NR Description: OSJNBb0118P14.7 [Oryza sativa (japonica
  misc_feature (111)..(334): Homolog of NCBI NO: 21592373 NR Description: unknown [Arabidopsis thaliana]
  misc_feature (111)..(334): Homolog of NCBI NO: 18417824 NR Description: putative protein
  misc_feature (54)..(340): Homolog of NCBI NO: 10129651 NR Description: putative protein [Arabidopsis thaliana]
  misc_feature (54)..(340): Homolog of NCBI NO: 18416362 NR Description: putative protein
VALFSTFCCDYFGRELLHFHFHRHRTLSSYKLFIFVSSHLYVELLFLFFSDSKMRTIVSRLIRYQSSLSQIRFVSASGGGRYLSTDSNKIDEPFNVEEAETVHVPPPPTEKLLVLGGNGFVGSHVCKEALDRGLSVSSLSRSGRSSLQESWASRVTWHQGNLLSSDLLKDALEGVTSVISCVGGFGSNSYMYKINGTANINAIRAASEKGVKRFVYISAADFGLANYLLRGYYEGKRAAETELLTRFAYGGIILRPGFIYGTRSVGSMKIPLGVFGSPMEMVLQQAKPLNQLPLVGPLFTPPVNVESVAKVAVRAATDPVFPPGIVDVHGIQRYSQQKSR

SEQ ID NO: 28425 - protein, 287 aa, Arabidopsis thaliana
  peptide (1)..(287): Ceres Seq. ID no. 12680987
  misc_feature (58)..(219): Pfam Name: Isoflavone reductase Pfam Description: Isoflavone reductase
  misc_feature (123)..(278): Homolog of NCBI NO: 8744993 NR Description: hypothetical protein P1295.07 [Leishmania major]
  misc_feature (58)..(257): Homolog of NCBI NO: 23037289 NR Description: hypothetical protein [Oenococcus oeni MCW]
  misc_feature (59)..(282): Homolog of NCBI NO: 37523204 NR Description: probable oxidoreductase [Gloeobacter violaceus]
  misc_feature (138)..(281): Homolog of NCBI NO: 11346175 NR Description: hypothetical protein F1N13_50 - Arabidopsis
  misc_feature (56)..(279): Homolog of NCBI NO: 18398333 NR Description: expressed protein
  misc_feature (56)..(268): Homolog of NCBI NO: 38346147 NR Description: OSJNBb0118P14.7 [Oryza sativa (japonica
  misc_feature (58)..(281): Homolog of NCBI NO: 21592373 NR Description: unknown [Arabidopsis thaliana]
  misc_feature (58)..(281): Homolog of NCBI NO: 18417824 NR Description: putative protein
  misc_feature (1)..(287): Homolog of NCBI NO: 10129651 NR Description: putative protein [Arabidopsis thaliana]
  misc_feature (1)..(287): Homolog of NCBI NO: 18416362 NR Description: putative protein
MRTIVSRLIRYQSSLSQIRFVSASGGGRYLSTDSNKIDEPFNVEEAETVHVPPPPTEKLLVLGGNGFVGSHVCKEALDRGLSVSSLSRSGRSSLQESWASRVTWHQGNLLSSDLLKDALEGVTSVISCVGGFGSNSYMYKINGTANINAIRAASEKGVKRFVYISAADFGLANYLLRGYYEGKRAAETELLTRFAYGGIILRPGFIYGTRSVGSMKIPLGVFGSPMEMVLQQAKPLNQLPLVGPLFTPPVNVESVAKVAVRAATDPVFPPGIVDVHGIQRYSQQKSR

SEQ ID NO: 28426 - DNA, 1531 bp, Arabidopsis thaliana
  misc_feature (1)..(1531): Ceres Seq. ID no. 12377341
  misc_feature: MA Experiment ID: 108434 Result: Up-regulated in Transcription
  misc_feature: MA Experiment 108434 PARAMETER Experiment Name: At_Root_Tips_cDNA_P Parameter: Tissue Value: Root Tips
  misc_feature: MA Experiment ID: 108462 Result: Down-regulated in Transcription
  misc_feature: MA Experiment 108462 PARAMETER Experiment Name: At_Germinating_Seeds_cDNA_P Parameter: Age (day) Value: 2 vs. 0
  misc_feature: MA Experiment 108462 PARAMETER Experiment Name: At_Germinating_Seeds_cDNA_P Parameter: Tissue Value: Germinating Seeds
  misc_feature: MA Experiment ID: 108463 Result: Down-regulated in Transcription
  misc_feature: MA Experiment 108463 PARAMETER Experiment Name: At_Germinating_Seeds_cDNA_P Parameter: Age (day) Value: 3 vs. 0
  misc_feature: MA Experiment 108463 PARAMETER Experiment Name: At_Germinating_Seeds_cDNA_P Parameter: Tissue Value: Germinating Seeds
  misc_feature: MA Experiment ID: 108573 Result: Down-regulated in Transcription
  misc_feature: MA Experiment 108573 PARAMETER Experiment Name: At_Drought_cDNA_P Parameter: Timepoint (hr) Value: 6
  misc_feature: MA Experiment 108573 PARAMETER Experiment Name: At_Drought_cDNA_P Parameter: Tissue Value: Aerial
  misc_feature: MA Experiment 108573 PARAMETER Experiment Name: At_Drought_cDNA_P Parameter: Treatment Value: Drought vs. No Drought
  misc_feature: MA Experiment ID: 108595 Result: Down-regulated in Transcription
  misc_feature: MA Experiment 108595 PARAMETER Experiment Name: At_Ler-pi_Ovule_cDNA_P Parameter: Plant Line Value: null
  misc_feature: MA Experiment ID: 20000224 Result: Up-regulated in Transcription
  misc_feature: MA Experiment ID: 20000227 Result: Up-regulated in Transcription
  misc_feature: MA Experiment 20000227 PARAMETER Experiment Name: At_Root-Tips-vs-Tops_P Parameter: Tissue Value: Root Tips vs. Root Tops
  misc_feature: MA Experiment ID: 20000286 Result: Up-regulated in Transcription
  misc_feature: MA Experiment 20000286 PARAMETER Experiment Name: At_Open_Flower_P Parameter: Age (day) Value: 21
  misc_feature: MA Experiment 20000286 PARAMETER Experiment Name: At_Open_Flower_P Parameter: Plant Line Value: WS
  misc_feature: MA Experiment 20000286 PARAMETER Experiment Name: At_Open_Flower_P Parameter: Tissue Value: Half Open vs. Whole Plant
  misc_feature: MA Experiment ID: 20001451 Result: Down-regulated in Transcription
  misc_feature: MA Experiment 20001451 PARAMETER Experiment Name: At_Far-red-induction_P Parameter: Age (day) Value: 7
  misc_feature: MA Experiment 20001451 PARAMETER Experiment Name: At_Far-red-induction_P Parameter: Light Value: Far-red vs. White
  misc_feature: MA Experiment 20001451 PARAMETER Experiment Name: At_Far-red-induction_P Parameter: Organism Value: A. thaliana
  misc_feature: MA Experiment 20001451 PARAMETER Experiment Name: At_Far-red-induction_P Parameter: Plant Line Value: Columbia
  misc_feature: MA Experiment 20001451 PARAMETER Experiment Name: At_Far-red-induction_P Parameter: Timepoint (hr) Value: 24
  misc_feature: MA Experiment 20001451 PARAMETER Experiment Name: At_Far-red-induction_P Parameter: Tissue Value: Whole Plant
  misc_feature: MA Experiment ID: 20001557 Result: Up-regulated in Transcription
  misc_feature: MA Experiment 20001557 PARAMETER Experiment Name: At_Drought_Soil_Dry_P Parameter: Age (day) Value: 27
  misc_feature: MA Experiment 20001557 PARAMETER Experiment Name: At_Drought_Soil_Dry_P Parameter: Organism Value: A. thaliana
  misc_feature: MA Experiment 20001557 PARAMETER Experiment Name: At_Drought_Soil_Dry_P Parameter: Plant Line Value: WS
  misc_feature: MA Experiment 20001557 PARAMETER Experiment Name: At_Drought_Soil_Dry_P Parameter: Post Timepoint (hr) Value: 3
  misc_feature: MA Experiment 20001557 PARAMETER Experiment Name: At_Drought_Soil_Dry_P Parameter: Post-Treatment Value: Re-Water vs. No Drought
  misc_feature: MA Experiment 20001557 PARAMETER Experiment Name: At_Drought_Soil_Dry_P Parameter: Timepoint (day) Value: 13
  misc_feature: MA Experiment 20001557 PARAMETER Experiment Name: At_Drought_Soil_Dry_P Parameter: Treatment Value: Drought vs. No Drought
  misc_feature: MA Experiment ID: 20001558 Result: Up-regulated in Transcription
  misc_feature: MA Experiment 20001558 PARAMETER Experiment Name: At_Drought_Soil_Dry_P Parameter: Age (day) Value: 27
  misc_feature: MA Experiment 20001558 PARAMETER Experiment Name: At_Drought_Soil_Dry_P Parameter: Organism Value: A. thaliana
  misc_feature: MA Experiment 20001558 PARAMETER Experiment Name: At_Drought_Soil_Dry_P Parameter: Plant Line Value: WS
  misc_feature: MA Experiment 20001558 PARAMETER Experiment Name: At_Drought_Soil_Dry_P Parameter: Post Timepoint (hr) Value: 6
  misc_feature: MA Experiment 20001558 PARAMETER Experiment Name: At_Drought_Soil_Dry_P Parameter: Post-Treatment Value: Re-Water vs. No Drought
  misc_feature: MA Experiment 20001558 PARAMETER Experiment Name: At_Drought_Soil_Dry_P Parameter: Timepoint (day) Value: 13
  misc_feature: MA Experiment 20001558 PARAMETER Experiment Name: At_Drought_Soil_Dry_P Parameter: Treatment Value: Drought vs. No Drought
aaaaccctaaatctctgatccgccatgagaggagctctcttgagaaatgcatctctctgcgctcgcagaatcattctttctcctcgtataacccatcagatctcccccaatgttccctttctcgctccaatcgccgctcctgctgctcccaagttcagatttttctcctccgaatccggtgagaactcgactacggcccctgagtcttcgccgactgattcacccgagaagaaagatctcgttgtagaagatgtaagcaacaaagagcttaaaagccgtatagagaagtatttcaatgagggtaatgaagatgctttacccggagttattgaagcacttctacagagaagacttgtagacaaacacgcagagactgatgatgaattgttggaaaaaatcgagtctctacctttcaaagatgatgtcaaggatgaagattttgaatccgatttcgaggaagcacattctactgacgaagaacttgaggatttgtacaattctcccgagtatgtagctgaaaagatgaggaagaatgagtttttcaacatggatgataagaagtgggatcacatgattagagaaggtatccaacatgggtgtcttactgatactaaagaatgcgaggagattcttgaggatatgctcaaatgggaccagcttcttcctgatgacttgaagaaaaaggttgaagcaaagtttaatgagcttggagatatgtgtgaaagaggtgaaattgaggctgaagcagcttatgagctttttaaggaatttgaagatgagatggtaattcagtatggggatcagatggaagctgagggtcctccccaatttggtgaaacagatgcttccgataggaatactgacttggatgatccccctggtaaaggcccaatcctcaggtggcaatcaaggatagtttttgctcctggaggtgatgcgtggcatccaaagaacaggaaagttaaaatgtctgttacagtgaaagagcttgggctctcaaagcatcaggctaaaaggctaagggaacttgtagggaaaagataccattcggggaaagacgagcttacaatcaccagcgagaggtttgaacaccgagaggaaaacaggaaagactgcttaagaactctttacgggttgatagaagaagctgggaaagccaacaagatcgctgaagacataagaacttcatatgtaaaacaaagactccgtgccaatccagcttttatgcagaaactacaagccaagatcataaggtctaaagaatcagatgccatcaacgcttgaacaaaacttttcccggttagcgcctttcttgtctcaccaaataatctgtaggatcgtcttcttttggcaatcatttgatccgttatggcttttcagatccatgaagaatctttgatggtaactcctatcttagtttggtttgcttgttgtatctcatgaagacatgaaccttggctgtgctgttggtgtctattagagactagttaacgttttctcagaattatgaatctctcctaaagttaaggtt

SEQ ID NO: 28427 - protein, 419 aa, Arabidopsis thaliana
  peptide (1)..(419): Ceres Seq. ID no. 12377342
  misc_feature (1)..(154): Homolog of NCBI NO: 15219546 NR Description: hypothetical protein; protein id: At1g73770.1
  misc_feature (26)..(419): Homolog of NCBI NO: 7485722 NR Description: hypothetical protein F18E5.80 - Arabidopsis
  misc_feature (1)..(419): Homolog of NCBI NO: 18415698 NR Description: putative protein
  misc_feature (1)..(419): Homolog of NCBI NO: 18401816 NR Description: expressed protein
MRGALLRNASLCARRIILSPRITHQISPNVPFLAPIAAPAAPKFRFFSSESGENSTTAPESSPTDSPEKKDLVVEDVSNKELKSRIEKYFNEGNEDALPGVIEALLQRRLVDKHAETDDELLEKIESLPFKDDVKDEDFESDFEEAHSTDEELEDLYNSPEYVAEKMRKNEFFNMDDKKWDHMIREGIQHGCLTDTKECEEILEDMLKWDQLLPDDLKKKVEAKFNELGDMCERGEIEAEAAYELFKEFEDEMVIQYGDQMEAEGPPQFGETDASDRNTDLDDPPGKGPILRWQSRIVFAPGGDAWHPKNRKVKMSVTVKELGLSKHQAKRLRELVGKRYHSGKDELTITSERFEHREENRKDCLRTLYGLIEEAGKANKIAEDIRTSYVKQRLRANPAFMQKLQAKIIRSKESDAINA

SEQ ID NO: 28428 - protein, 253 aa, Arabidopsis thaliana
  peptide (1)..(253): Ceres Seq. ID no. 12377343
  misc_feature (1)..(253): Homolog of NCBI NO: 7485722 NR Description: hypothetical protein F18E5.80 - Arabidopsis
  misc_feature (1)..(253): Homolog of NCBI NO: 18415698 NR Description: putative protein
  misc_feature (1)..(253): Homolog of NCBI NO: 18401816 NR Description: expressed protein
MRKNEFFNMDDKKWDHMIREGIQHGCLTDTKECEEILEDMLKWDQLLPDDLKKKVEAKFNELGDMCERGEIEAEAAYELFKEFEDEMVIQYGDQMEAEGPPQFGETDASDRNTDLDDPPGKGPILRWQSRIVFAPGGDAWHPKNRKVKMSVTVKELGLSKHQAKRLRELVGKRYHSGKDELTITSERFEHREENRKDCLRTLYGLIEEAGKANKIAEDIRTSYVKQRLRANPAFMQKLQAKIIRSKESDAINA

SEQ ID NO: 28429 - protein, 245 aa, Arabidopsis thaliana
  peptide (1)..(245): Ceres Seq. ID no. 12377344
  misc_feature (1)..(245): Homolog of NCBI NO: 7485722 NR Description: hypothetical protein F18E5.80 - Arabidopsis
  misc_feature (1)..(245): Homolog of NCBI NO: 18415698 NR Description: putative protein
  misc_feature (1)..(245): Homolog of NCBI NO: 18401816 NR Description: expressed protein
MDDKKWDHMIREGIQHGCLTDTKECEEILEDMLKWDQLLPDDLKKKVEAKFNELGDMCERGEIEAEAAYELFKEFEDEMVIQYGDQMEAEGPPQFGETDASDRNTDLDDPPGKGPILRWQSRIVFAPGGDAWHPKNRKVKMSVTVKELGLSKHQAKRLRELVGKRYHSGKDELTITSERFEHREENRKDCLRTLYGLIEEAGKANKIAEDIRTSYVKQRLRANPAFMQKLQAKIIRSKESDAINA

SEQ ID NO: 28430 - DNA, 799 bp, Arabidopsis thaliana
  misc_feature (1)..(799): Ceres Seq. ID no. 12393692
  misc_feature: MA Experiment ID: 108434 Result: Down-regulated in Transcription
  misc_feature: MA Experiment 108434 PARAMETER Experiment Name: At_Root_Tips_cDNA_P Parameter: Tissue Value: Root Tips
  misc_feature: MA Experiment ID: 108435 Result: Up-regulated in Transcription
  misc_feature: MA Experiment 108435 PARAMETER Experiment Name: At_stm_Mutants_cDNA_P Parameter: Plant Line Value: wt Landsburg vs stm
  misc_feature: MA Experiment 108435 PARAMETER Experiment Name: At_stm_Mutants_cDNA_P Parameter: Tissue Value: Shoot Apical Meristem Region
  misc_feature: MA Experiment ID: 108461 Result: Down-regulated in Transcription
  misc_feature: MA Experiment 108461 PARAMETER Experiment Name: At_Germinating_Seeds_cDNA_P Parameter: Age (day) Value: 1 vs. 0
  misc_feature: MA Experiment 108461 PARAMETER Experiment Name: At_Germinating_Seeds_cDNA_P Parameter: Tissue Value: Germinating Seeds
  misc_feature: MA Experiment ID: 108462 Result: Down-regulated in Transcription
  misc_feature: MA Experiment 108462 PARAMETER Experiment Name: At_Germinating_Seeds_cDNA_P Parameter: Age (day) Value: 2 vs. 0
  misc_feature: MA Experiment 108462 PARAMETER Experiment Name: At_Germinating_Seeds_cDNA_P Parameter: Tissue Value: Germinating Seeds
  misc_feature: MA Experiment ID: 108463 Result: Down-regulated in Transcription
  misc_feature: MA Experiment 108463 PARAMETER Experiment Name: At_Germinating_Seeds_cDNA_P Parameter: Age (day) Value: 3 vs. 0
  misc_feature: MA Experiment 108463 PARAMETER Experiment Name: At_Germinating_Seeds_cDNA_P Parameter: Tissue Value: Germinating Seeds
  misc_feature: MA Experiment ID: 108573 Result: Up-regulated in Transcription
  misc_feature: MA Experiment 108573 PARAMETER Experiment Name: At_Drought_cDNA_P Parameter: Timepoint (hr) Value: 6
  misc_feature: MA Experiment 108573 PARAMETER Experiment Name: At_Drought_cDNA_P Parameter: Tissue Value: Aerial
  misc_feature: MA Experiment 108573 PARAMETER Experiment Name: At_Drought_cDNA_P Parameter: Treatment Value: Drought vs. No Drought
  misc_feature: MA Experiment ID: 108579 Result: Up-regulated in Transcription
  misc_feature: MA Experiment 108579 PARAMETER Experiment Name: At_4deg_Cold_cDNA_P Parameter: Temperature (deg C) Value: 4 vs. 22
  misc_feature: MA Experiment 108579 PARAMETER Experiment Name: At_4deg_Cold_cDNA_P Parameter: Timepoint (hr) Value: 6
  misc_feature: MA Experiment 108579 PARAMETER Experiment Name: At_4deg_Cold_cDNA_P Parameter: Tissue Value: Aerial
  misc_feature: MA Experiment ID: 20000071 Result: Up-regulated in Transcription
  misc_feature: MA Experiment 20000071 PARAMETER Experiment Name: At_100uM_ABA_Mutants_cDNA_P Parameter: Plant Line Value: CS8104
  misc_feature: MA Experiment 20000071 PARAMETER Experiment Name: At_100uM_ABA_Mutants_cDNA_P Parameter: Timepoint (hr) Value: 6
  misc_feature: MA Experiment 20000071 PARAMETER Experiment Name: At_100uM_ABA_Mutants_cDNA_P Parameter: Tissue Value: Aerial
  misc_feature: MA Experiment 20000071 PARAMETER Experiment Name: At_100uM_ABA_Mutants_cDNA_P Parameter: Treatment Value: 100uM ABA vs. No Treatment
  misc_feature: MA Experiment ID: 20000089 Result: Up-regulated in Transcription
  misc_feature: MA Experiment ID: 20000117 Result: Up-regulated in Transcription
  misc_feature: MA Experiment 20000117 PARAMETER Experiment Name: At_100uM_ABA_Mutants_cDNA_P Parameter: Plant Line Value: Columbia
  misc_feature: MA Experiment 20000117 PARAMETER Experiment Name: At_100uM_ABA_Mutants_cDNA_P Parameter: Timepoint (hr) Value: 6
  misc_feature: MA Experiment 20000117 PARAMETER Experiment Name: At_100uM_ABA_Mutants_cDNA_P Parameter: Tissue Value: Aerial
  misc_feature: MA Experiment 20000117 PARAMETER Experiment Name: At_100uM_ABA_Mutants_cDNA_P Parameter: Treatment Value: 100uM ABA vs. No Treatment
  misc_feature: MA Experiment ID: 20000144 Result: Up-regulated in Transcription
  misc_feature: MA Experiment 20000144 PARAMETER Experiment Name: At_42deg_Heat_cDNA_P Parameter: Temperature (deg C) Value: 42 vs. 22
  misc_feature: MA Experiment 20000144 PARAMETER Experiment Name: At_42deg_Heat_cDNA_P Parameter: Timepoint (hr) Value: 1
  misc_feature: MA Experiment 20000144 PARAMETER Experiment Name: At_42deg_Heat_cDNA_P Parameter: Tissue Value: Aerial
  misc_feature: MA Experiment ID: 20000171 Result: Up-regulated in Transcription
  misc_feature: MA Experiment 20000171 PARAMETER Experiment Name: At_42deg_Heat_P Parameter: Age (day) Value: 14
  misc_feature: MA Experiment 20000171 PARAMETER Experiment Name: At_42deg_Heat_P Parameter: Organism Value: A. thaliana
  misc_feature: MA Experiment 20000171 PARAMETER Experiment Name: At_42deg_Heat_P Parameter: Plant Line Value: WS
  misc_feature: MA Experiment 20000171 PARAMETER Experiment Name: At_42deg_Heat_P Parameter: Temperature (deg C) Value: 42 vs. 22
  misc_feature: MA Experiment 20000171 PARAMETER Experiment Name: At_42deg_Heat_P Parameter: Timepoint (hr) Value: 1
  misc_feature: MA Experiment 20000171 PARAMETER Experiment Name: At_42deg_Heat_P Parameter: Tissue Value: Aerial
  misc_feature: MA Experiment ID: 20000179 Result: Down-regulated in Transcription
  misc_feature: MA Experiment 20000179 PARAMETER Experiment Name: At_Germinating_Seeds_P Parameter: Age (hr) Value: 6 vs. 0
  misc_feature: MA Experiment 20000179 PARAMETER Experiment Name: At_Germinating_Seeds_P Parameter: Tissue Value: Germinating Seeds
  misc_feature: MA Experiment ID: 20000180 Result: Down-regulated in Transcription
  misc_feature: MA Experiment 20000180 PARAMETER Experiment Name: At_Germinating_Seeds_P Parameter: Age (hr) Value: 24 vs. 0
  misc_feature: MA Experiment 20000180 PARAMETER Experiment Name: At_Germinating_Seeds_P Parameter: Tissue Value: Germinating Seeds
  misc_feature: MA Experiment ID: 20000185 Result: Down-regulated in Transcription
  misc_feature: MA Experiment 20000185 PARAMETER Experiment Name: At_Roots__P Parameter: Age (day) Value: 7 vs. 21
  misc_feature: MA Experiment 20000185 PARAMETER Experiment Name: At_Roots__P Parameter: Organism Value: A. thaliana
  misc_feature: MA Experiment 20000185 PARAMETER Experiment Name: At_Roots__P Parameter: Tissue Value: Roots vs. Whole Plant
  misc_feature: MA Experiment ID: 20000214 Result: Up-regulated in Transcription
  misc_feature: MA Experiment 20000214 PARAMETER Experiment Name: At_4deg_Cold_P Parameter: Timepoint (hr) Value: 6
  misc_feature: MA Experiment ID: 20000437 Result: Up-regulated in Transcription
  misc_feature: MA Experiment 20000437 PARAMETER Experiment Name: At_Drought_P Parameter: Age (day) Value: 8
  misc_feature: MA Experiment 20000437 PARAMETER Experiment Name: At_Drought_P Parameter: Organism Value: A. thaliana
  misc_feature: MA Experiment 20000437 PARAMETER Experiment Name: At_Drought_P Parameter: Plant Line Value: WS
  misc_feature: MA Experiment 20000437 PARAMETER Experiment Name: At_Drought_P Parameter: Timepoint (hr) Value: 24
  misc_feature: MA Experiment 20000437 PARAMETER Experiment Name: At_Drought_P Parameter: Tissue Value: Whole Plant
  misc_feature: MA Experiment 20000437 PARAMETER Experiment Name: At_Drought_P Parameter: Treatment Value: Drought vs. No Drought
  misc_feature: MA Experiment ID: 20001248 Result: Up-regulated in Transcription
  misc_feature: MA Experiment 20001248 PARAMETER Experiment Name: At_Far-red-induction_P Parameter: Age (day) Value: 7
  misc_feature: MA Experiment 20001248 PARAMETER Experiment Name: At_Far-red-induction_P Parameter: Light Value: Far-red vs. White
  misc_feature: MA Experiment 20001248 PARAMETER Experiment Name: At_Far-red-induction_P Parameter: Organism Value: A. thaliana
  misc_feature: MA Experiment 20001248 PARAMETER Experiment Name: At_Far-red-induction_P Parameter: Plant Line Value: Columbia
  misc_feature: MA Experiment 20001248 PARAMETER Experiment Name: At_Far-red-induction_P Parameter: Timepoint (hr) Value: 4
  misc_feature: MA Experiment 20001248 PARAMETER Experiment Name: At_Far-red-induction_P Parameter: Tissue Value: Whole Plant
acacctccactttcccttttgcccctcttttttacagatttcactctctgctctactactctctcctcctcctcctcctaaagaaagttcttaactctcctgggttcttcaggtttttccttttctggaataaaaagaagaagaaatgggtgttcttgatcatgtctctgaaatgtttgactgctctcatggtcacaagattaaaaagcgcaaacagttgcagacggtggagattaaagtgaaaatggactgcgaaggttgcgagcggaaagtgcggcgttctgtcgaaggcatgaagggtgtgtcttctgtgacgttggagcccaaagcccataaagtcactgtagtcggctacgtcgatcccaacaaggtggtggctcgaatgtctcacaggaccggcaagaaagtcgagctctggccatatgtgccctacgacgtggtcgctcatccttacgctgccggtgtctacgacaagaaggcaccctccggttatgtccgaagagtcgacgaccccggagtgtcgcagctggctcgtgctagctccaccgaggtccgctacaccactgcatttagcgacgagaacccggcggcttgtgtggtcatgtgatgtcatatggactactactgtttcaatttgttatggcttaatttaatgtcttgttttgtacattaataccataacggtaggtttcttgttttggttttagttccttggtctgtattccttacactttatgattgcaatatgtgtttttccctttcttccaaagacttttaatgttaataaatatttctaccc

SEQ ID NO: 28431 - protein, 153 aa, Arabidopsis thaliana
  peptide (1)..(153): Ceres Seq. ID no. 12393693
  misc_feature (38)..(153): Homolog of NCBI NO: 4097553 NR Description: ATFP6 [Arabidopsis thaliana]
  misc_feature (1)..(153): Homolog of NCBI NO: 18418567 NR Description: copper chaperone (CCH)-related
  misc_feature (1)..(153): Homolog of NCBI NO: 21536547 NR Description: farnesylated protein (ATFP6) [Arabidopsis
  misc_feature (1)..(153): Homolog of NCBI NO: 15233937 NR Description: copper chaperone (CCH)-related
MGVLDHVSEMFDCSHGHKIKKRKQLQTVEIKVKMDCEGCERKVRRSVEGMKGVSSVTLEPKAHKVTVVGYVDPNKVVARMSHRTGKKVELWPYVPYDVVAHPYAAGVYDKKAPSGYVRRVDDPGVSQLARASSTEVRYTTAFSDENPAACVVM

SEQ ID NO: 28432 - protein, 144 aa, Arabidopsis thaliana
  peptide (1)..(144): Ceres Seq. ID no. 12393694
  misc_feature (29)..(144): Homolog of NCBI NO: 4097553 NR Description: ATFP6 [Arabidopsis thaliana]
  misc_feature (1)..(144): Homolog of NCBI NO: 18418567 NR Description: copper chaperone (CCH)-related
  misc_feature (1)..(144): Homolog of NCBI NO: 21536547 NR Description: farnesylated protein (ATFP6) [Arabidopsis
  misc_feature (1)..(144): Homolog of NCBI NO: 15233937 NR Description: copper chaperone (CCH)-related
MFDCSHGHKIKKRKQLQTVEIKVKMDCEGCERKVRRSVEGMKGVSSVTLEPKAHKVTVVGYVDPNKVVARMSHRTGKKVELWPYVPYDVVAHPYAAGVYDKKAPSGYVRRVDDPGVSQLARASSTEVRYTTAFSDENPAACVVM

SEQ ID NO: 28433 - protein, 120 aa, Arabidopsis thaliana
  peptide (1)..(120): Ceres Seq. ID no. 12393695
  misc_feature (5)..(120): Homolog of NCBI NO: 4097553 NR Description: ATFP6 [Arabidopsis thaliana]
  misc_feature (1)..(120): Homolog of NCBI NO: 18418567 NR Description: copper chaperone (CCH)-related
  misc_feature (1)..(120): Homolog of NCBI NO: 21536547 NR Description: farnesylated protein (ATFP6) [Arabidopsis
  misc_feature (1)..(120): Homolog of NCBI NO: 15233937 NR Description: copper chaperone (CCH)-related
MDCEGCERKVRRSVEGMKGVSSVTLEPKAHKVTVVGYVDPNKVVARMSHRTGKKVELWPYVPYDVVAHPYAAGVYDKKAPSGYVRRVDDPGVSQLARASSTEVRYTTAFSDENPAACVVM

SEQ ID NO: 28434 - DNA, 597 bp, Arabidopsis thaliana
  misc_feature (1)..(597): Ceres Seq. ID no. 12331802
  misc_feature: MA Experiment ID: 108434 Result: Up-regulated in Transcription
  misc_feature: MA Experiment 108434 PARAMETER Experiment Name: At_Root_Tips_cDNA_P Parameter: Tissue Value: Root Tips
  misc_feature: MA Experiment ID: 108462 Result: Down-regulated in Transcription
  misc_feature: MA Experiment 108462 PARAMETER Experiment Name: At_Germinating_Seeds_cDNA_P Parameter: Age (day) Value: 2 vs. 0
  misc_feature: MA Experiment 108462 PARAMETER Experiment Name: At_Germinating_Seeds_cDNA_P Parameter: Tissue Value: Germinating Seeds
  misc_feature: MA Experiment ID: 108463 Result: Down-regulated in Transcription
  misc_feature: MA Experiment 108463 PARAMETER Experiment Name: At_Germinating_Seeds_cDNA_P Parameter: Age (day) Value: 3 vs. 0
  misc_feature: MA Experiment 108463 PARAMETER Experiment Name: At_Germinating_Seeds_cDNA_P Parameter: Tissue Value: Germinating Seeds
  misc_feature: MA Experiment ID: 108464 Result: Down-regulated in Transcription
  misc_feature: MA Experiment 108464 PARAMETER Experiment Name: At_Germinating_Seeds_cDNA_P Parameter: Age (day) Value: 4 vs. 0
  misc_feature: MA Experiment 108464 PARAMETER Experiment Name: At_Germinating_Seeds_cDNA_P Parameter: Tissue Value: Germinating Seeds
  misc_feature: MA Experiment ID: 108573 Result: Down-regulated in Transcription
  misc_feature: MA Experiment 108573 PARAMETER Experiment Name: At_Drought_cDNA_P Parameter: Timepoint (hr) Value: 6
  misc_feature: MA Experiment 108573 PARAMETER Experiment Name: At_Drought_cDNA_P Parameter: Tissue Value: Aerial
  misc_feature: MA Experiment 108573 PARAMETER Experiment Name: At_Drought_cDNA_P Parameter: Treatment Value: Drought vs. No Drought
  misc_feature: MA Experiment ID: 108576 Result: Up-regulated in Transcription
  misc_feature: MA Experiment 108576 PARAMETER Experiment Name: At_42deg_Heat_cDNA_P Parameter: Temperature (deg C) Value: 42 vs. 22
  misc_feature: MA Experiment 108576 PARAMETER Experiment Name: At_42deg_Heat_cDNA_P Parameter: Timepoint (hr) Value: 1
  misc_feature: MA Experiment 108576 PARAMETER Experiment Name: At_42deg_Heat_cDNA_P Parameter: Tissue Value: Aerial
  misc_feature: MA Experiment ID: 108585 Result: Down-regulated in Transcription
  misc_feature: MA Experiment 108585 PARAMETER Experiment Name: At_5mM_NaNP_cDNA_P Parameter: Timepoint (hr) Value: 6
  misc_feature: MA Experiment 108585 PARAMETER Experiment Name: At_5mM_NaNP_cDNA_P Parameter: Tissue Value: Aerial
  misc_feature: MA Experiment 108585 PARAMETER Experiment Name: At_5mM_NaNP_cDNA_P Parameter: Treatment Value: null
  misc_feature: MA Experiment ID: 108595 Result: Up-regulated in Transcription
  misc_feature: MA Experiment 108595 PARAMETER Experiment Name: At_Ler-pi_Ovule_cDNA_P Parameter: Plant Line Value: null
  misc_feature: MA Experiment ID: 20000070 Result: Up-regulated in Transcription
  misc_feature: MA Experiment 20000070 PARAMETER Experiment Name: At_100uM_ABA_Mutants_cDNA_P Parameter: Plant Line Value: CS24
  misc_feature: MA Experiment 20000070 PARAMETER Experiment Name: At_100uM_ABA_Mutants_cDNA_P Parameter: Timepoint (hr) Value: 6
  misc_feature: MA Experiment 20000070 PARAMETER Experiment Name: At_100uM_ABA_Mutants_cDNA_P Parameter: Tissue Value: Aerial
  misc_feature: MA Experiment 20000070 PARAMETER Experiment Name: At_100uM_ABA_Mutants_cDNA_P Parameter: Treatment Value: 100uM ABA vs. No Treatment
  misc_feature: MA Experiment ID: 20000093 Result: Up-regulated in Transcription
  misc_feature: MA Experiment 20000093 PARAMETER Experiment Name: At_42deg_Heat_cDNA_P Parameter: Temperature (deg C) Value: 42 vs. 22
  misc_feature: MA Experiment 20000093 PARAMETER Experiment Name: At_42deg_Heat_cDNA_P Parameter: Timepoint (hr) Value: 0.5
  misc_feature: MA Experiment 20000093 PARAMETER Experiment Name: At_42deg_Heat_cDNA_P Parameter: Tissue Value: Aerial
  misc_feature: MA Experiment ID: 20000111 Result: Up-regulated in Transcription
  misc_feature: MA Experiment 20000111 PARAMETER Experiment Name: At_42deg_Heat_cDNA_P Parameter: Temperature (deg C) Value: 42 vs. 22
  misc_feature: MA Experiment 20000111 PARAMETER Experiment Name: At_42deg_Heat_cDNA_P Parameter: Timepoint (hr) Value: 6
  misc_feature: MA Experiment 20000111 PARAMETER Experiment Name: At_42deg_Heat_cDNA_P Parameter: Tissue Value: Aerial
  misc_feature: MA Experiment ID: 20000112 Result: Up-regulated in Transcription
  misc_feature: MA Experiment 20000112 PARAMETER Experiment Name: At_42deg_Heat_cDNA_P Parameter: Temperature (deg C) Value: 42 vs. 22
  misc_feature: MA Experiment 20000112 PARAMETER Experiment Name: At_42deg_Heat_cDNA_P Parameter: Timepoint (hr) Value: 2
  misc_feature: MA Experiment 20000112 PARAMETER Experiment Name: At_42deg_Heat_cDNA_P Parameter: Tissue Value: Aerial
  misc_feature: MA Experiment ID: 20000113 Result: Up-regulated in Transcription
  misc_feature: MA Experiment 20000113 PARAMETER Experiment Name: At_42deg_Heat_cDNA_P Parameter: Temperature (deg C) Value: 42 vs. 22
  misc_feature: MA Experiment 20000113 PARAMETER Experiment Name: At_42deg_Heat_cDNA_P Parameter: Timepoint (hr) Value: 8
  misc_feature: MA Experiment 20000113 PARAMETER Experiment Name: At_42deg_Heat_cDNA_P Parameter: Tissue Value: Aerial
  misc_feature: MA Experiment ID: 20000144 Result: Up-regulated in Transcription
  misc_feature: MA Experiment 20000144 PARAMETER Experiment Name: At_42deg_Heat_cDNA_P Parameter: Temperature (deg C) Value: 42 vs. 22
  misc_feature: MA Experiment 20000144 PARAMETER Experiment Name: At_42deg_Heat_cDNA_P Parameter: Timepoint (hr) Value: 1
  misc_feature: MA Experiment 20000144 PARAMETER Experiment Name: At_42deg_Heat_cDNA_P Parameter: Tissue Value: Aerial
ctgaagagagagagatggcaacggcgtcgtttaggtggatcttgcagcttcacagagacgtaccaaaagcggctcgattctacgagaaaggtctcgatttctccgtcaatgtcgttaccttacgttgggctgaacttcaatctggtcctcttaagctagctcttatgcaagctcccagcgagcatgtgatgagtgagaagggatactcttcgttactatcgttcactgtagcagacattaatacaacaatctctaaacttatggaattaggagctgaactcgatggctctatcaaatatgaagtccatggcaaggttgcttctgtgagatgtcttgatggtcatgtgctcggactctatgaaccttcatgagttttctattcagttcggattatgtggatttgattttgtttttttcgatccgattttggttgaataatgtttcaaaattttgctaatcggatgtttggtaaggacttagctctaagacaaatgtaaatctaatatatccggcgtagaaaagtcgttaattgattgttcaactaatcgtctagacattcgatctattaaagacaggggagatatgttttacaaattt

SEQ ID NO: 28435 - protein, 122 aa, Arabidopsis thaliana
  peptide (1)..(122): Ceres Seq. ID no. 12331803
  misc_feature (9)..(118): Pfam Name: Glyoxalase/Bleomycin resistance Pfam Description: Glyoxalase/Bleomycin resistance
  misc_feature (7)..(122): Homolog of NCBI NO: 23039663 NR Description: hypothetical protein [Trichodesmium erythraeum
  misc_feature (7)..(122): Homolog of NCBI NO: 37523202 NR Description: hypothetical protein glr3633 [Gloeobacter
  misc_feature (6)..(55): Homolog of NCBI NO: 34898280 NR Description: hypothetical protein~predicted by GENSCAN etc.
  misc_feature (5)..(120): Homolog of NCBI NO: 15238137 NR Description: putative protein; protein id: At5g41650.1
  misc_feature (4)..(105): Homolog of NCBI NO: 25404929 NR Description: protein F22C12.6 [imported] - Arabidopsis
  misc_feature (5)..(122): Homolog of NCBI NO: 18407989 NR Description: Expressed protein
EEREMATASFRWILQLHRDVPKAARFYEKGLDFSVNVVTLRWAELQSGPLKLALMQAPSEHVMSEKGYSSLLSFTVADINTTISKLMELGAELDGSIKYEVHGKVASVRCLDGHVLGLYEPS

SEQ ID NO: 28436 - protein, 118 aa, Arabidopsis thaliana
  peptide (1)..(118): Ceres Seq. ID no. 12331804
  misc_feature (5)..(114): Pfam Name: Glyoxalase/Bleomycin resistance Pfam Description: Glyoxalase/Bleomycin resistance
  misc_feature (3)..(118): Homolog of NCBI NO: 23039663 NR Description: hypothetical protein [Trichodesmium erythraeum
  misc_feature (3)..(118): Homolog of NCBI NO: 37523202 NR Description: hypothetical protein glr3633 [Gloeobacter
  misc_feature (2)..(51): Homolog of NCBI NO: 34898280 NR Description: hypothetical protein~predicted by GENSCAN etc.
  misc_feature (1)..(116): Homolog of NCBI NO: 15238137 NR Description: putative protein; protein id: At5g41650.1
  misc_feature (1)..(101): Homolog of NCBI NO: 25404929 NR Description: protein F22C12.6 [imported] - Arabidopsis
  misc_feature (1)..(118): Homolog of NCBI NO: 18407989 NR Description: Expressed protein
MATASFRWILQLHRDVPKAARFYEKGLDFSVNVVTLRWAELQSGPLKLALMQAPSEHVMSEKGYSSLLSFTVADINTTISKLMELGAELDGSIKYEVHGKVASVRCLDGHVLGLYEPS

SEQ ID NO: 28437 - protein, 68 aa, Arabidopsis thaliana
  peptide (1)..(68): Ceres Seq. ID no. 12331805
  misc_feature (1)..(64): Pfam Name: Glyoxalase/Bleomycin resistance Pfam Description: Glyoxalase/Bleomycin resistance
  misc_feature (1)..(68): Homolog of NCBI NO: 23039663 NR Description: hypothetical protein [Trichodesmium erythraeum
  misc_feature (1)..(68): Homolog of NCBI NO: 37523202 NR Description: hypothetical protein glr3633 [Gloeobacter
  misc_feature (1)..(66): Homolog of NCBI NO: 15238137 NR Description: putative protein; protein id: At5g41650.1
  misc_feature (1)..(51): Homolog of NCBI NO: 25404929 NR Description: protein F22C12.6 [imported] - Arabidopsis
  misc_feature (1)..(68): Homolog of NCBI NO: 18407989 NR Description: Expressed protein
MQAPSEHVMSEKGYSSLLSFTVADINTTISKLMELGAELDGSIKYEVHGKVASVRCLDGHVLGLYEPS

SEQ ID NO: 28438 - DNA, 1068 bp, Arabidopsis thaliana
  misc_feature (1)..(1068): Ceres Seq. ID no. 12327625
  misc_feature: MA Experiment ID: 108434 Result: Up-regulated in Transcription
  misc_feature: MA Experiment 108434 PARAMETER Experiment Name: At_Root_Tips_cDNA_P Parameter: Tissue Value: Root Tips
  misc_feature: MA Experiment ID: 108461 Result: Up-regulated in Transcription
  misc_feature: MA Experiment 108461 PARAMETER Experiment Name: At_Germinating_Seeds_cDNA_P Parameter: Age (day) Value: 1 vs. 0
  misc_feature: MA Experiment 108461 PARAMETER Experiment Name: At_Germinating_Seeds_cDNA_P Parameter: Tissue Value: Germinating Seeds
  misc_feature: MA Experiment ID: 108608 Result: Up-regulated in Transcription
  misc_feature: MA Experiment 108608 PARAMETER Experiment Name: At_100uM_ABA_cDNA_P Parameter: Timepoint (hr) Value: 1
  misc_feature: MA Experiment 108608 PARAMETER Experiment Name: At_100uM_ABA_cDNA_P Parameter: Tissue Value: Aerial
  misc_feature: MA Experiment 108608 PARAMETER Experiment Name: At_100uM_ABA_cDNA_P Parameter: Treatment Value: 100uM ABA vs. No Treatment
  misc_feature: MA Experiment ID: 20000166 Result: Up-regulated in Transcription
  misc_feature: MA Experiment 20000166 PARAMETER Experiment Name: At_100uM_ABA_P Parameter: Age (day) Value: 14
  misc_feature: MA Experiment 20000166 PARAMETER Experiment Name: At_100uM_ABA_P Parameter: Organism Value: A. thaliana
  misc_feature: MA Experiment 20000166 PARAMETER Experiment Name: At_100uM_ABA_P Parameter: Plant Line Value: WS
  misc_feature: MA Experiment 20000166 PARAMETER Experiment Name: At_100uM_ABA_P Parameter: Timepoint (hr) Value: 1
  misc_feature: MA Experiment 20000166 PARAMETER Experiment Name: At_100uM_ABA_P Parameter: Tissue Value: Aerial
  misc_feature: MA Experiment 20000166 PARAMETER Experiment Name: At_100uM_ABA_P Parameter: Treatment Value: 100uM ABA vs. No Treatment
  misc_feature: MA Experiment ID: 20000794 Result: Down-regulated in Transcription
  misc_feature: MA Experiment 20000794 PARAMETER Experiment Name: At_Petals_P Parameter: Age (day) Value: 23-25 days
  misc_feature: MA Experiment 20000794 PARAMETER Experiment Name: At_Petals_P Parameter: Plant Line Value: WS
  misc_feature: MA Experiment 20000794 PARAMETER Experiment Name: At_Petals_P Parameter: Tissue Value: Petals vs. Whole plant
acacactcttcaaatcttcaatcagtaaagagttttaggtttttttttcttcttctcggaggtttgtagaatcaacaaaaatggtggaagaccacaagcacgaggaatcgatcttggagaagattgttgagaagatccatggccacggtgactcgtcttctctgtccgattccgacgacgataagaaatctacatcgtcttcgtcgtcgtccttcaagtcaaagatttaccgacttttcggaagggagaaacctgttcacaaggttctcggtggtggaaaacctgctgatatattcctttggaggaacaagaaggtatctggtggagtcttgggtgctgtaactgcgtcttgggtcttattcgagttattcgaataccatctcctcgcttttctctgtcactttgcgatttttgctcttgcagcattgttcttgtggtctaatgcttgtacattcatccacaagtcaactcctcacatcccggaagttcacatccctgaagatcctattcttcaacttgtttctggattaaggattgaaatcaatcgtggtttgacccttcttaggaacattgcatcaggaaaagatgtcaagaaatttatcctggtaattgctggcttgtgggttttgtccattattggcagctgctacaacttcttgacattgttctacactgctactgtccttctcttcaccattcctgtactctacgagaagtatgaggacaaagtagatgcctatggggagaaggcgatgagggagatcaaaaagcaatatgcagtacttgatgagaaggtattgcgtaaggtcataagcaagattccaagaggagctctgaacaagaagaaggattaaggaatgtgagttactctctcattggaatcgtagtaatggttcaagacatgttttgttagaagctgttggttgataaaccctttgatctcttgttattattatgttcattataaatttgggggttttaactaaaaatatttagattatgagagaacacggatgcatgataattattgttgttagttatttgtcttagttaatttctcatcctttt

SEQ ID NO: 28439 - protein, 257 aa, Arabidopsis thaliana
  peptide (1)..(257): Ceres Seq. ID no. 12327626
  misc_feature (13)..(256): Homolog of NCBI NO: 18398810 NR Description: expressed protein
  misc_feature (8)..(243): Homolog of NCBI NO: 15234108 NR Description: hypothetical protein; protein id: At4g01230.1
  misc_feature (5)..(255): Homolog of NCBI NO: 15233147 NR Description: putative protein; protein id: At3g61560.1
  misc_feature (37)..(256): Homolog of NCBI NO: 34904202 NR Description: P0492F05.25 [Oryza sativa (japonica
  misc_feature (8)..(255): Homolog of NCBI NO: 18406991 NR Description: expressed protein
  misc_feature (4)..(256): Homolog of NCBI NO: 34909318 NR Description: OSJNBb0021A09.5 [Oryza sativa (japonica
  misc_feature (9)..(257): Homolog of NCBI NO: 15236556 NR Description: putative protein
  misc_feature (9)..(257): Homolog of NCBI NO: 15237093 NR Description: putative protein
  misc_feature (1)..(257): Homolog of NCBI NO: 15222616 NR Description: hypothetical protein
  misc_feature (1)..(257): Homolog of NCBI NO: 15238125 NR Description: putative protein
MVEDHKHEESILEKIVEKIHGHGDSSSLSDSDDDKKSTSSSSSSFKSKIYRLFGREKPVHKVLGGGKPADIFLWRNKKVSGGVLGAVTASWVLFELFEYHLLAFLCHFAIFALAALFLWSNACTFIHKSTPHIPEVHIPEDPILQLVSGLRIEINRGLTLLRNIASGKDVKKFILVIAGLWVLSIIGSCYNFLTLFYTATVLLFTIPVLYEKYEDKVDAYGEKAMREIKKQYAVLDEKVLRKVISKIPRGALNKKKD

SEQ ID NO: 28440 - DNA, 1036 bp, Arabidopsis thaliana
  misc_feature (1)..(1036): Ceres Seq. ID no. 12488547
  misc_feature: MA Experiment ID: 20000235 Result: Down-regulated in Transcription
  misc_feature: MA Experiment 20000235 PARAMETER Experiment Name: At_Siliques_P Parameter: Age (day) Value: 21
  misc_feature: MA Experiment 20000235 PARAMETER Experiment Name: At_Siliques_P Parameter: Organism Value: A. thaliana
  misc_feature: MA Experiment 20000235 PARAMETER Experiment Name: At_Siliques_P Parameter: Plant Line Value: WS
  misc_feature: MA Experiment 20000235 PARAMETER Experiment Name: At_Siliques_P Parameter: Tissue Value: 5-10mm Siliques vs. Whole Plant
  misc_feature: MA Experiment ID: 20000264 Result: Up-regulated in Transcription
  misc_feature: MA Experiment 20000264 PARAMETER Experiment Name: At_Open_Flower_P Parameter: Age (day) Value: 21
  misc_feature: MA Experiment 20000264 PARAMETER Experiment Name: At_Open_Flower_P Parameter: Plant Line Value: WS
  misc_feature: MA Experiment 20000264 PARAMETER Experiment Name: At_Open_Flower_P Parameter: Tissue Value: Open Flower vs. Whole Plant
  misc_feature: MA Experiment ID: 20000265 Result: Up-regulated in Transcription
  misc_feature: MA Experiment 20000265 PARAMETER Experiment Name: At_Open_Flower_P Parameter: Age (day) Value: 21
  misc_feature: MA Experiment 20000265 PARAMETER Experiment Name: At_Open_Flower_P Parameter: Plant Line Value: WS
  misc_feature: MA Experiment 20000265 PARAMETER Experiment Name: At_Open_Flower_P Parameter: Tissue Value: Closed Flower vs. Whole Plant
  misc_feature: MA Experiment ID: 20000286 Result: Up-regulated in Transcription
  misc_feature: MA Experiment 20000286 PARAMETER Experiment Name: At_Open_Flower_P Parameter: Age (day) Value: 21
  misc_feature: MA Experiment 20000286 PARAMETER Experiment Name: At_Open_Flower_P Parameter: Plant Line Value: WS
  misc_feature: MA Experiment 20000286 PARAMETER Experiment Name: At_Open_Flower_P Parameter: Tissue Value: Half Open vs. Whole Plant
  misc_feature: MA Experiment ID: 20000438 Result: Down-regulated in Transcription
  misc_feature: MA Experiment 20000438 PARAMETER Experiment Name: At_Shoots__P Parameter: Age (day) Value: 14
  misc_feature: MA Experiment 20000438 PARAMETER Experiment Name: At_Shoots__P Parameter: Tissue Value: Shoots vs. Whole Plant
  misc_feature: MA Experiment ID: 20000794 Result: Up-regulated in Transcription
  misc_feature: MA Experiment 20000794 PARAMETER Experiment Name: At_Petals_P Parameter: Age (day) Value: 23-25 days
  misc_feature: MA Experiment 20000794 PARAMETER Experiment Name: At_Petals_P Parameter: Plant Line Value: WS
  misc_feature: MA Experiment 20000794 PARAMETER Experiment Name: At_Petals_P Parameter: Tissue Value: Petals vs. Whole plant
  misc_feature: MA Experiment ID: 20001910 Result: Down-regulated in Transcription
  misc_feature: MA Experiment 20001910 PARAMETER Experiment Name: At_Drought_Reproduction_P Parameter: Age (day) Value: 37
  misc_feature: MA Experiment 20001910 PARAMETER Experiment Name: At_Drought_Reproduction_P Parameter: Organism Value: A. thaliana
  misc_feature: MA Experiment 20001910 PARAMETER Experiment Name: At_Drought_Reproduction_P Parameter: Plant Line Value: WS
  misc_feature: MA Experiment 20001910 PARAMETER Experiment Name: At_Drought_Reproduction_P Parameter: Timepoint (day) Value: 7
  misc_feature: MA Experiment 20001910 PARAMETER Experiment Name: At_Drought_Reproduction_P Parameter: Tissue Value: Flowers
  misc_feature: MA Experiment 20001910 PARAMETER Experiment Name: At_Drought_Reproduction_P Parameter: Treatment Value: Drought vs. No Drought
aaataggcttccgttgttaaataaaagttgaacatttaaataaagtagagaggttgtgttggttctgcaaacatggatatgcttcacaccattctcaattttcttcttcctcctcttactatcagttttctcgttctcttttacccattttatctttttatcaaacttgtgagatttcttgttaagcaccttcgctttgaaaacgttaccgggaaagtagttcttatcaccggagcttcctccggcatcggagagcatgtggcatacgagtacgcaaagaaaggagcaaagttagctcttgttgctcgaagaaaggatcgtctagagatagtagcagaaacatcacgtcaattaggatctggcgatgtcatcatcatacctggtgatgtttctaaagttgaggactgcaagaagttcatcgacggaacgattcatcatttcggaaaactagaccacctgatcaacaatgctggagtacctcaaaccgttatattcgaagatttcacacaaattcaagacgctatttctataatggatatcaacttttggggctcaacgtccatcacttattttgctattcctcatcttcgaaaaagcaaaggaaaaattgttgtgatttcttctgctacggcaattatacctttgccagcggcaagcgtctattcagcaagcaaagcagctttagtaaaattctttgaaacattaagagttgagatcagtcccgatatcaaaataacaatcgctctttccggatttatatctacggatatgaccactcctcagtttaaagaaatgtacggttcagatttcatacttttggaatcagtgagtcaatgcgcaaaagcgatcttcagaggtattggtagaggagaggcatacgtcatagagccatcttggataaaatggatctttttgataaaaaatgtttgtcctgagatcgttgactacgtactcgactatatatttgttagttatctaagaccttatttcaagcgtgattaatcatatcgatctatccaagatctctctggttttc

SEQ ID NO: 28441 - protein, 309 aa, Arabidopsis thaliana
  peptide (1)..(309): Ceres Seq. ID no. 12488548
  misc_feature (1)..(290): Homolog of NCBI NO: 15234888 NR Description: putative oxidoreductase; protein id: At4g10020.1
  misc_feature (16)..(291): Homolog of NCBI NO: 21742781 NR Description: OSJNBa0055C08.3 [Oryza sativa (japonica
  misc_feature (1)..(300): Homolog of NCBI NO: 21311775 NR Description: steroleosin-B [Sesamum indicum]
  misc_feature (1)..(306): Homolog of NCBI NO: 15241261 NR Description: putative protein; protein id: At5g50770.1
  misc_feature (1)..(292): Homolog of NCBI NO: 18423187 NR Description: 11-beta-hydroxysteroid dehydrogenase-like
  misc_feature (1)..(300): Homolog of NCBI NO: 15824408 NR Description: steroleosin [Sesamum indicum]
  misc_feature (1)..(290): Homolog of NCBI NO: 8777392 NR Description: 11-beta-hydroxysteroid dehydrogenase-like
  misc_feature (1)..(290): Homolog of NCBI NO: 15241203 NR Description: 11-beta-hydroxysteroid dehydrogenase-like
  misc_feature (1)..(309): Homolog of NCBI NO: 15232779 NR Description: putative protein; protein id: At3g47360.1
  misc_feature (1)..(309): Homolog of NCBI NO: 15232777 NR Description: putative protein; protein id: At3g47350.1
  misc_feature (1)..(290): Homolog of NCBI NO: 15234888 NR Description: putative oxidoreductase; protein id: At4g10020.1
  misc_feature (16)..(291): Homolog of NCBI NO: 21742781 NR Description: OSJNBa0055C08.3 [Oryza sativa (japonica
  misc_feature (1)..(300): Homolog of NCBI NO: 21311775 NR Description: steroleosin-B [Sesamum indicum]
  misc_feature (1)..(306): Homolog of NCBI NO: 15241261 NR Description: putative protein; protein id: At5g50770.1
  misc_feature (1)..(292): Homolog of NCBI NO: 18423187 NR Description: 11-beta-hydroxysteroid dehydrogenase-like
  misc_feature (1)..(300): Homolog of NCBI NO: 15824408 NR Description: steroleosin [Sesamum indicum]
  misc_feature (1)..(290): Homolog of NCBI NO: 8777392 NR Description: 11-beta-hydroxysteroid dehydrogenase-like
  misc_feature (1)..(290): Homolog of NCBI NO: 15241203 NR Description: 11-beta-hydroxysteroid dehydrogenase-like
  misc_feature (1)..(309): Homolog of NCBI NO: 15232779 NR Description: putative protein; protein id: At3g47360.1
  misc_feature (1)..(309): Homolog of NCBI NO: 15232777 NR Description: putative protein; protein id: At3g47350.1
MDMLHTILNFLLPPLTISFLVLFYPFYLFIKLVRFLVKHLRFENVTGKVVLITGASSGIGEHVAYEYAKKGAKLALVARRKDRLEIVAETSRQLGSGDVIIIPGDVSKVEDCKKFIDGTIHHFGKLDHLINNAGVPQTVIFEDFTQIQDAISIMDINFWGSTSITYFAIPHLRKSKGKIVVISSATAIIPLPAASVYSASKAALVKFFETLRVEISPDIKITIALSGFISTDMTTPQFKEMYGSDFILLESVSQCAKAIFRGIGRGEAYVIEPSWIKWIFLIKNVCPEIVDYVLDYIFVSYLRPYFKRD

SEQ ID NO: 28442 - protein, 307 aa, Arabidopsis thaliana
  peptide (1)..(307): Ceres Seq. ID no. 12488549
  misc_feature (1)..(288): Homolog of NCBI NO: 15234888 NR Description: putative oxidoreductase; protein id: At4g10020.1
  misc_feature (14)..(289): Homolog of NCBI NO: 21742781 NR Description: OSJNBa0055C08.3 [Oryza sativa (japonica
  misc_feature (1)..(298): Homolog of NCBI NO: 21311775 NR Description: steroleosin-B [Sesamum indicum]
  misc_feature (1)..(304): Homolog of NCBI NO: 15241261 NR Description: putative protein; protein id: At5g50770.1
  misc_feature (1)..(290): Homolog of NCBI NO: 18423187 NR Description: 11-beta-hydroxysteroid dehydrogenase-like
  misc_feature (1)..(298): Homolog of NCBI NO: 15824408 NR Description: steroleosin [Sesamum indicum]
  misc_feature (1)..(288): Homolog of NCBI NO: 8777392 NR Description: 11-beta-hydroxysteroid dehydrogenase-like
  misc_feature (1)..(288): Homolog of NCBI NO: 15241203 NR Description: 11-beta-hydroxysteroid dehydrogenase-like
  misc_feature (1)..(307): Homolog of NCBI NO: 15232779 NR Description: putative protein; protein id: At3g47360.1
  misc_feature (1)..(307): Homolog of NCBI NO: 15232777 NR Description: putative protein; protein id: At3g47350.1
  misc_feature (1)..(288): Homolog of NCBI NO: 15234888 NR Description: putative oxidoreductase; protein id: At4g10020.1
  misc_feature (14)..(289): Homolog of NCBI NO: 21742781 NR Description: OSJNBa0055C08.3 [Oryza sativa (japonica
  misc_feature (1)..(298): Homolog of NCBI NO: 21311775 NR Description: steroleosin-B [Sesamum indicum]
  misc_feature (1)..(304): Homolog of NCBI NO: 15241261 NR Description: putative protein; protein id: At5g50770.1
  misc_feature (1)..(290): Homolog of NCBI NO: 18423187 NR Description: 11-beta-hydroxysteroid dehydrogenase-like
  misc_feature (1)..(298): Homolog of NCBI NO: 15824408 NR Description: steroleosin [Sesamum indicum]
  misc_feature (1)..(288): Homolog of NCBI NO: 8777392 NR Description: 11-beta-hydroxysteroid dehydrogenase-like
  misc_feature (1)..(288): Homolog of NCBI NO: 15241203 NR Description: 11-beta-hydroxysteroid dehydrogenase-like
  misc_feature (1)..(307): Homolog of NCBI NO: 15232779 NR Description: putative protein; protein id: At3g47360.1
  misc_feature (1)..(307): Homolog of NCBI NO: 15232777 NR Description: putative protein; protein id: At3g47350.1
MLHTILNFLLPPLTISFLVLFYPFYLFIKLVRFLVKHLRFENVTGKVVLITGASSGIGEHVAYEYAKKGAKLALVARRKDRLEIVAETSRQLGSGDVIIIPGDVSKVEDCKKFIDGTIHHFGKLDHLINNAGVPQTVIFEDFTQIQDAISIMDINFWGSTSITYFAIPHLRKSKGKIVVISSATAIIPLPAASVYSASKAALVKFFETLRVEISPDIKITIALSGFISTDMTTPQFKEMYGSDFILLESVSQCAKAIFRGIGRGEAYVIEPSWIKWIFLIKNVCPEIVDYVLDYIFVSYLRPYFKRD

SEQ ID NO: 28443 - protein, 156 aa, Arabidopsis thaliana
  peptide (1)..(156): Ceres Seq. ID no. 12488550
  misc_feature (1)..(137): Homolog of NCBI NO: 15234888 NR Description: putative oxidoreductase; protein id: At4g10020.1
  misc_feature (1)..(138): Homolog of NCBI NO: 21742781 NR Description: OSJNBa0055C08.3 [Oryza sativa (japonica
  misc_feature (1)..(147): Homolog of NCBI NO: 21311775 NR Description: steroleosin-B [Sesamum indicum]
  misc_feature (1)..(153): Homolog of NCBI NO: 15241261 NR Description: putative protein; protein id: At5g50770.1
  misc_feature (1)..(139): Homolog of NCBI NO: 18423187 NR Description: 11-beta-hydroxysteroid dehydrogenase-like
  misc_feature (1)..(147): Homolog of NCBI NO: 15824408 NR Description: steroleosin [Sesamum indicum]
  misc_feature (1)..(137): Homolog of NCBI NO: 8777392 NR Description: 11-beta-hydroxysteroid dehydrogenase-like
  misc_feature (1)..(137): Homolog of NCBI NO: 15241203 NR Description: 11-beta-hydroxysteroid dehydrogenase-like
  misc_feature (1)..(156): Homolog of NCBI NO: 15232779 NR Description: putative protein; protein id: At3g47360.1
  misc_feature (1)..(156): Homolog of NCBI NO: 15232777 NR Description: putative protein; protein id: At3g47350.1
  misc_feature (1)..(137): Homolog of NCBI NO: 15234888 NR Description: putative oxidoreductase; protein id: At4g10020.1
  misc_feature (1)..(138): Homolog of NCBI NO: 21742781 NR Description: OSJNBa0055C08.3 [Oryza sativa (japonica
  misc_feature (1)..(147): Homolog of NCBI NO: 21311775 NR Description: steroleosin-B [Sesamum indicum]
  misc_feature (1)..(153): Homolog of NCBI NO: 15241261 NR Description: putative protein; protein id: At5g50770.1
  misc_feature (1)..(139): Homolog of NCBI NO: 18423187 NR Description: 11-beta-hydroxysteroid dehydrogenase-like
  misc_feature (1)..(147): Homolog of NCBI NO: 15824408 NR Description: steroleosin [Sesamum indicum]
  misc_feature (1)..(137): Homolog of NCBI NO: 8777392 NR Description: 11-beta-hydroxysteroid dehydrogenase-like
  misc_feature (1)..(137): Homolog of NCBI NO: 15241203 NR Description: 11-beta-hydroxysteroid dehydrogenase-like
  misc_feature (1)..(156): Homolog of NCBI NO: 15232779 NR Description: putative protein; protein id: At3g47360.1
  misc_feature (1)..(156): Homolog of NCBI NO: 15232777 NR Description: putative protein; protein id: At3g47350.1
MDINFWGSTSITYFAIPHLRKSKGKIVVISSATAIIPLPAASVYSASKAALVKFFETLRVEISPDIKITIALSGFISTDMTTPQFKEMYGSDFILLESVSQCAKAIFRGIGRGEAYVIEPSWIKWIFLIKNVCPEIVDYVLDYIFVSYLRPYFKRD

SEQ ID NO: 28444 - DNA, 1299 bp, Arabidopsis thaliana
  misc_feature (1)..(1299): Ceres Seq. ID no. 12324245
  misc_feature: MA Experiment ID: 20000179 Result: Up-regulated in Transcription
  misc_feature: MA Experiment 20000179 PARAMETER Experiment Name: At_Germinating_Seeds_P Parameter: Age (hr) Value: 6 vs. 0
  misc_feature: MA Experiment 20000179 PARAMETER Experiment Name: At_Germinating_Seeds_P Parameter: Tissue Value: Germinating Seeds
  misc_feature: MA Experiment ID: 20001557 Result: Up-regulated in Transcription
  misc_feature: MA Experiment 20001557 PARAMETER Experiment Name: At_Drought_Soil_Dry_P Parameter: Age (day) Value: 27
  misc_feature: MA Experiment 20001557 PARAMETER Experiment Name: At_Drought_Soil_Dry_P Parameter: Organism Value: A. thaliana
  misc_feature: MA Experiment 20001557 PARAMETER Experiment Name: At_Drought_Soil_Dry_P Parameter: Plant Line Value: WS
  misc_feature: MA Experiment 20001557 PARAMETER Experiment Name: At_Drought_Soil_Dry_P Parameter: Post Timepoint (hr) Value: 3
  misc_feature: MA Experiment 20001557 PARAMETER Experiment Name: At_Drought_Soil_Dry_P Parameter: Post-Treatment Value: Re-Water vs. No Drought
  misc_feature: MA Experiment 20001557 PARAMETER Experiment Name: At_Drought_Soil_Dry_P Parameter: Timepoint (day) Value: 13
  misc_feature: MA Experiment 20001557 PARAMETER Experiment Name: At_Drought_Soil_Dry_P Parameter: Treatment Value: Drought vs. No Drought
tccatttccgtcttcacacagtttagggttcacaacttgattcggatcgaaagcaccgagaagaagaagccaatcaatcatgtctagacaagtggcaaggcttatcggatctctgtcatcaaaagctcgccgttgttctaccggcggctcagaggtttttccgtcatgccagtctctcacttcgttgacccaatctcgctccttcgcgtcggatcctcatcctcctgcggcggttttcgttgacaaaaacacacgagtcctctgtcaaggcatcaccggaaagaacggcactttccacactgaacaagccattgagtacggcaccaaaatggtggcaggagtgacaccgaagaagggtggaacagaacacttgggtctcccagttttcaactctgttgctgaagctaaggctgacaccaaagccaatgcctctgtgatttatgttcctgctccttttgctgctgctgctattatggagggtattgaggctgagttagatcttattgtgtgtatcaccgaaggaatccctcaacatgacatggtacgtgtaaagcatgctcttaacagtcaatcgaaaactaggctgattggtccaaactgccctgggattatcaagcctggtgaatgcaaaattggaattatgccgggatacatccacaagcctgggaagattggaattgtctcacgatctggaaccttgacatatgaagctgttttccaaacaactgcagtgggtctaggccaatctacttgtgtaggaatcggtggggatccttttaacgggacaaactttgtcgactgcttggagaaattctttgttgatcctcaaacagaaggtatcgttctcattggagaaatcggaggcactgcagaagaagatgctgcagcattgataaaggcaagtggtactgagaagcctgttgttgcttttattgctggacttactgcaccaccgggtcgtcgaatgggtcatgccggagccattgtttccggtggtaaaggtacggctcaggacaaaattaagagtttgaatgatgctggagtgaaggttgttgaatctccggctaagattggatcagcgatgtatgagctctttcaagaaagaggtcttttgaagcagtgaagtgaatttcactagctttcgcttctttttttccatcttgaaaccttcaagaaaaaagaaaagaaaaaaaccctaattccacgccattgatggctgcacacttttttggggtttgttttgctatattgatatgatttttccaattgaacagtgataattaaaagagattcaaatcc

SEQ ID NO: 28445 - protein, 347 aa, Arabidopsis thaliana
  peptide (1)..(347): Ceres Seq. ID no. 12324246
  misc_feature (53)..(164): Pfam Name: CoA binding domain Pfam Description: CoA binding domain
  misc_feature (40)..(335): Homolog of NCBI NO: 1711574 NR Description: SUCCINYL-COA LIGASE
  misc_feature (52)..(345): Homolog of NCBI NO: 20141810 NR Description: Succinyl-CoA ligase
  misc_feature (52)..(345): Homolog of NCBI NO: 16758586 NR Description: succinate-CoA ligase, GDP-forming, alpha subunit
  misc_feature (52)..(345): Homolog of NCBI NO: 38181885 NR Description: Suclg1 protein [Rattus norvegicus]
  misc_feature (12)..(346): Homolog of NCBI NO: 34393512 NR Description: putative succinyl-CoA ligase alpha subunit
  misc_feature (1)..(345): Homolog of NCBI NO: 27357175 NR Description: succinyl-CoA ligase alpha subunit [Lycopersicon
  misc_feature (52)..(346): Homolog of NCBI NO: 1076415 NR Description: succinate-CoA ligase (GDP-forming) (EC 6.2.1.4)
  misc_feature (1)..(346): Homolog of NCBI NO: 21593483 NR Description: succinyl-CoA synthetase, alpha subunit
  misc_feature (1)..(346): Homolog of NCBI NO: 15237260 NR Description: succinyl-CoA synthetase, alpha subunit
  misc_feature (1)..(347): Homolog of NCBI NO: 15241592 NR Description: succinyl-CoA-ligase alpha subunit
MSRQVARLIGSLSSKARRCSTGGSEVFPSCQSLTSLTQSRSFASDPHPPAAVFVDKNTRVLCQGITGKNGTFHTEQAIEYGTKMVAGVTPKKGGTEHLGLPVFNSVAEAKADTKANASVIYVPAPFAAAAIMEGIEAELDLIVCITEGIPQHDMVRVKHALNSQSKTRLIGPNCPGIIKPGECKIGIMPGYIHKPGKIGIVSRSGTLTYEAVFQTTAVGLGQSTCVGIGGDPFNGTNFVDCLEKFFVDPQTEGIVLIGEIGGTAEEDAAALIKASGTEKPVVAFIAGLTAPPGRRMGHAGAIVSGGKGTAQDKIKSLNDAGVKVVESPAKIGSAMYELFQERGLLKQ

SEQ ID NO: 28446 - protein, 264 aa, Arabidopsis thaliana
  peptide (1)..(264): Ceres Seq. ID no. 12324247
  misc_feature (1)..(81): Pfam Name: CoA binding domain Pfam Description: CoA binding domain
  misc_feature (1)..(252): Homolog of NCBI NO: 1711574 NR Description: SUCCINYL-COA LIGASE
  misc_feature (1)..(262): Homolog of NCBI NO: 20141810 NR Description: Succinyl-CoA ligase
  misc_feature (1)..(262): Homolog of NCBI NO: 16758586 NR Description: succinate-CoA ligase, GDP-forming, alpha subunit
  misc_feature (1)..(262): Homolog of NCBI NO: 38181885 NR Description: Suclg1 protein [Rattus norvegicus]
  misc_feature (1)..(263): Homolog of NCBI NO: 34393512 NR Description: putative succinyl-CoA ligase alpha subunit
  misc_feature (1)..(262): Homolog of NCBI NO: 27357175 NR Description: succinyl-CoA ligase alpha subunit [Lycopersicon
  misc_feature (1)..(263): Homolog of NCBI NO: 1076415 NR Description: succinate-CoA ligase (GDP-forming) (EC 6.2.1.4)
  misc_feature (1)..(263): Homolog of NCBI NO: 21593483 NR Description: succinyl-CoA synthetase, alpha subunit
  misc_feature (1)..(263): Homolog of NCBI NO: 15237260 NR Description: succinyl-CoA synthetase, alpha subunit
  misc_feature (1)..(264): Homolog of NCBI NO: 15241592 NR Description: succinyl-CoA-ligase alpha subunit
MVAGVTPKKGGTEHLGLPVFNSVAEAKADTKANASVIYVPAPFAAAAIMEGIEAELDLIVCITEGIPQHDMVRVKHALNSQSKTRLIGPNCPGIIKPGECKIGIMPGYIHKPGKIGIVSRSGTLTYEAVFQTTAVGLGQSTCVGIGGDPFNGTNFVDCLEKFFVDPQTEGIVLIGEIGGTAEEDAAALIKASGTEKPVVAFIAGLTAPPGRRMGHAGAIVSGGKGTAQDKIKSLNDAGVKVVESPAKIGSAMYELFQERGLLKQ

SEQ ID NO: 28447 - protein, 216 aa, Arabidopsis thaliana
  peptide (1)..(216): Ceres Seq. ID no. 12324248
  misc_feature (1)..(204): Homolog of NCBI NO: 1711574 NR Description: SUCCINYL-COA LIGASE
  misc_feature (1)..(214): Homolog of NCBI NO: 20141810 NR Description: Succinyl-CoA ligase
  misc_feature (1)..(214): Homolog of NCBI NO: 16758586 NR Description: succinate-CoA ligase, GDP-forming, alpha subunit
  misc_feature (1)..(214): Homolog of NCBI NO: 38181885 NR Description: Suclg1 protein [Rattus norvegicus]
  misc_feature (1)..(215): Homolog of NCBI NO: 34393512 NR Description: putative succinyl-CoA ligase alpha subunit
  misc_feature (1)..(214): Homolog of NCBI NO: 27357175 NR Description: succinyl-CoA ligase alpha subunit [Lycopersicon
  misc_feature (1)..(215): Homolog of NCBI NO: 1076415 NR Description: succinate-CoA ligase (GDP-forming) (EC 6.2.1.4)
  misc_feature (1)..(215): Homolog of NCBI NO: 21593483 NR Description: succinyl-CoA synthetase, alpha subunit
  misc_feature (1)..(215): Homolog of NCBI NO: 15237260 NR Description: succinyl-CoA synthetase, alpha subunit
  misc_feature (1)..(216): Homolog of NCBI NO: 15241592 NR Description: succinyl-CoA-ligase alpha subunit
MEGIEAELDLIVCITEGIPQHDMVRVKHALNSQSKTRLIGPNCPGIIKPGECKIGIMPGYIHKPGKIGIVSRSGTLTYEAVFQTTAVGLGQSTCVGIGGDPFNGTNFVDCLEKFFVDPQTEGIVLIGEIGGTAEEDAAALIKASGTEKPVVAFIAGLTAPPGRRMGHAGAIVSGGKGTAQDKIKSLNDAGVKVVESPAKIGSAMYELFQERGLLKQ

SEQ ID NO: 28448 - DNA, 1294 bp, Arabidopsis thaliana
  misc_feature (1)..(1294): Ceres Seq. ID no. 13487534
  misc_feature: MA Experiment ID: 20000184 Result: Up-regulated in Transcription
  misc_feature: MA Experiment 20000184 PARAMETER Experiment Name: At_Shoots__P Parameter: Age (day) Value: 7
  misc_feature: MA Experiment 20000184 PARAMETER Experiment Name: At_Shoots__P Parameter: Tissue Value: Shoots vs. Whole Plant
  misc_feature: MA Experiment ID: 20000227 Result: Up-regulated in Transcription
  misc_feature: MA Experiment 20000227 PARAMETER Experiment Name: At_Root-Tips-vs-Tops_P Parameter: Tissue Value: Root Tips vs. Root Tops
  misc_feature: MA Experiment ID: 20000437 Result: Down-regulated in Transcription
  misc_feature: MA Experiment 20000437 PARAMETER Experiment Name: At_Drought_P Parameter: Age (day) Value: 8
  misc_feature: MA Experiment 20000437 PARAMETER Experiment Name: At_Drought_P Parameter: Organism Value: A. thaliana
  misc_feature: MA Experiment 20000437 PARAMETER Experiment Name: At_Drought_P Parameter: Plant Line Value: WS
  misc_feature: MA Experiment 20000437 PARAMETER Experiment Name: At_Drought_P Parameter: Timepoint (hr) Value: 24
  misc_feature: MA Experiment 20000437 PARAMETER Experiment Name: At_Drought_P Parameter: Tissue Value: Whole Plant
  misc_feature: MA Experiment 20000437 PARAMETER Experiment Name: At_Drought_P Parameter: Treatment Value: Drought vs. No Drought
  misc_feature: MA Experiment ID: 20000439 Result: Down-regulated in Transcription
  misc_feature: MA Experiment 20000439 PARAMETER Experiment Name: At_Roots__P Parameter: Age (day) Value: 14 vs. 21
  misc_feature: MA Experiment 20000439 PARAMETER Experiment Name: At_Roots__P Parameter: Organism Value: A. thaliana
  misc_feature: MA Experiment 20000439 PARAMETER Experiment Name: At_Roots__P Parameter: Tissue Value: Roots vs. Whole Plant
  misc_feature: MA Experiment ID: 20000527 Result: Up-regulated in Transcription
  misc_feature: MA Experiment 20000527 PARAMETER Experiment Name: At_10percent_PEG_P Parameter: Age (day) Value: 20
  misc_feature: MA Experiment 20000527 PARAMETER Experiment Name: At_10percent_PEG_P Parameter: Organism Value: A. thaliana
  misc_feature: MA Experiment 20000527 PARAMETER Experiment Name: At_10percent_PEG_P Parameter: Plant Line Value: WS
  misc_feature: MA Experiment 20000527 PARAMETER Experiment Name: At_10percent_PEG_P Parameter: Timepoint (day) Value: 20
  misc_feature: MA Experiment 20000527 PARAMETER Experiment Name: At_10percent_PEG_P Parameter: Tissue Value: Whole Plant
  misc_feature: MA Experiment 20000527 PARAMETER Experiment Name: At_10percent_PEG_P Parameter: Treatment Value: 10percent PEG vs. No Treatment
  misc_feature: MA Experiment ID: 20000794 Result: Down-regulated in Transcription
  misc_feature: MA Experiment 20000794 PARAMETER Experiment Name: At_Petals_P Parameter: Age (day) Value: 23-25 days
  misc_feature: MA Experiment 20000794 PARAMETER Experiment Name: At_Petals_P Parameter: Plant Line Value: WS
  misc_feature: MA Experiment 20000794 PARAMETER Experiment Name: At_Petals_P Parameter: Tissue Value: Petals vs. Whole plant
  misc_feature: MA Experiment ID: 20001450 Result: Down-regulated in Transcription
  misc_feature: MA Experiment 20001450 PARAMETER Experiment Name: At_Far-red-induction_P Parameter: Age (day) Value: 7
  misc_feature: MA Experiment 20001450 PARAMETER Experiment Name: At_Far-red-induction_P Parameter: Light Value: Far-red vs. White
  misc_feature: MA Experiment 20001450 PARAMETER Experiment Name: At_Far-red-induction_P Parameter: Organism Value: A. thaliana
  misc_feature: MA Experiment 20001450 PARAMETER Experiment Name: At_Far-red-induction_P Parameter: Plant Line Value: Columbia
  misc_feature: MA Experiment 20001450 PARAMETER Experiment Name: At_Far-red-induction_P Parameter: Timepoint (hr) Value: 8
  misc_feature: MA Experiment 20001450 PARAMETER Experiment Name: At_Far-red-induction_P Parameter: Tissue Value: Whole Plant
  misc_feature: MA Experiment ID: 20001558 Result: Up-regulated in Transcription
  misc_feature: MA Experiment 20001558 PARAMETER Experiment Name: At_Drought_Soil_Dry_P Parameter: Age (day) Value: 27
  misc_feature: MA Experiment 20001558 PARAMETER Experiment Name: At_Drought_Soil_Dry_P Parameter: Organism Value: A. thaliana
  misc_feature: MA Experiment 20001558 PARAMETER Experiment Name: At_Drought_Soil_Dry_P Parameter: Plant Line Value: WS
  misc_feature: MA Experiment 20001558 PARAMETER Experiment Name: At_Drought_Soil_Dry_P Parameter: Post Timepoint (hr) Value: 6
  misc_feature: MA Experiment 20001558 PARAMETER Experiment Name: At_Drought_Soil_Dry_P Parameter: Post-Treatment Value: Re-Water vs. No Drought
  misc_feature: MA Experiment 20001558 PARAMETER Experiment Name: At_Drought_Soil_Dry_P Parameter: Timepoint (day) Value: 13
  misc_feature: MA Experiment 20001558 PARAMETER Experiment Name: At_Drought_Soil_Dry_P Parameter: Treatment Value: Drought vs. No Drought
  misc_feature: MA Experiment ID: 20001560 Result: Up-regulated in Transcription
  misc_feature: MA Experiment 20001560 PARAMETER Experiment Name: At_Drought_Soil_Dry_P Parameter: Age (day) Value: 28
  misc_feature: MA Experiment 20001560 PARAMETER Experiment Name: At_Drought_Soil_Dry_P Parameter: Organism Value: A. thaliana
  misc_feature: MA Experiment 20001560 PARAMETER Experiment Name: At_Drought_Soil_Dry_P Parameter: Plant Line Value: WS
  misc_feature: MA Experiment 20001560 PARAMETER Experiment Name: At_Drought_Soil_Dry_P Parameter: Post Timepoint (hr) Value: None
  misc_feature: MA Experiment 20001560 PARAMETER Experiment Name: At_Drought_Soil_Dry_P Parameter: Post-Treatment Value: None
  misc_feature: MA Experiment 20001560 PARAMETER Experiment Name: At_Drought_Soil_Dry_P Parameter: Timepoint (day) Value: 14
  misc_feature: MA Experiment 20001560 PARAMETER Experiment Name: At_Drought_Soil_Dry_P Parameter: Treatment Value: Drought vs. No Drought
  misc_feature: MA Experiment ID: 20001757 Result: Up-regulated in Transcription
  misc_feature: MA Experiment 20001757 PARAMETER Experiment Name: At_50mM_NH4NO3_L-to-H_P Parameter: Timepoint (hr) Value: 6
  misc_feature: MA Experiment 20001757 PARAMETER Experiment Name: At_50mM_NH4NO3_L-to-H_P Parameter: Tissue Value: Leaf
  misc_feature: MA Experiment 20001757 PARAMETER Experiment Name: At_50mM_NH4NO3_L-to-H_P Parameter: Treatment Value: 50mM NH4NO3 vs 100mM Mannitol
aaaaacttccgtatcctggagagtaaattcctttatggctacgaatgggttaatggcgtcgtccagtgtgtttcttcatcgcccgcgtatcgcatttgcttctagaacgaatcagactgtaggaaaatacggtaaaggccgtgttagtttcatgggcattgggacacgtcgtcttccggtggttttatccatgacggcgatggcggattccggtgaggaggccgtgaaatctgttttgcctggaaatggcatatccatcatggtgaatggatgtagtggcaaaatggggaaagctgtaattaaagcagcagactctgcaggagtaaatattgttcccatatcgtttggatctgctggtgaggatggtcagagagttgaggtctgtggaaaggagattactgtgcacggtccaactgaaagagaaaaggttctttcttcggtgtttgagaagcacccggagctaattgttgtcgactacacaattccctctgcagtaaatgataatgcggagctgtatagcaaagtaggtgttcctttcgtcatgggaacaactggtggagataggaacaaattgtatgaaactgttgaggaagcaaagatttatgctgtgatttctccacagatgggtaaacaggttgtagcatttcttgcggccatggagatcatggctgagcagtttccgggagccttttctggttattccttggatgtgatggagtctcatcaagctagcaaattggatgcatccggaacagcaaaagctgttatttcttgcttccaggaattgggtgtgtcttacgacatggatcagatacaattgattcgggatccaaaacagcaagtggagatggtgggtgtacctgaggagcatatctctggtcacgctttccatctttatcacttgacatcacccgatgaaactgtctccttcgagttccagcacaatgtctgcggccgatcaatttatgctgagggtactgttgatgccgtgctcttcctcgccaaaaagattcgattgaaagcagatcagcgaatctacaacatgatcgatgtcttgagagagggaaatatgcgttgagctttcgagttttgccagtgcattgaccaaatggtggttgtagaagagctgagattagatttaccaaatcatcagctgtgaaaattagatgtttggtttcccacttcttctgccttgagcacaggcttttgaaattccttggtatatacaagaacttgccattgtattgttcatgttttgacctctttacctcaatgttattctcctttctggatc

SEQ ID NO: 28449 - protein, 358 aa, Arabidopsis thaliana
  peptide (1)..(358): Ceres Seq. ID no. 13487535
  misc_feature (211)..(353): Pfam Name: Dihydrodipicolinate reductase, C-terminus Pfam Description: Dihydrodipicolinate reductase, C-terminus
  misc_feature (84)..(352): Homolog of NCBI NO: 15668598 NR Description: dihydrodipicolinate reductase (dapB)
  misc_feature (84)..(352): Homolog of NCBI NO: 7531267 NR Description: DIHYDRODIPICOLINATE REDUCTASE (DHPR)
  misc_feature (84)..(352): Homolog of NCBI NO: 22299530 NR Description: dihydrodipicolinate reductase
  misc_feature (12)..(336): Homolog of NCBI NO: 11357603 NR Description: hypothetical protein F24G16.160 - Arabidopsis
  misc_feature (12)..(358): Homolog of NCBI NO: 18411368 NR Description: expressed protein [Arabidopsis thaliana]
  misc_feature (18)..(337): Homolog of NCBI NO: 7486478 NR Description: hypothetical protein At2g44040 [imported] -
  misc_feature (12)..(358): Homolog of NCBI NO: 18406430 NR Description: expressed protein [Arabidopsis thaliana]
KTSVSWRVNSFMATNGLMASSSVFLHRPRIAFASRTNQTVGKYGKGRVSFMGIGTRRLPVVLSMTAMADSGEEAVKSVLPGNGISIMVNGCSGKMGKAVIKAADSAGVNIVPISFGSAGEDGQRVEVCGKEITVHGPTEREKVLSSVFEKHPELIVVDYTIPSAVNDNAELYSKVGVPFVMGTTGGDRNKLYETVEEAKIYAVISPQMGKQVVAFLAAMEIMAEQFPGAFSGYSLDVMESHQASKLDASGTAKAVISCFQELGVSYDMDQIQLIRDPKQQVEMVGVPEEHISGHAFHLYHLTSPDETVSFEFQHNVCGRSIYAEGTVDAVLFLAKKIRLKADQRIYNMIDVLREGNMR

SEQ ID NO: 28450 - protein, 347 aa, Arabidopsis thaliana
  peptide (1)..(347): Ceres Seq. ID no. 13487536
  misc_feature (200)..(342): Pfam Name: Dihydrodipicolinate reductase, C-terminus Pfam Description: Dihydrodipicolinate reductase, C-terminus
  misc_feature (73)..(341): Homolog of NCBI NO: 15668598 NR Description: dihydrodipicolinate reductase (dapB)
  misc_feature (73)..(341): Homolog of NCBI NO: 7531267 NR Description: DIHYDRODIPICOLINATE REDUCTASE (DHPR)
  misc_feature (73)..(341): Homolog of NCBI NO: 22299530 NR Description: dihydrodipicolinate reductase
  misc_feature (1)..(325): Homolog of NCBI NO: 11357603 NR Description: hypothetical protein F24G16.160 - Arabidopsis
  misc_feature (1)..(347): Homolog of NCBI NO: 18411368 NR Description: expressed protein [Arabidopsis thaliana]
  misc_feature (7)..(326): Homolog of NCBI NO: 7486478 NR Description: hypothetical protein At2g44040 [imported] -
  misc_feature (1)..(347): Homolog of NCBI NO: 18406430 NR Description: expressed protein [Arabidopsis thaliana]
MATNGLMASSSVFLHRPRIAFASRTNQTVGKYGKGRVSFMGIGTRRLPVVLSMTAMADSGEEAVKSVLPGNGISIMVNGCSGKMGKAVIKAADSAGVNIVPISFGSAGEDGQRVEVCGKEITVHGPTEREKVLSSVFEKHPELIVVDYTIPSAVNDNAELYSKVGVPFVMGTTGGDRNKLYETVEEAKIYAVISPQMGKQVVAFLAAMEIMAEQFPGAFSGYSLDVMESHQASKLDASGTAKAVISCFQELGVSYDMDQIQLIRDPKQQVEMVGVPEEHISGHAFHLYHLTSPDETVSFEFQHNVCGRSIYAEGTVDAVLFLAKKIRLKADQRIYNMIDVLREGNMR

SEQ ID NO: 28451 - protein, 341 aa, Arabidopsis thaliana
  peptide (1)..(341): Ceres Seq. ID no. 13487537
  misc_feature (194)..(336): Pfam Name: Dihydrodipicolinate reductase, C-terminus Pfam Description: Dihydrodipicolinate reductase, C-terminus
  misc_feature (67)..(335): Homolog of NCBI NO: 15668598 NR Description: dihydrodipicolinate reductase (dapB)
  misc_feature (67)..(335): Homolog of NCBI NO: 7531267 NR Description: DIHYDRODIPICOLINATE REDUCTASE (DHPR)
  misc_feature (67)..(335): Homolog of NCBI NO: 22299530 NR Description: dihydrodipicolinate reductase
  misc_feature (1)..(319): Homolog of NCBI NO: 11357603 NR Description: hypothetical protein F24G16.160 - Arabidopsis
  misc_feature (1)..(341): Homolog of NCBI NO: 18411368 NR Description: expressed protein [Arabidopsis thaliana]
  misc_feature (1)..(320): Homolog of NCBI NO: 7486478 NR Description: hypothetical protein At2g44040 [imported] -
  misc_feature (1)..(341): Homolog of NCBI NO: 18406430 NR Description: expressed protein [Arabidopsis thaliana]
MASSSVFLHRPRIAFASRTNQTVGKYGKGRVSFMGIGTRRLPVVLSMTAMADSGEEAVKSVLPGNGISIMVNGCSGKMGKAVIKAADSAGVNIVPISFGSAGEDGQRVEVCGKEITVHGPTEREKVLSSVFEKHPELIVVDYTIPSAVNDNAELYSKVGVPFVMGTTGGDRNKLYETVEEAKIYAVISPQMGKQVVAFLAAMEIMAEQFPGAFSGYSLDVMESHQASKLDASGTAKAVISCFQELGVSYDMDQIQLIRDPKQQVEMVGVPEEHISGHAFHLYHLTSPDETVSFEFQHNVCGRSIYAEGTVDAVLFLAKKIRLKADQRIYNMIDVLREGNMR

SEQ ID NO: 28452 - DNA, 1520 bp, Arabidopsis thaliana
  misc_feature (1)..(1520): Ceres Seq. ID no. 13499768
  misc_feature: MA Experiment ID: 20000173 Result: Up-regulated in Transcription
  misc_feature: MA Experiment 20000173 PARAMETER Experiment Name: At_42deg_Heat_P Parameter: Age (day) Value: 14
  misc_feature: MA Experiment 20000173 PARAMETER Experiment Name: At_42deg_Heat_P Parameter: Organism Value: A. thaliana
  misc_feature: MA Experiment 20000173 PARAMETER Experiment Name: At_42deg_Heat_P Parameter: Plant Line Value: WS
  misc_feature: MA Experiment 20000173 PARAMETER Experiment Name: At_42deg_Heat_P Parameter: Temperature (deg C) Value: 42 vs. 22
  misc_feature: MA Experiment 20000173 PARAMETER Experiment Name: At_42deg_Heat_P Parameter: Timepoint (hr) Value: 6
  misc_feature: MA Experiment 20000173 PARAMETER Experiment Name: At_42deg_Heat_P Parameter: Tissue Value: Aerial
  misc_feature: MA Experiment ID: 20000437 Result: Down-regulated in Transcription
  misc_feature: MA Experiment 20000437 PARAMETER Experiment Name: At_Drought_P Parameter: Age (day) Value: 8
  misc_feature: MA Experiment 20000437 PARAMETER Experiment Name: At_Drought_P Parameter: Organism Value: A. thaliana
  misc_feature: MA Experiment 20000437 PARAMETER Experiment Name: At_Drought_P Parameter: Plant Line Value: WS
  misc_feature: MA Experiment 20000437 PARAMETER Experiment Name: At_Drought_P Parameter: Timepoint (hr) Value: 24
  misc_feature: MA Experiment 20000437 PARAMETER Experiment Name: At_Drought_P Parameter: Tissue Value: Whole Plant
  misc_feature: MA Experiment 20000437 PARAMETER Experiment Name: At_Drought_P Parameter: Treatment Value: Drought vs. No Drought
  misc_feature: MA Experiment ID: 20000794 Result: Up-regulated in Transcription
  misc_feature: MA Experiment 20000794 PARAMETER Experiment Name: At_Petals_P Parameter: Age (day) Value: 23-25 days
  misc_feature: MA Experiment 20000794 PARAMETER Experiment Name: At_Petals_P Parameter: Plant Line Value: WS
  misc_feature: MA Experiment 20000794 PARAMETER Experiment Name: At_Petals_P Parameter: Tissue Value: Petals vs. Whole plant
  misc_feature: MA Experiment ID: 20001247 Result: Down-regulated in Transcription
  misc_feature: MA Experiment 20001247 PARAMETER Experiment Name: At_Far-red-induction_P Parameter: Age (day) Value: 7
  misc_feature: MA Experiment 20001247 PARAMETER Experiment Name: At_Far-red-induction_P Parameter: Light Value: Far-red vs. White
  misc_feature: MA Experiment 20001247 PARAMETER Experiment Name: At_Far-red-induction_P Parameter: Organism Value: A. thaliana
  misc_feature: MA Experiment 20001247 PARAMETER Experiment Name: At_Far-red-induction_P Parameter: Plant Line Value: Columbia
  misc_feature: MA Experiment 20001247 PARAMETER Experiment Name: At_Far-red-induction_P Parameter: Timepoint (hr) Value: 1
  misc_feature: MA Experiment 20001247 PARAMETER Experiment Name: At_Far-red-induction_P Parameter: Tissue Value: Whole Plant
  misc_feature: MA Experiment ID: 20001248 Result: Down-regulated in Transcription
  misc_feature: MA Experiment 20001248 PARAMETER Experiment Name: At_Far-red-induction_P Parameter: Age (day) Value: 7
  misc_feature: MA Experiment 20001248 PARAMETER Experiment Name: At_Far-red-induction_P Parameter: Light Value: Far-red vs. White
  misc_feature: MA Experiment 20001248 PARAMETER Experiment Name: At_Far-red-induction_P Parameter: Organism Value: A. thaliana
  misc_feature: MA Experiment 20001248 PARAMETER Experiment Name: At_Far-red-induction_P Parameter: Plant Line Value: Columbia
  misc_feature: MA Experiment 20001248 PARAMETER Experiment Name: At_Far-red-induction_P Parameter: Timepoint (hr) Value: 4
  misc_feature: MA Experiment 20001248 PARAMETER Experiment Name: At_Far-red-induction_P Parameter: Tissue Value: Whole Plant
  misc_feature: MA Experiment ID: 20001450 Result: Down-regulated in Transcription
  misc_feature: MA Experiment 20001450 PARAMETER Experiment Name: At_Far-red-induction_P Parameter: Age (day) Value: 7
  misc_feature: MA Experiment 20001450 PARAMETER Experiment Name: At_Far-red-induction_P Parameter: Light Value: Far-red vs. White
  misc_feature: MA Experiment 20001450 PARAMETER Experiment Name: At_Far-red-induction_P Parameter: Organism Value: A. thaliana
  misc_feature: MA Experiment 20001450 PARAMETER Experiment Name: At_Far-red-induction_P Parameter: Plant Line Value: Columbia
  misc_feature: MA Experiment 20001450 PARAMETER Experiment Name: At_Far-red-induction_P Parameter: Timepoint (hr) Value: 8
  misc_feature: MA Experiment 20001450 PARAMETER Experiment Name: At_Far-red-induction_P Parameter: Tissue Value: Whole Plant
  misc_feature: MA Experiment ID: 20001451 Result: Down-regulated in Transcription
  misc_feature: MA Experiment 20001451 PARAMETER Experiment Name: At_Far-red-induction_P Parameter: Age (day) Value: 7
  misc_feature: MA Experiment 20001451 PARAMETER Experiment Name: At_Far-red-induction_P Parameter: Light Value: Far-red vs. White
  misc_feature: MA Experiment 20001451 PARAMETER Experiment Name: At_Far-red-induction_P Parameter: Organism Value: A. thaliana
  misc_feature: MA Experiment 20001451 PARAMETER Experiment Name: At_Far-red-induction_P Parameter: Plant Line Value: Columbia
  misc_feature: MA Experiment 20001451 PARAMETER Experiment Name: At_Far-red-induction_P Parameter: Timepoint (hr) Value: 24
  misc_feature: MA Experiment 20001451 PARAMETER Experiment Name: At_Far-red-induction_P Parameter: Tissue Value: Whole Plant
aagaaacaagaggtaggctcttctagcgaactcctttcatacgttttctctctactctcatcgcttttcttatctctctcggagctcttccgtcgtccaccattgattacgggagtgtattgagctaaatatggctataatacaacttggaagtacatgtgttgctcaatggagtattcgtcctcaatttgcagtcagagcttattatcccagcagaatcgaatcaactcgccatcaaaattccagtagccaagtaaattgtttgggagcttcaaagtcgagtatgttctcacatgggtcattgcccttcttgtccatgacgggaatgtccagaaatatgcatcctcctcgcagaggatctcgcttcactgttagagctgatgcagattactattcggtactcggagtttcgaaaaatgcaaccaaagctgagattaaaagcgcttatcggaagctggctaggaattaccatccggatgtgaacaaggatcctggcgcagaagagaaattcaaagaaataagtaacgcatatgaggttttatcagatgatgaaaagaaatctctttacgataggtatggtgaggccggacttaaaggcgctgctggatttggcaatggggattttagtaatccgttcgatctattcgactcattattcgaaggcttcggtggtgggatgggtagaggttcaagaagcagagctgtggatggtcaagacgagtattacacgctaatcttaaacttcaaagaagcggttttcggaatggagaaagaaatagagatatcccggctcgagagctgtgggacatgtgaaggttcaggtgcaaaacctggaaccaaaccgaccaaatgcaccacgtgtggcggacaaggccaagtggtttcagcagctagaactcctctgggcgtgttccaacaagtcatgacttgctcgtcctgtaatggcactggagagatctcgacgccgtgtggtacttgctctggagacggacgcgtgaggaagacaaaacggataagtctcaaagtaccagccggggttgattcaggtagccggttgagagtgagaggagaaggcaatgccgggaagagaggcggatcaccgggcgatctgtttgttgttatagaagttatcccagacccgattttgaaacgagacgatacaaatattctctacacttgcaagatatcgtatatcgatgcgattttagggacgacactgaaagtaccaacagtggatgggacagtagatttgaaagttccagctgggacacaacctagcacgacgcttgtgatggcgaaaaaaggagttccggtattgaacaagagtaatatgagaggagatcagttggtgagagtacaagtggagatacctaagagattgagcaaagaggagaaaaaacttattgaagagcttgctgatatgagcaagaacaggactgctaatagcaccagtagatgattagaaacacgaaaattttgacattgaaattatgaatctctctatacatatacatttttct

SEQ ID NO: 28453 - protein, 442 aa, Arabidopsis thaliana
  peptide (1)..(442): Ceres Seq. ID no. 13499769
  misc_feature (307)..(429): Pfam Name: DnaJ C terminal region Pfam Description: DnaJ C terminal region
  misc_feature (39)..(436): Homolog of NCBI NO: 14326568 NR Description: At1g80030/F18B13_37 [Arabidopsis thaliana]
  misc_feature (39)..(436): Homolog of NCBI NO: 18412605 NR Description: DnaJ protein, putative [Arabidopsis thaliana]
  misc_feature (55)..(442): Homolog of NCBI NO: 7441921 NR Description: heat shock protein dnaJ - garden pea
  misc_feature (1)..(430): Homolog of NCBI NO: 16326131 NR Description: DNAJ homologue [Oryza sativa]
  misc_feature (52)..(439): Homolog of NCBI NO: 7441920 NR Description: heat shock protein T5J17.130, dnaJ-type -
  misc_feature (1)..(439): Homolog of NCBI NO: 18420568 NR Description: DnaJ protein, putative [Arabidopsis thaliana]
  misc_feature (52)..(442): Homolog of NCBI NO: 25296019 NR Description: probable DnaJ protein [imported] - Arabidopsis
  misc_feature (1)..(442): Homolog of NCBI NO: 21536561 NR Description: putative DnaJ protein [Arabidopsis thaliana]
  misc_feature (1)..(442): Homolog of NCBI NO: 18399949 NR Description: DnaJ protein, putative [Arabidopsis thaliana]
  misc_feature (1)..(442): Homolog of NCBI NO: 30794072 NR Description: putative DnaJ protein [Arabidopsis thaliana]
MAIIQLGSTCVAQWSIRPQFAVRAYYPSRIESTRHQNSSSQVNCLGASKSSMFSHGSLPFLSMTGMSRNMHPPRRGSRFTVRADADYYSVLGVSKNATKAEIKSAYRKLARNYHPDVNKDPGAEEKFKEISNAYEVLSDDEKKSLYDRYGEAGLKGAAGFGNGDFSNPFDLFDSLFEGFGGGMGRGSRSRAVDGQDEYYTLILNFKEAVFGMEKEIEISRLESCGTCEGSGAKPGTKPTKCTTCGGQGQVVSAARTPLGVFQQVMTCSSCNGTGEISTPCGTCSGDGRVRKTKRISLKVPAGVDSGSRLRVRGEGNAGKRGGSPGDLFVVIEVIPDPILKRDDTNILYTCKISYIDAILGTTLKVPTVDGTVDLKVPAGTQPSTTLVMAKKGVPVLNKSNMRGDQLVRVQVEIPKRLSKEEKKLIEELADMSKNRTANSTSR

SEQ ID NO: 28454 - protein, 391 aa, Arabidopsis thaliana
  peptide (1)..(391): Ceres Seq. ID no. 13499770
  misc_feature (256)..(378): Pfam Name: DnaJ C terminal region Pfam Description: DnaJ C terminal region
  misc_feature (1)..(385): Homolog of NCBI NO: 14326568 NR Description: At1g80030/F18B13_37 [Arabidopsis thaliana]
  misc_feature (1)..(385): Homolog of NCBI NO: 18412605 NR Description: DnaJ protein, putative [Arabidopsis thaliana]
  misc_feature (4)..(391): Homolog of NCBI NO: 7441921 NR Description: heat shock protein dnaJ - garden pea
  misc_feature (1)..(379): Homolog of NCBI NO: 16326131 NR Description: DNAJ homologue [Oryza sativa]
  misc_feature (1)..(388): Homolog of NCBI NO: 7441920 NR Description: heat shock protein T5J17.130, dnaJ-type -
  misc_feature (1)..(388): Homolog of NCBI NO: 18420568 NR Description: DnaJ protein, putative [Arabidopsis thaliana]
  misc_feature (1)..(391): Homolog of NCBI NO: 25296019 NR Description: probable DnaJ protein [imported] - Arabidopsis
  misc_feature (1)..(391): Homolog of NCBI NO: 21536561 NR Description: putative DnaJ protein [Arabidopsis thaliana]
  misc_feature (1)..(391): Homolog of NCBI NO: 18399949 NR Description: DnaJ protein, putative [Arabidopsis thaliana]
  misc_feature (1)..(391): Homolog of NCBI NO: 30794072 NR Description: putative DnaJ protein [Arabidopsis thaliana]
MFSHGSLPFLSMTGMSRNMHPPRRGSRFTVRADADYYSVLGVSKNATKAEIKSAYRKLARNYHPDVNKDPGAEEKFKEISNAYEVLSDDEKKSLYDRYGEAGLKGAAGFGNGDFSNPFDLFDSLFEGFGGGMGRGSRSRAVDGQDEYYTLILNFKEAVFGMEKEIEISRLESCGTCEGSGAKPGTKPTKCTTCGGQGQVVSAARTPLGVFQQVMTCSSCNGTGEISTPCGTCSGDGRVRKTKRISLKVPAGVDSGSRLRVRGEGNAGKRGGSPGDLFVVIEVIPDPILKRDDTNILYTCKISYIDAILGTTLKVPTVDGTVDLKVPAGTQPSTTLVMAKKGVPVLNKSNMRGDQLVRVQVEIPKRLSKEEKKLIEELADMSKNRTANSTSR

SEQ ID NO: 28455 - protein, 380 aa, Arabidopsis thaliana
  peptide (1)..(380): Ceres Seq. ID no. 13499771
  misc_feature (245)..(367): Pfam Name: DnaJ C terminal region Pfam Description: DnaJ C terminal region
  misc_feature (1)..(374): Homolog of NCBI NO: 14326568 NR Description: At1g80030/F18B13_37 [Arabidopsis thaliana]
  misc_feature (1)..(374): Homolog of NCBI NO: 18412605 NR Description: DnaJ protein, putative [Arabidopsis thaliana]
  misc_feature (1)..(380): Homolog of NCBI NO: 7441921 NR Description: heat shock protein dnaJ - garden pea
  misc_feature (1)..(368): Homolog of NCBI NO: 16326131 NR Description: DNAJ homologue [Oryza sativa]
  misc_feature (1)..(377): Homolog of NCBI NO: 7441920 NR Description: heat shock protein T5J17.130, dnaJ-type -
  misc_feature (1)..(377): Homolog of NCBI NO: 18420568 NR Description: DnaJ protein, putative [Arabidopsis thaliana]
  misc_feature (1)..(380): Homolog of NCBI NO: 25296019 NR Description: probable DnaJ protein [imported] - Arabidopsis
  misc_feature (1)..(380): Homolog of NCBI NO: 21536561 NR Description: putative DnaJ protein [Arabidopsis thaliana]
  misc_feature (1)..(380): Homolog of NCBI NO: 18399949 NR Description: DnaJ protein, putative [Arabidopsis thaliana]
  misc_feature (1)..(380): Homolog of NCBI NO: 30794072 NR Description: putative DnaJ protein [Arabidopsis thaliana]
MTGMSRNMHPPRRGSRFTVRADADYYSVLGVSKNATKAEIKSAYRKLARNYHPDVNKDPGAEEKFKEISNAYEVLSDDEKKSLYDRYGEAGLKGAAGFGNGDFSNPFDLFDSLFEGFGGGMGRGSRSRAVDGQDEYYTLILNFKEAVFGMEKEIEISRLESCGTCEGSGAKPGTKPTKCTTCGGQGQVVSAARTPLGVFQQVMTCSSCNGTGEISTPCGTCSGDGRVRKTKRISLKVPAGVDSGSRLRVRGEGNAGKRGGSPGDLFVVIEVIPDPILKRDDTNILYTCKISYIDAILGTTLKVPTVDGTVDLKVPAGTQPSTTLVMAKKGVPVLNKSNMRGDQLVRVQVEIPKRLSKEEKKLIEELADMSKNRTANSTSR

SEQ ID NO: 28456 - DNA, 1200 bp, Arabidopsis thaliana
  misc_feature (1)..(1200): Ceres Seq. ID no. 12327357
  misc_feature: MA Experiment ID: 20000086 Result: Down-regulated in Transcription
  misc_feature: MA Experiment 20000086 PARAMETER Experiment Name: At_100uM_ABA_Mutants_cDNA_P Parameter: Plant Line Value: CS22
  misc_feature: MA Experiment 20000086 PARAMETER Experiment Name: At_100uM_ABA_Mutants_cDNA_P Parameter: Timepoint (hr) Value: 6
  misc_feature: MA Experiment 20000086 PARAMETER Experiment Name: At_100uM_ABA_Mutants_cDNA_P Parameter: Tissue Value: Aerial
  misc_feature: MA Experiment 20000086 PARAMETER Experiment Name: At_100uM_ABA_Mutants_cDNA_P Parameter: Treatment Value: 100uM ABA vs. No Treatment
  misc_feature: MA Experiment ID: 20000179 Result: Up-regulated in Transcription
  misc_feature: MA Experiment 20000179 PARAMETER Experiment Name: At_Germinating_Seeds_P Parameter: Age (hr) Value: 6 vs. 0
  misc_feature: MA Experiment 20000179 PARAMETER Experiment Name: At_Germinating_Seeds_P Parameter: Tissue Value: Germinating Seeds
  misc_feature: MA Experiment ID: 20000180 Result: Up-regulated in Transcription
  misc_feature: MA Experiment 20000180 PARAMETER Experiment Name: At_Germinating_Seeds_P Parameter: Age (hr) Value: 24 vs. 0
  misc_feature: MA Experiment 20000180 PARAMETER Experiment Name: At_Germinating_Seeds_P Parameter: Tissue Value: Germinating Seeds
  misc_feature: MA Experiment ID: 20000224 Result: Down-regulated in Transcription
  misc_feature: MA Experiment ID: 20000235 Result: Down-regulated in Transcription
  misc_feature: MA Experiment 20000235 PARAMETER Experiment Name: At_Siliques_P Parameter: Age (day) Value: 21
  misc_feature: MA Experiment 20000235 PARAMETER Experiment Name: At_Siliques_P Parameter: Organism Value: A. thaliana
  misc_feature: MA Experiment 20000235 PARAMETER Experiment Name: At_Siliques_P Parameter: Plant Line Value: WS
  misc_feature: MA Experiment 20000235 PARAMETER Experiment Name: At_Siliques_P Parameter: Tissue Value: 5-10mm Siliques vs. Whole Plant
aaacacggctctctcttcttcatcatcatcatcatcttcctctcgatcggaaaatagtcaaaagtttctataaattgttgaatcaaagcagagaagaagaagaagacgatcatgaatccagattccgattatcctcatctccctaacatcaagatccaccatccttcatctcctcgtcactctcaccaccactcttcctccactccttccgccgctactcctaccccaaccgccggtgctcgccgtaagatcggagtcgccgttgacctttccgaagaaagcgctttcgctgttcgctgggctgtcgatcattacatccgtcccggagacgccgtcgtcattctccacgtttctccaacctccgttctcttcggcgccgattggggacctctccctctccaaactcctcctcctccttccgccgctaccgatcccggagctcagccgaagcctagtcaggaagatttcgatgcgtttacttcttccaaagtagcggatctagcgaagccgttgaaggaagctgggtttcctcataagatccatatagtgaaagatcacgatatgagagagaggctttgcttagagactgaaaggcttaatctaagcgccgtgataatgggaagcagaggatttggtgctgagaagagaggaagtgatggcaagcttggctctgttagtgattattgtgttcaccattgtgtttgtcctgttgttgttgttagatatcctgatgatcgtgatggtcctgctcctcctgggaatgttggagctaccagggaagctattgtcactgttaaatcacgtagggatgatgacgatgatgatgatgaagatcatgaggctaagattgctgctgctgcttccgatcatcatgaacacatcaaagatgagtaaagtgccttagtatctcatcaggttcaccctcttcacagtcaggtacaacgatggatgaaacaaaacggatttgtgcagaggagtgtgtttgtgtgtttgtttattgctatcttttgcaatattgaaaagtctctggaatctcctctggattatttattcccagtccttgttcttcttataattctccatgtatgattttcacatttaaacaatgcccttttccatgtatgactttcacatttaaacaatacccttttggggttatgaccttaatcttcaatctaatttgatatccgatgagatact

SEQ ID NO: 28457 - protein, 260 aa, Arabidopsis thaliana
  peptide (1)..(260): Ceres Seq. ID no. 12327358
  misc_feature (43)..(204): Pfam Name: Universal stress protein family Pfam Description: Universal stress protein family
  misc_feature (39)..(170): Homolog of NCBI NO: 15232490 NR Description: CHP-rich zinc finger protein, putative; protein
  misc_feature (17)..(223): Homolog of NCBI NO: 34910112 NR Description: B1100D10.31 [Oryza sativa (japonica
  misc_feature (30)..(244): Homolog of NCBI NO: 30682187 NR Description: expressed protein [Arabidopsis thaliana]
  misc_feature (30)..(244): Homolog of NCBI NO: 25402657 NR Description: protein T23J18.3 [imported] - Arabidopsis
  misc_feature (33)..(244): Homolog of NCBI NO: 33146953 NR Description: CHP-rich zinc finger protein-like
  misc_feature (33)..(244): Homolog of NCBI NO: 28971968 NR Description: OSJNBb0041B22.10 [Oryza sativa (japonica
  misc_feature (1)..(237): Homolog of NCBI NO: 18423628 NR Description: putative protein
  misc_feature (1)..(237): Homolog of NCBI NO: 8885586 NR Description: gene_id:F24B18.5~pir||T05756~similar to unknown
  misc_feature (1)..(258): Homolog of NCBI NO: 7486798 NR Description: hypothetical protein M4I22.130 - Arabidopsis
  misc_feature (1)..(260): Homolog of NCBI NO: 18416966 NR Description: putative protein
MNPDSDYPHLPNIKIHHPSSPRHSHHHSSSTPSAATPTPTAGARRKIGVAVDLSEESAFAVRWAVDHYIRPGDAVVILHVSPTSVLFGADWGPLPLQTPPPPSAATDPGAQPKPSQEDFDAFTSSKVADLAKPLKEAGFPHKIHIVKDHDMRERLCLETERLNLSAVIMGSRGFGAEKRGSDGKLGSVSDYCVHHCVCPVVVVRYPDDRDGPAPPGNVGATREAIVTVKSRRDDDDDDDEDHEAKIAAAASDHHEHIKDE

SEQ ID NO: 28458 - DNA, 1432 bp, Arabidopsis thaliana
  misc_feature (1)..(1432): Ceres Seq. ID no. 12559942
  misc_feature: MA Experiment ID: 20000180 Result: Up-regulated in Transcription
  misc_feature: MA Experiment 20000180 PARAMETER Experiment Name: At_Germinating_Seeds_P Parameter: Age (hr) Value: 24 vs. 0
  misc_feature: MA Experiment 20000180 PARAMETER Experiment Name: At_Germinating_Seeds_P Parameter: Tissue Value: Germinating Seeds
  misc_feature: MA Experiment ID: 20000182 Result: Down-regulated in Transcription
  misc_feature: MA Experiment 20000182 PARAMETER Experiment Name: At_2mM_SA_P Parameter: Age (day) Value: 14
  misc_feature: MA Experiment 20000182 PARAMETER Experiment Name: At_2mM_SA_P Parameter: Organism Value: A. thaliana
  misc_feature: MA Experiment 20000182 PARAMETER Experiment Name: At_2mM_SA_P Parameter: Plant Line Value: WS
  misc_feature: MA Experiment 20000182 PARAMETER Experiment Name: At_2mM_SA_P Parameter: Timepoint (hr) Value: 6
  misc_feature: MA Experiment 20000182 PARAMETER Experiment Name: At_2mM_SA_P Parameter: Tissue Value: Aerial
  misc_feature: MA Experiment 20000182 PARAMETER Experiment Name: At_2mM_SA_P Parameter: Treatment Value: 2mM SA vs. No Treatment
  misc_feature: MA Experiment ID: 20000185 Result: Down-regulated in Transcription
  misc_feature: MA Experiment 20000185 PARAMETER Experiment Name: At_Roots__P Parameter: Age (day) Value: 7 vs. 21
  misc_feature: MA Experiment 20000185 PARAMETER Experiment Name: At_Roots__P Parameter: Organism Value: A. thaliana
  misc_feature: MA Experiment 20000185 PARAMETER Experiment Name: At_Roots__P Parameter: Tissue Value: Roots vs. Whole Plant
  misc_feature: MA Experiment ID: 20000234 Result: Down-regulated in Transcription
  misc_feature: MA Experiment 20000234 PARAMETER Experiment Name: At_Siliques_P Parameter: Age (day) Value: 21
  misc_feature: MA Experiment 20000234 PARAMETER Experiment Name: At_Siliques_P Parameter: Organism Value: A. thaliana
  misc_feature: MA Experiment 20000234 PARAMETER Experiment Name: At_Siliques_P Parameter: Plant Line Value: WS
  misc_feature: MA Experiment 20000234 PARAMETER Experiment Name: At_Siliques_P Parameter: Tissue Value: Less Than 5mm Siliques vs. Whole Plant
  misc_feature: MA Experiment ID: 20000264 Result: Down-regulated in Transcription
  misc_feature: MA Experiment 20000264 PARAMETER Experiment Name: At_Open_Flower_P Parameter: Age (day) Value: 21
  misc_feature: MA Experiment 20000264 PARAMETER Experiment Name: At_Open_Flower_P Parameter: Plant Line Value: WS
  misc_feature: MA Experiment 20000264 PARAMETER Experiment Name: At_Open_Flower_P Parameter: Tissue Value: Open Flower vs. Whole Plant
  misc_feature: MA Experiment ID: 20000265 Result: Down-regulated in Transcription
  misc_feature: MA Experiment 20000265 PARAMETER Experiment Name: At_Open_Flower_P Parameter: Age (day) Value: 21
  misc_feature: MA Experiment 20000265 PARAMETER Experiment Name: At_Open_Flower_P Parameter: Plant Line Value: WS
  misc_feature: MA Experiment 20000265 PARAMETER Experiment Name: At_Open_Flower_P Parameter: Tissue Value: Closed Flower vs. Whole Plant
  misc_feature: MA Experiment ID: 20000286 Result: Down-regulated in Transcription
  misc_feature: MA Experiment 20000286 PARAMETER Experiment Name: At_Open_Flower_P Parameter: Age (day) Value: 21
  misc_feature: MA Experiment 20000286 PARAMETER Experiment Name: At_Open_Flower_P Parameter: Plant Line Value: WS
  misc_feature: MA Experiment 20000286 PARAMETER Experiment Name: At_Open_Flower_P Parameter: Tissue Value: Half Open vs. Whole Plant
  misc_feature: MA Experiment ID: 20000437 Result: Down-regulated in Transcription
  misc_feature: MA Experiment 20000437 PARAMETER Experiment Name: At_Drought_P Parameter: Age (day) Value: 8
  misc_feature: MA Experiment 20000437 PARAMETER Experiment Name: At_Drought_P Parameter: Organism Value: A. thaliana
  misc_feature: MA Experiment 20000437 PARAMETER Experiment Name: At_Drought_P Parameter: Plant Line Value: WS
  misc_feature: MA Experiment 20000437 PARAMETER Experiment Name: At_Drought_P Parameter: Timepoint (hr) Value: 24
  misc_feature: MA Experiment 20000437 PARAMETER Experiment Name: At_Drought_P Parameter: Tissue Value: Whole Plant
  misc_feature: MA Experiment 20000437 PARAMETER Experiment Name: At_Drought_P Parameter: Treatment Value: Drought vs. No Drought
  misc_feature: MA Experiment ID: 20000438 Result: Up-regulated in Transcription
  misc_feature: MA Experiment 20000438 PARAMETER Experiment Name: At_Shoots__P Parameter: Age (day) Value: 14
  misc_feature: MA Experiment 20000438 PARAMETER Experiment Name: At_Shoots__P Parameter: Tissue Value: Shoots vs. Whole Plant
  misc_feature: MA Experiment ID: 20000439 Result: Down-regulated in Transcription
  misc_feature: MA Experiment 20000439 PARAMETER Experiment Name: At_Roots__P Parameter: Age (day) Value: 14 vs. 21
  misc_feature: MA Experiment 20000439 PARAMETER Experiment Name: At_Roots__P Parameter: Organism Value: A. thaliana
  misc_feature: MA Experiment 20000439 PARAMETER Experiment Name: At_Roots__P Parameter: Tissue Value: Roots vs. Whole Plant
  misc_feature: MA Experiment ID: 20000452 Result: Up-regulated in Transcription
  misc_feature: MA Experiment 20000452 PARAMETER Experiment Name: At_CS6879_Shoots-Roots_P Parameter: Age (day) Value: 14
  misc_feature: MA Experiment 20000452 PARAMETER Experiment Name: At_CS6879_Shoots-Roots_P Parameter: Organism Value: A. thaliana
  misc_feature: MA Experiment 20000452 PARAMETER Experiment Name: At_CS6879_Shoots-Roots_P Parameter: Plant Line Value: CS6879 vs. WS
  misc_feature: MA Experiment 20000452 PARAMETER Experiment Name: At_CS6879_Shoots-Roots_P Parameter: Tissue Value: Shoots
  misc_feature: MA Experiment ID: 20000573 Result: Down-regulated in Transcription
  misc_feature: MA Experiment 20000573 PARAMETER Experiment Name: At_100uM_ABA_Mutants__P Parameter: Organism Value: A. thaliana
  misc_feature: MA Experiment 20000573 PARAMETER Experiment Name: At_100uM_ABA_Mutants__P Parameter: Plant Line Value: CS22 vs. Ler wt
  misc_feature: MA Experiment 20000573 PARAMETER Experiment Name: At_100uM_ABA_Mutants__P Parameter: Timepoint (hr) Value: N/A
  misc_feature: MA Experiment 20000573 PARAMETER Experiment Name: At_100uM_ABA_Mutants__P Parameter: Tissue Value: Whole Plant
  misc_feature: MA Experiment 20000573 PARAMETER Experiment Name: At_100uM_ABA_Mutants__P Parameter: Treatment Value: None
  misc_feature: MA Experiment ID: 20000794 Result: Down-regulated in Transcription
  misc_feature: MA Experiment 20000794 PARAMETER Experiment Name: At_Petals_P Parameter: Age (day) Value: 23-25 days
  misc_feature: MA Experiment 20000794 PARAMETER Experiment Name: At_Petals_P Parameter: Plant Line Value: WS
  misc_feature: MA Experiment 20000794 PARAMETER Experiment Name: At_Petals_P Parameter: Tissue Value: Petals vs. Whole plant
  misc_feature: MA Experiment ID: 20001248 Result: Down-regulated in Transcription
  misc_feature: MA Experiment 20001248 PARAMETER Experiment Name: At_Far-red-induction_P Parameter: Age (day) Value: 7
  misc_feature: MA Experiment 20001248 PARAMETER Experiment Name: At_Far-red-induction_P Parameter: Light Value: Far-red vs. White
  misc_feature: MA Experiment 20001248 PARAMETER Experiment Name: At_Far-red-induction_P Parameter: Organism Value: A. thaliana
  misc_feature: MA Experiment 20001248 PARAMETER Experiment Name: At_Far-red-induction_P Parameter: Plant Line Value: Columbia
  misc_feature: MA Experiment 20001248 PARAMETER Experiment Name: At_Far-red-induction_P Parameter: Timepoint (hr) Value: 4
  misc_feature: MA Experiment 20001248 PARAMETER Experiment Name: At_Far-red-induction_P Parameter: Tissue Value: Whole Plant
  misc_feature: MA Experiment ID: 20001450 Result: Down-regulated in Transcription
  misc_feature: MA Experiment 20001450 PARAMETER Experiment Name: At_Far-red-induction_P Parameter: Age (day) Value: 7
  misc_feature: MA Experiment 20001450 PARAMETER Experiment Name: At_Far-red-induction_P Parameter: Light Value: Far-red vs. White
  misc_feature: MA Experiment 20001450 PARAMETER Experiment Name: At_Far-red-induction_P Parameter: Organism Value: A. thaliana
  misc_feature: MA Experiment 20001450 PARAMETER Experiment Name: At_Far-red-induction_P Parameter: Plant Line Value: Columbia
  misc_feature: MA Experiment 20001450 PARAMETER Experiment Name: At_Far-red-induction_P Parameter: Timepoint (hr) Value: 8
  misc_feature: MA Experiment 20001450 PARAMETER Experiment Name: At_Far-red-induction_P Parameter: Tissue Value: Whole Plant
  misc_feature: MA Experiment ID: 20001557 Result: Down-regulated in Transcription
  misc_feature: MA Experiment 20001557 PARAMETER Experiment Name: At_Drought_Soil_Dry_P Parameter: Age (day) Value: 27
  misc_feature: MA Experiment 20001557 PARAMETER Experiment Name: At_Drought_Soil_Dry_P Parameter: Organism Value: A. thaliana
  misc_feature: MA Experiment 20001557 PARAMETER Experiment Name: At_Drought_Soil_Dry_P Parameter: Plant Line Value: WS
  misc_feature: MA Experiment 20001557 PARAMETER Experiment Name: At_Drought_Soil_Dry_P Parameter: Post Timepoint (hr) Value: 3
  misc_feature: MA Experiment 20001557 PARAMETER Experiment Name: At_Drought_Soil_Dry_P Parameter: Post-Treatment Value: Re-Water vs. No Drought
  misc_feature: MA Experiment 20001557 PARAMETER Experiment Name: At_Drought_Soil_Dry_P Parameter: Timepoint (day) Value: 13
  misc_feature: MA Experiment 20001557 PARAMETER Experiment Name: At_Drought_Soil_Dry_P Parameter: Treatment Value: Drought vs. No Drought
  misc_feature: MA Experiment ID: 20001558 Result: Down-regulated in Transcription
  misc_feature: MA Experiment 20001558 PARAMETER Experiment Name: At_Drought_Soil_Dry_P Parameter: Age (day) Value: 27
  misc_feature: MA Experiment 20001558 PARAMETER Experiment Name: At_Drought_Soil_Dry_P Parameter: Organism Value: A. thaliana
  misc_feature: MA Experiment 20001558 PARAMETER Experiment Name: At_Drought_Soil_Dry_P Parameter: Plant Line Value: WS
  misc_feature: MA Experiment 20001558 PARAMETER Experiment Name: At_Drought_Soil_Dry_P Parameter: Post Timepoint (hr) Value: 6
  misc_feature: MA Experiment 20001558 PARAMETER Experiment Name: At_Drought_Soil_Dry_P Parameter: Post-Treatment Value: Re-Water vs. No Drought
  misc_feature: MA Experiment 20001558 PARAMETER Experiment Name: At_Drought_Soil_Dry_P Parameter: Timepoint (day) Value: 13
  misc_feature: MA Experiment 20001558 PARAMETER Experiment Name: At_Drought_Soil_Dry_P Parameter: Treatment Value: Drought vs. No Drought
  misc_feature: MA Experiment ID: 20001559 Result: Down-regulated in Transcription
  misc_feature: MA Experiment 20001559 PARAMETER Experiment Name: At_Drought_Soil_Dry_P Parameter: Age (day) Value: 28
  misc_feature: MA Experiment 20001559 PARAMETER Experiment Name: At_Drought_Soil_Dry_P Parameter: Organism Value: A. thaliana
  misc_feature: MA Experiment 20001559 PARAMETER Experiment Name: At_Drought_Soil_Dry_P Parameter: Plant Line Value: WS
  misc_feature: MA Experiment 20001559 PARAMETER Experiment Name: At_Drought_Soil_Dry_P Parameter: Post Timepoint (hr) Value: 29
  misc_feature: MA Experiment 20001559 PARAMETER Experiment Name: At_Drought_Soil_Dry_P Parameter: Post-Treatment Value: Re-Water vs. No Drought
  misc_feature: MA Experiment 20001559 PARAMETER Experiment Name: At_Drought_Soil_Dry_P Parameter: Timepoint (day) Value: 14
  misc_feature: MA Experiment 20001559 PARAMETER Experiment Name: At_Drought_Soil_Dry_P Parameter: Treatment Value: Drought vs. No Drought
  misc_feature: MA Experiment ID: 20001904 Result: Down-regulated in Transcription
  misc_feature: MA Experiment 20001904 PARAMETER Experiment Name: At_Drought_Reproduction_P Parameter: Age (day) Value: 37
  misc_feature: MA Experiment 20001904 PARAMETER Experiment Name: At_Drought_Reproduction_P Parameter: Organism Value: A. thaliana
  misc_feature: MA Experiment 20001904 PARAMETER Experiment Name: At_Drought_Reproduction_P Parameter: Plant Line Value: WS
  misc_feature: MA Experiment 20001904 PARAMETER Experiment Name: At_Drought_Reproduction_P Parameter: Timepoint (day) Value: 7
  misc_feature: MA Experiment 20001904 PARAMETER Experiment Name: At_Drought_Reproduction_P Parameter: Tissue Value: Rosettes
  misc_feature: MA Experiment 20001904 PARAMETER Experiment Name: At_Drought_Reproduction_P Parameter: Treatment Value: Drought vs. No Drought
  misc_feature: MA Experiment ID: 20001906 Result: Down-regulated in Transcription
  misc_feature: MA Experiment 20001906 PARAMETER Experiment Name: At_Drought_Reproduction_P Parameter: Age (day) Value: 35
  misc_feature: MA Experiment 20001906 PARAMETER Experiment Name: At_Drought_Reproduction_P Parameter: Organism Value: A. thaliana
  misc_feature: MA Experiment 20001906 PARAMETER Experiment Name: At_Drought_Reproduction_P Parameter: Plant Line Value: WS
  misc_feature: MA Experiment 20001906 PARAMETER Experiment Name: At_Drought_Reproduction_P Parameter: Timepoint (day) Value: 5
  misc_feature: MA Experiment 20001906 PARAMETER Experiment Name: At_Drought_Reproduction_P Parameter: Tissue Value: Siliques
  misc_feature: MA Experiment 20001906 PARAMETER Experiment Name: At_Drought_Reproduction_P Parameter: Treatment Value: Drought vs. No Drought
aaaccttccaaagtttttttcaaaacaacacagaaaaaatggcagcaaccgccgcaacaacgacgtcgtctcaccttcttctctcaagctcacgtcacgtggcatcatcatcccagccttcaatcctttcaccgagatctctcttctccaacaacgggaaacgagcaccaactggagtgaggaaccatcagtatgcgagtggagtgaggtgtatggccgtagcggcggatgctgctgagacgaaaacggcggcgaggaagaagagtggatacgaacttcaaacgttgacgggctggttgctgagacaagagatgaaaggagagatagatgcagagctgacgatagtgatgtcgagtatatcattggcttgtaagcagatcgcttcacttgttcaacgtgccggaatctctaacctgaccggagttcaaggcgccgttaatattcagggagaggatcagaagaagcttgacgtcatctctaatgaggtgttttccaactgtttgagatcaagtggaagaacgggaatcatagcctcggaggaagaggacgtgccagttgcggtggaggagagttactccggcaactacgtcgtcgtgtttgaccctcttgatggttcctccaacattgacgctgccgtctctactggttctatcttcggtatctatagccccaatgacgaatgcattgtcgacgactccgacgatatctcagctcttgggtcagaagaacaaaggtgtatagtaaacgtgtgccagccagggaacaacttgttagcagccggctactgtatgtactcgagctcggtcatcttcgttcttactctaggcaaaggcgttttctccttcacgctcgatccaatgtacggtgagtttgtcctcacgcaagaaaacattgagatccccaaagccgggagaatctactctttcaacgaagggaattaccagatgtgggacgataaactaaagaagtacattgatgatcttaaggaccctggtccaactgggaagccttactccgcaaggtacattggaagtttggttggagattttcacaggactttattgtatggtgggatttacgggtaccctcgtgacgcaaagagcaaaaatggaaaacttaggctgttgtatgagtgtgcaccaatgagtttcattgttgaacaagctggagggaaaggttctgatggacattcgagagtactagatatccaaccgactgagatacatcagagggttcctctatacattggaagcacagaggaagtagagaagctggagaagtacttggcttgagtcatgtactaaacataagccatttaatttctattgtaagccagtttctgactacatggtatatgcaaatagatgcataatggtgaaagtcctattttgttgtcaatatcaatatagagaagaaatcagctgttaaaact

SEQ ID NO: 28459 - protein, 429 aa, Arabidopsis thaliana
  peptide (1)..(429): Ceres Seq. ID no. 12559943
  misc_feature (93)..(429): Pfam Name: Fructose-1-6-bisphosphatase Pfam Description: Fructose-1-6-bisphosphatase
  misc_feature (74)..(429): Homolog of NCBI NO: 67243 NR Description: fructose-bisphosphatase (EC 3.1.3.11),
  misc_feature (60)..(429): Homolog of NCBI NO: 322711 NR Description: fructose-bisphosphatase (EC 3.1.3.11) - garden
  misc_feature (17)..(429): Homolog of NCBI NO: 2506391 NR Description: Fructose-1,6-bisphosphatase, chloroplast
  misc_feature (17)..(429): Homolog of NCBI NO: 14318171 NR Description: fructose-1,6-bisphosphatase [Pisum sativum]
  misc_feature (13)..(429): Homolog of NCBI NO: 4585576 NR Description: fructose-1,6-bisphosphatase precursor [Solanum
  misc_feature (13)..(429): Homolog of NCBI NO: 3915687 NR Description: Fructose-1,6-bisphosphatase, chloroplast
  misc_feature (13)..(429): Homolog of NCBI NO: 585118 NR Description: FRUCTOSE-1,6-BISPHOSPHATASE, CHLOROPLAST
  misc_feature (13)..(429): Homolog of NCBI NO: 4218951 NR Description: fructose-1,6-bisphosphatase precursor [Brassica
  misc_feature (13)..(429): Homolog of NCBI NO: 99693 NR Description: fructose-bisphosphatase (EC 3.1.3.11) precursor,
  misc_feature (13)..(429): Homolog of NCBI NO: 15232408 NR Description: fructose-bisphosphatase precursor
TFQSFFQNNTEKMAATAATTTSSHLLLSSSRHVASSSQPSILSPRSLFSNNGKRAPTGVRNHQYASGVRCMAVAADAAETKTAARKKSGYELQTLTGWLLRQEMKGEIDAELTIVMSSISLACKQIASLVQRAGISNLTGVQGAVNIQGEDQKKLDVISNEVFSNCLRSSGRTGIIASEEEDVPVAVEESYSGNYVVVFDPLDGSSNIDAAVSTGSIFGIYSPNDECIVDDSDDISALGSEEQRCIVNVCQPGNNLLAAGYCMYSSSVIFVLTLGKGVFSFTLDPMYGEFVLTQENIEIPKAGRIYSFNEGNYQMWDDKLKKYIDDLKDPGPTGKPYSARYIGSLVGDFHRTLLYGGIYGYPRDAKSKNGKLRLLYECAPMSFIVEQAGGKGSDGHSRVLDIQPTEIHQRVPLYIGSTEEVEKLEKYLA

SEQ ID NO: 28460 - protein, 417 aa, Arabidopsis thaliana
  peptide (1)..(417): Ceres Seq. ID no. 12559944
  misc_feature (81)..(417): Pfam Name: Fructose-1-6-bisphosphatase Pfam Description: Fructose-1-6-bisphosphatase
  misc_feature (62)..(417): Homolog of NCBI NO: 67243 NR Description: fructose-bisphosphatase (EC 3.1.3.11),
  misc_feature (48)..(417): Homolog of NCBI NO: 322711 NR Description: fructose-bisphosphatase (EC 3.1.3.11) - garden
  misc_feature (5)..(417): Homolog of NCBI NO: 2506391 NR Description: Fructose-1,6-bisphosphatase, chloroplast
  misc_feature (5)..(417): Homolog of NCBI NO: 14318171 NR Description: fructose-1,6-bisphosphatase [Pisum sativum]
  misc_feature (1)..(417): Homolog of NCBI NO: 4585576 NR Description: fructose-1,6-bisphosphatase precursor [Solanum
  misc_feature (1)..(417): Homolog of NCBI NO: 3915687 NR Description: Fructose-1,6-bisphosphatase, chloroplast
  misc_feature (1)..(417): Homolog of NCBI NO: 585118 NR Description: FRUCTOSE-1,6-BISPHOSPHATASE, CHLOROPLAST
  misc_feature (1)..(417): Homolog of NCBI NO: 4218951 NR Description: fructose-1,6-bisphosphatase precursor [Brassica
  misc_feature (1)..(417): Homolog of NCBI NO: 99693 NR Description: fructose-bisphosphatase (EC 3.1.3.11) precursor,
  misc_feature (1)..(417): Homolog of NCBI NO: 15232408 NR Description: fructose-bisphosphatase precursor
MAATAATTTSSHLLLSSSRHVASSSQPSILSPRSLFSNNGKRAPTGVRNHQYASGVRCMAVAADAAETKTAARKKSGYELQTLTGWLLRQEMKGEIDAELTIVMSSISLACKQIASLVQRAGISNLTGVQGAVNIQGEDQKKLDVISNEVFSNCLRSSGRTGIIASEEEDVPVAVEESYSGNYVVVFDPLDGSSNIDAAVSTGSIFGIYSPNDECIVDDSDDISALGSEEQRCIVNVCQPGNNLLAAGYCMYSSSVIFVLTLGKGVFSFTLDPMYGEFVLTQENIEIPKAGRIYSFNEGNYQMWDDKLKKYIDDLKDPGPTGKPYSARYIGSLVGDFHRTLLYGGIYGYPRDAKSKNGKLRLLYECAPMSFIVEQAGGKGSDGHSRVLDIQPTEIHQRVPLYIGSTEEVEKLEKYLA

SEQ ID NO: 28461 - protein, 359 aa, Arabidopsis thaliana
  peptide (1)..(359): Ceres Seq. ID no. 12559945
  misc_feature (23)..(359): Pfam Name: Fructose-1-6-bisphosphatase Pfam Description: Fructose-1-6-bisphosphatase
  misc_feature (4)..(359): Homolog of NCBI NO: 67243 NR Description: fructose-bisphosphatase (EC 3.1.3.11),
  misc_feature (1)..(359): Homolog of NCBI NO: 322711 NR Description: fructose-bisphosphatase (EC 3.1.3.11) - garden
  misc_feature (1)..(359): Homolog of NCBI NO: 2506391 NR Description: Fructose-1,6-bisphosphatase, chloroplast
  misc_feature (1)..(359): Homolog of NCBI NO: 14318171 NR Description: fructose-1,6-bisphosphatase [Pisum sativum]
  misc_feature (1)..(359): Homolog of NCBI NO: 4585576 NR Description: fructose-1,6-bisphosphatase precursor [Solanum
  misc_feature (1)..(359): Homolog of NCBI NO: 3915687 NR Description: Fructose-1,6-bisphosphatase, chloroplast
  misc_feature (1)..(359): Homolog of NCBI NO: 585118 NR Description: FRUCTOSE-1,6-BISPHOSPHATASE, CHLOROPLAST
  misc_feature (1)..(359): Homolog of NCBI NO: 4218951 NR Description: fructose-1,6-bisphosphatase precursor [Brassica
  misc_feature (1)..(359): Homolog of NCBI NO: 99693 NR Description: fructose-bisphosphatase (EC 3.1.3.11) precursor,
  misc_feature (1)..(359): Homolog of NCBI NO: 15232408 NR Description: fructose-bisphosphatase precursor
MAVAADAAETKTAARKKSGYELQTLTGWLLRQEMKGEIDAELTIVMSSISLACKQIASLVQRAGISNLTGVQGAVNIQGEDQKKLDVISNEVFSNCLRSSGRTGIIASEEEDVPVAVEESYSGNYVVVFDPLDGSSNIDAAVSTGSIFGIYSPNDECIVDDSDDISALGSEEQRCIVNVCQPGNNLLAAGYCMYSSSVIFVLTLGKGVFSFTLDPMYGEFVLTQENIEIPKAGRIYSFNEGNYQMWDDKLKKYIDDLKDPGPTGKPYSARYIGSLVGDFHRTLLYGGIYGYPRDAKSKNGKLRLLYECAPMSFIVEQAGGKGSDGHSRVLDIQPTEIHQRVPLYIGSTEEVEKLEKYLA

SEQ ID NO: 28462 - DNA, 569 bp, Arabidopsis thaliana
  misc_feature (1)..(569): Ceres Seq. ID no. 12482101
  misc_feature: MA Experiment ID: 108434 Result: Up-regulated in Transcription
  misc_feature: MA Experiment 108434 PARAMETER Experiment Name: At_Root_Tips_cDNA_P Parameter: Tissue Value: Root Tips
  misc_feature: MA Experiment ID: 20001911 Result: Down-regulated in Transcription
  misc_feature: MA Experiment 20001911 PARAMETER Experiment Name: At_Drought_Reproduction_P Parameter: Age (day) Value: 40
  misc_feature: MA Experiment 20001911 PARAMETER Experiment Name: At_Drought_Reproduction_P Parameter: Organism Value: A. thaliana
  misc_feature: MA Experiment 20001911 PARAMETER Experiment Name: At_Drought_Reproduction_P Parameter: Plant Line Value: WS
  misc_feature: MA Experiment 20001911 PARAMETER Experiment Name: At_Drought_Reproduction_P Parameter: Timepoint (day) Value: 10
  misc_feature: MA Experiment 20001911 PARAMETER Experiment Name: At_Drought_Reproduction_P Parameter: Tissue Value: Flowers
  misc_feature: MA Experiment 20001911 PARAMETER Experiment Name: At_Drought_Reproduction_P Parameter: Treatment Value: Drought vs. No Drought
atttccgtcggactcagtggagaagaagaagaagatccaaatcgatccgttgaaaagtttctccatttcggattctggtttaggaatttcgaatttgctgtgcgatgtcgagtgcggtggacgctacgggaaacccgatccctacttcggcggttttaacggcgtcagcgaagcatataggtatgaggtgtatgccggagaatgttgcgttcctcaaatgcaagaagaatgatccaaacccagagaagtgtctcgacaaaggtcgtgacgtcactcgctgcgtgcttggcttgctgaaggatcttcaccagaagtgccaaaaggagatggatgattatgttgggtgtatgtattactacacaaacgagtttgatctgtgtaggaaagagcaagaagccttcgagaaagtgtgtcccttgaaatgagaatcacaagttcttgtcatgttttgatttgtatctcataataaagcaaaatgttcatttttgaatgagctttactctctccatctcttgtttgttgtcatcccatttatttcctctcagatgctttcgtagtgagttccaaag

SEQ ID NO: 28463 - protein, 106 aa, Arabidopsis thaliana
  peptide (1)..(106): Ceres Seq. ID no. 12482102
  misc_feature (14)..(101): Homolog of NCBI NO: 24762701 NR Description: CG3683-PA [Drosophila melanogaster]
  misc_feature (14)..(105): Homolog of NCBI NO: 21312012 NR Description: RIKEN cDNA 0610033L03 [Mus musculus]
  misc_feature (14)..(101): Homolog of NCBI NO: 38048623 NR Description: similar to Drosophila melanogaster CG3683
  misc_feature (14)..(105): Homolog of NCBI NO: 28461275 NR Description: NADH dehydrogenase (ubiquinone) 1 alpha
  misc_feature (14)..(105): Homolog of NCBI NO: 33086512 NR Description: Aa2-258 [Rattus norvegicus]
  misc_feature (14)..(105): Homolog of NCBI NO: 27706932 NR Description: similar to RIKEN cDNA 0610033L03
  misc_feature (14)..(105): Homolog of NCBI NO: 7657369 NR Description: NADH dehydrogenase (ubiquinone) 1 alpha
  misc_feature (14)..(105): Homolog of NCBI NO: 37589679 NR Description: Unknown (protein for MGC:73139) [Danio rerio]
  misc_feature (2)..(106): Homolog of NCBI NO: 18397530 NR Description: expressed protein
  misc_feature (1)..(106): Homolog of NCBI NO: 15239564 NR Description: NADH:ubiquinone oxidoreductase - like protein
MSSAVDATGNPIPTSAVLTASAKHIGMRCMPENVAFLKCKKNDPNPEKCLDKGRDVTRCVLGLLKDLHQKCQKEMDDYVGCMYYYTNEFDLCRKEQEAFEKVCPLK

SEQ ID NO: 28464 - protein, 80 aa, Arabidopsis thaliana
  peptide (1)..(80): Ceres Seq. ID no. 12482103
  misc_feature (1)..(75): Homolog of NCBI NO: 24762701 NR Description: CG3683-PA [Drosophila melanogaster]
  misc_feature (1)..(79): Homolog of NCBI NO: 21312012 NR Description: RIKEN cDNA 0610033L03 [Mus musculus]
  misc_feature (1)..(75): Homolog of NCBI NO: 38048623 NR Description: similar to Drosophila melanogaster CG3683
  misc_feature (1)..(79): Homolog of NCBI NO: 28461275 NR Description: NADH dehydrogenase (ubiquinone) 1 alpha
  misc_feature (1)..(79): Homolog of NCBI NO: 33086512 NR Description: Aa2-258 [Rattus norvegicus]
  misc_feature (1)..(79): Homolog of NCBI NO: 27706932 NR Description: similar to RIKEN cDNA 0610033L03
  misc_feature (1)..(79): Homolog of NCBI NO: 7657369 NR Description: NADH dehydrogenase (ubiquinone) 1 alpha
  misc_feature (1)..(79): Homolog of NCBI NO: 37589679 NR Description: Unknown (protein for MGC:73139) [Danio rerio]
  misc_feature (1)..(80): Homolog of NCBI NO: 18397530 NR Description: expressed protein
  misc_feature (1)..(80): Homolog of NCBI NO: 15239564 NR Description: NADH:ubiquinone oxidoreductase - like protein
MRCMPENVAFLKCKKNDPNPEKCLDKGRDVTRCVLGLLKDLHQKCQKEMDDYVGCMYYYTNEFDLCRKEQEAFEKVCPLK

SEQ ID NO: 28465 - protein, 77 aa, Arabidopsis thaliana
  peptide (1)..(77): Ceres Seq. ID no. 12482104
  misc_feature (1)..(72): Homolog of NCBI NO: 24762701 NR Description: CG3683-PA [Drosophila melanogaster]
  misc_feature (1)..(76): Homolog of NCBI NO: 21312012 NR Description: RIKEN cDNA 0610033L03 [Mus musculus]
  misc_feature (1)..(72): Homolog of NCBI NO: 38048623 NR Description: similar to Drosophila melanogaster CG3683
  misc_feature (1)..(76): Homolog of NCBI NO: 28461275 NR Description: NADH dehydrogenase (ubiquinone) 1 alpha
  misc_feature (1)..(76): Homolog of NCBI NO: 33086512 NR Description: Aa2-258 [Rattus norvegicus]
  misc_feature (1)..(76): Homolog of NCBI NO: 27706932 NR Description: similar to RIKEN cDNA 0610033L03
  misc_feature (1)..(76): Homolog of NCBI NO: 7657369 NR Description: NADH dehydrogenase (ubiquinone) 1 alpha
  misc_feature (1)..(76): Homolog of NCBI NO: 37589679 NR Description: Unknown (protein for MGC:73139) [Danio rerio]
  misc_feature (1)..(77): Homolog of NCBI NO: 18397530 NR Description: expressed protein
  misc_feature (1)..(77): Homolog of NCBI NO: 15239564 NR Description: NADH:ubiquinone oxidoreductase - like protein
MPENVAFLKCKKNDPNPEKCLDKGRDVTRCVLGLLKDLHQKCQKEMDDYVGCMYYYTNEFDLCRKEQEAFEKVCPLK

SEQ ID NO: 28466 - DNA, 588 bp, Arabidopsis thaliana
  misc_feature (1)..(588): Ceres Seq. ID no. 12336000
  misc_feature: MA Experiment ID: 108434 Result: Up-regulated in Transcription
  misc_feature: MA Experiment 108434 PARAMETER Experiment Name: At_Root_Tips_cDNA_P Parameter: Tissue Value: Root Tips
  misc_feature: MA Experiment ID: 108461 Result: Up-regulated in Transcription
  misc_feature: MA Experiment 108461 PARAMETER Experiment Name: At_Germinating_Seeds_cDNA_P Parameter: Age (day) Value: 1 vs. 0
  misc_feature: MA Experiment 108461 PARAMETER Experiment Name: At_Germinating_Seeds_cDNA_P Parameter: Tissue Value: Germinating Seeds
  misc_feature: MA Experiment ID: 108462 Result: Up-regulated in Transcription
  misc_feature: MA Experiment 108462 PARAMETER Experiment Name: At_Germinating_Seeds_cDNA_P Parameter: Age (day) Value: 2 vs. 0
  misc_feature: MA Experiment 108462 PARAMETER Experiment Name: At_Germinating_Seeds_cDNA_P Parameter: Tissue Value: Germinating Seeds
  misc_feature: MA Experiment ID: 108573 Result: Down-regulated in Transcription
  misc_feature: MA Experiment 108573 PARAMETER Experiment Name: At_Drought_cDNA_P Parameter: Timepoint (hr) Value: 6
  misc_feature: MA Experiment 108573 PARAMETER Experiment Name: At_Drought_cDNA_P Parameter: Tissue Value: Aerial
  misc_feature: MA Experiment 108573 PARAMETER Experiment Name: At_Drought_cDNA_P Parameter: Treatment Value: Drought vs. No Drought
  misc_feature: MA Experiment ID: 108577 Result: Down-regulated in Transcription
  misc_feature: MA Experiment 108577 PARAMETER Experiment Name: At_42deg_Heat_cDNA_P Parameter: Temperature (deg C) Value: 42 vs. 22
  misc_feature: MA Experiment 108577 PARAMETER Experiment Name: At_42deg_Heat_cDNA_P Parameter: Timepoint (hr) Value: 6
  misc_feature: MA Experiment 108577 PARAMETER Experiment Name: At_42deg_Heat_cDNA_P Parameter: Tissue Value: Aerial
  misc_feature: MA Experiment ID: 108579 Result: Up-regulated in Transcription
  misc_feature: MA Experiment 108579 PARAMETER Experiment Name: At_4deg_Cold_cDNA_P Parameter: Temperature (deg C) Value: 4 vs. 22
  misc_feature: MA Experiment 108579 PARAMETER Experiment Name: At_4deg_Cold_cDNA_P Parameter: Timepoint (hr) Value: 6
  misc_feature: MA Experiment 108579 PARAMETER Experiment Name: At_4deg_Cold_cDNA_P Parameter: Tissue Value: Aerial
  misc_feature: MA Experiment ID: 108585 Result: Down-regulated in Transcription
  misc_feature: MA Experiment 108585 PARAMETER Experiment Name: At_5mM_NaNP_cDNA_P Parameter: Timepoint (hr) Value: 6
  misc_feature: MA Experiment 108585 PARAMETER Experiment Name: At_5mM_NaNP_cDNA_P Parameter: Tissue Value: Aerial
  misc_feature: MA Experiment 108585 PARAMETER Experiment Name: At_5mM_NaNP_cDNA_P Parameter: Treatment Value: null
  misc_feature: MA Experiment ID: 20000112 Result: Down-regulated in Transcription
  misc_feature: MA Experiment 20000112 PARAMETER Experiment Name: At_42deg_Heat_cDNA_P Parameter: Temperature (deg C) Value: 42 vs. 22
  misc_feature: MA Experiment 20000112 PARAMETER Experiment Name: At_42deg_Heat_cDNA_P Parameter: Timepoint (hr) Value: 2
  misc_feature: MA Experiment 20000112 PARAMETER Experiment Name: At_42deg_Heat_cDNA_P Parameter: Tissue Value: Aerial
  misc_feature: MA Experiment ID: 20000117 Result: Down-regulated in Transcription
  misc_feature: MA Experiment 20000117 PARAMETER Experiment Name: At_100uM_ABA_Mutants_cDNA_P Parameter: Plant Line Value: Columbia
  misc_feature: MA Experiment 20000117 PARAMETER Experiment Name: At_100uM_ABA_Mutants_cDNA_P Parameter: Timepoint (hr) Value: 6
  misc_feature: MA Experiment 20000117 PARAMETER Experiment Name: At_100uM_ABA_Mutants_cDNA_P Parameter: Tissue Value: Aerial
  misc_feature: MA Experiment 20000117 PARAMETER Experiment Name: At_100uM_ABA_Mutants_cDNA_P Parameter: Treatment Value: 100uM ABA vs. No Treatment
  misc_feature: MA Experiment ID: 20000144 Result: Down-regulated in Transcription
  misc_feature: MA Experiment 20000144 PARAMETER Experiment Name: At_42deg_Heat_cDNA_P Parameter: Temperature (deg C) Value: 42 vs. 22
  misc_feature: MA Experiment 20000144 PARAMETER Experiment Name: At_42deg_Heat_cDNA_P Parameter: Timepoint (hr) Value: 1
  misc_feature: MA Experiment 20000144 PARAMETER Experiment Name: At_42deg_Heat_cDNA_P Parameter: Tissue Value: Aerial
  misc_feature: MA Experiment ID: 20000171 Result: Down-regulated in Transcription
  misc_feature: MA Experiment 20000171 PARAMETER Experiment Name: At_42deg_Heat_P Parameter: Age (day) Value: 14
  misc_feature: MA Experiment 20000171 PARAMETER Experiment Name: At_42deg_Heat_P Parameter: Organism Value: A. thaliana
  misc_feature: MA Experiment 20000171 PARAMETER Experiment Name: At_42deg_Heat_P Parameter: Plant Line Value: WS
  misc_feature: MA Experiment 20000171 PARAMETER Experiment Name: At_42deg_Heat_P Parameter: Temperature (deg C) Value: 42 vs. 22
  misc_feature: MA Experiment 20000171 PARAMETER Experiment Name: At_42deg_Heat_P Parameter: Timepoint (hr) Value: 1
  misc_feature: MA Experiment 20000171 PARAMETER Experiment Name: At_42deg_Heat_P Parameter: Tissue Value: Aerial
  misc_feature: MA Experiment ID: 20000173 Result: Down-regulated in Transcription
  misc_feature: MA Experiment 20000173 PARAMETER Experiment Name: At_42deg_Heat_P Parameter: Age (day) Value: 14
  misc_feature: MA Experiment 20000173 PARAMETER Experiment Name: At_42deg_Heat_P Parameter: Organism Value: A. thaliana
  misc_feature: MA Experiment 20000173 PARAMETER Experiment Name: At_42deg_Heat_P Parameter: Plant Line Value: WS
  misc_feature: MA Experiment 20000173 PARAMETER Experiment Name: At_42deg_Heat_P Parameter: Temperature (deg C) Value: 42 vs. 22
  misc_feature: MA Experiment 20000173 PARAMETER Experiment Name: At_42deg_Heat_P Parameter: Timepoint (hr) Value: 6
  misc_feature: MA Experiment 20000173 PARAMETER Experiment Name: At_42deg_Heat_P Parameter: Tissue Value: Aerial
  misc_feature: MA Experiment ID: 20000179 Result: Up-regulated in Transcription
  misc_feature: MA Experiment 20000179 PARAMETER Experiment Name: At_Germinating_Seeds_P Parameter: Age (hr) Value: 6 vs. 0
  misc_feature: MA Experiment 20000179 PARAMETER Experiment Name: At_Germinating_Seeds_P Parameter: Tissue Value: Germinating Seeds
  misc_feature: MA Experiment ID: 20000180 Result: Up-regulated in Transcription
  misc_feature: MA Experiment 20000180 PARAMETER Experiment Name: At_Germinating_Seeds_P Parameter: Age (hr) Value: 24 vs. 0
  misc_feature: MA Experiment 20000180 PARAMETER Experiment Name: At_Germinating_Seeds_P Parameter: Tissue Value: Germinating Seeds
  misc_feature: MA Experiment ID: 20000234 Result: Up-regulated in Transcription
  misc_feature: MA Experiment 20000234 PARAMETER Experiment Name: At_Siliques_P Parameter: Age (day) Value: 21
  misc_feature: MA Experiment 20000234 PARAMETER Experiment Name: At_Siliques_P Parameter: Organism Value: A. thaliana
  misc_feature: MA Experiment 20000234 PARAMETER Experiment Name: At_Siliques_P Parameter: Plant Line Value: WS
  misc_feature: MA Experiment 20000234 PARAMETER Experiment Name: At_Siliques_P Parameter: Tissue Value: Less Than 5mm Siliques vs. Whole Plant
  misc_feature: MA Experiment ID: 20000264 Result: Up-regulated in Transcription
  misc_feature: MA Experiment 20000264 PARAMETER Experiment Name: At_Open_Flower_P Parameter: Age (day) Value: 21
  misc_feature: MA Experiment 20000264 PARAMETER Experiment Name: At_Open_Flower_P Parameter: Plant Line Value: WS
  misc_feature: MA Experiment 20000264 PARAMETER Experiment Name: At_Open_Flower_P Parameter: Tissue Value: Open Flower vs. Whole Plant
  misc_feature: MA Experiment ID: 20000265 Result: Up-regulated in Transcription
  misc_feature: MA Experiment 20000265 PARAMETER Experiment Name: At_Open_Flower_P Parameter: Age (day) Value: 21
  misc_feature: MA Experiment 20000265 PARAMETER Experiment Name: At_Open_Flower_P Parameter: Plant Line Value: WS
  misc_feature: MA Experiment 20000265 PARAMETER Experiment Name: At_Open_Flower_P Parameter: Tissue Value: Closed Flower vs. Whole Plant
  misc_feature: MA Experiment ID: 20000437 Result: Down-regulated in Transcription
  misc_feature: MA Experiment 20000437 PARAMETER Experiment Name: At_Drought_P Parameter: Age (day) Value: 8
  misc_feature: MA Experiment 20000437 PARAMETER Experiment Name: At_Drought_P Parameter: Organism Value: A. thaliana
  misc_feature: MA Experiment 20000437 PARAMETER Experiment Name: At_Drought_P Parameter: Plant Line Value: WS
  misc_feature: MA Experiment 20000437 PARAMETER Experiment Name: At_Drought_P Parameter: Timepoint (hr) Value: 24
  misc_feature: MA Experiment 20000437 PARAMETER Experiment Name: At_Drought_P Parameter: Tissue Value: Whole Plant
  misc_feature: MA Experiment 20000437 PARAMETER Experiment Name: At_Drought_P Parameter: Treatment Value: Drought vs. No Drought
  misc_feature: MA Experiment ID: 20000495 Result: Down-regulated in Transcription
  misc_feature: MA Experiment 20000495 PARAMETER Experiment Name: At_Guard_Cells_P Parameter: Harvest Date Value: 8/2/2002
  misc_feature: MA Experiment 20000495 PARAMETER Experiment Name: At_Guard_Cells_P Parameter: Organism Value: A. thaliana
  misc_feature: MA Experiment 20000495 PARAMETER Experiment Name: At_Guard_Cells_P Parameter: Tissue Value: Guard Cells vs. Leaves
  misc_feature: MA Experiment ID: 20000496 Result: Down-regulated in Transcription
  misc_feature: MA Experiment 20000496 PARAMETER Experiment Name: At_Guard_Cells_P Parameter: Harvest Date Value: 7/19/2002
  misc_feature: MA Experiment 20000496 PARAMETER Experiment Name: At_Guard_Cells_P Parameter: Organism Value: Canola
  misc_feature: MA Experiment 20000496 PARAMETER Experiment Name: At_Guard_Cells_P Parameter: Tissue Value: Guard Cells vs. Leaves
  misc_feature: MA Experiment ID: 20001451 Result: Down-regulated in Transcription
  misc_feature: MA Experiment 20001451 PARAMETER Experiment Name: At_Far-red-induction_P Parameter: Age (day) Value: 7
  misc_feature: MA Experiment 20001451 PARAMETER Experiment Name: At_Far-red-induction_P Parameter: Light Value: Far-red vs. White
  misc_feature: MA Experiment 20001451 PARAMETER Experiment Name: At_Far-red-induction_P Parameter: Organism Value: A. thaliana
  misc_feature: MA Experiment 20001451 PARAMETER Experiment Name: At_Far-red-induction_P Parameter: Plant Line Value: Columbia
  misc_feature: MA Experiment 20001451 PARAMETER Experiment Name: At_Far-red-induction_P Parameter: Timepoint (hr) Value: 24
  misc_feature: MA Experiment 20001451 PARAMETER Experiment Name: At_Far-red-induction_P Parameter: Tissue Value: Whole Plant
  misc_feature: MA Experiment ID: 20001555 Result: Down-regulated in Transcription
  misc_feature: MA Experiment 20001555 PARAMETER Experiment Name: At_Drought_Soil_Dry_P Parameter: Age (day) Value: 24
  misc_feature: MA Experiment 20001555 PARAMETER Experiment Name: At_Drought_Soil_Dry_P Parameter: Organism Value: A. thaliana
  misc_feature: MA Experiment 20001555 PARAMETER Experiment Name: At_Drought_Soil_Dry_P Parameter: Plant Line Value: WS
  misc_feature: MA Experiment 20001555 PARAMETER Experiment Name: At_Drought_Soil_Dry_P Parameter: Post Timepoint (hr) Value: None
  misc_feature: MA Experiment 20001555 PARAMETER Experiment Name: At_Drought_Soil_Dry_P Parameter: Post-Treatment Value: None
  misc_feature: MA Experiment 20001555 PARAMETER Experiment Name: At_Drought_Soil_Dry_P Parameter: Timepoint (day) Value: 10
  misc_feature: MA Experiment 20001555 PARAMETER Experiment Name: At_Drought_Soil_Dry_P Parameter: Treatment Value: Drought vs. No Drought
  misc_feature: MA Experiment ID: 20001557 Result: Down-regulated in Transcription
  misc_feature: MA Experiment 20001557 PARAMETER Experiment Name: At_Drought_Soil_Dry_P Parameter: Age (day) Value: 27
  misc_feature: MA Experiment 20001557 PARAMETER Experiment Name: At_Drought_Soil_Dry_P Parameter: Organism Value: A. thaliana
  misc_feature: MA Experiment 20001557 PARAMETER Experiment Name: At_Drought_Soil_Dry_P Parameter: Plant Line Value: WS
  misc_feature: MA Experiment 20001557 PARAMETER Experiment Name: At_Drought_Soil_Dry_P Parameter: Post Timepoint (hr) Value: 3
  misc_feature: MA Experiment 20001557 PARAMETER Experiment Name: At_Drought_Soil_Dry_P Parameter: Post-Treatment Value: Re-Water vs. No Drought
  misc_feature: MA Experiment 20001557 PARAMETER Experiment Name: At_Drought_Soil_Dry_P Parameter: Timepoint (day) Value: 13
  misc_feature: MA Experiment 20001557 PARAMETER Experiment Name: At_Drought_Soil_Dry_P Parameter: Treatment Value: Drought vs. No Drought
aatccagatctcaactttctctcatcttcaaattaaaatcaaacagtttcttaataacattttacctcatggctcgtaccaagcagacggctaggaaatcaaccggaggaaaggctccaaggaagcagctggcgacaaaagcggcgaggaaatctgctccggccaccggaggagtgaagaagccacacagattcagacccggaactgttgctttaagagaaatcaggaagtaccagaagagcactgagcttcttatccgtaaactccctttccagaggcttgtcagagagatcgctcaggacttcaaaaccgatcttcgtttccagagcagtgccgtcgccgctcttcaggaagctgctgaagcttacctcgtcggactcttcgaagacaccaatctctgcgccattcacgccaagagggtcacgatcatgcccaaggacatccagctcgcgagaagaatcagaggagaacgagcttagatctaagtattctggttactcttgtgttttgattagaaccataagattgtaaaatttcaagttaaatccaagggttataatattaattccaagcaattatcttttgttc

SEQ ID NO: 28467 - protein, 158 aa, Arabidopsis thaliana
  peptide (1)..(158): Ceres Seq. ID no. 12336001
  misc_feature (39)..(157): Pfam Name: Core histone H2A/H2B/H3/H4 Pfam Description: Core histone H2A/H2B/H3/H4
  misc_feature (4)..(158): Homolog of NCBI NO: 31210959 NR Description: ENSANGP00000016066 [Anopheles gambiae]
  misc_feature (18)..(158): Homolog of NCBI NO: 37546835 NR Description: similar to histone protein Hist2h3c1 [Homo
  misc_feature (11)..(158): Homolog of NCBI NO: 34876396 NR Description: similar to H3 histone family, member I [Rattus
  misc_feature (4)..(158): Homolog of NCBI NO: 31239843 NR Description: ENSANGP00000014183 [Anopheles gambiae]
  misc_feature (24)..(158): Homolog of NCBI NO: 122083 NR Description: Histone H3
  misc_feature (24)..(158): Homolog of NCBI NO: 70753 NR Description: histone H3 - garden pea (tentative sequence)
  misc_feature (23)..(158): Homolog of NCBI NO: 166384 NR Description: histone H3 (H3-1.1)
  misc_feature (23)..(158): Homolog of NCBI NO: 1362108 NR Description: histone H3 homolog - common tobacco
  misc_feature (23)..(158): Homolog of NCBI NO: 122087 NR Description: Histone H3
  misc_feature (23)..(158): Homolog of NCBI NO: 15232146 NR Description: histone H3, putative
SRSQLSLIFKLKSNSFLITFYLMARTKQTARKSTGGKAPRKQLATKAARKSAPATGGVKKPHRFRPGTVALREIRKYQKSTELLIRKLPFQRLVREIAQDFKTDLRFQSSAVAALQEAAEAYLVGLFEDTNLCAIHAKRVTIMPKDIQLARRIRGERA

SEQ ID NO: 28468 - protein, 136 aa, Arabidopsis thaliana; identical to SEQ ID NO: 8709
  peptide (1)..(136): Ceres Seq. ID no. 12336002
  misc_feature (17)..(135): Pfam Name: Core histone H2A/H2B/H3/H4 Pfam Description: Core histone H2A/H2B/H3/H4
  misc_feature (1)..(136): Homolog of NCBI NO: 31210959 NR Description: ENSANGP00000016066 [Anopheles gambiae]
  misc_feature (1)..(136): Homolog of NCBI NO: 37546835 NR Description: similar to histone protein Hist2h3c1 [Homo
  misc_feature (1)..(136): Homolog of NCBI NO: 34876396 NR Description: similar to H3 histone family, member I [Rattus
  misc_feature (1)..(136): Homolog of NCBI NO: 31239843 NR Description: ENSANGP00000014183 [Anopheles gambiae]
  misc_feature (2)..(136): Homolog of NCBI NO: 122083 NR Description: Histone H3
  misc_feature (2)..(136): Homolog of NCBI NO: 70753 NR Description: histone H3 - garden pea (tentative sequence)
  misc_feature (1)..(136): Homolog of NCBI NO: 166384 NR Description: histone H3 (H3-1.1)
  misc_feature (1)..(136): Homolog of NCBI NO: 1362108 NR Description: histone H3 homolog - common tobacco
  misc_feature (1)..(136): Homolog of NCBI NO: 122087 NR Description: Histone H3
  misc_feature (1)..(136): Homolog of NCBI NO: 15232146 NR Description: histone H3, putative

SEQ ID NO: 28469 - DNA, 1005 bp, Arabidopsis thaliana
  misc_feature (1)..(1005): Ceres Seq. ID no. 15178652
  misc_feature: MA Experiment ID: 20000173 Result: Up-regulated in Transcription
  misc_feature: MA Experiment 20000173 PARAMETER Experiment Name: At_42deg_Heat_P Parameter: Age (day) Value: 14
  misc_feature: MA Experiment 20000173 PARAMETER Experiment Name: At_42deg_Heat_P Parameter: Organism Value: A. thaliana
  misc_feature: MA Experiment 20000173 PARAMETER Experiment Name: At_42deg_Heat_P Parameter: Plant Line Value: WS
  misc_feature: MA Experiment 20000173 PARAMETER Experiment Name: At_42deg_Heat_P Parameter: Temperature (deg C) Value: 42 vs. 22
  misc_feature: MA Experiment 20000173 PARAMETER Experiment Name: At_42deg_Heat_P Parameter: Timepoint (hr) Value: 6
  misc_feature: MA Experiment 20000173 PARAMETER Experiment Name: At_42deg_Heat_P Parameter: Tissue Value: Aerial
  misc_feature: MA Experiment ID: 20000794 Result: Down-regulated in Transcription
  misc_feature: MA Experiment 20000794 PARAMETER Experiment Name: At_Petals_P Parameter: Age (day) Value: 23-25 days
  misc_feature: MA Experiment 20000794 PARAMETER Experiment Name: At_Petals_P Parameter: Plant Line Value: WS
  misc_feature: MA Experiment 20000794 PARAMETER Experiment Name: At_Petals_P Parameter: Tissue Value: Petals vs. Whole plant
  misc_feature: MA Experiment ID: 20001558 Result: Up-regulated in Transcription
  misc_feature: MA Experiment 20001558 PARAMETER Experiment Name: At_Drought_Soil_Dry_P Parameter: Age (day) Value: 27
  misc_feature: MA Experiment 20001558 PARAMETER Experiment Name: At_Drought_Soil_Dry_P Parameter: Organism Value: A. thaliana
  misc_feature: MA Experiment 20001558 PARAMETER Experiment Name: At_Drought_Soil_Dry_P Parameter: Plant Line Value: WS
  misc_feature: MA Experiment 20001558 PARAMETER Experiment Name: At_Drought_Soil_Dry_P Parameter: Post Timepoint (hr) Value: 6
  misc_feature: MA Experiment 20001558 PARAMETER Experiment Name: At_Drought_Soil_Dry_P Parameter: Post-Treatment Value: Re-Water vs. No Drought
  misc_feature: MA Experiment 20001558 PARAMETER Experiment Name: At_Drought_Soil_Dry_P Parameter: Timepoint (day) Value: 13
  misc_feature: MA Experiment 20001558 PARAMETER Experiment Name: At_Drought_Soil_Dry_P Parameter: Treatment Value: Drought vs. No Drought
  misc_feature: MA Experiment ID: 20001757 Result: Up-regulated in Transcription
  misc_feature: MA Experiment 20001757 PARAMETER Experiment Name: At_50mM_NH4NO3_L-to-H_P Parameter: Timepoint (hr) Value: 6
  misc_feature: MA Experiment 20001757 PARAMETER Experiment Name: At_50mM_NH4NO3_L-to-H_P Parameter: Tissue Value: Leaf
  misc_feature: MA Experiment 20001757 PARAMETER Experiment Name: At_50mM_NH4NO3_L-to-H_P Parameter: Treatment Value: 50mM NH4NO3 vs 100mM Mannitol
taacgcactctcttctccgaatctagggtttttgtctctagcctcctcaagctttgcaaacaatcatggcgacccagatcagcaagaagagaaagttcgtagccgatggtgtgttttacgctgaactcaatgaggttctaaccagagagcttgctgaggatggttactctggtgttgaggttcgcgtcactcctatgcgtactgagatcatcattagagccactcgtactcaaaacgttctcggtgagaagggaaggaggattagggaattgacatctcttgtacaaaagagattcaaatttcctcaggacagtgttgagctttatgctgagaaggttgctaacagaggtctttgtgctattgctcaggctgagtctcttcgttacaagcttcttggtggtcttgctgttcgtagggcgtgctatggtgttttaaggtttgttatggagagtggagctaaaggatgcgaagtcattgtgagtggaaaactccgtgctgcacgtgctaagtagatgaagttcaaggatggttacatggtttcctcaggtcagccaaccaaggaatacattgatgctgcagttaggcatgttcttcttagacagggtgtgcttggtctcaaggtgaagatcatgcttgactgggaccccaagggcaaacaaggaccgatgacaccattgcctgatgttgtgatcatccatacaccgaaagaagatgatgtatacattgcacctgctcaggttgttactcaagctgcttttgtaccggaagctccattaaccaccacagattatccagcaatgccagttgcttagagagccttttcgttttctggtttaaaacccaatggggatggttctttttttgggacagtactagttttctcatgttattctaagttaatacttaaagttctggaggttgaattacatcaaggatatgaatgtatgtttttcgttatcttttgtttaaattttatttatctattaaagaaaaaaaaaaaaaaaa

SEQ ID NO: 28470 - protein, 148 aa, Arabidopsis thaliana
  peptide (1)..(148): Ceres Seq. ID no. 15178653
  misc_feature (47)..(95): Pfam Name: KH domain Pfam Description: KH domain
  misc_feature (1)..(148): Homolog of NCBI NO: 12847921 NR Description: unnamed protein product [Mus musculus]
  misc_feature (1)..(148): Homolog of NCBI NO: 38512247 NR Description: Ribosomal protein S3 [Silurana tropicalis]
  misc_feature (1)..(148): Homolog of NCBI NO: 22001962 NR Description: 40S ribosomal protein S3
  misc_feature (1)..(148): Homolog of NCBI NO: 37595356 NR Description: ribosomal protein S3 [Danio rerio]
  misc_feature (1)..(148): Homolog of NCBI NO: 133940 NR Description: 40S ribosomal protein S3A (S1A)
  misc_feature (3)..(148): Homolog of NCBI NO: 14192875 NR Description: Putative 40S ribosomal protein; contains
  misc_feature (1)..(148): Homolog of NCBI NO: 22204124 NR Description: putative 40S ribosomal protein S3 [Triticum
  misc_feature (1)..(148): Homolog of NCBI NO: 15232352 NR Description: 40S ribosomal protein S3 (RPS3B) [Arabidopsis
  misc_feature (1)..(148): Homolog of NCBI NO: 15225107 NR Description: 40S ribosomal protein S3 (RPS3A) [Arabidopsis
  misc_feature (1)..(148): Homolog of NCBI NO: 15238533 NR Description: 40S ribosomal protein S3 (RPS3C) [Arabidopsis
MATQISKKRKFVADGVFYAELNEVLTRELAEDGYSGVEVRVTPMRTEIIIRATRTQNVLGEKGRRIRELTSLVQKRFKFPQDSVELYAEKVANRGLCAIAQAESLRYKLLGGLAVRRACYGVLRFVMESGAKGCEVIVSGKLRAARAK

SEQ ID NO: 28471 - protein, 105 aa, Arabidopsis thaliana
  peptide (1)..(105): Ceres Seq. ID no. 15178654
  misc_feature (4)..(52): Pfam Name: KH domain Pfam Description: KH domain
  misc_feature (1)..(105): Homolog of NCBI NO: 12847921 NR Description: unnamed protein product [Mus musculus]
  misc_feature (1)..(105): Homolog of NCBI NO: 38512247 NR Description: Ribosomal protein S3 [Silurana tropicalis]
  misc_feature (1)..(105): Homolog of NCBI NO: 22001962 NR Description: 40S ribosomal protein S3
  misc_feature (1)..(105): Homolog of NCBI NO: 37595356 NR Description: ribosomal protein S3 [Danio rerio]
  misc_feature (1)..(105): Homolog of NCBI NO: 133940 NR Description: 40S ribosomal protein S3A (S1A)
  misc_feature (1)..(105): Homolog of NCBI NO: 14192875 NR Description: Putative 40S ribosomal protein; contains
  misc_feature (1)..(105): Homolog of NCBI NO: 22204124 NR Description: putative 40S ribosomal protein S3 [Triticum
  misc_feature (1)..(105): Homolog of NCBI NO: 15232352 NR Description: 40S ribosomal protein S3 (RPS3B) [Arabidopsis
  misc_feature (1)..(105): Homolog of NCBI NO: 15225107 NR Description: 40S ribosomal protein S3 (RPS3A) [Arabidopsis
  misc_feature (1)..(105): Homolog of NCBI NO: 15238533 NR Description: 40S ribosomal protein S3 (RPS3C) [Arabidopsis
MRTEIIIRATRTQNVLGEKGRRIRELTSLVQKRFKFPQDSVELYAEKVANRGLCAIAQAESLRYKLLGGLAVRRACYGVLRFVMESGAKGCEVIVSGKLRAARAK

SEQ ID NO: 28472 - protein, 99 aa, Arabidopsis thaliana
  peptide (1)..(99): Ceres Seq. ID no. 15178655
  misc_feature (1)..(94): Homolog of NCBI NO: 12847921 NR Description: unnamed protein product [Mus musculus]
  misc_feature (1)..(97): Homolog of NCBI NO: 38512247 NR Description: Ribosomal protein S3 [Silurana tropicalis]
  misc_feature (1)..(99): Homolog of NCBI NO: 22001962 NR Description: 40S ribosomal protein S3
  misc_feature (1)..(99): Homolog of NCBI NO: 37595356 NR Description: ribosomal protein S3 [Danio rerio]
  misc_feature (1)..(97): Homolog of NCBI NO: 133940 NR Description: 40S ribosomal protein S3A (S1A)
  misc_feature (1)..(73): Homolog of NCBI NO: 14192875 NR Description: Putative 40S ribosomal protein; contains
  misc_feature (1)..(76): Homolog of NCBI NO: 22204124 NR Description: putative 40S ribosomal protein S3 [Triticum
  misc_feature (1)..(99): Homolog of NCBI NO: 15232352 NR Description: 40S ribosomal protein S3 (RPS3B) [Arabidopsis
  misc_feature (1)..(99): Homolog of NCBI NO: 15225107 NR Description: 40S ribosomal protein S3 (RPS3A) [Arabidopsis
  misc_feature (1)..(99): Homolog of NCBI NO: 15238533 NR Description: 40S ribosomal protein S3 (RPS3C) [Arabidopsis
MKFKDGYMVSSGQPTKEYIDAAVRHVLLRQGVLGLKVKIMLDWDPKGKQGPMTPLPDVVIIHTPKEDDVYIAPAQVVTQAAFVPEAPLTTTDYPAMPVA

SEQ ID NO: 28473 - DNA, 1905 bp, Arabidopsis thaliana; identical to SEQ ID NO: 20321
  misc_feature (1)..(1905): Ceres Seq. ID no. 13486771
  misc_feature: MA Experiment ID: 20001451 Result: Up-regulated in Transcription
  misc_feature: MA Experiment 20001451 PARAMETER Experiment Name: At_Far-red-induction_P Parameter: Age (day) Value: 7
  misc_feature: MA Experiment 20001451 PARAMETER Experiment Name: At_Far-red-induction_P Parameter: Light Value: Far-red vs. White
  misc_feature: MA Experiment 20001451 PARAMETER Experiment Name: At_Far-red-induction_P Parameter: Organism Value: A. thaliana
  misc_feature: MA Experiment 20001451 PARAMETER Experiment Name: At_Far-red-induction_P Parameter: Plant Line Value: Columbia
  misc_feature: MA Experiment 20001451 PARAMETER Experiment Name: At_Far-red-induction_P Parameter: Timepoint (hr) Value: 24
  misc_feature: MA Experiment 20001451 PARAMETER Experiment Name: At_Far-red-induction_P Parameter: Tissue Value: Whole Plant
  misc_feature: MA Experiment ID: 20001905 Result: Up-regulated in Transcription
  misc_feature: MA Experiment 20001905 PARAMETER Experiment Name: At_Drought_Reproduction_P Parameter: Age (day) Value: 40
  misc_feature: MA Experiment 20001905 PARAMETER Experiment Name: At_Drought_Reproduction_P Parameter: Organism Value: A. thaliana
  misc_feature: MA Experiment 20001905 PARAMETER Experiment Name: At_Drought_Reproduction_P Parameter: Plant Line Value: WS
  misc_feature: MA Experiment 20001905 PARAMETER Experiment Name: At_Drought_Reproduction_P Parameter: Timepoint (day) Value: 10
  misc_feature: MA Experiment 20001905 PARAMETER Experiment Name: At_Drought_Reproduction_P Parameter: Tissue Value: Rosettes
  misc_feature: MA Experiment 20001905 PARAMETER Experiment Name: At_Drought_Reproduction_P Parameter: Treatment Value: Drought vs. No Drought
  misc_feature: MA Experiment ID: 20001911 Result: Up-regulated in Transcription
  misc_feature: MA Experiment 20001911 PARAMETER Experiment Name: At_Drought_Reproduction_P Parameter: Age (day) Value: 40
  misc_feature: MA Experiment 20001911 PARAMETER Experiment Name: At_Drought_Reproduction_P Parameter: Organism Value: A. thaliana
  misc_feature: MA Experiment 20001911 PARAMETER Experiment Name: At_Drought_Reproduction_P Parameter: Plant Line Value: WS
  misc_feature: MA Experiment 20001911 PARAMETER Experiment Name: At_Drought_Reproduction_P Parameter: Timepoint (day) Value: 10
  misc_feature: MA Experiment 20001911 PARAMETER Experiment Name: At_Drought_Reproduction_P Parameter: Tissue Value: Flowers
  misc_feature: MA Experiment 20001911 PARAMETER Experiment Name: At_Drought_Reproduction_P Parameter: Treatment Value: Drought vs. No Drought

SEQ ID NO: 28474 - protein, 297 aa, Arabidopsis thaliana; identical to SEQ ID NO: 20322
  peptide (1)..(297): Ceres Seq. ID no. 15218567
  misc_feature (199)..(249): Pfam Name: Formiminotransferase domain Pfam Description: Formiminotransferase domain
  misc_feature (199)..(249): Pfam Name: Formiminotransferase domain Pfam Description: Formiminotransferase domain
  misc_feature (9)..(249): Homolog of NCBI NO: 13540922 NR Description: Glutamate formiminotransferase [Thermoplasma
  misc_feature (9)..(247): Homolog of NCBI NO: 20806959 NR Description: Glutamate formiminotransferase
  misc_feature (9)..(249): Homolog of NCBI NO: 28211902 NR Description: glutamate formiminotransferase [Clostridium
  misc_feature (14)..(249): Homolog of NCBI NO: 15643606 NR Description:
  misc_feature (5)..(55): Homolog of NCBI NO: 34897974 NR Description: hypothetical protein~similar to Oryza sativa
  misc_feature (9)..(249): Homolog of NCBI NO: 13540922 NR Description: Glutamate formiminotransferase [Thermoplasma
  misc_feature (9)..(249): Homolog of NCBI NO: 28211902 NR Description: glutamate formiminotransferase [Clostridium
  misc_feature (5)..(55): Homolog of NCBI NO: 34897974 NR Description: hypothetical protein~similar to Oryza sativa
  misc_feature (1)..(297): Homolog of NCBI NO: 25411995 NR Description: hypothetical protein At2g20830 [imported] -
  misc_feature (1)..(297): Homolog of NCBI NO: 18399493 NR Description: expressed protein [Arabidopsis thaliana]
  misc_feature (5)..(290): Homolog of NCBI NO: 5734618 NR Description: Similar to Arabidopsis thaliana chromosome II BAC
  misc_feature (5)..(290): Homolog of NCBI NO: 34898040 NR Description: OSJNBa0038F22.18 [Oryza sativa (japonica
  misc_feature (142)..(297): Homolog of NCBI NO: 34897974 NR Description: hypothetical protein~similar to Oryza sativa
  misc_feature (14)..(249): Homolog of NCBI NO: 15643606 NR Description:
  misc_feature (9)..(247): Homolog of NCBI NO: 20806959 NR Description: Glutamate formiminotransferase
  misc_feature (142)..(297): Homolog of NCBI NO: 34897974 NR Description: hypothetical protein~similar to Oryza sativa
  misc_feature (5)..(290): Homolog of NCBI NO: 34898040 NR Description: OSJNBa0038F22.18 [Oryza sativa (japonica
  misc_feature (5)..(290): Homolog of NCBI NO: 5734618 NR Description: Similar to Arabidopsis thaliana chromosome II BAC
  misc_feature (1)..(297): Homolog of NCBI NO: 18399493 NR Description: expressed protein [Arabidopsis thaliana]
  misc_feature (1)..(297): Homolog of NCBI NO: 25411995 NR Description: hypothetical protein At2g20830 [imported] -

SEQ ID NO: 28475 - protein, 293 aa, Arabidopsis thaliana; identical to SEQ ID NO: 20323
  peptide (1)..(293): Ceres Seq. ID no. 15218568
  misc_feature (195)..(245): Pfam Name: Formiminotransferase domain Pfam Description: Formiminotransferase domain
  misc_feature (195)..(245): Pfam Name: Formiminotransferase domain Pfam Description: Formiminotransferase domain
  misc_feature (5)..(245): Homolog of NCBI NO: 13540922 NR Description: Glutamate formiminotransferase [Thermoplasma
  misc_feature (5)..(243): Homolog of NCBI NO: 20806959 NR Description: Glutamate formiminotransferase
  misc_feature (5)..(245): Homolog of NCBI NO: 28211902 NR Description: glutamate formiminotransferase [Clostridium
  misc_feature (10)..(245): Homolog of NCBI NO: 15643606 NR Description:
  misc_feature (1)..(51): Homolog of NCBI NO: 34897974 NR Description: hypothetical protein~similar to Oryza sativa
  misc_feature (5)..(245): Homolog of NCBI NO: 13540922 NR Description: Glutamate formiminotransferase [Thermoplasma
  misc_feature (5)..(245): Homolog of NCBI NO: 28211902 NR Description: glutamate formiminotransferase [Clostridium
  misc_feature (1)..(51): Homolog of NCBI NO: 34897974 NR Description: hypothetical protein~similar to Oryza sativa
  misc_feature (1)..(293): Homolog of NCBI NO: 25411995 NR Description: hypothetical protein At2g20830 [imported] -
  misc_feature (1)..(293): Homolog of NCBI NO: 18399493 NR Description: expressed protein [Arabidopsis thaliana]
  misc_feature (1)..(286): Homolog of NCBI NO: 5734618 NR Description: Similar to Arabidopsis thaliana chromosome II BAC
  misc_feature (1)..(286): Homolog of NCBI NO: 34898040 NR Description: OSJNBa0038F22.18 [Oryza sativa (japonica
  misc_feature (138)..(293): Homolog of NCBI NO: 34897974 NR Description: hypothetical protein~similar to Oryza sativa
  misc_feature (10)..(245): Homolog of NCBI NO: 15643606 NR Description:
  misc_feature (5)..(243): Homolog of NCBI NO: 20806959 NR Description: Glutamate formiminotransferase
  misc_feature (138)..(293): Homolog of NCBI NO: 34897974 NR Description: hypothetical protein~similar to Oryza sativa
  misc_feature (1)..(286): Homolog of NCBI NO: 34898040 NR Description: OSJNBa0038F22.18 [Oryza sativa (japonica
  misc_feature (1)..(286): Homolog of NCBI NO: 5734618 NR Description: Similar to Arabidopsis thaliana chromosome II BAC
  misc_feature (1)..(293): Homolog of NCBI NO: 18399493 NR Description: expressed protein [Arabidopsis thaliana]
  misc_feature (1)..(293): Homolog of NCBI NO: 25411995 NR Description: hypothetical protein At2g20830 [imported] -

SEQ ID NO: 28476 - protein, 226 aa, Arabidopsis thaliana; identical to SEQ ID NO: 20324
  peptide (1)..(226): Ceres Seq. ID no. 15218569
  misc_feature (128)..(178): Pfam Name: Formiminotransferase domain Pfam Description: Formiminotransferase domain
  misc_feature (128)..(178): Pfam Name: Formiminotransferase domain Pfam Description: Formiminotransferase domain
  misc_feature (1)..(176): Homolog of NCBI NO: 34540165 NR Description: formiminotransferase-cyclodeaminase-related
  misc_feature (1)..(178): Homolog of NCBI NO: 13540922 NR Description: Glutamate formiminotransferase [Thermoplasma
  misc_feature (1)..(176): Homolog of NCBI NO: 20806959 NR Description: Glutamate formiminotransferase
  misc_feature (1)..(178): Homolog of NCBI NO: 28211902 NR Description: glutamate formiminotransferase [Clostridium
  misc_feature (1)..(178): Homolog of NCBI NO: 15643606 NR Description:
  misc_feature (1)..(176): Homolog of NCBI NO: 34540165 NR Description: formiminotransferase-cyclodeaminase-related
  misc_feature (1)..(176): Homolog of NCBI NO: 20806959 NR Description: Glutamate formiminotransferase
  misc_feature (1)..(178): Homolog of NCBI NO: 15643606 NR Description:
  misc_feature (1)..(226): Homolog of NCBI NO: 25411995 NR Description: hypothetical protein At2g20830 [imported] -
  misc_feature (1)..(226): Homolog of NCBI NO: 18399493 NR Description: expressed protein [Arabidopsis thaliana]
  misc_feature (1)..(219): Homolog of NCBI NO: 5734618 NR Description: Similar to Arabidopsis thaliana chromosome II BAC
  misc_feature (1)..(219): Homolog of NCBI NO: 34898040 NR Description: OSJNBa0038F22.18 [Oryza sativa (japonica
  misc_feature (71)..(226): Homolog of NCBI NO: 34897974 NR Description: hypothetical protein~similar to Oryza sativa
  misc_feature (1)..(178): Homolog of NCBI NO: 28211902 NR Description: glutamate formiminotransferase [Clostridium
  misc_feature (1)..(178): Homolog of NCBI NO: 13540922 NR Description: Glutamate formiminotransferase [Thermoplasma
  misc_feature (71)..(226): Homolog of NCBI NO: 34897974 NR Description: hypothetical protein~similar to Oryza sativa
  misc_feature (1)..(219): Homolog of NCBI NO: 34898040 NR Description: OSJNBa0038F22.18 [Oryza sativa (japonica
  misc_feature (1)..(219): Homolog of NCBI NO: 5734618 NR Description: Similar to Arabidopsis thaliana chromosome II BAC
  misc_feature (1)..(226): Homolog of NCBI NO: 18399493 NR Description: expressed protein [Arabidopsis thaliana]
  misc_feature (1)..(226): Homolog of NCBI NO: 25411995 NR Description: hypothetical protein At2g20830 [imported] -

SEQ ID NO: 28477 - DNA, 909 bp, Arabidopsis thaliana
  misc_feature (1)..(909): Ceres Seq. ID no. 12332583
  misc_feature: MA Experiment ID: 108577 Result: Down-regulated in Transcription
  misc_feature: MA Experiment 108577 PARAMETER Experiment Name: At_42deg_Heat_cDNA_P Parameter: Temperature (deg C) Value: 42 vs. 22
  misc_feature: MA Experiment 108577 PARAMETER Experiment Name: At_42deg_Heat_cDNA_P Parameter: Timepoint (hr) Value: 6
  misc_feature: MA Experiment 108577 PARAMETER Experiment Name: At_42deg_Heat_cDNA_P Parameter: Tissue Value: Aerial
agaaagaggatacagaatagtgattactaacatcttctccgatggcggttgcgccggcaagagctcgttcagactatgattatctcatcaagcttctcctcatcggtgatagcggtgtgggaaaaagttgcttgttactgcgtttttcggatgatactttcaccacgagtttcattactaccattggaatcgacttcaagataagaacagtcgaacttgatgggaagcgtatcaaattgcagatatgggacactgctggacaagaacgttttagaactataaccacagcatattacagaggagcgatgggtatattactcgtctatgatgtaacagatgagtcatcattcaacaacattaggaactggatgaaaaacattgagcagcatgcgtccgatagtgtcaacaagatattggtcggtaacaaagccgacatggacgaaagcaaaagggctgtcccaacatcaaaaggacaagctcttgctgatgagtatggaatcaaattctttgagacgagtgcaaaaacaaaccagaatgtcgagcaggttttcctttctatcgctaaagacataaaacaaagactcacagaaagcgatacaaaagccgagccccaagggatcaagatcactaaacaagatgctaacaaagcctcatcgtcttctacaaatgagaaatcagcttgctgcagttatgtttagaagttctctgaacctgtttctaatctcttaccgtctttaatcttcttcgcatcattcaagggatcgtcctatgttcttattagtaggaggatagacttaattgatagctgtgtgtattttgctatctcgatggccaaacactgtactggtaatggtagacaatgtttaagtgcttaaactttgaattaatgaaatgcagatgttatgtgtg

SEQ ID NO: 28478 - protein, 218 aa, Arabidopsis thaliana
  peptide (1)..(218): Ceres Seq. ID no. 12332584
  misc_feature (17)..(179): Pfam Name: Ras family Pfam Description: Ras family
  misc_feature (1)..(215): Homolog of NCBI NO: 18447921 NR Description: ras-related protein RAB8-5 [Nicotiana tabacum]
  misc_feature (1)..(215): Homolog of NCBI NO: 15231847 NR Description: Ras-related GTP-binding protein, putative
  misc_feature (1)..(215): Homolog of NCBI NO: 18447915 NR Description: ras-related protein RAB8-2 [Nicotiana tabacum]
  misc_feature (1)..(215): Homolog of NCBI NO: 2808638 NR Description: small GTP-binding protein [Daucus carota]
  misc_feature (1)..(215): Homolog of NCBI NO: 1362066 NR Description: GTP-binding protein GTP6 - garden pea
  misc_feature (1)..(215): Homolog of NCBI NO: 18447913 NR Description: ras-related protein RAB8-1 [Nicotiana tabacum]
  misc_feature (1)..(215): Homolog of NCBI NO: 18447917 NR Description: ras-related protein RAB8-3 [Nicotiana tabacum]
  misc_feature (1)..(218): Homolog of NCBI NO: 21592670 NR Description: putative Ras-like GTP-binding protein
  misc_feature (1)..(218): Homolog of NCBI NO: 15242773 NR Description: GTP-binding protein, putative
  misc_feature (1)..(218): Homolog of NCBI NO: 15232784 NR Description: Ras family GTP-binding protein, putative
MAVAPARARSDYDYLIKLLLIGDSGVGKSCLLLRFSDDTFTTSFITTIGIDFKIRTVELDGKRIKLQIWDTAGQERFRTITTAYYRGAMGILLVYDVTDESSFNNIRNWMKNIEQHASDSVNKILVGNKADMDESKRAVPTSKGQALADEYGIKFFETSAKTNQNVEQVFLSIAKDIKQRLTESDTKAEPQGIKITKQDANKASSSSTNEKSACCSYV

SEQ ID NO: 28479 - protein, 130 aa, Arabidopsis thaliana
  peptide (1)..(130): Ceres Seq. ID no. 12332585
  misc_feature (1)..(91): Pfam Name: Ras family Pfam Description: Ras family
  misc_feature (1)..(127): Homolog of NCBI NO: 18447921 NR Description: ras-related protein RAB8-5 [Nicotiana tabacum]
  misc_feature (1)..(127): Homolog of NCBI NO: 15231847 NR Description: Ras-related GTP-binding protein, putative
  misc_feature (1)..(127): Homolog of NCBI NO: 18447915 NR Description: ras-related protein RAB8-2 [Nicotiana tabacum]
  misc_feature (1)..(127): Homolog of NCBI NO: 2808638 NR Description: small GTP-binding protein [Daucus carota]
  misc_feature (1)..(127): Homolog of NCBI NO: 1362066 NR Description: GTP-binding protein GTP6 - garden pea
  misc_feature (1)..(127): Homolog of NCBI NO: 18447913 NR Description: ras-related protein RAB8-1 [Nicotiana tabacum]
  misc_feature (1)..(127): Homolog of NCBI NO: 18447917 NR Description: ras-related protein RAB8-3 [Nicotiana tabacum]
  misc_feature (1)..(130): Homolog of NCBI NO: 21592670 NR Description: putative Ras-like GTP-binding protein
  misc_feature (1)..(130): Homolog of NCBI NO: 15242773 NR Description: GTP-binding protein, putative
  misc_feature (1)..(130): Homolog of NCBI NO: 15232784 NR Description: Ras family GTP-binding protein, putative
MGILLVYDVTDESSFNNIRNWMKNIEQHASDSVNKILVGNKADMDESKRAVPTSKGQALADEYGIKFFETSAKTNQNVEQVFLSIAKDIKQRLTESDTKAEPQGIKITKQDANKASSSSTNEKSACCSYV

SEQ ID NO: 28480 - protein, 109 aa, Arabidopsis thaliana
  peptide (1)..(109): Ceres Seq. ID no. 12332586
  misc_feature (1)..(70): Pfam Name: Ras family Pfam Description: Ras family
  misc_feature (1)..(106): Homolog of NCBI NO: 18447921 NR Description: ras-related protein RAB8-5 [Nicotiana tabacum]
  misc_feature (1)..(106): Homolog of NCBI NO: 15231847 NR Description: Ras-related GTP-binding protein, putative
  misc_feature (1)..(106): Homolog of NCBI NO: 18447915 NR Description: ras-related protein RAB8-2 [Nicotiana tabacum]
  misc_feature (1)..(106): Homolog of NCBI NO: 2808638 NR Description: small GTP-binding protein [Daucus carota]
  misc_feature (1)..(106): Homolog of NCBI NO: 1362066 NR Description: GTP-binding protein GTP6 - garden pea
  misc_feature (1)..(106): Homolog of NCBI NO: 18447913 NR Description: ras-related protein RAB8-1 [Nicotiana tabacum]
  misc_feature (1)..(106): Homolog of NCBI NO: 18447917 NR Description: ras-related protein RAB8-3 [Nicotiana tabacum]
  misc_feature (1)..(109): Homolog of NCBI NO: 21592670 NR Description: putative Ras-like GTP-binding protein
  misc_feature (1)..(109): Homolog of NCBI NO: 15242773 NR Description: GTP-binding protein, putative
  misc_feature (1)..(109): Homolog of NCBI NO: 15232784 NR Description: Ras family GTP-binding protein, putative
MKNIEQHASDSVNKILVGNKADMDESKRAVPTSKGQALADEYGIKFFETSAKTNQNVEQVFLSIAKDIKQRLTESDTKAEPQGIKITKQDANKASSSSTNEKSACCSYV

SEQ ID NO: 28481 - DNA, 1047 bp, Arabidopsis thaliana
  misc_feature (1)..(1047): Ceres Seq. ID no. 12332587
  misc_feature: MA Experiment ID: 20000166 Result: Up-regulated in Transcription
  misc_feature: MA Experiment 20000166 PARAMETER Experiment Name: At_100uM_ABA_P Parameter: Age (day) Value: 14
  misc_feature: MA Experiment 20000166 PARAMETER Experiment Name: At_100uM_ABA_P Parameter: Organism Value: A. thaliana
  misc_feature: MA Experiment 20000166 PARAMETER Experiment Name: At_100uM_ABA_P Parameter: Plant Line Value: WS
  misc_feature: MA Experiment 20000166 PARAMETER Experiment Name: At_100uM_ABA_P Parameter: Timepoint (hr) Value: 1
  misc_feature: MA Experiment 20000166 PARAMETER Experiment Name: At_100uM_ABA_P Parameter: Tissue Value: Aerial
  misc_feature: MA Experiment 20000166 PARAMETER Experiment Name: At_100uM_ABA_P Parameter: Treatment Value: 100uM ABA vs. No Treatment
  misc_feature: MA Experiment ID: 20000171 Result: Down-regulated in Transcription
  misc_feature: MA Experiment 20000171 PARAMETER Experiment Name: At_42deg_Heat_P Parameter: Age (day) Value: 14
  misc_feature: MA Experiment 20000171 PARAMETER Experiment Name: At_42deg_Heat_P Parameter: Organism Value: A. thaliana
  misc_feature: MA Experiment 20000171 PARAMETER Experiment Name: At_42deg_Heat_P Parameter: Plant Line Value: WS
  misc_feature: MA Experiment 20000171 PARAMETER Experiment Name: At_42deg_Heat_P Parameter: Temperature (deg C) Value: 42 vs. 22
  misc_feature: MA Experiment 20000171 PARAMETER Experiment Name: At_42deg_Heat_P Parameter: Timepoint (hr) Value: 1
  misc_feature: MA Experiment 20000171 PARAMETER Experiment Name: At_42deg_Heat_P Parameter: Tissue Value: Aerial
  misc_feature: MA Experiment ID: 20000173 Result: Down-regulated in Transcription
  misc_feature: MA Experiment 20000173 PARAMETER Experiment Name: At_42deg_Heat_P Parameter: Age (day) Value: 14
  misc_feature: MA Experiment 20000173 PARAMETER Experiment Name: At_42deg_Heat_P Parameter: Organism Value: A. thaliana
  misc_feature: MA Experiment 20000173 PARAMETER Experiment Name: At_42deg_Heat_P Parameter: Plant Line Value: WS
  misc_feature: MA Experiment 20000173 PARAMETER Experiment Name: At_42deg_Heat_P Parameter: Temperature (deg C) Value: 42 vs. 22
  misc_feature: MA Experiment 20000173 PARAMETER Experiment Name: At_42deg_Heat_P Parameter: Timepoint (hr) Value: 6
  misc_feature: MA Experiment 20000173 PARAMETER Experiment Name: At_42deg_Heat_P Parameter: Tissue Value: Aerial
  misc_feature: MA Experiment ID: 20000179 Result: Down-regulated in Transcription
  misc_feature: MA Experiment 20000179 PARAMETER Experiment Name: At_Germinating_Seeds_P Parameter: Age (hr) Value: 6 vs. 0
  misc_feature: MA Experiment 20000179 PARAMETER Experiment Name: At_Germinating_Seeds_P Parameter: Tissue Value: Germinating Seeds
  misc_feature: MA Experiment ID: 20000182 Result: Up-regulated in Transcription
  misc_feature: MA Experiment 20000182 PARAMETER Experiment Name: At_2mM_SA_P Parameter: Age (day) Value: 14
  misc_feature: MA Experiment 20000182 PARAMETER Experiment Name: At_2mM_SA_P Parameter: Organism Value: A. thaliana
  misc_feature: MA Experiment 20000182 PARAMETER Experiment Name: At_2mM_SA_P Parameter: Plant Line Value: WS
  misc_feature: MA Experiment 20000182 PARAMETER Experiment Name: At_2mM_SA_P Parameter: Timepoint (hr) Value: 6
  misc_feature: MA Experiment 20000182 PARAMETER Experiment Name: At_2mM_SA_P Parameter: Tissue Value: Aerial
  misc_feature: MA Experiment 20000182 PARAMETER Experiment Name: At_2mM_SA_P Parameter: Treatment Value: 2mM SA vs. No Treatment
  misc_feature: MA Experiment ID: 20000185 Result: Down-regulated in Transcription
  misc_feature: MA Experiment 20000185 PARAMETER Experiment Name: At_Roots__P Parameter: Age (day) Value: 7 vs. 21
  misc_feature: MA Experiment 20000185 PARAMETER Experiment Name: At_Roots__P Parameter: Organism Value: A. thaliana
  misc_feature: MA Experiment 20000185 PARAMETER Experiment Name: At_Roots__P Parameter: Tissue Value: Roots vs. Whole Plant
  misc_feature: MA Experiment ID: 20000439 Result: Down-regulated in Transcription
  misc_feature: MA Experiment 20000439 PARAMETER Experiment Name: At_Roots__P Parameter: Age (day) Value: 14 vs. 21
  misc_feature: MA Experiment 20000439 PARAMETER Experiment Name: At_Roots__P Parameter: Organism Value: A. thaliana
  misc_feature: MA Experiment 20000439 PARAMETER Experiment Name: At_Roots__P Parameter: Tissue Value: Roots vs. Whole Plant
  misc_feature: MA Experiment ID: 20000573 Result: Down-regulated in Transcription
  misc_feature: MA Experiment 20000573 PARAMETER Experiment Name: At_100uM_ABA_Mutants__P Parameter: Organism Value: A. thaliana
  misc_feature: MA Experiment 20000573 PARAMETER Experiment Name: At_100uM_ABA_Mutants__P Parameter: Plant Line Value: CS22 vs. Ler wt
  misc_feature: MA Experiment 20000573 PARAMETER Experiment Name: At_100uM_ABA_Mutants__P Parameter: Timepoint (hr) Value: N/A
  misc_feature: MA Experiment 20000573 PARAMETER Experiment Name: At_100uM_ABA_Mutants__P Parameter: Tissue Value: Whole Plant
  misc_feature: MA Experiment 20000573 PARAMETER Experiment Name: At_100uM_ABA_Mutants__P Parameter: Treatment Value: None
  misc_feature: MA Experiment ID: 20000574 Result: Down-regulated in Transcription
  misc_feature: MA Experiment 20000574 PARAMETER Experiment Name: At_100uM_ABA_Mutants__P Parameter: Organism Value: A. thaliana
  misc_feature: MA Experiment 20000574 PARAMETER Experiment Name: At_100uM_ABA_Mutants__P Parameter: Plant Line Value: CS23 vs. Ler wt
  misc_feature: MA Experiment 20000574 PARAMETER Experiment Name: At_100uM_ABA_Mutants__P Parameter: Timepoint (hr) Value: N/A
  misc_feature: MA Experiment 20000574 PARAMETER Experiment Name: At_100uM_ABA_Mutants__P Parameter: Tissue Value: Whole Plant
  misc_feature: MA Experiment 20000574 PARAMETER Experiment Name: At_100uM_ABA_Mutants__P Parameter: Treatment Value: None
  misc_feature: MA Experiment ID: 20000794 Result: Down-regulated in Transcription
  misc_feature: MA Experiment 20000794 PARAMETER Experiment Name: At_Petals_P Parameter: Age (day) Value: 23-25 days
  misc_feature: MA Experiment 20000794 PARAMETER Experiment Name: At_Petals_P Parameter: Plant Line Value: WS
  misc_feature: MA Experiment 20000794 PARAMETER Experiment Name: At_Petals_P Parameter: Tissue Value: Petals vs. Whole plant
  misc_feature: MA Experiment ID: 20001558 Result: Down-regulated in Transcription
  misc_feature: MA Experiment 20001558 PARAMETER Experiment Name: At_Drought_Soil_Dry_P Parameter: Age (day) Value: 27
  misc_feature: MA Experiment 20001558 PARAMETER Experiment Name: At_Drought_Soil_Dry_P Parameter: Organism Value: A. thaliana
  misc_feature: MA Experiment 20001558 PARAMETER Experiment Name: At_Drought_Soil_Dry_P Parameter: Plant Line Value: WS
  misc_feature: MA Experiment 20001558 PARAMETER Experiment Name: At_Drought_Soil_Dry_P Parameter: Post Timepoint (hr) Value: 6
  misc_feature: MA Experiment 20001558 PARAMETER Experiment Name: At_Drought_Soil_Dry_P Parameter: Post-Treatment Value: Re-Water vs. No Drought
  misc_feature: MA Experiment 20001558 PARAMETER Experiment Name: At_Drought_Soil_Dry_P Parameter: Timepoint (day) Value: 13
  misc_feature: MA Experiment 20001558 PARAMETER Experiment Name: At_Drought_Soil_Dry_P Parameter: Treatment Value: Drought vs. No Drought
acctcttatcaaacaccaaaccacaccagaacagaactcagccatggcttcttcttcttcttctcttctaatcctagccgttgcttgtttcgtctcgctaatctcaccggcgatttcacaacaggcttgcaaatcacagaacttgaactccgccggtccgttcgatagttgcgaagaccttccggtactcaattcctacctccattacacctacaattcctcaaattcatctctctccgtcgctttcgtcgccactccatctcaagccaacggtggctgggtcgcttgggctattaatcctacggggactaagatggctggttctcaagccttcctcgcttacagatccggcggtggtgcggctccggtcgtgaagacgtacaacattagcagctacagcagtctcgtcgaaggtaaacttgcttttgatttttggaatctacgcgccgagtcgttaagcggcggtaggatcgccattttcaaccgaacggttaaggttccggcgggacgtgatagtgtgaatcaggtatggcagatcggcggcaatgttaccaacggtcgtcccggtgtacatcctttcggtcctgataatttgggctcccaccgtgtgttgagtttcacagaagatgcagcaccgggctctgctccttcgccgggatctgctccttcgccgggatctgctccggcgccgggcaccagtggctcgactaccccaggaacagcggcgggaggtccagggaacgcggggtcattgacgaggaacgtaaattttggggtcaatttgggaattttggttttgttgggttctatttttattttctgaatggggatctctctctagtctctcttctcttcttgagtctctctctatttttttttttttttggtttgttcgaacaataatggagccccatacttttgtactgttttagtcttagggccatttactttgtttcaccacattacttagagttattggattgtatggaccattactatcatgagattgagattatcttatcttcttaaaatatctatttgccatcc

SEQ ID NO: 28482 - protein, 273 aa, Arabidopsis thaliana
  peptide (1)..(273): Ceres Seq. ID no. 12332588
  misc_feature (105)..(217): Pfam Name: Protein of unknown function (DUF568) Pfam Description: Protein of unknown function (DUF568)
  misc_feature (24)..(221): Homolog of NCBI NO: 22328744 NR Description: hypothetical protein
  misc_feature (24)..(221): Homolog of NCBI NO: 18086563 NR Description: AT4g17280/dl4675c [Arabidopsis thaliana]
  misc_feature (20)..(221): Homolog of NCBI NO: 15238124 NR Description: putative protein; protein id: At5g47530.1
  misc_feature (19)..(219): Homolog of NCBI NO: 21593814 NR Description: unknown [Arabidopsis thaliana]
  misc_feature (19)..(219): Homolog of NCBI NO: 15235545 NR Description: putative protein
  misc_feature (15)..(214): Homolog of NCBI NO: 18404500 NR Description: expressed protein
  misc_feature (24)..(272): Homolog of NCBI NO: 29647484 NR Description: OJ1191_A10.2 [Oryza sativa (japonica
  misc_feature (105)..(273): Homolog of NCBI NO: 18426884 NR Description: AT3g07390/F21O3_10 [Arabidopsis thaliana]
  misc_feature (1)..(273): Homolog of NCBI NO: 30680258 NR Description: auxin-induced protein (AIR12) [Arabidopsis
  misc_feature (10)..(273): Homolog of NCBI NO: 11357190 NR Description: auxin-induced protein AIR12
PLIKHQTTPEQNSAMASSSSSLLILAVACFVSLISPAISQQACKSQNLNSAGPFDSCEDLPVLNSYLHYTYNSSNSSLSVAFVATPSQANGGWVAWAINPTGTKMAGSQAFLAYRSGGGAAPVVKTYNISSYSSLVEGKLAFDFWNLRAESLSGGRIAIFNRTVKVPAGRDSVNQVWQIGGNVTNGRPGVHPFGPDNLGSHRVLSFTEDAAPGSAPSPGSAPSPGSAPAPGTSGSTTPGTAAGGPGNAGSLTRNVNFGVNLGILVLLGSIFIF

SEQ ID NO: 28483 - protein, 259 aa, Arabidopsis thaliana
  peptide (1)..(259): Ceres Seq. ID no. 12332589
  misc_feature (91)..(203): Pfam Name: Protein of unknown function (DUF568) Pfam Description: Protein of unknown function (DUF568)
  misc_feature (10)..(207): Homolog of NCBI NO: 22328744 NR Description: hypothetical protein
  misc_feature (10)..(207): Homolog of NCBI NO: 18086563 NR Description: AT4g17280/dl4675c [Arabidopsis thaliana]
  misc_feature (6)..(207): Homolog of NCBI NO: 15238124 NR Description: putative protein; protein id: At5g47530.1
  misc_feature (5)..(205): Homolog of NCBI NO: 21593814 NR Description: unknown [Arabidopsis thaliana]
  misc_feature (5)..(205): Homolog of NCBI NO: 15235545 NR Description: putative protein
  misc_feature (1)..(200): Homolog of NCBI NO: 18404500 NR Description: expressed protein
  misc_feature (10)..(258): Homolog of NCBI NO: 29647484 NR Description: OJ1191_A10.2 [Oryza sativa (japonica
  misc_feature (91)..(259): Homolog of NCBI NO: 18426884 NR Description: AT3g07390/F21O3_10 [Arabidopsis thaliana]
  misc_feature (1)..(259): Homolog of NCBI NO: 30680258 NR Description: auxin-induced protein (AIR12) [Arabidopsis
  misc_feature (1)..(259): Homolog of NCBI NO: 11357190 NR Description: auxin-induced protein AIR12
MASSSSSLLILAVACFVSLISPAISQQACKSQNLNSAGPFDSCEDLPVLNSYLHYTYNSSNSSLSVAFVATPSQANGGWVAWAINPTGTKMAGSQAFLAYRSGGGAAPVVKTYNISSYSSLVEGKLAFDFWNLRAESLSGGRIAIFNRTVKVPAGRDSVNQVWQIGGNVTNGRPGVHPFGPDNLGSHRVLSFTEDAAPGSAPSPGSAPSPGSAPAPGTSGSTTPGTAAGGPGNAGSLTRNVNFGVNLGILVLLGSIFIF

SEQ ID NO: 28484 - protein, 169 aa, Arabidopsis thaliana
  peptide (1)..(169): Ceres Seq. ID no. 12332590
  misc_feature (1)..(113): Pfam Name: Protein of unknown function (DUF568) Pfam Description: Protein of unknown function (DUF568)
  misc_feature (1)..(117): Homolog of NCBI NO: 22328744 NR Description: hypothetical protein
  misc_feature (1)..(117): Homolog of NCBI NO: 18086563 NR Description: AT4g17280/dl4675c [Arabidopsis thaliana]
  misc_feature (1)..(117): Homolog of NCBI NO: 15238124 NR Description: putative protein; protein id: At5g47530.1
  misc_feature (1)..(115): Homolog of NCBI NO: 21593814 NR Description: unknown [Arabidopsis thaliana]
  misc_feature (1)..(115): Homolog of NCBI NO: 15235545 NR Description: putative protein
  misc_feature (1)..(110): Homolog of NCBI NO: 18404500 NR Description: expressed protein
  misc_feature (1)..(168): Homolog of NCBI NO: 29647484 NR Description: OJ1191_A10.2 [Oryza sativa (japonica
  misc_feature (1)..(169): Homolog of NCBI NO: 18426884 NR Description: AT3g07390/F21O3_10 [Arabidopsis thaliana]
  misc_feature (1)..(169): Homolog of NCBI NO: 30680258 NR Description: auxin-induced protein (AIR12) [Arabidopsis
  misc_feature (1)..(169): Homolog of NCBI NO: 11357190 NR Description: auxin-induced protein AIR12
MAGSQAFLAYRSGGGAAPVVKTYNISSYSSLVEGKLAFDFWNLRAESLSGGRIAIFNRTVKVPAGRDSVNQVWQIGGNVTNGRPGVHPFGPDNLGSHRVLSFTEDAAPGSAPSPGSAPSPGSAPAPGTSGSTTPGTAAGGPGNAGSLTRNVNFGVNLGILVLLGSIFIF

SEQ ID NO: 28485 - DNA, 773 bp, Arabidopsis thaliana
  misc_feature (1)..(773): Ceres Seq. ID no. 12420842
  misc_feature: MA Experiment ID: 108434 Result: Up-regulated in Transcription
  misc_feature: MA Experiment 108434 PARAMETER Experiment Name: At_Root_Tips_cDNA_P Parameter: Tissue Value: Root Tips
  misc_feature: MA Experiment ID: 108462 Result: Down-regulated in Transcription
  misc_feature: MA Experiment 108462 PARAMETER Experiment Name: At_Germinating_Seeds_cDNA_P Parameter: Age (day) Value: 2 vs. 0
  misc_feature: MA Experiment 108462 PARAMETER Experiment Name: At_Germinating_Seeds_cDNA_P Parameter: Tissue Value: Germinating Seeds
  misc_feature: MA Experiment ID: 108463 Result: Down-regulated in Transcription
  misc_feature: MA Experiment 108463 PARAMETER Experiment Name: At_Germinating_Seeds_cDNA_P Parameter: Age (day) Value: 3 vs. 0
  misc_feature: MA Experiment 108463 PARAMETER Experiment Name: At_Germinating_Seeds_cDNA_P Parameter: Tissue Value: Germinating Seeds
  misc_feature: MA Experiment ID: 108464 Result: Down-regulated in Transcription
  misc_feature: MA Experiment 108464 PARAMETER Experiment Name: At_Germinating_Seeds_cDNA_P Parameter: Age (day) Value: 4 vs. 0
  misc_feature: MA Experiment 108464 PARAMETER Experiment Name: At_Germinating_Seeds_cDNA_P Parameter: Tissue Value: Germinating Seeds
  misc_feature: MA Experiment ID: 108488 Result: Up-regulated in Transcription
  misc_feature: MA Experiment ID: 108561 Result: Down-regulated in Transcription
  misc_feature: MA Experiment 108561 PARAMETER Experiment Name: At_100uM_ABA_cDNA_P Parameter: Timepoint (hr) Value: 6
  misc_feature: MA Experiment 108561 PARAMETER Experiment Name: At_100uM_ABA_cDNA_P Parameter: Tissue Value: Aerial
  misc_feature: MA Experiment 108561 PARAMETER Experiment Name: At_100uM_ABA_cDNA_P Parameter: Treatment Value: 100uM ABA vs. No Treatment
  misc_feature: MA Experiment ID: 108573 Result: Down-regulated in Transcription
  misc_feature: MA Experiment 108573 PARAMETER Experiment Name: At_Drought_cDNA_P Parameter: Timepoint (hr) Value: 6
  misc_feature: MA Experiment 108573 PARAMETER Experiment Name: At_Drought_cDNA_P Parameter: Tissue Value: Aerial
  misc_feature: MA Experiment 108573 PARAMETER Experiment Name: At_Drought_cDNA_P Parameter: Treatment Value: Drought vs. No Drought
  misc_feature: MA Experiment ID: 20000184 Result: Up-regulated in Transcription
  misc_feature: MA Experiment 20000184 PARAMETER Experiment Name: At_Shoots__P Parameter: Age (day) Value: 7
  misc_feature: MA Experiment 20000184 PARAMETER Experiment Name: At_Shoots__P Parameter: Tissue Value: Shoots vs. Whole Plant
  misc_feature: MA Experiment ID: 20000437 Result: Down-regulated in Transcription
  misc_feature: MA Experiment 20000437 PARAMETER Experiment Name: At_Drought_P Parameter: Age (day) Value: 8
  misc_feature: MA Experiment 20000437 PARAMETER Experiment Name: At_Drought_P Parameter: Organism Value: A. thaliana
  misc_feature: MA Experiment 20000437 PARAMETER Experiment Name: At_Drought_P Parameter: Plant Line Value: WS
  misc_feature: MA Experiment 20000437 PARAMETER Experiment Name: At_Drought_P Parameter: Timepoint (hr) Value: 24
  misc_feature: MA Experiment 20000437 PARAMETER Experiment Name: At_Drought_P Parameter: Tissue Value: Whole Plant
  misc_feature: MA Experiment 20000437 PARAMETER Experiment Name: At_Drought_P Parameter: Treatment Value: Drought vs. No Drought
  misc_feature: MA Experiment ID: 20000794 Result: Down-regulated in Transcription
  misc_feature: MA Experiment 20000794 PARAMETER Experiment Name: At_Petals_P Parameter: Age (day) Value: 23-25 days
  misc_feature: MA Experiment 20000794 PARAMETER Experiment Name: At_Petals_P Parameter: Plant Line Value: WS
  misc_feature: MA Experiment 20000794 PARAMETER Experiment Name: At_Petals_P Parameter: Tissue Value: Petals vs. Whole plant
  misc_feature: MA Experiment ID: 20001558 Result: Up-regulated in Transcription
  misc_feature: MA Experiment 20001558 PARAMETER Experiment Name: At_Drought_Soil_Dry_P Parameter: Age (day) Value: 27
  misc_feature: MA Experiment 20001558 PARAMETER Experiment Name: At_Drought_Soil_Dry_P Parameter: Organism Value: A. thaliana
  misc_feature: MA Experiment 20001558 PARAMETER Experiment Name: At_Drought_Soil_Dry_P Parameter: Plant Line Value: WS
  misc_feature: MA Experiment 20001558 PARAMETER Experiment Name: At_Drought_Soil_Dry_P Parameter: Post Timepoint (hr) Value: 6
  misc_feature: MA Experiment 20001558 PARAMETER Experiment Name: At_Drought_Soil_Dry_P Parameter: Post-Treatment Value: Re-Water vs. No Drought
  misc_feature: MA Experiment 20001558 PARAMETER Experiment Name: At_Drought_Soil_Dry_P Parameter: Timepoint (day) Value: 13
  misc_feature: MA Experiment 20001558 PARAMETER Experiment Name: At_Drought_Soil_Dry_P Parameter: Treatment Value: Drought vs. No Drought
  misc_feature: MA Experiment ID: 20001560 Result: Up-regulated in Transcription
  misc_feature: MA Experiment 20001560 PARAMETER Experiment Name: At_Drought_Soil_Dry_P Parameter: Age (day) Value: 28
  misc_feature: MA Experiment 20001560 PARAMETER Experiment Name: At_Drought_Soil_Dry_P Parameter: Organism Value: A. thaliana
  misc_feature: MA Experiment 20001560 PARAMETER Experiment Name: At_Drought_Soil_Dry_P Parameter: Plant Line Value: WS
  misc_feature: MA Experiment 20001560 PARAMETER Experiment Name: At_Drought_Soil_Dry_P Parameter: Post Timepoint (hr) Value: None
  misc_feature: MA Experiment 20001560 PARAMETER Experiment Name: At_Drought_Soil_Dry_P Parameter: Post-Treatment Value: None
  misc_feature: MA Experiment 20001560 PARAMETER Experiment Name: At_Drought_Soil_Dry_P Parameter: Timepoint (day) Value: 14
  misc_feature: MA Experiment 20001560 PARAMETER Experiment Name: At_Drought_Soil_Dry_P Parameter: Treatment Value: Drought vs. No Drought
  misc_feature: MA Experiment ID: 20001757 Result: Up-regulated in Transcription
  misc_feature: MA Experiment 20001757 PARAMETER Experiment Name: At_50mM_NH4NO3_L-to-H_P Parameter: Timepoint (hr) Value: 6
  misc_feature: MA Experiment 20001757 PARAMETER Experiment Name: At_50mM_NH4NO3_L-to-H_P Parameter: Tissue Value: Leaf
  misc_feature: MA Experiment 20001757 PARAMETER Experiment Name: At_50mM_NH4NO3_L-to-H_P Parameter: Treatment Value: 50mM NH4NO3 vs 100mM Mannitol
atccgcagaaaaccctattgctcccctttgctcaagctcagtgcctctttgcagcgaaagctcaaccaacaagacgatgattatctcagagaacaatcgcagagagatctgcaaataccttttcaaagagggagtatgctttgctaagaaggatttcaatctcccaaagcatccgttgattgatgtaccaaacctgcaagtgattaagctcatgcagagtttcaagtccaaggagtacgttagggagacatttgcgtggatgcattattattggtttctgactaatgaaggaattgagttcttgagaacttatcttaaccttccttccgatgttgtccctgctactttgaagaagtctgctaagcccggtggtcgtccctttggtggcccacctggtgatcgccaaagaggaccacctcgctctgatggagaccgtcccagatttggtgaccgtgatggataccgtggaggcccacgtggtggtgatgagaagggtggagctccagctgatttccagccgtctttccaaggaggtggtggtaggcctggttttggccgtggtgcaggcggttacagtgcagcagcaccatctggttcagggttcccttgaaaaatttgttgtcatattgcgacgatggaaggacagttttgttttttgttctagttctgtttgtgtaatgcaaatctggaatctataatctatctattaccttcaccttggtttaaacgaacaaatcctgtagtttcaggattagtgtcaaaattcatgtttc

SEQ ID NO: 28486 - protein, 202 aa, Arabidopsis thaliana
  peptide (1)..(202): Ceres Seq. ID no. 12420843
  misc_feature (28)..(123): Pfam Name: Plectin/S10 domain Pfam Description: Plectin/S10 domain
  misc_feature (26)..(188): Homolog of NCBI NO: 28200289 NR Description: ribosomal protein S10 [Branchiostoma belcheri
  misc_feature (26)..(188): Homolog of NCBI NO: 24266976 NR Description: ribosomal protein S10 [Branchiostoma belcheri]
  misc_feature (26)..(196): Homolog of NCBI NO: 40642980 NR Description: ribosomal protein S10 [Crassostrea gigas]
  misc_feature (26)..(197): Homolog of NCBI NO: 34905824 NR Description: putative ribosomal protein S10
  misc_feature (26)..(202): Homolog of NCBI NO: 15238099 NR Description: putative protein
  misc_feature (26)..(199): Homolog of NCBI NO: 20140213 NR Description: 40S ribosomal protein S10
  misc_feature (26)..(199): Homolog of NCBI NO: 34897532 NR Description: OSJNBa0042L16.3 [Oryza sativa (japonica
  misc_feature (26)..(202): Homolog of NCBI NO: 20139798 NR Description: 40S ribosomal protein S10-3
  misc_feature (26)..(202): Homolog of NCBI NO: 15237217 NR Description: putative protein
  misc_feature (26)..(202): Homolog of NCBI NO: 15235985 NR Description: putative ribosomal protein S10
SAENPIAPLCSSSVPLCSESSTNKTMIISENNRREICKYLFKEGVCFAKKDFNLPKHPLIDVPNLQVIKLMQSFKSKEYVRETFAWMHYYWFLTNEGIEFLRTYLNLPSDVVPATLKKSAKPGGRPFGGPPGDRQRGPPRSDGDRPRFGDRDGYRGGPRGGDEKGGAPADFQPSFQGGGGRPGFGRGAGGYSAAAPSGSGFP

SEQ ID NO: 28487 - protein, 177 aa, Arabidopsis thaliana
  peptide (1)..(177): Ceres Seq. ID no. 12420844
  misc_feature (3)..(98): Pfam Name: Plectin/S10 domain Pfam Description: Plectin/S10 domain
  misc_feature (1)..(163): Homolog of NCBI NO: 28200289 NR Description: ribosomal protein S10 [Branchiostoma belcheri
  misc_feature (1)..(163): Homolog of NCBI NO: 24266976 NR Description: ribosomal protein S10 [Branchiostoma belcheri]
  misc_feature (1)..(171): Homolog of NCBI NO: 40642980 NR Description: ribosomal protein S10 [Crassostrea gigas]
  misc_feature (1)..(172): Homolog of NCBI NO: 34905824 NR Description: putative ribosomal protein S10
  misc_feature (1)..(177): Homolog of NCBI NO: 15238099 NR Description: putative protein
  misc_feature (1)..(174): Homolog of NCBI NO: 20140213 NR Description: 40S ribosomal protein S10
  misc_feature (1)..(174): Homolog of NCBI NO: 34897532 NR Description: OSJNBa0042L16.3 [Oryza sativa (japonica
  misc_feature (1)..(177): Homolog of NCBI NO: 20139798 NR Description: 40S ribosomal protein S10-3
  misc_feature (1)..(177): Homolog of NCBI NO: 15237217 NR Description: putative protein
  misc_feature (1)..(177): Homolog of NCBI NO: 15235985 NR Description: putative ribosomal protein S10
MIISENNRREICKYLFKEGVCFAKKDFNLPKHPLIDVPNLQVIKLMQSFKSKEYVRETFAWMHYYWFLTNEGIEFLRTYLNLPSDVVPATLKKSAKPGGRPFGGPPGDRQRGPPRSDGDRPRFGDRDGYRGGPRGGDEKGGAPADFQPSFQGGGGRPGFGRGAGGYSAAAPSGSGFP

SEQ ID NO: 28488 - protein, 132 aa, Arabidopsis thaliana
  peptide (1)..(132): Ceres Seq. ID no. 12420845
  misc_feature (1)..(53): Pfam Name: Plectin/S10 domain Pfam Description: Plectin/S10 domain
  misc_feature (1)..(118): Homolog of NCBI NO: 28200289 NR Description: ribosomal protein S10 [Branchiostoma belcheri
  misc_feature (1)..(118): Homolog of NCBI NO: 24266976 NR Description: ribosomal protein S10 [Branchiostoma belcheri]
  misc_feature (1)..(126): Homolog of NCBI NO: 40642980 NR Description: ribosomal protein S10 [Crassostrea gigas]
  misc_feature (1)..(127): Homolog of NCBI NO: 34905824 NR Description: putative ribosomal protein S10
  misc_feature (1)..(132): Homolog of NCBI NO: 15238099 NR Description: putative protein
  misc_feature (1)..(129): Homolog of NCBI NO: 20140213 NR Description: 40S ribosomal protein S10
  misc_feature (1)..(129): Homolog of NCBI NO: 34897532 NR Description: OSJNBa0042L16.3 [Oryza sativa (japonica
  misc_feature (1)..(132): Homolog of NCBI NO: 20139798 NR Description: 40S ribosomal protein S10-3
  misc_feature (1)..(132): Homolog of NCBI NO: 15237217 NR Description: putative protein
  misc_feature (1)..(132): Homolog of NCBI NO: 15235985 NR Description: putative ribosomal protein S10
MQSFKSKEYVRETFAWMHYYWFLTNEGIEFLRTYLNLPSDVVPATLKKSAKPGGRPFGGPPGDRQRGPPRSDGDRPRFGDRDGYRGGPRGGDEKGGAPADFQPSFQGGGGRPGFGRGAGGYSAAAPSGSGFP

SEQ ID NO: 28489 - DNA, 682 bp, Arabidopsis thaliana
  misc_feature (1)..(682): Ceres Seq. ID no. 12393018
  misc_feature: MA Experiment ID: 20000173 Result: Down-regulated in Transcription
  misc_feature: MA Experiment 20000173 PARAMETER Experiment Name: At_42deg_Heat_P Parameter: Age (day) Value: 14
  misc_feature: MA Experiment 20000173 PARAMETER Experiment Name: At_42deg_Heat_P Parameter: Organism Value: A. thaliana
  misc_feature: MA Experiment 20000173 PARAMETER Experiment Name: At_42deg_Heat_P Parameter: Plant Line Value: WS
  misc_feature: MA Experiment 20000173 PARAMETER Experiment Name: At_42deg_Heat_P Parameter: Temperature (deg C) Value: 42 vs. 22
  misc_feature: MA Experiment 20000173 PARAMETER Experiment Name: At_42deg_Heat_P Parameter: Timepoint (hr) Value: 6
  misc_feature: MA Experiment 20000173 PARAMETER Experiment Name: At_42deg_Heat_P Parameter: Tissue Value: Aerial
  misc_feature: MA Experiment ID: 20000437 Result: Down-regulated in Transcription
  misc_feature: MA Experiment 20000437 PARAMETER Experiment Name: At_Drought_P Parameter: Age (day) Value: 8
  misc_feature: MA Experiment 20000437 PARAMETER Experiment Name: At_Drought_P Parameter: Organism Value: A. thaliana
  misc_feature: MA Experiment 20000437 PARAMETER Experiment Name: At_Drought_P Parameter: Plant Line Value: WS
  misc_feature: MA Experiment 20000437 PARAMETER Experiment Name: At_Drought_P Parameter: Timepoint (hr) Value: 24
  misc_feature: MA Experiment 20000437 PARAMETER Experiment Name: At_Drought_P Parameter: Tissue Value: Whole Plant
  misc_feature: MA Experiment 20000437 PARAMETER Experiment Name: At_Drought_P Parameter: Treatment Value: Drought vs. No Drought
aacaaacacaaaacttgatctcacgactccatcttctaaaattcagaatctttctttgaaacttttgtgtgaagaaaatggcaccaaaggcagagaagaagccggcagagaagaaaccagtggaagagaaatcaaaagccgaaaaagctccagcggagaagaaaccaaaagccggcaagaaactcccgaaggaagccggtgccggcggcgataagaagaagaaaatgaagaagaagagtgttgagacgtacaagatctacatcttcaaggttctgaaacaagttcatccagatattggtatttcaagcaaagctatggggattatgaacagtttcatcaacgacatctttgagaaattggcatcggaatcgtcgaaactcgcgaggtataataagaagccgacgattacttctcgggagattcagactgctgttagacttgttcttcctggtgagcttgcgaaacatgctgtttctgaaggaactaaggcggtgactaagtttactagctcttgaattgtggatcttgttgaaatcgatgtttgtaaaattagggttttttagatttgatggttgttgttgactctttgatcgatttctgtttcgttttcttgttgcgatgttaatcaaatcggatccgatttctttcttaaatcaaatctatcaagtaaaatcttttgccg

SEQ ID NO: 28490 - protein, 145 aa, Arabidopsis thaliana; identical to SEQ ID NO: 21275
  peptide (1)..(145): Ceres Seq. ID no. 12393019
  misc_feature (5)..(144): Pfam Name: Core histone H2A/H2B/H3/H4 Pfam Description: Core histone H2A/H2B/H3/H4
  misc_feature (1)..(145): Homolog of NCBI NO: 7387727 NR Description: Histone H2B (CaH2B)
  misc_feature (1)..(145): Homolog of NCBI NO: 15226943 NR Description: putative histone H2B
  misc_feature (1)..(145): Homolog of NCBI NO: 21617908 NR Description: histone H2B [Arabidopsis thaliana]
  misc_feature (1)..(145): Homolog of NCBI NO: 15223016 NR Description: histone H2B
  misc_feature (1)..(145): Homolog of NCBI NO: 7439756 NR Description: histone H2B - tomato
  misc_feature (1)..(145): Homolog of NCBI NO: 7387726 NR Description: Histone H2B
  misc_feature (1)..(145): Homolog of NCBI NO: 21554180 NR Description: histone H2B-like protein [Arabidopsis thaliana]
  misc_feature (1)..(145): Homolog of NCBI NO: 15238563 NR Description: histone H2B - like protein
  misc_feature (1)..(145): Homolog of NCBI NO: 15231304 NR Description: histone H2B; protein id: At3g45980.1, supported
  misc_feature (1)..(145): Homolog of NCBI NO: 15231313 NR Description: histone H2B -like protein

SEQ ID NO: 28491 - protein, 96 aa, Arabidopsis thaliana; identical to SEQ ID NO: 21276
  peptide (1)..(96): Ceres Seq. ID no. 12393020
  misc_feature (1)..(95): Pfam Name: Core histone H2A/H2B/H3/H4 Pfam Description: Core histone H2A/H2B/H3/H4
  misc_feature (1)..(96): Homolog of NCBI NO: 7387727 NR Description: Histone H2B (CaH2B)
  misc_feature (1)..(96): Homolog of NCBI NO: 15226943 NR Description: putative histone H2B
  misc_feature (1)..(96): Homolog of NCBI NO: 21617908 NR Description: histone H2B [Arabidopsis thaliana]
  misc_feature (1)..(96): Homolog of NCBI NO: 15223016 NR Description: histone H2B
  misc_feature (1)..(96): Homolog of NCBI NO: 7439756 NR Description: histone H2B - tomato
  misc_feature (1)..(96): Homolog of NCBI NO: 7387726 NR Description: Histone H2B
  misc_feature (1)..(96): Homolog of NCBI NO: 21554180 NR Description: histone H2B-like protein [Arabidopsis thaliana]
  misc_feature (1)..(96): Homolog of NCBI NO: 15238563 NR Description: histone H2B - like protein
  misc_feature (1)..(96): Homolog of NCBI NO: 15231304 NR Description: histone H2B; protein id: At3g45980.1, supported
  misc_feature (1)..(96): Homolog of NCBI NO: 15231313 NR Description: histone H2B -like protein

SEQ ID NO: 28492 - DNA, 932 bp, Arabidopsis thaliana
  misc_feature (1)..(932): Ceres Seq. ID no. 12574162
  misc_feature: MA Experiment ID: 20000227 Result: Up-regulated in Transcription
  misc_feature: MA Experiment 20000227 PARAMETER Experiment Name: At_Root-Tips-vs-Tops_P Parameter: Tissue Value: Root Tips vs. Root Tops
  misc_feature: MA Experiment ID: 20001557 Result: Up-regulated in Transcription
  misc_feature: MA Experiment 20001557 PARAMETER Experiment Name: At_Drought_Soil_Dry_P Parameter: Age (day) Value: 27
  misc_feature: MA Experiment 20001557 PARAMETER Experiment Name: At_Drought_Soil_Dry_P Parameter: Organism Value: A. thaliana
  misc_feature: MA Experiment 20001557 PARAMETER Experiment Name: At_Drought_Soil_Dry_P Parameter: Plant Line Value: WS
  misc_feature: MA Experiment 20001557 PARAMETER Experiment Name: At_Drought_Soil_Dry_P Parameter: Post Timepoint (hr) Value: 3
  misc_feature: MA Experiment 20001557 PARAMETER Experiment Name: At_Drought_Soil_Dry_P Parameter: Post-Treatment Value: Re-Water vs. No Drought
  misc_feature: MA Experiment 20001557 PARAMETER Experiment Name: At_Drought_Soil_Dry_P Parameter: Timepoint (day) Value: 13
  misc_feature: MA Experiment 20001557 PARAMETER Experiment Name: At_Drought_Soil_Dry_P Parameter: Treatment Value: Drought vs. No Drought
  misc_feature: MA Experiment ID: 20001558 Result: Up-regulated in Transcription
  misc_feature: MA Experiment 20001558 PARAMETER Experiment Name: At_Drought_Soil_Dry_P Parameter: Age (day) Value: 27
  misc_feature: MA Experiment 20001558 PARAMETER Experiment Name: At_Drought_Soil_Dry_P Parameter: Organism Value: A. thaliana
  misc_feature: MA Experiment 20001558 PARAMETER Experiment Name: At_Drought_Soil_Dry_P Parameter: Plant Line Value: WS
  misc_feature: MA Experiment 20001558 PARAMETER Experiment Name: At_Drought_Soil_Dry_P Parameter: Post Timepoint (hr) Value: 6
  misc_feature: MA Experiment 20001558 PARAMETER Experiment Name: At_Drought_Soil_Dry_P Parameter: Post-Treatment Value: Re-Water vs. No Drought
  misc_feature: MA Experiment 20001558 PARAMETER Experiment Name: At_Drought_Soil_Dry_P Parameter: Timepoint (day) Value: 13
  misc_feature: MA Experiment 20001558 PARAMETER Experiment Name: At_Drought_Soil_Dry_P Parameter: Treatment Value: Drought vs. No Drought
  misc_feature: MA Experiment ID: 20001560 Result: Up-regulated in Transcription
  misc_feature: MA Experiment 20001560 PARAMETER Experiment Name: At_Drought_Soil_Dry_P Parameter: Age (day) Value: 28
  misc_feature: MA Experiment 20001560 PARAMETER Experiment Name: At_Drought_Soil_Dry_P Parameter: Organism Value: A. thaliana
  misc_feature: MA Experiment 20001560 PARAMETER Experiment Name: At_Drought_Soil_Dry_P Parameter: Plant Line Value: WS
  misc_feature: MA Experiment 20001560 PARAMETER Experiment Name: At_Drought_Soil_Dry_P Parameter: Post Timepoint (hr) Value: None
  misc_feature: MA Experiment 20001560 PARAMETER Experiment Name: At_Drought_Soil_Dry_P Parameter: Post-Treatment Value: None
  misc_feature: MA Experiment 20001560 PARAMETER Experiment Name: At_Drought_Soil_Dry_P Parameter: Timepoint (day) Value: 14
  misc_feature: MA Experiment 20001560 PARAMETER Experiment Name: At_Drought_Soil_Dry_P Parameter: Treatment Value: Drought vs. No Drought
  misc_feature: MA Experiment ID: 20001757 Result: Up-regulated in Transcription
  misc_feature: MA Experiment 20001757 PARAMETER Experiment Name: At_50mM_NH4NO3_L-to-H_P Parameter: Timepoint (hr) Value: 6
  misc_feature: MA Experiment 20001757 PARAMETER Experiment Name: At_50mM_NH4NO3_L-to-H_P Parameter: Tissue Value: Leaf
  misc_feature: MA Experiment 20001757 PARAMETER Experiment Name: At_50mM_NH4NO3_L-to-H_P Parameter: Treatment Value: 50mM NH4NO3 vs 100mM Mannitol
agtttcgctgcgctgtttcaagggttttcgtttttatcttttcctccgaagaagaagataagaggttgaagaagaagaagatgccaggtccagttattgaggaagtgaatgaggaggctcttatggatgccattaaagagcagatgaagctccagaaggagaacgatgttgttgttgaggatgtgaaagatggagacgaagacgatgatgatgttgatgacgacgacgatgagattgctgatggagctggtgagaatgaggcttccaagcaaagtagaagcgagaagaaaagccgaaaggcgatgctgaaactcggaatgaaacctgttactgatgttagcagagtgactatcaagagatcaaagaatgtgttgtttgtcatctcgaagccggatgtgttcaagagtccgaactctgagacctatgtgatattcggtgaggctaagattgatgacatgagctctcagctacaagcacaagctgctcagaggttcaagatgcctgacgttgcgtctatgatccccaacactgatggttctgaagcagccacggttgcacaagaggaggaagacgatgaagatgttgatgagactggtgttgaagccaaggacattgatcttgtgatgactcaagccggtgtctcgaggcccaaggctgttaaggctcttaaagagagtaacggagatattgtttccgccattatggaactcactacataggttttagtgagttgcaaaagacttgtgatggttcgtctttgttgcttcatttctgattcggttagcaattttctcgaacatctctgtttctccacttttttgaggctatttctttttacctttctctgagccataaacaatgttgcttcacatctataatttgagacgtttatgtctagtgttgttaactctttagcaagaaagattgatgag

SEQ ID NO: 28493 - protein, 238 aa, Arabidopsis thaliana
  peptide (1)..(238): Ceres Seq. ID no. 12574163
  misc_feature (92)..(151): Pfam Name: NAC domain Pfam Description: NAC domain
  misc_feature (92)..(151): Pfam Name: NAC domain Pfam Description: NAC domain
  misc_feature (34)..(237): Homolog of NCBI NO: 34907258 NR Description: putative nascent polypeptide associated complex
  misc_feature (37)..(238): Homolog of NCBI NO: 15230476 NR Description: nascent polypeptide associated complex alpha
  misc_feature (49)..(237): Homolog of NCBI NO: 34902238 NR Description: Putative nascent polypeptide associated complex
  misc_feature (37)..(238): Homolog of NCBI NO: 32352154 NR Description: nascent polypeptide associated complex alpha
  misc_feature (28)..(238): Homolog of NCBI NO: 15229149 NR Description: alpha NAC-like protein
  misc_feature (34)..(237): Homolog of NCBI NO: 34907258 NR Description: putative nascent polypeptide associated complex
  misc_feature (49)..(237): Homolog of NCBI NO: 34902238 NR Description: Putative nascent polypeptide associated complex
  misc_feature (28)..(238): Homolog of NCBI NO: 15229149 NR Description: alpha NAC-like protein
  misc_feature (27)..(238): Homolog of NCBI NO: 15235122 NR Description: putative alpha NAC
  misc_feature (27)..(238): Homolog of NCBI NO: 18398710 NR Description: expressed protein
  misc_feature (27)..(238): Homolog of NCBI NO: 21536597 NR Description: putative alpha NAC [Arabidopsis thaliana]
  misc_feature (20)..(238): Homolog of NCBI NO: 4115918 NR Description: similar to nascent polypeptide associated complex
  misc_feature (28)..(238): Homolog of NCBI NO: 13899101 NR Description: alpha NAC-like protein [Arabidopsis thaliana]
  misc_feature (37)..(238): Homolog of NCBI NO: 32352154 NR Description: nascent polypeptide associated complex alpha
  misc_feature (37)..(238): Homolog of NCBI NO: 15230476 NR Description: nascent polypeptide associated complex alpha
  misc_feature (28)..(238): Homolog of NCBI NO: 13899101 NR Description: alpha NAC-like protein [Arabidopsis thaliana]
  misc_feature (20)..(238): Homolog of NCBI NO: 4115918 NR Description: similar to nascent polypeptide associated complex
  misc_feature (27)..(238): Homolog of NCBI NO: 21536597 NR Description: putative alpha NAC [Arabidopsis thaliana]
  misc_feature (27)..(238): Homolog of NCBI NO: 18398710 NR Description: expressed protein
  misc_feature (27)..(238): Homolog of NCBI NO: 15235122 NR Description: putative alpha NAC
FRCAVSRVFVFIFSSEEEDKRLKKKKMPGPVIEEVNEEALMDAIKEQMKLQKENDVVVEDVKDGDEDDDDVDDDDDEIADGAGENEASKQSRSEKKSRKAMLKLGMKPVTDVSRVTIKRSKNVLFVISKPDVFKSPNSETYVIFGEAKIDDMSSQLQAQAAQRFKMPDVASMIPNTDGSEAATVAQEEEDDEDVDETGVEAKDIDLVMTQAGVSRPKAVKALKESNGDIVSAIMELTT

SEQ ID NO: 28494 - protein, 212 aa, Arabidopsis thaliana
  peptide (1)..(212): Ceres Seq. ID no. 12574164
  misc_feature (66)..(125): Pfam Name: NAC domain Pfam Description: NAC domain
  misc_feature (66)..(125): Pfam Name: NAC domain Pfam Description: NAC domain
  misc_feature (8)..(211): Homolog of NCBI NO: 34907258 NR Description: putative nascent polypeptide associated complex
  misc_feature (11)..(212): Homolog of NCBI NO: 15230476 NR Description: nascent polypeptide associated complex alpha
  misc_feature (23)..(211): Homolog of NCBI NO: 34902238 NR Description: Putative nascent polypeptide associated complex
  misc_feature (11)..(212): Homolog of NCBI NO: 32352154 NR Description: nascent polypeptide associated complex alpha
  misc_feature (2)..(212): Homolog of NCBI NO: 15229149 NR Description: alpha NAC-like protein
  misc_feature (8)..(211): Homolog of NCBI NO: 34907258 NR Description: putative nascent polypeptide associated complex
  misc_feature (23)..(211): Homolog of NCBI NO: 34902238 NR Description: Putative nascent polypeptide associated complex
  misc_feature (2)..(212): Homolog of NCBI NO: 15229149 NR Description: alpha NAC-like protein
  misc_feature (1)..(212): Homolog of NCBI NO: 15235122 NR Description: putative alpha NAC
  misc_feature (1)..(212): Homolog of NCBI NO: 18398710 NR Description: expressed protein
  misc_feature (1)..(212): Homolog of NCBI NO: 21536597 NR Description: putative alpha NAC [Arabidopsis thaliana]
  misc_feature (1)..(212): Homolog of NCBI NO: 4115918 NR Description: similar to nascent polypeptide associated complex
  misc_feature (2)..(212): Homolog of NCBI NO: 13899101 NR Description: alpha NAC-like protein [Arabidopsis thaliana]
  misc_feature (11)..(212): Homolog of NCBI NO: 32352154 NR Description: nascent polypeptide associated complex alpha
  misc_feature (11)..(212): Homolog of NCBI NO: 15230476 NR Description: nascent polypeptide associated complex alpha
  misc_feature (2)..(212): Homolog of NCBI NO: 13899101 NR Description: alpha NAC-like protein [Arabidopsis thaliana]
  misc_feature (1)..(212): Homolog of NCBI NO: 4115918 NR Description: similar to nascent polypeptide associated complex
  misc_feature (1)..(212): Homolog of NCBI NO: 21536597 NR Description: putative alpha NAC [Arabidopsis thaliana]
  misc_feature (1)..(212): Homolog of NCBI NO: 18398710 NR Description: expressed protein
  misc_feature (1)..(212): Homolog of NCBI NO: 15235122 NR Description: putative alpha NAC
MPGPVIEEVNEEALMDAIKEQMKLQKENDVVVEDVKDGDEDDDDVDDDDDEIADGAGENEASKQSRSEKKSRKAMLKLGMKPVTDVSRVTIKRSKNVLFVISKPDVFKSPNSETYVIFGEAKIDDMSSQLQAQAAQRFKMPDVASMIPNTDGSEAATVAQEEEDDEDVDETGVEAKDIDLVMTQAGVSRPKAVKALKESNGDIVSAIMELTT

SEQ ID NO: 28495 - protein, 198 aa, Arabidopsis thaliana
  peptide (1)..(198): Ceres Seq. ID no. 12574165
  misc_feature (52)..(111): Pfam Name: NAC domain Pfam Description: NAC domain
  misc_feature (52)..(111): Pfam Name: NAC domain Pfam Description: NAC domain
  misc_feature (1)..(197): Homolog of NCBI NO: 34907258 NR Description: putative nascent polypeptide associated complex
  misc_feature (1)..(198): Homolog of NCBI NO: 15230476 NR Description: nascent polypeptide associated complex alpha
  misc_feature (9)..(197): Homolog of NCBI NO: 34902238 NR Description: Putative nascent polypeptide associated complex
  misc_feature (1)..(198): Homolog of NCBI NO: 32352154 NR Description: nascent polypeptide associated complex alpha
  misc_feature (1)..(198): Homolog of NCBI NO: 15229149 NR Description: alpha NAC-like protein
  misc_feature (1)..(197): Homolog of NCBI NO: 34907258 NR Description: putative nascent polypeptide associated complex
  misc_feature (9)..(197): Homolog of NCBI NO: 34902238 NR Description: Putative nascent polypeptide associated complex
  misc_feature (1)..(198): Homolog of NCBI NO: 15229149 NR Description: alpha NAC-like protein
  misc_feature (1)..(198): Homolog of NCBI NO: 15235122 NR Description: putative alpha NAC
  misc_feature (1)..(198): Homolog of NCBI NO: 18398710 NR Description: expressed protein
  misc_feature (1)..(198): Homolog of NCBI NO: 21536597 NR Description: putative alpha NAC [Arabidopsis thaliana]
  misc_feature (1)..(198): Homolog of NCBI NO: 4115918 NR Description: similar to nascent polypeptide associated complex
  misc_feature (1)..(198): Homolog of NCBI NO: 13899101 NR Description: alpha NAC-like protein [Arabidopsis thaliana]
  misc_feature (1)..(198): Homolog of NCBI NO: 32352154 NR Description: nascent polypeptide associated complex alpha
  misc_feature (1)..(198): Homolog of NCBI NO: 15230476 NR Description: nascent polypeptide associated complex alpha
  misc_feature (1)..(198): Homolog of NCBI NO: 13899101 NR Description: alpha NAC-like protein [Arabidopsis thaliana]
  misc_feature (1)..(198): Homolog of NCBI NO: 4115918 NR Description: similar to nascent polypeptide associated complex
  misc_feature (1)..(198): Homolog of NCBI NO: 21536597 NR Description: putative alpha NAC [Arabidopsis thaliana]
  misc_feature (1)..(198): Homolog of NCBI NO: 18398710 NR Description: expressed protein
  misc_feature (1)..(198): Homolog of NCBI NO: 15235122 NR Description: putative alpha NAC
MDAIKEQMKLQKENDVVVEDVKDGDEDDDDVDDDDDEIADGAGENEASKQSRSEKKSRKAMLKLGMKPVTDVSRVTIKRSKNVLFVISKPDVFKSPNSETYVIFGEAKIDDMSSQLQAQAAQRFKMPDVASMIPNTDGSEAATVAQEEEDDEDVDETGVEAKDIDLVMTQAGVSRPKAVKALKESNGDIVSAIMELTT

SEQ ID NO: 28496 - DNA, 930 bp, Arabidopsis thaliana
  misc_feature (1)..(930): Ceres Seq. ID no. 12332556
  misc_feature: MA Experiment ID: 108434 Result: Up-regulated in Transcription
  misc_feature: MA Experiment 108434 PARAMETER Experiment Name: At_Root_Tips_cDNA_P Parameter: Tissue Value: Root Tips
  misc_feature: MA Experiment ID: 108435 Result: Up-regulated in Transcription
  misc_feature: MA Experiment 108435 PARAMETER Experiment Name: At_stm_Mutants_cDNA_P Parameter: Plant Line Value: wt Landsburg vs stm
  misc_feature: MA Experiment 108435 PARAMETER Experiment Name: At_stm_Mutants_cDNA_P Parameter: Tissue Value: Shoot Apical Meristem Region
  misc_feature: MA Experiment ID: 108576 Result: Down-regulated in Transcription
  misc_feature: MA Experiment 108576 PARAMETER Experiment Name: At_42deg_Heat_cDNA_P Parameter: Temperature (deg C) Value: 42 vs. 22
  misc_feature: MA Experiment 108576 PARAMETER Experiment Name: At_42deg_Heat_cDNA_P Parameter: Timepoint (hr) Value: 1
  misc_feature: MA Experiment 108576 PARAMETER Experiment Name: At_42deg_Heat_cDNA_P Parameter: Tissue Value: Aerial
  misc_feature: MA Experiment ID: 108579 Result: Down-regulated in Transcription
  misc_feature: MA Experiment 108579 PARAMETER Experiment Name: At_4deg_Cold_cDNA_P Parameter: Temperature (deg C) Value: 4 vs. 22
  misc_feature: MA Experiment 108579 PARAMETER Experiment Name: At_4deg_Cold_cDNA_P Parameter: Timepoint (hr) Value: 6
  misc_feature: MA Experiment 108579 PARAMETER Experiment Name: At_4deg_Cold_cDNA_P Parameter: Tissue Value: Aerial
  misc_feature: MA Experiment ID: 20000068 Result: Down-regulated in Transcription
  misc_feature: MA Experiment ID: 20000214 Result: Down-regulated in Transcription
  misc_feature: MA Experiment 20000214 PARAMETER Experiment Name: At_4deg_Cold_P Parameter: Timepoint (hr) Value: 6
  misc_feature: MA Experiment ID: 20000496 Result: Up-regulated in Transcription
  misc_feature: MA Experiment 20000496 PARAMETER Experiment Name: At_Guard_Cells_P Parameter: Harvest Date Value: 7/19/2002
  misc_feature: MA Experiment 20000496 PARAMETER Experiment Name: At_Guard_Cells_P Parameter: Organism Value: Canola
  misc_feature: MA Experiment 20000496 PARAMETER Experiment Name: At_Guard_Cells_P Parameter: Tissue Value: Guard Cells vs. Leaves
  misc_feature: MA Experiment ID: 20001905 Result: Up-regulated in Transcription
  misc_feature: MA Experiment 20001905 PARAMETER Experiment Name: At_Drought_Reproduction_P Parameter: Age (day) Value: 40
  misc_feature: MA Experiment 20001905 PARAMETER Experiment Name: At_Drought_Reproduction_P Parameter: Organism Value: A. thaliana
  misc_feature: MA Experiment 20001905 PARAMETER Experiment Name: At_Drought_Reproduction_P Parameter: Plant Line Value: WS
  misc_feature: MA Experiment 20001905 PARAMETER Experiment Name: At_Drought_Reproduction_P Parameter: Timepoint (day) Value: 10
  misc_feature: MA Experiment 20001905 PARAMETER Experiment Name: At_Drought_Reproduction_P Parameter: Tissue Value: Rosettes
  misc_feature: MA Experiment 20001905 PARAMETER Experiment Name: At_Drought_Reproduction_P Parameter: Treatment Value: Drought vs. No Drought
aaaaattgctttttaaaatccctcctcacacagattccttccttcatcacctcacacactctctacgcttgacatggccttcgatctccaccatggctcagcttcagatacgcattcatcagaacttccgtcgttttctctcccaccttatcctcagatgataatggaagcgattgagtccttgaacgataagaacggctgcaacaaaacgacgattgctaagcacatcgagtcgactcaacaaactctaccgccgtcacacatgacgctgctcagctaccatctcaaccagatgaagaaaaccggtcagctaatcatggtgaagaacaattatatgaaaccagatccagatgctcctcctaagcgtggtcgtggccgtcctccgaagcagaagactcaggccgaatctgacgccgctgctgctgctgttgttgctgccaccgtcgtctctacagatccgcctagatctcgtggccgtccaccgaagccgaaagatccatcggagcctccccaggagaaggtcattaccggatctggaaggccacgaggacgaccaccgaagagaccgagaacagattcggagacggttgctgcgccggaaccggcagctcaggcgacaggtgagcgtaggggacgtgggagacctccgaaggtgaagccgacggtggttgctccggttgggtgctgaattaatcggtacttatgcaatttcggaatctttagttactgaaaaatggaatctcttagagagtaagagagtgctttaatttagcttaattagatttatttggatttctttcagtatttggattgtaaactttagaatttgtgtgtgtgttgttgcttagtcctgagataagatataacattagcgactgtgtattattattattactgcattgtgttatgtgaaactttgttctcttgttg

SEQ ID NO: 28497 - protein, 204 aa, Arabidopsis thaliana
  peptide (1)..(204): Ceres Seq. ID no. 12332557
  misc_feature (22)..(91): Pfam Name: linker histone H1 and H5 family Pfam Description: linker histone H1 and H5 family
  misc_feature (13)..(198): Homolog of NCBI NO: 11544762 NR Description: HMGI/Y protein [Zea mays]
  misc_feature (13)..(198): Homolog of NCBI NO: 9837562 NR Description: high mobility group I/Y-2 [Zea mays]
  misc_feature (22)..(196): Homolog of NCBI NO: 2129885 NR Description: HMGI/Y protein - garden pea
  misc_feature (24)..(203): Homolog of NCBI NO: 7439646 NR Description: DNA binding protein PF1 - rice
  misc_feature (22)..(196): Homolog of NCBI NO: 7439645 NR Description: high mobility group protein HMGI/Y-2 - sword bean
  misc_feature (22)..(196): Homolog of NCBI NO: 7439663 NR Description: high mobility group protein HMGI/Y-1 - sword bean
  misc_feature (19)..(204): Homolog of NCBI NO: 6651027 NR Description: high mobility group protein I/Y [Brassica napus]
  misc_feature (29)..(204): Homolog of NCBI NO: 21536605 NR Description: linker histone protein, putative [Arabidopsis
  misc_feature (1)..(204): Homolog of NCBI NO: 1808590 NR Description: HMG-I/Y [Arabidopsis thaliana]
  misc_feature (1)..(204): Homolog of NCBI NO: 15223947 NR Description: linker histone protein, putative
MAFDLHHGSASDTHSSELPSFSLPPYPQMIMEAIESLNDKNGCNKTTIAKHIESTQQTLPPSHMTLLSYHLNQMKKTGQLIMVKNNYMKPDPDAPPKRGRGRPPKQKTQAESDAAAAAVVAATVVSTDPPRSRGRPPKPKDPSEPPQEKVITGSGRPRGRPPKRPRTDSETVAAPEPAAQATGERRGRGRPPKVKPTVVAPVGC

SEQ ID NO: 28498 - protein, 176 aa, Arabidopsis thaliana
  peptide (1)..(176): Ceres Seq. ID no. 12332558
  misc_feature (1)..(63): Pfam Name: linker histone H1 and H5 family Pfam Description: linker histone H1 and H5 family
  misc_feature (1)..(170): Homolog of NCBI NO: 11544762 NR Description: HMGI/Y protein [Zea mays]
  misc_feature (1)..(170): Homolog of NCBI NO: 9837562 NR Description: high mobility group I/Y-2 [Zea mays]
  misc_feature (1)..(168): Homolog of NCBI NO: 2129885 NR Description: HMGI/Y protein - garden pea
  misc_feature (1)..(175): Homolog of NCBI NO: 7439646 NR Description: DNA binding protein PF1 - rice
  misc_feature (1)..(168): Homolog of NCBI NO: 7439645 NR Description: high mobility group protein HMGI/Y-2 - sword bean
  misc_feature (1)..(168): Homolog of NCBI NO: 7439663 NR Description: high mobility group protein HMGI/Y-1 - sword bean
  misc_feature (1)..(176): Homolog of NCBI NO: 6651027 NR Description: high mobility group protein I/Y [Brassica napus]
  misc_feature (1)..(176): Homolog of NCBI NO: 21536605 NR Description: linker histone protein, putative [Arabidopsis
  misc_feature (1)..(176): Homolog of NCBI NO: 1808590 NR Description: HMG-I/Y [Arabidopsis thaliana]
  misc_feature (1)..(176): Homolog of NCBI NO: 15223947 NR Description: linker histone protein, putative
MIMEAIESLNDKNGCNKTTIAKHIESTQQTLPPSHMTLLSYHLNQMKKTGQLIMVKNNYMKPDPDAPPKRGRGRPPKQKTQAESDAAAAAVVAATVVSTDPPRSRGRPPKPKDPSEPPQEKVITGSGRPRGRPPKRPRTDSETVAAPEPAAQATGERRGRGRPPKVKPTVVAPVGC

SEQ ID NO: 28499 - protein, 174 aa, Arabidopsis thaliana
  peptide (1)..(174): Ceres Seq. ID no. 12332559
  misc_feature (1)..(61): Pfam Name: linker histone H1 and H5 family Pfam Description: linker histone H1 and H5 family
  misc_feature (1)..(168): Homolog of NCBI NO: 11544762 NR Description: HMGI/Y protein [Zea mays]
  misc_feature (1)..(168): Homolog of NCBI NO: 9837562 NR Description: high mobility group I/Y-2 [Zea mays]
  misc_feature (1)..(166): Homolog of NCBI NO: 2129885 NR Description: HMGI/Y protein - garden pea
  misc_feature (1)..(173): Homolog of NCBI NO: 7439646 NR Description: DNA binding protein PF1 - rice
  misc_feature (1)..(166): Homolog of NCBI NO: 7439645 NR Description: high mobility group protein HMGI/Y-2 - sword bean
  misc_feature (1)..(166): Homolog of NCBI NO: 7439663 NR Description: high mobility group protein HMGI/Y-1 - sword bean
  misc_feature (1)..(174): Homolog of NCBI NO: 6651027 NR Description: high mobility group protein I/Y [Brassica napus]
  misc_feature (1)..(174): Homolog of NCBI NO: 21536605 NR Description: linker histone protein, putative [Arabidopsis
  misc_feature (1)..(174): Homolog of NCBI NO: 1808590 NR Description: HMG-I/Y [Arabidopsis thaliana]
  misc_feature (1)..(174): Homolog of NCBI NO: 15223947 NR Description: linker histone protein, putative
MEAIESLNDKNGCNKTTIAKHIESTQQTLPPSHMTLLSYHLNQMKKTGQLIMVKNNYMKPDPDAPPKRGRGRPPKQKTQAESDAAAAAVVAATVVSTDPPRSRGRPPKPKDPSEPPQEKVITGSGRPRGRPPKRPRTDSETVAAPEPAAQATGERRGRGRPPKVKPTVVAPVGC

SEQ ID NO: 28500 - DNA, 735 bp, Arabidopsis thaliana
  misc_feature (1)..(735): Ceres Seq. ID no. 12393721
  misc_feature: MA Experiment ID: 20000171 Result: Down-regulated in Transcription
  misc_feature: MA Experiment 20000171 PARAMETER Experiment Name: At_42deg_Heat_P Parameter: Age (day) Value: 14
  misc_feature: MA Experiment 20000171 PARAMETER Experiment Name: At_42deg_Heat_P Parameter: Organism Value: A. thaliana
  misc_feature: MA Experiment 20000171 PARAMETER Experiment Name: At_42deg_Heat_P Parameter: Plant Line Value: WS
  misc_feature: MA Experiment 20000171 PARAMETER Experiment Name: At_42deg_Heat_P Parameter: Temperature (deg C) Value: 42 vs. 22
  misc_feature: MA Experiment 20000171 PARAMETER Experiment Name: At_42deg_Heat_P Parameter: Timepoint (hr) Value: 1
  misc_feature: MA Experiment 20000171 PARAMETER Experiment Name: At_42deg_Heat_P Parameter: Tissue Value: Aerial
  misc_feature: MA Experiment ID: 20000173 Result: Down-regulated in Transcription
  misc_feature: MA Experiment 20000173 PARAMETER Experiment Name: At_42deg_Heat_P Parameter: Age (day) Value: 14
  misc_feature: MA Experiment 20000173 PARAMETER Experiment Name: At_42deg_Heat_P Parameter: Organism Value: A. thaliana
  misc_feature: MA Experiment 20000173 PARAMETER Experiment Name: At_42deg_Heat_P Parameter: Plant Line Value: WS
  misc_feature: MA Experiment 20000173 PARAMETER Experiment Name: At_42deg_Heat_P Parameter: Temperature (deg C) Value: 42 vs. 22
  misc_feature: MA Experiment 20000173 PARAMETER Experiment Name: At_42deg_Heat_P Parameter: Timepoint (hr) Value: 6
  misc_feature: MA Experiment 20000173 PARAMETER Experiment Name: At_42deg_Heat_P Parameter: Tissue Value: Aerial
  misc_feature: MA Experiment ID: 20000180 Result: Down-regulated in Transcription
  misc_feature: MA Experiment 20000180 PARAMETER Experiment Name: At_Germinating_Seeds_P Parameter: Age (hr) Value: 24 vs. 0
  misc_feature: MA Experiment 20000180 PARAMETER Experiment Name: At_Germinating_Seeds_P Parameter: Tissue Value: Germinating Seeds
  misc_feature: MA Experiment ID: 20000437 Result: Down-regulated in Transcription
  misc_feature: MA Experiment 20000437 PARAMETER Experiment Name: At_Drought_P Parameter: Age (day) Value: 8
  misc_feature: MA Experiment 20000437 PARAMETER Experiment Name: At_Drought_P Parameter: Organism Value: A. thaliana
  misc_feature: MA Experiment 20000437 PARAMETER Experiment Name: At_Drought_P Parameter: Plant Line Value: WS
  misc_feature: MA Experiment 20000437 PARAMETER Experiment Name: At_Drought_P Parameter: Timepoint (hr) Value: 24
  misc_feature: MA Experiment 20000437 PARAMETER Experiment Name: At_Drought_P Parameter: Tissue Value: Whole Plant
  misc_feature: MA Experiment 20000437 PARAMETER Experiment Name: At_Drought_P Parameter: Treatment Value: Drought vs. No Drought
  misc_feature: MA Experiment ID: 20001451 Result: Down-regulated in Transcription
  misc_feature: MA Experiment 20001451 PARAMETER Experiment Name: At_Far-red-induction_P Parameter: Age (day) Value: 7
  misc_feature: MA Experiment 20001451 PARAMETER Experiment Name: At_Far-red-induction_P Parameter: Light Value: Far-red vs. White
  misc_feature: MA Experiment 20001451 PARAMETER Experiment Name: At_Far-red-induction_P Parameter: Organism Value: A. thaliana
  misc_feature: MA Experiment 20001451 PARAMETER Experiment Name: At_Far-red-induction_P Parameter: Plant Line Value: Columbia
  misc_feature: MA Experiment 20001451 PARAMETER Experiment Name: At_Far-red-induction_P Parameter: Timepoint (hr) Value: 24
  misc_feature: MA Experiment 20001451 PARAMETER Experiment Name: At_Far-red-induction_P Parameter: Tissue Value: Whole Plant
gcttagctaatgttgacgactcttcgatctcgttgttcgtctcttcttctagatcaatcatggaagctagctcccaatcgcatcttcgcttcctctccctctttttcttcaaccgccgggatctctaatgtctcagagattctcacacttcccgaagtggagaagattctcgccgacgtgaaagctgataacgtgactgtgattcctacacataatcattgtttctgggctgatttcactgtcatcgccaccggtagatccgattggcacttaagaaacatcgctcaagctttagtttatagggccaagcaaaagcagaaaggagctaaacatgtaatgttaccttctgtgcaagggtacaatagcaagtggattgtcatagactacggaaagtttgtagtccatgcacttgatgagaaagccagaggttatttcaatttggaaagcctttggtctgctgaatcctctggtactgatacttcagatcaggatctccaaaacgtttttgtaaaggtccgaccaaagaacaattcgaaaaggaaaccggctaaagtgagttcttgatcctgtccgatggatacaatttctcataaacttctcgagtctagacgagttaagaataggaggattttaaagcctattaagtatttatctccttaatattttttttttggtaagttttatctccttaatatttgtagtcatctatctattttttccttaatatctttgctt

SEQ ID NO: 28501 - protein, 184 aa, Arabidopsis thaliana
  peptide (1)..(184): Ceres Seq. ID no. 12393722
  misc_feature (44)..(149): Pfam Name: Domain of unknown function DUF143 Pfam Description: Domain of unknown function DUF143
  misc_feature (50)..(157): Homolog of NCBI NO: 23028923 NR Description: hypothetical protein [Microbulbifer degradans
  misc_feature (45)..(161): Homolog of NCBI NO: 15838771 NR Description: conserved hypothetical protein [Xylella
  misc_feature (54)..(149): Homolog of NCBI NO: 33519773 NR Description: conserved hypothetical protein
  misc_feature (50)..(153): Homolog of NCBI NO: 24372753 NR Description: iojap domain protein [Shewanella oneidensis MR-1]
  misc_feature (33)..(148): Homolog of NCBI NO: 23040963 NR Description: hypothetical protein [Trichodesmium erythraeum
  misc_feature (26)..(150): Homolog of NCBI NO: 15966916 NR Description: HYPOTHETICAL PROTEIN [Sinorhizobium meliloti]
  misc_feature (5)..(154): Homolog of NCBI NO: 23109914 NR Description: hypothetical protein [Novosphingobium
  misc_feature (50)..(165): Homolog of NCBI NO: 22998575 NR Description: hypothetical protein [Magnetococcus sp. MC-1]
  misc_feature (1)..(184): Homolog of NCBI NO: 18408812 NR Description: expressed protein
  misc_feature (1)..(184): Homolog of NCBI NO: 21536608 NR Description: unknown [Arabidopsis thaliana]
MLTTLRSRCSSLLLDQSWKLAPNRIFASSPSFSSTAGISNVSEILTLPEVEKILADVKADNVTVIPTHNHCFWADFTVIATGRSDWHLRNIAQALVYRAKQKQKGAKHVMLPSVQGYNSKWIVIDYGKFVVHALDEKARGYFNLESLWSAESSGTDTSDQDLQNVFVKVRPKNNSKRKPAKVSS

SEQ ID NO: 28502 - DNA, 725 bp, Arabidopsis thaliana
  misc_feature (1)..(725): Ceres Seq. ID no. 13645709
  misc_feature: MA Experiment ID: 20000184 Result: Down-regulated in Transcription
  misc_feature: MA Experiment 20000184 PARAMETER Experiment Name: At_Shoots__P Parameter: Age (day) Value: 7
  misc_feature: MA Experiment 20000184 PARAMETER Experiment Name: At_Shoots__P Parameter: Tissue Value: Shoots vs. Whole Plant
  misc_feature: MA Experiment ID: 20000227 Result: Up-regulated in Transcription
  misc_feature: MA Experiment 20000227 PARAMETER Experiment Name: At_Root-Tips-vs-Tops_P Parameter: Tissue Value: Root Tips vs. Root Tops
aaaggaaagcagaaacgttagatttctttagacgcgcaaactgaaagagctttgatcgatcgatttggaggattcgtagaagatatgtcgagtatatacagaactgtttcgagaaaagagaaaccgagacgtcatcatggattgacgacacagaagaagcaagagattaaggaagcttttgagctatttgacactgatggttctggtaccattgatgctaaagagcttaatgttgctatgagggcgcttggttttgaaatgacggaagagcaaatcaacaaaatgatagctgatgtggataaagatggaagtggagctatagattttgatgagtttgttcatatgatgactgctaagattggtgaaagagacacaaaagaagagctcactaaagcattccagatcattgatcttgacaaaaatgggaagatatctccggatgatatcaaacgcatggcaaaggacttgggtgagaatttcactgatgctgagatacgagagatggttgaagaagcagaccgagaccgtgatggtgaagttaacatggatgaattcatgaggatgatgaggagaactgcttatggtggtaactagaaaggttgttgctgttcttaacgatatttgatgagctctattatagttctttaactgaggcttaattatctgtaatattattactgaagatacatatatcacagttttaatctatagctcatcttaatggc

SEQ ID NO: 28503 - protein, 169 aa, Arabidopsis thaliana
  peptide (1)..(169): Ceres Seq. ID no. 13645710
  misc_feature (63)..(91): Pfam Name: EF hand Pfam Description: EF hand
  misc_feature (9)..(165): Homolog of NCBI NO: 543936 NR Description: CALTRACTIN (CENTRIN)
  misc_feature (10)..(167): Homolog of NCBI NO: 37533900 NR Description: Centrin [Oryza sativa (japonica cultivar-group)]
  misc_feature (13)..(167): Homolog of NCBI NO: 21554823 NR Description: caltractin-like protein [Arabidopsis thaliana]
  misc_feature (13)..(167): Homolog of NCBI NO: 15234588 NR Description: caltractin (centrin), putative [Arabidopsis
  misc_feature (2)..(167): Homolog of NCBI NO: 34906754 NR Description: putative caltractin [Oryza sativa (japonica
  misc_feature (1)..(167): Homolog of NCBI NO: 33146874 NR Description: putative caltractin [Oryza sativa (japonica
  misc_feature (1)..(167): Homolog of NCBI NO: 6358509 NR Description: centrin [Nicotiana tabacum]
  misc_feature (1)..(167): Homolog of NCBI NO: 6358511 NR Description: centrin [Nicotiana tabacum]
  misc_feature (1)..(166): Homolog of NCBI NO: 729051 NR Description: CALTRACTIN (CENTRIN)
  misc_feature (1)..(169): Homolog of NCBI NO: 15229732 NR Description: caltractin (centrin) [Arabidopsis thaliana]
MSSIYRTVSRKEKPRRHHGLTTQKKQEIKEAFELFDTDGSGTIDAKELNVAMRALGFEMTEEQINKMIADVDKDGSGAIDFDEFVHMMTAKIGERDTKEELTKAFQIIDLDKNGKISPDDIKRMAKDLGENFTDAEIREMVEEADRDRDGEVNMDEFMRMMRRTAYGGN

SEQ ID NO: 28504 - protein, 118 aa, Arabidopsis thaliana
  peptide (1)..(118): Ceres Seq. ID no. 13645711
  misc_feature (12)..(40): Pfam Name: EF hand Pfam Description: EF hand
  misc_feature (1)..(114): Homolog of NCBI NO: 543936 NR Description: CALTRACTIN (CENTRIN)
  misc_feature (1)..(116): Homolog of NCBI NO: 37533900 NR Description: Centrin [Oryza sativa (japonica cultivar-group)]
  misc_feature (1)..(116): Homolog of NCBI NO: 21554823 NR Description: caltractin-like protein [Arabidopsis thaliana]
  misc_feature (1)..(116): Homolog of NCBI NO: 15234588 NR Description: caltractin (centrin), putative [Arabidopsis
  misc_feature (1)..(116): Homolog of NCBI NO: 34906754 NR Description: putative caltractin [Oryza sativa (japonica
  misc_feature (1)..(116): Homolog of NCBI NO: 33146874 NR Description: putative caltractin [Oryza sativa (japonica
  misc_feature (1)..(116): Homolog of NCBI NO: 6358509 NR Description: centrin [Nicotiana tabacum]
  misc_feature (1)..(116): Homolog of NCBI NO: 6358511 NR Description: centrin [Nicotiana tabacum]
  misc_feature (1)..(115): Homolog of NCBI NO: 729051 NR Description: CALTRACTIN (CENTRIN)
  misc_feature (1)..(118): Homolog of NCBI NO: 15229732 NR Description: caltractin (centrin) [Arabidopsis thaliana]
MRALGFEMTEEQINKMIADVDKDGSGAIDFDEFVHMMTAKIGERDTKEELTKAFQIIDLDKNGKISPDDIKRMAKDLGENFTDAEIREMVEEADRDRDGEVNMDEFMRMMRRTAYGGN

SEQ ID NO: 28505 - protein, 111 aa, Arabidopsis thaliana
  peptide (1)..(111): Ceres Seq. ID no. 13645712
  misc_feature (5)..(33): Pfam Name: EF hand Pfam Description: EF hand
  misc_feature (1)..(107): Homolog of NCBI NO: 543936 NR Description: CALTRACTIN (CENTRIN)
  misc_feature (1)..(109): Homolog of NCBI NO: 37533900 NR Description: Centrin [Oryza sativa (japonica cultivar-group)]
  misc_feature (1)..(109): Homolog of NCBI NO: 21554823 NR Description: caltractin-like protein [Arabidopsis thaliana]
  misc_feature (1)..(109): Homolog of NCBI NO: 15234588 NR Description: caltractin (centrin), putative [Arabidopsis
  misc_feature (1)..(109): Homolog of NCBI NO: 34906754 NR Description: putative caltractin [Oryza sativa (japonica
  misc_feature (1)..(109): Homolog of NCBI NO: 33146874 NR Description: putative caltractin [Oryza sativa (japonica
  misc_feature (1)..(109): Homolog of NCBI NO: 6358509 NR Description: centrin [Nicotiana tabacum]
  misc_feature (1)..(109): Homolog of NCBI NO: 6358511 NR Description: centrin [Nicotiana tabacum]
  misc_feature (1)..(108): Homolog of NCBI NO: 729051 NR Description: CALTRACTIN (CENTRIN)
  misc_feature (1)..(111): Homolog of NCBI NO: 15229732 NR Description: caltractin (centrin) [Arabidopsis thaliana]
MTEEQINKMIADVDKDGSGAIDFDEFVHMMTAKIGERDTKEELTKAFQIIDLDKNGKISPDDIKRMAKDLGENFTDAEIREMVEEADRDRDGEVNMDEFMRMMRRTAYGGN

SEQ ID NO: 28506 - DNA, 1107 bp, Arabidopsis thaliana
  misc_feature (1)..(1107): Ceres Seq. ID no. 12334388
  misc_feature: MA Experiment ID: 108595 Result: Down-regulated in Transcription
  misc_feature: MA Experiment 108595 PARAMETER Experiment Name: At_Ler-pi_Ovule_cDNA_P Parameter: Plant Line Value: null
gttggttctcttcttcaaaacaagctctctctgtccctctctgtctctctctttgggtaatcggaaaaatcagaaaaatgggaaccctaggacgagcgattcacactgtgggtaatcggattcgtggaactgcccaagcccaagctcgcgttggttctcttcttcaaggaagccaccacatcgagaaacatctgtcgaggcatcggacgttgattactgtggctccgaacgcttctgtgattggtgatgttcagatcaataaaggctcgttcatttcgtatgcaagtgtttctcgtgatttgcagtatcctcgtgcaatgggaatgggacaggtccggagatttagcgaagatgtttctcacatgcctgaaatggaagactctgatgttctgaatgcattcaaagacttgatggctgcagattgggctgagcttccttctgctgttgttaaagatgctaaaaccgcgatatcgaaaaacacagatgacaaggcagggcaagaggctttgaaaaatgtgttccgagcagctgaagctgtagaggaatttggtgggattctcacttcgattaagatggaaatcgatgatagcattggaatgagtggggagggtgtgaagcctttaccaaatgatataaccgatgcgctgcgtactgcttatcagaggtatgctgagtatctagactcctttgaacctgaagaagtctacttgaagaagaaggttgagatggagttggggactaagatgatccacttgaagatgagatgcagcgggcttggttctgaatggggaaaggttactgttcttggaacctcaggactctcgggatcttacgtggagcaaagggcctaaaacaaaaagagaagatctagaattacgtgcgaagcttgttatgttgttattgcgttattttgtcttagcacataataaaggtcaatctgaccaaaagacatatcaggtgagtctgttcattgtttcctccaaatgaagctttaaaatttagagcttaacaccaattgaaaaataaactcacatgaatttgtgttcatttgttactgtttccttttatgagagatcttttgtttataatgattcaatattttgagct

SEQ ID NO: 28507 - protein, 282 aa, Arabidopsis thaliana
  peptide (1)..(282): Ceres Seq. ID no. 12334389
  misc_feature (26)..(98): Homolog of NCBI NO: 34902506 NR Description: P0581F09.11 [Oryza sativa (japonica
  misc_feature (26)..(109): Homolog of NCBI NO: 18425082 NR Description: ferripyochelin-binding protein-like
  misc_feature (26)..(98): Homolog of NCBI NO: 21537242 NR Description: unknown [Arabidopsis thaliana]
  misc_feature (26)..(98): Homolog of NCBI NO: 18394761 NR Description: expressed protein
  misc_feature (26)..(98): Homolog of NCBI NO: 34904754 NR Description: putative transcription factor APFI
  misc_feature (26)..(98): Homolog of NCBI NO: 15220153 NR Description: Unknown protein
  misc_feature (26)..(98): Homolog of NCBI NO: 13507025 NR Description: transcription factor APFI [Arabidopsis thaliana]
  misc_feature (112)..(268): Homolog of NCBI NO: 32488163 NR Description: OSJNBa0033G16.15 [Oryza sativa (japonica
  misc_feature (96)..(282): Homolog of NCBI NO: 18652408 NR Description: unknown [Hordeum vulgare]
  misc_feature (26)..(282): Homolog of NCBI NO: 18401719 NR Description: expressed protein
WFSSSKQALSVPLCLSLWVIGKIRKMGTLGRAIHTVGNRIRGTAQAQARVGSLLQGSHHIEKHLSRHRTLITVAPNASVIGDVQINKGSFISYASVSRDLQYPRAMGMGQVRRFSEDVSHMPEMEDSDVLNAFKDLMAADWAELPSAVVKDAKTAISKNTDDKAGQEALKNVFRAAEAVEEFGGILTSIKMEIDDSIGMSGEGVKPLPNDITDALRTAYQRYAEYLDSFEPEEVYLKKKVEMELGTKMIHLKMRCSGLGSEWGKVTVLGTSGLSGSYVEQRA

SEQ ID NO: 28508 - protein, 257 aa, Arabidopsis thaliana
  peptide (1)..(257): Ceres Seq. ID no. 12334390
  misc_feature (1)..(73): Homolog of NCBI NO: 34902506 NR Description: P0581F09.11 [Oryza sativa (japonica
  misc_feature (1)..(84): Homolog of NCBI NO: 18425082 NR Description: ferripyochelin-binding protein-like
  misc_feature (1)..(73): Homolog of NCBI NO: 21537242 NR Description: unknown [Arabidopsis thaliana]
  misc_feature (1)..(73): Homolog of NCBI NO: 18394761 NR Description: expressed protein
  misc_feature (1)..(73): Homolog of NCBI NO: 34904754 NR Description: putative transcription factor APFI
  misc_feature (1)..(73): Homolog of NCBI NO: 15220153 NR Description: Unknown protein
  misc_feature (1)..(73): Homolog of NCBI NO: 13507025 NR Description: transcription factor APFI [Arabidopsis thaliana]
  misc_feature (87)..(243): Homolog of NCBI NO: 32488163 NR Description: OSJNBa0033G16.15 [Oryza sativa (japonica
  misc_feature (71)..(257): Homolog of NCBI NO: 18652408 NR Description: unknown [Hordeum vulgare]
  misc_feature (1)..(257): Homolog of NCBI NO: 18401719 NR Description: expressed protein
MGTLGRAIHTVGNRIRGTAQAQARVGSLLQGSHHIEKHLSRHRTLITVAPNASVIGDVQINKGSFISYASVSRDLQYPRAMGMGQVRRFSEDVSHMPEMEDSDVLNAFKDLMAADWAELPSAVVKDAKTAISKNTDDKAGQEALKNVFRAAEAVEEFGGILTSIKMEIDDSIGMSGEGVKPLPNDITDALRTAYQRYAEYLDSFEPEEVYLKKKVEMELGTKMIHLKMRCSGLGSEWGKVTVLGTSGLSGSYVEQRA

SEQ ID NO: 28509 - protein, 177 aa, Arabidopsis thaliana
  peptide (1)..(177): Ceres Seq. ID no. 12334391
  misc_feature (7)..(163): Homolog of NCBI NO: 32488163 NR Description: OSJNBa0033G16.15 [Oryza sativa (japonica
  misc_feature (1)..(177): Homolog of NCBI NO: 18652408 NR Description: unknown [Hordeum vulgare]
  misc_feature (1)..(177): Homolog of NCBI NO: 18401719 NR Description: expressed protein
MGMGQVRRFSEDVSHMPEMEDSDVLNAFKDLMAADWAELPSAVVKDAKTAISKNTDDKAGQEALKNVFRAAEAVEEFGGILTSIKMEIDDSIGMSGEGVKPLPNDITDALRTAYQRYAEYLDSFEPEEVYLKKKVEMELGTKMIHLKMRCSGLGSEWGKVTVLGTSGLSGSYVEQRA

SEQ ID NO: 28510 - DNA, 857 bp, Arabidopsis thaliana
  misc_feature (1)..(857): Ceres Seq. ID no. 12323469
  misc_feature: MA Experiment ID: 108461 Result: Up-regulated in Transcription
  misc_feature: MA Experiment 108461 PARAMETER Experiment Name: At_Germinating_Seeds_cDNA_P Parameter: Age (day) Value: 1 vs. 0
  misc_feature: MA Experiment 108461 PARAMETER Experiment Name: At_Germinating_Seeds_cDNA_P Parameter: Tissue Value: Germinating Seeds
  misc_feature: MA Experiment ID: 108462 Result: Up-regulated in Transcription
  misc_feature: MA Experiment 108462 PARAMETER Experiment Name: At_Germinating_Seeds_cDNA_P Parameter: Age (day) Value: 2 vs. 0
  misc_feature: MA Experiment 108462 PARAMETER Experiment Name: At_Germinating_Seeds_cDNA_P Parameter: Tissue Value: Germinating Seeds
  misc_feature: MA Experiment ID: 108463 Result: Up-regulated in Transcription
  misc_feature: MA Experiment 108463 PARAMETER Experiment Name: At_Germinating_Seeds_cDNA_P Parameter: Age (day) Value: 3 vs. 0
  misc_feature: MA Experiment 108463 PARAMETER Experiment Name: At_Germinating_Seeds_cDNA_P Parameter: Tissue Value: Germinating Seeds
  misc_feature: MA Experiment ID: 108464 Result: Up-regulated in Transcription
  misc_feature: MA Experiment 108464 PARAMETER Experiment Name: At_Germinating_Seeds_cDNA_P Parameter: Age (day) Value: 4 vs. 0
  misc_feature: MA Experiment 108464 PARAMETER Experiment Name: At_Germinating_Seeds_cDNA_P Parameter: Tissue Value: Germinating Seeds
  misc_feature: MA Experiment ID: 108579 Result: Up-regulated in Transcription
  misc_feature: MA Experiment 108579 PARAMETER Experiment Name: At_4deg_Cold_cDNA_P Parameter: Temperature (deg C) Value: 4 vs. 22
  misc_feature: MA Experiment 108579 PARAMETER Experiment Name: At_4deg_Cold_cDNA_P Parameter: Timepoint (hr) Value: 6
  misc_feature: MA Experiment 108579 PARAMETER Experiment Name: At_4deg_Cold_cDNA_P Parameter: Tissue Value: Aerial
  misc_feature: MA Experiment ID: 108595 Result: Down-regulated in Transcription
  misc_feature: MA Experiment 108595 PARAMETER Experiment Name: At_Ler-pi_Ovule_cDNA_P Parameter: Plant Line Value: null
  misc_feature: MA Experiment ID: 20000089 Result: Down-regulated in Transcription
  misc_feature: MA Experiment ID: 20000179 Result: Up-regulated in Transcription
  misc_feature: MA Experiment 20000179 PARAMETER Experiment Name: At_Germinating_Seeds_P Parameter: Age (hr) Value: 6 vs. 0
  misc_feature: MA Experiment 20000179 PARAMETER Experiment Name: At_Germinating_Seeds_P Parameter: Tissue Value: Germinating Seeds
  misc_feature: MA Experiment ID: 20000180 Result: Up-regulated in Transcription
  misc_feature: MA Experiment 20000180 PARAMETER Experiment Name: At_Germinating_Seeds_P Parameter: Age (hr) Value: 24 vs. 0
  misc_feature: MA Experiment 20000180 PARAMETER Experiment Name: At_Germinating_Seeds_P Parameter: Tissue Value: Germinating Seeds
  misc_feature: MA Experiment ID: 20000495 Result: Down-regulated in Transcription
  misc_feature: MA Experiment 20000495 PARAMETER Experiment Name: At_Guard_Cells_P Parameter: Harvest Date Value: 8/2/2002
  misc_feature: MA Experiment 20000495 PARAMETER Experiment Name: At_Guard_Cells_P Parameter: Organism Value: A. thaliana
  misc_feature: MA Experiment 20000495 PARAMETER Experiment Name: At_Guard_Cells_P Parameter: Tissue Value: Guard Cells vs. Leaves
  misc_feature: MA Experiment ID: 20000573 Result: Down-regulated in Transcription
  misc_feature: MA Experiment 20000573 PARAMETER Experiment Name: At_100uM_ABA_Mutants__P Parameter: Organism Value: A. thaliana
  misc_feature: MA Experiment 20000573 PARAMETER Experiment Name: At_100uM_ABA_Mutants__P Parameter: Plant Line Value: CS22 vs. Ler wt
  misc_feature: MA Experiment 20000573 PARAMETER Experiment Name: At_100uM_ABA_Mutants__P Parameter: Timepoint (hr) Value: N/A
  misc_feature: MA Experiment 20000573 PARAMETER Experiment Name: At_100uM_ABA_Mutants__P Parameter: Tissue Value: Whole Plant
  misc_feature: MA Experiment 20000573 PARAMETER Experiment Name: At_100uM_ABA_Mutants__P Parameter: Treatment Value: None
  misc_feature: MA Experiment ID: 20000574 Result: Down-regulated in Transcription
  misc_feature: MA Experiment 20000574 PARAMETER Experiment Name: At_100uM_ABA_Mutants__P Parameter: Organism Value: A. thaliana
  misc_feature: MA Experiment 20000574 PARAMETER Experiment Name: At_100uM_ABA_Mutants__P Parameter: Plant Line Value: CS23 vs. Ler wt
  misc_feature: MA Experiment 20000574 PARAMETER Experiment Name: At_100uM_ABA_Mutants__P Parameter: Timepoint (hr) Value: N/A
  misc_feature: MA Experiment 20000574 PARAMETER Experiment Name: At_100uM_ABA_Mutants__P Parameter: Tissue Value: Whole Plant
  misc_feature: MA Experiment 20000574 PARAMETER Experiment Name: At_100uM_ABA_Mutants__P Parameter: Treatment Value: None
  misc_feature: MA Experiment ID: 20001248 Result: Down-regulated in Transcription
  misc_feature: MA Experiment 20001248 PARAMETER Experiment Name: At_Far-red-induction_P Parameter: Age (day) Value: 7
  misc_feature: MA Experiment 20001248 PARAMETER Experiment Name: At_Far-red-induction_P Parameter: Light Value: Far-red vs. White
  misc_feature: MA Experiment 20001248 PARAMETER Experiment Name: At_Far-red-induction_P Parameter: Organism Value: A. thaliana
  misc_feature: MA Experiment 20001248 PARAMETER Experiment Name: At_Far-red-induction_P Parameter: Plant Line Value: Columbia
  misc_feature: MA Experiment 20001248 PARAMETER Experiment Name: At_Far-red-induction_P Parameter: Timepoint (hr) Value: 4
  misc_feature: MA Experiment 20001248 PARAMETER Experiment Name: At_Far-red-induction_P Parameter: Tissue Value: Whole Plant
  misc_feature: MA Experiment ID: 20001557 Result: Down-regulated in Transcription
  misc_feature: MA Experiment 20001557 PARAMETER Experiment Name: At_Drought_Soil_Dry_P Parameter: Age (day) Value: 27
  misc_feature: MA Experiment 20001557 PARAMETER Experiment Name: At_Drought_Soil_Dry_P Parameter: Organism Value: A. thaliana
  misc_feature: MA Experiment 20001557 PARAMETER Experiment Name: At_Drought_Soil_Dry_P Parameter: Plant Line Value: WS
  misc_feature: MA Experiment 20001557 PARAMETER Experiment Name: At_Drought_Soil_Dry_P Parameter: Post Timepoint (hr) Value: 3
  misc_feature: MA Experiment 20001557 PARAMETER Experiment Name: At_Drought_Soil_Dry_P Parameter: Post-Treatment Value: Re-Water vs. No Drought
  misc_feature: MA Experiment 20001557 PARAMETER Experiment Name: At_Drought_Soil_Dry_P Parameter: Timepoint (day) Value: 13
  misc_feature: MA Experiment 20001557 PARAMETER Experiment Name: At_Drought_Soil_Dry_P Parameter: Treatment Value: Drought vs. No Drought
  misc_feature: MA Experiment ID: 20001558 Result: Down-regulated in Transcription
  misc_feature: MA Experiment 20001558 PARAMETER Experiment Name: At_Drought_Soil_Dry_P Parameter: Age (day) Value: 27
  misc_feature: MA Experiment 20001558 PARAMETER Experiment Name: At_Drought_Soil_Dry_P Parameter: Organism Value: A. thaliana
  misc_feature: MA Experiment 20001558 PARAMETER Experiment Name: At_Drought_Soil_Dry_P Parameter: Plant Line Value: WS
  misc_feature: MA Experiment 20001558 PARAMETER Experiment Name: At_Drought_Soil_Dry_P Parameter: Post Timepoint (hr) Value: 6
  misc_feature: MA Experiment 20001558 PARAMETER Experiment Name: At_Drought_Soil_Dry_P Parameter: Post-Treatment Value: Re-Water vs. No Drought
  misc_feature: MA Experiment 20001558 PARAMETER Experiment Name: At_Drought_Soil_Dry_P Parameter: Timepoint (day) Value: 13
  misc_feature: MA Experiment 20001558 PARAMETER Experiment Name: At_Drought_Soil_Dry_P Parameter: Treatment Value: Drought vs. No Drought
  misc_feature: MA Experiment ID: 20001560 Result: Down-regulated in Transcription
  misc_feature: MA Experiment 20001560 PARAMETER Experiment Name: At_Drought_Soil_Dry_P Parameter: Age (day) Value: 28
  misc_feature: MA Experiment 20001560 PARAMETER Experiment Name: At_Drought_Soil_Dry_P Parameter: Organism Value: A. thaliana
  misc_feature: MA Experiment 20001560 PARAMETER Experiment Name: At_Drought_Soil_Dry_P Parameter: Plant Line Value: WS
  misc_feature: MA Experiment 20001560 PARAMETER Experiment Name: At_Drought_Soil_Dry_P Parameter: Post Timepoint (hr) Value: None
  misc_feature: MA Experiment 20001560 PARAMETER Experiment Name: At_Drought_Soil_Dry_P Parameter: Post-Treatment Value: None
  misc_feature: MA Experiment 20001560 PARAMETER Experiment Name: At_Drought_Soil_Dry_P Parameter: Timepoint (day) Value: 14
  misc_feature: MA Experiment 20001560 PARAMETER Experiment Name: At_Drought_Soil_Dry_P Parameter: Treatment Value: Drought vs. No Drought
  misc_feature: MA Experiment ID: 20001905 Result: Down-regulated in Transcription
  misc_feature: MA Experiment 20001905 PARAMETER Experiment Name: At_Drought_Reproduction_P Parameter: Age (day) Value: 40
  misc_feature: MA Experiment 20001905 PARAMETER Experiment Name: At_Drought_Reproduction_P Parameter: Organism Value: A. thaliana
  misc_feature: MA Experiment 20001905 PARAMETER Experiment Name: At_Drought_Reproduction_P Parameter: Plant Line Value: WS
  misc_feature: MA Experiment 20001905 PARAMETER Experiment Name: At_Drought_Reproduction_P Parameter: Timepoint (day) Value: 10
  misc_feature: MA Experiment 20001905 PARAMETER Experiment Name: At_Drought_Reproduction_P Parameter: Tissue Value: Rosettes
  misc_feature: MA Experiment 20001905 PARAMETER Experiment Name: At_Drought_Reproduction_P Parameter: Treatment Value: Drought vs. No Drought
aaattctcactttactcaaaagattcctcggatcatcagaaaatggctatggctacgcgagcgattcgataccagttaccgtcaccgagatttagagctcctagatgcgaatcatcggaaccgattaagcagattcagatccagcaacgaccaagaggtggcgatttagccgagaacgggaagatcgtgctccaaccaaggctttgcacgctgagatcttatggatctgatatggtcatcgctaaaaaggacggcggagatggtggaggaggaggatctgatgttgagttagcgtctccgttttttgagacgcttacggattacatagagagttcgaagaagagtcaggatttcgaaaccatctccggtagactcgccatgattgtatttgcggtgacggtgacggaggagattgttacggggaactcgttgtttaagaaactagatgtggaaggattgagtgaagctattggagctggtctcgccgcgatgggatgcgcggcgatgtttgcttggttaacgatttctcggaacagagtcggacggatctttacagtgagttgcaactcgttcattgactcgttggttgatcagatcgttgatggactgttctacgataccaagcctagtgattggtctgatgatctttaagttcataaatgataaataccactctcaaatgtattactattgtacactttcatctataatagtatagtatagttttgctcttcttcatggtgcttgaagatgataatgaaagtctgtaacttttgtgtctttatatatatatataaaagatatggaagttcatgtgaaacaattgagtgttgttatgggacgtagttgtatcgatt

SEQ ID NO: 28511 - protein, 216 aa, Arabidopsis thaliana
  peptide (1)..(216): Ceres Seq. ID no. 12323470
  misc_feature (15)..(91): Homolog of NCBI NO: 38345615 NR Description: OSJNBb0003B01.7 [Oryza sativa (japonica
  misc_feature (47)..(216): Homolog of NCBI NO: 14423380 NR Description: Unknown protein [Arabidopsis thaliana]
  misc_feature (15)..(216): Homolog of NCBI NO: 18399845 NR Description: expressed protein
KFSLYSKDSSDHQKMAMATRAIRYQLPSPRFRAPRCESSEPIKQIQIQQRPRGGDLAENGKIVLQPRLCTLRSYGSDMVIAKKDGGDGGGGGSDVELASPFFETLTDYIESSKKSQDFETISGRLAMIVFAVTVTEEIVTGNSLFKKLDVEGLSEAIGAGLAAMGCAAMFAWLTISRNRVGRIFTVSCNSFIDSLVDQIVDGLFYDTKPSDWSDDL

SEQ ID NO: 28512 - protein, 202 aa, Arabidopsis thaliana
  peptide (1)..(202): Ceres Seq. ID no. 12323471
  misc_feature (1)..(77): Homolog of NCBI NO: 38345615 NR Description: OSJNBb0003B01.7 [Oryza sativa (japonica
  misc_feature (33)..(202): Homolog of NCBI NO: 14423380 NR Description: Unknown protein [Arabidopsis thaliana]
  misc_feature (1)..(202): Homolog of NCBI NO: 18399845 NR Description: expressed protein
MAMATRAIRYQLPSPRFRAPRCESSEPIKQIQIQQRPRGGDLAENGKIVLQPRLCTLRSYGSDMVIAKKDGGDGGGGGSDVELASPFFETLTDYIESSKKSQDFETISGRLAMIVFAVTVTEEIVTGNSLFKKLDVEGLSEAIGAGLAAMGCAAMFAWLTISRNRVGRIFTVSCNSFIDSLVDQIVDGLFYDTKPSDWSDDL

SEQ ID NO: 28513 - protein, 200 aa, Arabidopsis thaliana
  peptide (1)..(200): Ceres Seq. ID no. 12323472
  misc_feature (1)..(75): Homolog of NCBI NO: 38345615 NR Description: OSJNBb0003B01.7 [Oryza sativa (japonica
  misc_feature (31)..(200): Homolog of NCBI NO: 14423380 NR Description: Unknown protein [Arabidopsis thaliana]
  misc_feature (1)..(200): Homolog of NCBI NO: 18399845 NR Description: expressed protein
MATRAIRYQLPSPRFRAPRCESSEPIKQIQIQQRPRGGDLAENGKIVLQPRLCTLRSYGSDMVIAKKDGGDGGGGGSDVELASPFFETLTDYIESSKKSQDFETISGRLAMIVFAVTVTEEIVTGNSLFKKLDVEGLSEAIGAGLAAMGCAAMFAWLTISRNRVGRIFTVSCNSFIDSLVDQIVDGLFYDTKPSDWSDDL

SEQ ID NO: 28514 - DNA, 1261 bp, Arabidopsis thaliana
  misc_feature (1)..(1261): Ceres Seq. ID no. 13491264
  misc_feature: MA Experiment ID: 20000171 Result: Up-regulated in Transcription
  misc_feature: MA Experiment 20000171 PARAMETER Experiment Name: At_42deg_Heat_P Parameter: Age (day) Value: 14
  misc_feature: MA Experiment 20000171 PARAMETER Experiment Name: At_42deg_Heat_P Parameter: Organism Value: A. thaliana
  misc_feature: MA Experiment 20000171 PARAMETER Experiment Name: At_42deg_Heat_P Parameter: Plant Line Value: WS
  misc_feature: MA Experiment 20000171 PARAMETER Experiment Name: At_42deg_Heat_P Parameter: Temperature (deg C) Value: 42 vs. 22
  misc_feature: MA Experiment 20000171 PARAMETER Experiment Name: At_42deg_Heat_P Parameter: Timepoint (hr) Value: 1
  misc_feature: MA Experiment 20000171 PARAMETER Experiment Name: At_42deg_Heat_P Parameter: Tissue Value: Aerial
  misc_feature: MA Experiment ID: 20000173 Result: Up-regulated in Transcription
  misc_feature: MA Experiment 20000173 PARAMETER Experiment Name: At_42deg_Heat_P Parameter: Age (day) Value: 14
  misc_feature: MA Experiment 20000173 PARAMETER Experiment Name: At_42deg_Heat_P Parameter: Organism Value: A. thaliana
  misc_feature: MA Experiment 20000173 PARAMETER Experiment Name: At_42deg_Heat_P Parameter: Plant Line Value: WS
  misc_feature: MA Experiment 20000173 PARAMETER Experiment Name: At_42deg_Heat_P Parameter: Temperature (deg C) Value: 42 vs. 22
  misc_feature: MA Experiment 20000173 PARAMETER Experiment Name: At_42deg_Heat_P Parameter: Timepoint (hr) Value: 6
  misc_feature: MA Experiment 20000173 PARAMETER Experiment Name: At_42deg_Heat_P Parameter: Tissue Value: Aerial
  misc_feature: MA Experiment ID: 20000179 Result: Down-regulated in Transcription
  misc_feature: MA Experiment 20000179 PARAMETER Experiment Name: At_Germinating_Seeds_P Parameter: Age (hr) Value: 6 vs. 0
  misc_feature: MA Experiment 20000179 PARAMETER Experiment Name: At_Germinating_Seeds_P Parameter: Tissue Value: Germinating Seeds
  misc_feature: MA Experiment ID: 20000184 Result: Up-regulated in Transcription
  misc_feature: MA Experiment 20000184 PARAMETER Experiment Name: At_Shoots__P Parameter: Age (day) Value: 7
  misc_feature: MA Experiment 20000184 PARAMETER Experiment Name: At_Shoots__P Parameter: Tissue Value: Shoots vs. Whole Plant
  misc_feature: MA Experiment ID: 20000234 Result: Up-regulated in Transcription
  misc_feature: MA Experiment 20000234 PARAMETER Experiment Name: At_Siliques_P Parameter: Age (day) Value: 21
  misc_feature: MA Experiment 20000234 PARAMETER Experiment Name: At_Siliques_P Parameter: Organism Value: A. thaliana
  misc_feature: MA Experiment 20000234 PARAMETER Experiment Name: At_Siliques_P Parameter: Plant Line Value: WS
  misc_feature: MA Experiment 20000234 PARAMETER Experiment Name: At_Siliques_P Parameter: Tissue Value: Less Than 5mm Siliques vs. Whole Plant
  misc_feature: MA Experiment ID: 20000235 Result: Up-regulated in Transcription
  misc_feature: MA Experiment 20000235 PARAMETER Experiment Name: At_Siliques_P Parameter: Age (day) Value: 21
  misc_feature: MA Experiment 20000235 PARAMETER Experiment Name: At_Siliques_P Parameter: Organism Value: A. thaliana
  misc_feature: MA Experiment 20000235 PARAMETER Experiment Name: At_Siliques_P Parameter: Plant Line Value: WS
  misc_feature: MA Experiment 20000235 PARAMETER Experiment Name: At_Siliques_P Parameter: Tissue Value: 5-10mm Siliques vs. Whole Plant
  misc_feature: MA Experiment ID: 20000264 Result: Up-regulated in Transcription
  misc_feature: MA Experiment 20000264 PARAMETER Experiment Name: At_Open_Flower_P Parameter: Age (day) Value: 21
  misc_feature: MA Experiment 20000264 PARAMETER Experiment Name: At_Open_Flower_P Parameter: Plant Line Value: WS
  misc_feature: MA Experiment 20000264 PARAMETER Experiment Name: At_Open_Flower_P Parameter: Tissue Value: Open Flower vs. Whole Plant
  misc_feature: MA Experiment ID: 20000265 Result: Up-regulated in Transcription
  misc_feature: MA Experiment 20000265 PARAMETER Experiment Name: At_Open_Flower_P Parameter: Age (day) Value: 21
  misc_feature: MA Experiment 20000265 PARAMETER Experiment Name: At_Open_Flower_P Parameter: Plant Line Value: WS
  misc_feature: MA Experiment 20000265 PARAMETER Experiment Name: At_Open_Flower_P Parameter: Tissue Value: Closed Flower vs. Whole Plant
  misc_feature: MA Experiment ID: 20000286 Result: Up-regulated in Transcription
  misc_feature: MA Experiment 20000286 PARAMETER Experiment Name: At_Open_Flower_P Parameter: Age (day) Value: 21
  misc_feature: MA Experiment 20000286 PARAMETER Experiment Name: At_Open_Flower_P Parameter: Plant Line Value: WS
  misc_feature: MA Experiment 20000286 PARAMETER Experiment Name: At_Open_Flower_P Parameter: Tissue Value: Half Open vs. Whole Plant
  misc_feature: MA Experiment ID: 20000794 Result: Up-regulated in Transcription
  misc_feature: MA Experiment 20000794 PARAMETER Experiment Name: At_Petals_P Parameter: Age (day) Value: 23-25 days
  misc_feature: MA Experiment 20000794 PARAMETER Experiment Name: At_Petals_P Parameter: Plant Line Value: WS
  misc_feature: MA Experiment 20000794 PARAMETER Experiment Name: At_Petals_P Parameter: Tissue Value: Petals vs. Whole plant
acgctctctcactgatcattcacaatctctctctttttttcaccggcgataattttccgatctcgattataagatggcgaaggaaccagttcgtgttcttgttaccggagctgcaggacaaatcggatatgctcttgttcctatgattgcaagggggataatgcttggtgctgatcagcctgtgatcctccacatgcttgacatcccttttgcagcagaagctttgaacggtgtgaagatggaattggtcgatgctgctttccctcttctaaagggtgtggtggctacaactgatgctgttgaagcgtgtaccggtgttaatgttgctgtcatggttggtggtttcccgaggaaggaaggaatggagaggaaggatgttatgtccaagaacgtttccatttacaagtctcaagcttctgccttggagaagcatgctgcaccaaactgcaaggttctggttgttgcaaaccctgcaaacaccaatgcattgatcctgaaggaatttgcaccatcgatcccagagaagaacattacttgcttgaccaggcttgaccacaacagggcattgggacaagtgtctgagaggttaagcgtaccagtgtctgatgtgaagaacgtgattatctggggaaaccactcatcaacccaatacccagatgtcaaccacgctaccgttaagacttccgttggagagaagccagtgcgtgagctagtcaagaatgacgagtggttgaatggagagttcatctctaccgttcaacaacgtggtgctgccattatcaaggccaggaagctgtctagtgcactttctgcagctagctcagcttgtgaccatatccgtgattgggttgttggaacacctgagggcacatttgtttcaatgggagtatactcagatggatcctacaatgttccagctggacttatctactccttccccgtaacctgccgtaatggagagtggaccattgttcaaggtttaccgattgatgacgcatcgaggaagaagatggatttgacagcagaggagttgaaggaagagaaggacctcgcttactcatgcctctcttaaaccggtcttttctcagctggtttaatcagtgaaagctttgtttcgaataaagaagttttgttataaaatgaacttttaataacctcatgagcttgaggtttagttttcctaatgttcccatgatgtgtcggtactgatttgctgaccatatataaacaatcattttgataattgacctcttttggtttc

SEQ ID NO: 28515 - protein, 332 aa, Arabidopsis thaliana
  peptide (1)..(332): Ceres Seq. ID no. 13491265
  misc_feature (157)..(331): Pfam Name: lactate/malate dehydrogenase, alpha/beta Pfam Description: lactate/malate dehydrogenase, alpha/beta
  misc_feature (4)..(332): Homolog of NCBI NO: 37589957 NR Description: Malate dehydrogenase, soluble [Mus musculus]
  misc_feature (1)..(332): Homolog of NCBI NO: 15982948 NR Description: NAD-dependent malate dehydrogenase [Prunus
  misc_feature (1)..(332): Homolog of NCBI NO: 11133373 NR Description: Malate dehydrogenase, cytoplasmic
  misc_feature (1)..(332): Homolog of NCBI NO: 12229778 NR Description: Malate dehydrogenase, cytoplasmic
  misc_feature (1)..(332): Homolog of NCBI NO: 10334493 NR Description: cytosolic malate dehydrogenase [Cicer arietinum]
  misc_feature (1)..(331): Homolog of NCBI NO: 18202485 NR Description: Malate dehydrogenase, cytoplasmic
  misc_feature (1)..(332): Homolog of NCBI NO: 10798652 NR Description: malate dehydrogenase [Nicotiana tabacum]
  misc_feature (1)..(332): Homolog of NCBI NO: 15219721 NR Description: malate dehydrogenase, cytosolic, putative
  misc_feature (1)..(332): Homolog of NCBI NO: 21593565 NR Description: cytosolic malate dehydrogenase [Arabidopsis
  misc_feature (1)..(332): Homolog of NCBI NO: 15239843 NR Description: malate dehydrogenase, cytosolic, putative
MAKEPVRVLVTGAAGQIGYALVPMIARGIMLGADQPVILHMLDIPFAAEALNGVKMELVDAAFPLLKGVVATTDAVEACTGVNVAVMVGGFPRKEGMERKDVMSKNVSIYKSQASALEKHAAPNCKVLVVANPANTNALILKEFAPSIPEKNITCLTRLDHNRALGQVSERLSVPVSDVKNVIIWGNHSSTQYPDVNHATVKTSVGEKPVRELVKNDEWLNGEFISTVQQRGAAIIKARKLSSALSAASSACDHIRDWVVGTPEGTFVSMGVYSDGSYNVPAGLIYSFPVTCRNGEWTIVQGLPIDDASRKKMDLTAEELKEEKDLAYSCLS

SEQ ID NO: 28516 - protein, 309 aa, Arabidopsis thaliana
  peptide (1)..(309): Ceres Seq. ID no. 13491266
  misc_feature (134)..(308): Pfam Name: lactate/malate dehydrogenase, alpha/beta Pfam Description: lactate/malate dehydrogenase, alpha/beta
  misc_feature (1)..(309): Homolog of NCBI NO: 37589957 NR Description: Malate dehydrogenase, soluble [Mus musculus]
  misc_feature (1)..(309): Homolog of NCBI NO: 15982948 NR Description: NAD-dependent malate dehydrogenase [Prunus
  misc_feature (1)..(309): Homolog of NCBI NO: 11133373 NR Description: Malate dehydrogenase, cytoplasmic
  misc_feature (1)..(309): Homolog of NCBI NO: 12229778 NR Description: Malate dehydrogenase, cytoplasmic
  misc_feature (1)..(309): Homolog of NCBI NO: 10334493 NR Description: cytosolic malate dehydrogenase [Cicer arietinum]
  misc_feature (1)..(308): Homolog of NCBI NO: 18202485 NR Description: Malate dehydrogenase, cytoplasmic
  misc_feature (1)..(309): Homolog of NCBI NO: 10798652 NR Description: malate dehydrogenase [Nicotiana tabacum]
  misc_feature (1)..(309): Homolog of NCBI NO: 15219721 NR Description: malate dehydrogenase, cytosolic, putative
  misc_feature (1)..(309): Homolog of NCBI NO: 21593565 NR Description: cytosolic malate dehydrogenase [Arabidopsis
  misc_feature (1)..(309): Homolog of NCBI NO: 15239843 NR Description: malate dehydrogenase, cytosolic, putative
MIARGIMLGADQPVILHMLDIPFAAEALNGVKMELVDAAFPLLKGVVATTDAVEACTGVNVAVMVGGFPRKEGMERKDVMSKNVSIYKSQASALEKHAAPNCKVLVVANPANTNALILKEFAPSIPEKNITCLTRLDHNRALGQVSERLSVPVSDVKNVIIWGNHSSTQYPDVNHATVKTSVGEKPVRELVKNDEWLNGEFISTVQQRGAAIIKARKLSSALSAASSACDHIRDWVVGTPEGTFVSMGVYSDGSYNVPAGLIYSFPVTCRNGEWTIVQGLPIDDASRKKMDLTAEELKEEKDLAYSCLS

SEQ ID NO: 28517 - protein, 303 aa, Arabidopsis thaliana
  peptide (1)..(303): Ceres Seq. ID no. 13491267
  misc_feature (128)..(302): Pfam Name: lactate/malate dehydrogenase, alpha/beta Pfam Description: lactate/malate dehydrogenase, alpha/beta
  misc_feature (1)..(303): Homolog of NCBI NO: 37589957 NR Description: Malate dehydrogenase, soluble [Mus musculus]
  misc_feature (1)..(303): Homolog of NCBI NO: 15982948 NR Description: NAD-dependent malate dehydrogenase [Prunus
  misc_feature (1)..(303): Homolog of NCBI NO: 11133373 NR Description: Malate dehydrogenase, cytoplasmic
  misc_feature (1)..(303): Homolog of NCBI NO: 12229778 NR Description: Malate dehydrogenase, cytoplasmic
  misc_feature (1)..(303): Homolog of NCBI NO: 10334493 NR Description: cytosolic malate dehydrogenase [Cicer arietinum]
  misc_feature (1)..(302): Homolog of NCBI NO: 18202485 NR Description: Malate dehydrogenase, cytoplasmic
  misc_feature (1)..(303): Homolog of NCBI NO: 10798652 NR Description: malate dehydrogenase [Nicotiana tabacum]
  misc_feature (1)..(303): Homolog of NCBI NO: 15219721 NR Description: malate dehydrogenase, cytosolic, putative
  misc_feature (1)..(303): Homolog of NCBI NO: 21593565 NR Description: cytosolic malate dehydrogenase [Arabidopsis
  misc_feature (1)..(303): Homolog of NCBI NO: 15239843 NR Description: malate dehydrogenase, cytosolic, putative
MLGADQPVILHMLDIPFAAEALNGVKMELVDAAFPLLKGVVATTDAVEACTGVNVAVMVGGFPRKEGMERKDVMSKNVSIYKSQASALEKHAAPNCKVLVVANPANTNALILKEFAPSIPEKNITCLTRLDHNRALGQVSERLSVPVSDVKNVIIWGNHSSTQYPDVNHATVKTSVGEKPVRELVKNDEWLNGEFISTVQQRGAAIIKARKLSSALSAASSACDHIRDWVVGTPEGTFVSMGVYSDGSYNVPAGLIYSFPVTCRNGEWTIVQGLPIDDASRKKMDLTAEELKEEKDLAYSCLS

SEQ ID NO: 28518 - DNA, 871 bp, Arabidopsis thaliana
  misc_feature (1)..(871): Ceres Seq. ID no. 12348502
  misc_feature: MA Experiment ID: 108473 Result: Down-regulated in Transcription
  misc_feature: MA Experiment 108473 PARAMETER Experiment Name: At_Drought_Flowers_cDNA_P Parameter: Timepoint (hr) Value: 7 d
  misc_feature: MA Experiment 108473 PARAMETER Experiment Name: At_Drought_Flowers_cDNA_P Parameter: Tissue Value: Flower
  misc_feature: MA Experiment 108473 PARAMETER Experiment Name: At_Drought_Flowers_cDNA_P Parameter: Treatment Value: Drought vs. No Drought
  misc_feature: MA Experiment ID: 108474 Result: Down-regulated in Transcription
  misc_feature: MA Experiment 108474 PARAMETER Experiment Name: At_Drought_Flowers_cDNA_P Parameter: Timepoint (hr) Value: null
  misc_feature: MA Experiment 108474 PARAMETER Experiment Name: At_Drought_Flowers_cDNA_P Parameter: Treatment Value: Drought vs. No Drought
  misc_feature: MA Experiment ID: 108501 Result: Down-regulated in Transcription
  misc_feature: MA Experiment 108501 PARAMETER Experiment Name: At_ap2_floral_buds_cDNA_P Parameter: Plant Line Value: ap2 (Ler.)
  misc_feature: MA Experiment 108501 PARAMETER Experiment Name: At_ap2_floral_buds_cDNA_P Parameter: Tissue Value: Closed Flower
  misc_feature: MA Experiment ID: 20000265 Result: Up-regulated in Transcription
  misc_feature: MA Experiment 20000265 PARAMETER Experiment Name: At_Open_Flower_P Parameter: Age (day) Value: 21
  misc_feature: MA Experiment 20000265 PARAMETER Experiment Name: At_Open_Flower_P Parameter: Plant Line Value: WS
  misc_feature: MA Experiment 20000265 PARAMETER Experiment Name: At_Open_Flower_P Parameter: Tissue Value: Closed Flower vs. Whole Plant
  misc_feature: MA Experiment ID: 20000286 Result: Up-regulated in Transcription
  misc_feature: MA Experiment 20000286 PARAMETER Experiment Name: At_Open_Flower_P Parameter: Age (day) Value: 21
  misc_feature: MA Experiment 20000286 PARAMETER Experiment Name: At_Open_Flower_P Parameter: Plant Line Value: WS
  misc_feature: MA Experiment 20000286 PARAMETER Experiment Name: At_Open_Flower_P Parameter: Tissue Value: Half Open vs. Whole Plant
  misc_feature: MA Experiment ID: 20001910 Result: Down-regulated in Transcription
  misc_feature: MA Experiment 20001910 PARAMETER Experiment Name: At_Drought_Reproduction_P Parameter: Age (day) Value: 37
  misc_feature: MA Experiment 20001910 PARAMETER Experiment Name: At_Drought_Reproduction_P Parameter: Organism Value: A. thaliana
  misc_feature: MA Experiment 20001910 PARAMETER Experiment Name: At_Drought_Reproduction_P Parameter: Plant Line Value: WS
  misc_feature: MA Experiment 20001910 PARAMETER Experiment Name: At_Drought_Reproduction_P Parameter: Timepoint (day) Value: 7
  misc_feature: MA Experiment 20001910 PARAMETER Experiment Name: At_Drought_Reproduction_P Parameter: Tissue Value: Flowers
  misc_feature: MA Experiment 20001910 PARAMETER Experiment Name: At_Drought_Reproduction_P Parameter: Treatment Value: Drought vs. No Drought
aatattcctcatatacacaagctttggttattcgtttgctcttgtttttatcaggtaagcatcatttgtagactacattttcagagagaaatgggtgtatttcctggtttgatcaatcagaacacacaacagcctccagaggtcgagtccaagagatctaggaatgttaaacgtaagtcagtgtctgagacttatccagagaacagagaagaattaaagaagcaattaaaactttggagagcttcagataagaaatctccatggtatgattatcctcctaaggttaaggaacacgtatcaaaaaaggtttttagcgatcttggaccgacagagaagcacgtgagggtggaaaaagctgcaccctggaggttcctttggtggtctggatctatcccggtacatctaactttcaatgagagccgaaaagatttcagcacactatatatgattcctaaaaagaacgtgatgttcatgaaaacgttctatggtaagtggcaaatagagccatggtacgtagataacatgcgcttttgcaagccgagactcccaaagaatcgagaagaatatagacaatgtaccggtggaaaaggattgattggctctagagtgacattggaccagtattttcagccttcttcttatcttaacctgccaccactttcttggtacatccgtagggccaccgtcaagaccaccaaggctctagttgaagatcttcaaattcaggccgccgttatcagaagcgtttgaaactctttccaatccgatatttgttagttataccgtttttatacaaacattaaactcaaatattggaatactgtaaaaaaaaaatcacgttctgtcaagaagaaagaaagaatcactttat

SEQ ID NO: 28519 - protein, 249 aa, Arabidopsis thaliana
  peptide (1)..(249): Ceres Seq. ID no. 12348503
  misc_feature (127)..(230): Pfam Name: Domain of unknown function DUF220 Pfam Description: Domain of unknown function DUF220
  misc_feature (127)..(230): Pfam Name: Domain of unknown function DUF220 Pfam Description: Domain of unknown function DUF220
  misc_feature (93)..(248): Homolog of NCBI NO: 8778583 NR Description: F28C11.19 [Arabidopsis thaliana]
  misc_feature (97)..(240): Homolog of NCBI NO: 8778583 NR Description: F28C11.19 [Arabidopsis thaliana]
  misc_feature (95)..(240): Homolog of NCBI NO: 8778583 NR Description: F28C11.19 [Arabidopsis thaliana]
  misc_feature (91)..(247): Homolog of NCBI NO: 8778583 NR Description: F28C11.19 [Arabidopsis thaliana]
  misc_feature (31)..(104): Homolog of NCBI NO: 25373395 NR Description: hypothetical protein F5O8.22 - Arabidopsis
  misc_feature (93)..(248): Homolog of NCBI NO: 8778583 NR Description: F28C11.19 [Arabidopsis thaliana]
  misc_feature (95)..(240): Homolog of NCBI NO: 8778583 NR Description: F28C11.19 [Arabidopsis thaliana]
  misc_feature (31)..(104): Homolog of NCBI NO: 25373395 NR Description: hypothetical protein F5O8.22 - Arabidopsis
  misc_feature (95)..(248): Homolog of NCBI NO: 8778583 NR Description: F28C11.19 [Arabidopsis thaliana]
  misc_feature (1)..(104): Homolog of NCBI NO: 8778583 NR Description: F28C11.19 [Arabidopsis thaliana]
  misc_feature (31)..(249): Homolog of NCBI NO: 21536644 NR Description: OBP32pep protein, putative [Arabidopsis thaliana]
  misc_feature (31)..(249): Homolog of NCBI NO: 18395270 NR Description: OBP32pep protein, putative
  misc_feature (97)..(249): Homolog of NCBI NO: 25373395 NR Description: hypothetical protein F5O8.22 - Arabidopsis
  misc_feature (91)..(247): Homolog of NCBI NO: 8778583 NR Description: F28C11.19 [Arabidopsis thaliana]
  misc_feature (97)..(240): Homolog of NCBI NO: 8778583 NR Description: F28C11.19 [Arabidopsis thaliana]
  misc_feature (97)..(249): Homolog of NCBI NO: 25373395 NR Description: hypothetical protein F5O8.22 - Arabidopsis
  misc_feature (31)..(249): Homolog of NCBI NO: 18395270 NR Description: OBP32pep protein, putative
  misc_feature (31)..(249): Homolog of NCBI NO: 21536644 NR Description: OBP32pep protein, putative [Arabidopsis thaliana]
  misc_feature (1)..(104): Homolog of NCBI NO: 8778583 NR Description: F28C11.19 [Arabidopsis thaliana]
  misc_feature (95)..(248): Homolog of NCBI NO: 8778583 NR Description: F28C11.19 [Arabidopsis thaliana]
NIPHIHKLWLFVCSCFYQVSIICRLHFQREMGVFPGLINQNTQQPPEVESKRSRNVKRKSVSETYPENREELKKQLKLWRASDKKSPWYDYPPKVKEHVSKKVFSDLGPTEKHVRVEKAAPWRFLWWSGSIPVHLTFNESRKDFSTLYMIPKKNVMFMKTFYGKWQIEPWYVDNMRFCKPRLPKNREEYRQCTGGKGLIGSRVTLDQYFQPSSYLNLPPLSWYIRRATVKTTKALVEDLQIQAAVIRSV

SEQ ID NO: 28520 - protein, 219 aa, Arabidopsis thaliana
  peptide (1)..(219): Ceres Seq. ID no. 12348504
  misc_feature (97)..(200): Pfam Name: Domain of unknown function DUF220 Pfam Description: Domain of unknown function DUF220
  misc_feature (97)..(200): Pfam Name: Domain of unknown function DUF220 Pfam Description: Domain of unknown function DUF220
  misc_feature (63)..(218): Homolog of NCBI NO: 8778583 NR Description: F28C11.19 [Arabidopsis thaliana]
  misc_feature (67)..(210): Homolog of NCBI NO: 8778583 NR Description: F28C11.19 [Arabidopsis thaliana]
  misc_feature (65)..(210): Homolog of NCBI NO: 8778583 NR Description: F28C11.19 [Arabidopsis thaliana]
  misc_feature (61)..(217): Homolog of NCBI NO: 8778583 NR Description: F28C11.19 [Arabidopsis thaliana]
  misc_feature (1)..(74): Homolog of NCBI NO: 25373395 NR Description: hypothetical protein F5O8.22 - Arabidopsis
  misc_feature (63)..(218): Homolog of NCBI NO: 8778583 NR Description: F28C11.19 [Arabidopsis thaliana]
  misc_feature (65)..(210): Homolog of NCBI NO: 8778583 NR Description: F28C11.19 [Arabidopsis thaliana]
  misc_feature (1)..(74): Homolog of NCBI NO: 25373395 NR Description: hypothetical protein F5O8.22 - Arabidopsis
  misc_feature (65)..(218): Homolog of NCBI NO: 8778583 NR Description: F28C11.19 [Arabidopsis thaliana]
  misc_feature (1)..(74): Homolog of NCBI NO: 8778583 NR Description: F28C11.19 [Arabidopsis thaliana]
  misc_feature (1)..(219): Homolog of NCBI NO: 21536644 NR Description: OBP32pep protein, putative [Arabidopsis thaliana]
  misc_feature (1)..(219): Homolog of NCBI NO: 18395270 NR Description: OBP32pep protein, putative
  misc_feature (67)..(219): Homolog of NCBI NO: 25373395 NR Description: hypothetical protein F5O8.22 - Arabidopsis
  misc_feature (61)..(217): Homolog of NCBI NO: 8778583 NR Description: F28C11.19 [Arabidopsis thaliana]
  misc_feature (67)..(210): Homolog of NCBI NO: 8778583 NR Description: F28C11.19 [Arabidopsis thaliana]
  misc_feature (67)..(219): Homolog of NCBI NO: 25373395 NR Description: hypothetical protein F5O8.22 - Arabidopsis
  misc_feature (1)..(219): Homolog of NCBI NO: 18395270 NR Description: OBP32pep protein, putative
  misc_feature (1)..(219): Homolog of NCBI NO: 21536644 NR Description: OBP32pep protein, putative [Arabidopsis thaliana]
  misc_feature (1)..(74): Homolog of NCBI NO: 8778583 NR Description: F28C11.19 [Arabidopsis thaliana]
  misc_feature (65)..(218): Homolog of NCBI NO: 8778583 NR Description: F28C11.19 [Arabidopsis thaliana]
MGVFPGLINQNTQQPPEVESKRSRNVKRKSVSETYPENREELKKQLKLWRASDKKSPWYDYPPKVKEHVSKKVFSDLGPTEKHVRVEKAAPWRFLWWSGSIPVHLTFNESRKDFSTLYMIPKKNVMFMKTFYGKWQIEPWYVDNMRFCKPRLPKNREEYRQCTGGKGLIGSRVTLDQYFQPSSYLNLPPLSWYIRRATVKTTKALVEDLQIQAAVIRSV

SEQ ID NO: 28521 - DNA, 673 bp, Arabidopsis thaliana
  misc_feature (1)..(673): Ceres Seq. ID no. 12331840
  misc_feature: MA Experiment ID: 20000439 Result: Up-regulated in Transcription
  misc_feature: MA Experiment 20000439 PARAMETER Experiment Name: At_Roots__P Parameter: Age (day) Value: 14 vs. 21
  misc_feature: MA Experiment 20000439 PARAMETER Experiment Name: At_Roots__P Parameter: Organism Value: A. thaliana
  misc_feature: MA Experiment 20000439 PARAMETER Experiment Name: At_Roots__P Parameter: Tissue Value: Roots vs. Whole Plant
  misc_feature: MA Experiment ID: 20001451 Result: Up-regulated in Transcription
  misc_feature: MA Experiment 20001451 PARAMETER Experiment Name: At_Far-red-induction_P Parameter: Age (day) Value: 7
  misc_feature: MA Experiment 20001451 PARAMETER Experiment Name: At_Far-red-induction_P Parameter: Light Value: Far-red vs. White
  misc_feature: MA Experiment 20001451 PARAMETER Experiment Name: At_Far-red-induction_P Parameter: Organism Value: A. thaliana
  misc_feature: MA Experiment 20001451 PARAMETER Experiment Name: At_Far-red-induction_P Parameter: Plant Line Value: Columbia
  misc_feature: MA Experiment 20001451 PARAMETER Experiment Name: At_Far-red-induction_P Parameter: Timepoint (hr) Value: 24
  misc_feature: MA Experiment 20001451 PARAMETER Experiment Name: At_Far-red-induction_P Parameter: Tissue Value: Whole Plant
cagagcttcgacagcttctggagtctggtaacatagatctttgctttgctaacgaggacgaagcagcagagctccttaggggtgagcaagaagcgggtccggaggcagctcttgagttcctaggcagacattgcagatgggctgtggtaactttagggtcgaaagggtgcattgcaaaacatgataaagaggtggtatatatatcagccataggagagacagtagcaactgatgccacaggagccggtgacctattcgcaagcgggtttctgtacggactaataaagggattgtctttggaagaatgttgcaaagtgggatcatgcagtggtggatctgtcatccgtgctctcggtggagaagtaaccccagaaaactggcaatggatgcacaaacagttgcagttgaagggcttacctgttcctgacatccacaactgatgatatcaccatcagattgtagaatttcaaacaatttcgttgaagggccggttctgattcaagcagctcttagcattatgttgttcacagagattctcacagcatttacttcaatacacattgtgttgttttcaatctttttttgtgaaaaataaaaatgcgtttgtcaaggtttaggatcaatcttacttactccacctttctgttccttaaacaatgttcctttttctggc

SEQ ID NO: 28522 - protein, 145 aa, Arabidopsis thaliana
  peptide (1)..(145): Ceres Seq. ID no. 12331841
  misc_feature (1)..(125): Pfam Name: pfkB family carbohydrate kinase Pfam Description: pfkB family carbohydrate kinase
  misc_feature (1)..(138): Homolog of NCBI NO: 20803993 NR Description: PUTATIVE SUGAR KINASE PROTEIN [Mesorhizobium loti]
  misc_feature (3)..(118): Homolog of NCBI NO: 33239956 NR Description: Sugar kinase, ribokinase family
  misc_feature (1)..(118): Homolog of NCBI NO: 17933998 NR Description: pfkB family carbohydrate kinase
  misc_feature (1)..(118): Homolog of NCBI NO: 15887433 NR Description: AGR_C_118p [Agrobacterium tumefaciens]
  misc_feature (1)..(118): Homolog of NCBI NO: 17988062 NR Description: FRUCTOKINASE [Brucella melitensis]
  misc_feature (1)..(118): Homolog of NCBI NO: 15963924 NR Description: PUTATIVE SUGAR KINASE PROTEIN [Sinorhizobium
  misc_feature (1)..(126): Homolog of NCBI NO: 29348208 NR Description: putative PfkB family carbohydrate kinase
  misc_feature (1)..(145): Homolog of NCBI NO: 39579184 NR Description: putative ribokinase [Triticum turgidum subsp.
  misc_feature (1)..(145): Homolog of NCBI NO: 34894090 NR Description: P0005A05.10 [Oryza sativa (japonica
  misc_feature (1)..(145): Homolog of NCBI NO: 15223593 NR Description: ribokinase, putative; protein id: At1g19600.1
ELRQLLESGNIDLCFANEDEAAELLRGEQEAGPEAALEFLGRHCRWAVVTLGSKGCIAKHDKEVVYISAIGETVATDATGAGDLFASGFLYGLIKGLSLEECCKVGSCSGGSVIRALGGEVTPENWQWMHKQLQLKGLPVPDIHN

SEQ ID NO: 28523 - DNA, 950 bp, Arabidopsis thaliana
  misc_feature (1)..(950): Ceres Seq. ID no. 12579476
  misc_feature: MA Experiment ID: 108434 Result: Up-regulated in Transcription
  misc_feature: MA Experiment 108434 PARAMETER Experiment Name: At_Root_Tips_cDNA_P Parameter: Tissue Value: Root Tips
  misc_feature: MA Experiment ID: 108463 Result: Down-regulated in Transcription
  misc_feature: MA Experiment 108463 PARAMETER Experiment Name: At_Germinating_Seeds_cDNA_P Parameter: Age (day) Value: 3 vs. 0
  misc_feature: MA Experiment 108463 PARAMETER Experiment Name: At_Germinating_Seeds_cDNA_P Parameter: Tissue Value: Germinating Seeds
  misc_feature: MA Experiment ID: 108464 Result: Down-regulated in Transcription
  misc_feature: MA Experiment 108464 PARAMETER Experiment Name: At_Germinating_Seeds_cDNA_P Parameter: Age (day) Value: 4 vs. 0
  misc_feature: MA Experiment 108464 PARAMETER Experiment Name: At_Germinating_Seeds_cDNA_P Parameter: Tissue Value: Germinating Seeds
  misc_feature: MA Experiment ID: 20000068 Result: Up-regulated in Transcription
  misc_feature: MA Experiment ID: 20000113 Result: Down-regulated in Transcription
  misc_feature: MA Experiment 20000113 PARAMETER Experiment Name: At_42deg_Heat_cDNA_P Parameter: Temperature (deg C) Value: 42 vs. 22
  misc_feature: MA Experiment 20000113 PARAMETER Experiment Name: At_42deg_Heat_cDNA_P Parameter: Timepoint (hr) Value: 8
  misc_feature: MA Experiment 20000113 PARAMETER Experiment Name: At_42deg_Heat_cDNA_P Parameter: Tissue Value: Aerial
attcgtgactaaaaaagctcctaggcaccaaaatcgagacactctcgacaaccatactctctgacgccggtggtggttccgatcgccagcgtcgggacttatcaactcccatcaaccttcatgtgttctatataagctttatcttcattgaatcttcctccgttatctcaaatctctcaaaatatctaaatctccttttttatgtgagcttcttcactgaaagttttctttgtgacggaagagtatatcgatgctctattggctccgatctgactcagatcttggatgcatctctgtcttcgaacccaaaacaagaaaattcacaacagtccaacagctcctcttctcaaacatcagagcaagacttcatcaacttatcaaaaagctctagatctggactagcaccaacaccacctttggtttcttctcaccggttttcgttgatggcaggagtatctcttggaccatcagttgtgcttcttcggctgggaacgtcgacgacacacgacgagttcaaacgctggcaaatggtcaccctatatattcacagtcgcccatcatttcaattcttcaaaatgacggaggcgctttccttatcccgacaacatcaaccctagggtttgattggatgagccccatctttcattaaagcccaatatctcccatgtggcccatatccaggtctgatttccctatcaatttgcatagtctctctttgctttgtttctcgacaaaggatggtagtggactccattcagctttaggaacaatgcatctagaggggatttgcttattcaattatcgaaaccttatgatagtcctgattgtttatcaccggatgcatcttaacaattgtttaaattaaaattttgaaacatgacatgtaagaagcaaatcttagtttttaattcataaaaacttcttagataagaagcaaatcttagtttttc

SEQ ID NO: 28524 - protein, 66 aa, Arabidopsis thaliana
  peptide (1)..(66): Ceres Seq. ID no. 12579477
  misc_feature (1)..(50): Homolog of NCBI NO: 15234188 NR Description: hypothetical protein; protein id: At4g19240.1
MWPISRSDFPINLHSLSLLCFSTKDGSGLHSALGTMHLEGICLFNYRNLMIVLIVYHRMHLNNCLN

SEQ ID NO: 28525 - protein, 57 aa, Arabidopsis thaliana
  peptide (1)..(57): Ceres Seq. ID no. 12579478
  misc_feature (1)..(29): Homolog of NCBI NO: 15234188 NR Description: hypothetical protein; protein id: At4g19240.1
MAGVSLGPSVVLLRLGTSTTHDEFKRWQMVTLYIHSRPSFQFFKMTEALSLSRQHQP

SEQ ID NO: 28526 - protein, 46 aa, Arabidopsis thaliana
  peptide (1)..(46): Ceres Seq. ID no. 12579479
MLYWLRSDSDLGCISVFEPKTRKFTTVQQLLFSNIRARLHQLIKKL

SEQ ID NO: 28527 - DNA, 1076 bp, Arabidopsis thaliana
  misc_feature (1)..(1076): Ceres Seq. ID no. 12421106
  misc_feature: MA Experiment ID: 108464 Result: Down-regulated in Transcription
  misc_feature: MA Experiment 108464 PARAMETER Experiment Name: At_Germinating_Seeds_cDNA_P Parameter: Age (day) Value: 4 vs. 0
  misc_feature: MA Experiment 108464 PARAMETER Experiment Name: At_Germinating_Seeds_cDNA_P Parameter: Tissue Value: Germinating Seeds
  misc_feature: MA Experiment ID: 108473 Result: Down-regulated in Transcription
  misc_feature: MA Experiment 108473 PARAMETER Experiment Name: At_Drought_Flowers_cDNA_P Parameter: Timepoint (hr) Value: 7 d
  misc_feature: MA Experiment 108473 PARAMETER Experiment Name: At_Drought_Flowers_cDNA_P Parameter: Tissue Value: Flower
  misc_feature: MA Experiment 108473 PARAMETER Experiment Name: At_Drought_Flowers_cDNA_P Parameter: Treatment Value: Drought vs. No Drought
  misc_feature: MA Experiment ID: 108572 Result: Down-regulated in Transcription
  misc_feature: MA Experiment 108572 PARAMETER Experiment Name: At_Drought_cDNA_P Parameter: Timepoint (hr) Value: 1
  misc_feature: MA Experiment 108572 PARAMETER Experiment Name: At_Drought_cDNA_P Parameter: Tissue Value: Aerial
  misc_feature: MA Experiment 108572 PARAMETER Experiment Name: At_Drought_cDNA_P Parameter: Treatment Value: Drought vs. No Drought
  misc_feature: MA Experiment ID: 108573 Result: Down-regulated in Transcription
  misc_feature: MA Experiment 108573 PARAMETER Experiment Name: At_Drought_cDNA_P Parameter: Timepoint (hr) Value: 6
  misc_feature: MA Experiment 108573 PARAMETER Experiment Name: At_Drought_cDNA_P Parameter: Tissue Value: Aerial
  misc_feature: MA Experiment 108573 PARAMETER Experiment Name: At_Drought_cDNA_P Parameter: Treatment Value: Drought vs. No Drought
  misc_feature: MA Experiment ID: 108577 Result: Down-regulated in Transcription
  misc_feature: MA Experiment 108577 PARAMETER Experiment Name: At_42deg_Heat_cDNA_P Parameter: Temperature (deg C) Value: 42 vs. 22
  misc_feature: MA Experiment 108577 PARAMETER Experiment Name: At_42deg_Heat_cDNA_P Parameter: Timepoint (hr) Value: 6
  misc_feature: MA Experiment 108577 PARAMETER Experiment Name: At_42deg_Heat_cDNA_P Parameter: Tissue Value: Aerial
  misc_feature: MA Experiment ID: 108668 Result: Down-regulated in Transcription
  misc_feature: MA Experiment 108668 PARAMETER Experiment Name: At_2mM_SA_cDNA_P Parameter: Plant Line Value: WS
  misc_feature: MA Experiment 108668 PARAMETER Experiment Name: At_2mM_SA_cDNA_P Parameter: Timepoint (hr) Value: 6
  misc_feature: MA Experiment 108668 PARAMETER Experiment Name: At_2mM_SA_cDNA_P Parameter: Treatment Value: 2mM SA vs. No Treatment
  misc_feature: MA Experiment ID: 20000069 Result: Down-regulated in Transcription
  misc_feature: MA Experiment 20000069 PARAMETER Experiment Name: At_100uM_ABA_Mutants_cDNA_P Parameter: Plant Line Value: CS23
  misc_feature: MA Experiment 20000069 PARAMETER Experiment Name: At_100uM_ABA_Mutants_cDNA_P Parameter: Timepoint (hr) Value: 6
  misc_feature: MA Experiment 20000069 PARAMETER Experiment Name: At_100uM_ABA_Mutants_cDNA_P Parameter: Tissue Value: Aerial
  misc_feature: MA Experiment 20000069 PARAMETER Experiment Name: At_100uM_ABA_Mutants_cDNA_P Parameter: Treatment Value: 100uM ABA vs. No Treatment
  misc_feature: MA Experiment ID: 20000111 Result: Down-regulated in Transcription
  misc_feature: MA Experiment 20000111 PARAMETER Experiment Name: At_42deg_Heat_cDNA_P Parameter: Temperature (deg C) Value: 42 vs. 22
  misc_feature: MA Experiment 20000111 PARAMETER Experiment Name: At_42deg_Heat_cDNA_P Parameter: Timepoint (hr) Value: 6
  misc_feature: MA Experiment 20000111 PARAMETER Experiment Name: At_42deg_Heat_cDNA_P Parameter: Tissue Value: Aerial
  misc_feature: MA Experiment ID: 20000173 Result: Down-regulated in Transcription
  misc_feature: MA Experiment 20000173 PARAMETER Experiment Name: At_42deg_Heat_P Parameter: Age (day) Value: 14
  misc_feature: MA Experiment 20000173 PARAMETER Experiment Name: At_42deg_Heat_P Parameter: Organism Value: A. thaliana
  misc_feature: MA Experiment 20000173 PARAMETER Experiment Name: At_42deg_Heat_P Parameter: Plant Line Value: WS
  misc_feature: MA Experiment 20000173 PARAMETER Experiment Name: At_42deg_Heat_P Parameter: Temperature (deg C) Value: 42 vs. 22
  misc_feature: MA Experiment 20000173 PARAMETER Experiment Name: At_42deg_Heat_P Parameter: Timepoint (hr) Value: 6
  misc_feature: MA Experiment 20000173 PARAMETER Experiment Name: At_42deg_Heat_P Parameter: Tissue Value: Aerial
  misc_feature: MA Experiment ID: 20000179 Result: Up-regulated in Transcription
  misc_feature: MA Experiment 20000179 PARAMETER Experiment Name: At_Germinating_Seeds_P Parameter: Age (hr) Value: 6 vs. 0
  misc_feature: MA Experiment 20000179 PARAMETER Experiment Name: At_Germinating_Seeds_P Parameter: Tissue Value: Germinating Seeds
  misc_feature: MA Experiment ID: 20000180 Result: Up-regulated in Transcription
  misc_feature: MA Experiment 20000180 PARAMETER Experiment Name: At_Germinating_Seeds_P Parameter: Age (hr) Value: 24 vs. 0
  misc_feature: MA Experiment 20000180 PARAMETER Experiment Name: At_Germinating_Seeds_P Parameter: Tissue Value: Germinating Seeds
  misc_feature: MA Experiment ID: 20000182 Result: Down-regulated in Transcription
  misc_feature: MA Experiment 20000182 PARAMETER Experiment Name: At_2mM_SA_P Parameter: Age (day) Value: 14
  misc_feature: MA Experiment 20000182 PARAMETER Experiment Name: At_2mM_SA_P Parameter: Organism Value: A. thaliana
  misc_feature: MA Experiment 20000182 PARAMETER Experiment Name: At_2mM_SA_P Parameter: Plant Line Value: WS
  misc_feature: MA Experiment 20000182 PARAMETER Experiment Name: At_2mM_SA_P Parameter: Timepoint (hr) Value: 6
  misc_feature: MA Experiment 20000182 PARAMETER Experiment Name: At_2mM_SA_P Parameter: Tissue Value: Aerial
  misc_feature: MA Experiment 20000182 PARAMETER Experiment Name: At_2mM_SA_P Parameter: Treatment Value: 2mM SA vs. No Treatment
  misc_feature: MA Experiment ID: 20000185 Result: Down-regulated in Transcription
  misc_feature: MA Experiment 20000185 PARAMETER Experiment Name: At_Roots__P Parameter: Age (day) Value: 7 vs. 21
  misc_feature: MA Experiment 20000185 PARAMETER Experiment Name: At_Roots__P Parameter: Organism Value: A. thaliana
  misc_feature: MA Experiment 20000185 PARAMETER Experiment Name: At_Roots__P Parameter: Tissue Value: Roots vs. Whole Plant
  misc_feature: MA Experiment ID: 20000224 Result: Down-regulated in Transcription
  misc_feature: MA Experiment ID: 20000227 Result: Up-regulated in Transcription
  misc_feature: MA Experiment 20000227 PARAMETER Experiment Name: At_Root-Tips-vs-Tops_P Parameter: Tissue Value: Root Tips vs. Root Tops
  misc_feature: MA Experiment ID: 20000268 Result: Down-regulated in Transcription
  misc_feature: MA Experiment 20000268 PARAMETER Experiment Name: At_100mM_NaCl__P Parameter: Age (day) Value: 14
  misc_feature: MA Experiment 20000268 PARAMETER Experiment Name: At_100mM_NaCl__P Parameter: Organism Value: A. thaliana
  misc_feature: MA Experiment 20000268 PARAMETER Experiment Name: At_100mM_NaCl__P Parameter: Plant Line Value: WS
  misc_feature: MA Experiment 20000268 PARAMETER Experiment Name: At_100mM_NaCl__P Parameter: Timepoint (hr) Value: 6
  misc_feature: MA Experiment 20000268 PARAMETER Experiment Name: At_100mM_NaCl__P Parameter: Tissue Value: Whole Plant
  misc_feature: MA Experiment 20000268 PARAMETER Experiment Name: At_100mM_NaCl__P Parameter: Treatment Value: 100mM NaCl vs. No Treatment
  misc_feature: MA Experiment ID: 20000436 Result: Down-regulated in Transcription
  misc_feature: MA Experiment 20000436 PARAMETER Experiment Name: At_Drought_P Parameter: Age (day) Value: 7
  misc_feature: MA Experiment 20000436 PARAMETER Experiment Name: At_Drought_P Parameter: Organism Value: A. thaliana
  misc_feature: MA Experiment 20000436 PARAMETER Experiment Name: At_Drought_P Parameter: Plant Line Value: WS
  misc_feature: MA Experiment 20000436 PARAMETER Experiment Name: At_Drought_P Parameter: Timepoint (hr) Value: 12
  misc_feature: MA Experiment 20000436 PARAMETER Experiment Name: At_Drought_P Parameter: Tissue Value: Whole Plant
  misc_feature: MA Experiment 20000436 PARAMETER Experiment Name: At_Drought_P Parameter: Treatment Value: Drought vs. No Drought
  misc_feature: MA Experiment ID: 20000437 Result: Down-regulated in Transcription
  misc_feature: MA Experiment 20000437 PARAMETER Experiment Name: At_Drought_P Parameter: Age (day) Value: 8
  misc_feature: MA Experiment 20000437 PARAMETER Experiment Name: At_Drought_P Parameter: Organism Value: A. thaliana
  misc_feature: MA Experiment 20000437 PARAMETER Experiment Name: At_Drought_P Parameter: Plant Line Value: WS
  misc_feature: MA Experiment 20000437 PARAMETER Experiment Name: At_Drought_P Parameter: Timepoint (hr) Value: 24
  misc_feature: MA Experiment 20000437 PARAMETER Experiment Name: At_Drought_P Parameter: Tissue Value: Whole Plant
  misc_feature: MA Experiment 20000437 PARAMETER Experiment Name: At_Drought_P Parameter: Treatment Value: Drought vs. No Drought
  misc_feature: MA Experiment ID: 20000439 Result: Down-regulated in Transcription
  misc_feature: MA Experiment 20000439 PARAMETER Experiment Name: At_Roots__P Parameter: Age (day) Value: 14 vs. 21
  misc_feature: MA Experiment 20000439 PARAMETER Experiment Name: At_Roots__P Parameter: Organism Value: A. thaliana
  misc_feature: MA Experiment 20000439 PARAMETER Experiment Name: At_Roots__P Parameter: Tissue Value: Roots vs. Whole Plant
  misc_feature: MA Experiment ID: 20000451 Result: Down-regulated in Transcription
  misc_feature: MA Experiment 20000451 PARAMETER Experiment Name: At_CS6879_Shoots-Roots_P Parameter: Age (day) Value: 14
  misc_feature: MA Experiment 20000451 PARAMETER Experiment Name: At_CS6879_Shoots-Roots_P Parameter: Organism Value: A. thaliana
  misc_feature: MA Experiment 20000451 PARAMETER Experiment Name: At_CS6879_Shoots-Roots_P Parameter: Plant Line Value: CS6879 vs. WS
  misc_feature: MA Experiment 20000451 PARAMETER Experiment Name: At_CS6879_Shoots-Roots_P Parameter: Tissue Value: Roots
  misc_feature: MA Experiment ID: 20000452 Result: Down-regulated in Transcription
  misc_feature: MA Experiment 20000452 PARAMETER Experiment Name: At_CS6879_Shoots-Roots_P Parameter: Age (day) Value: 14
  misc_feature: MA Experiment 20000452 PARAMETER Experiment Name: At_CS6879_Shoots-Roots_P Parameter: Organism Value: A. thaliana
  misc_feature: MA Experiment 20000452 PARAMETER Experiment Name: At_CS6879_Shoots-Roots_P Parameter: Plant Line Value: CS6879 vs. WS
  misc_feature: MA Experiment 20000452 PARAMETER Experiment Name: At_CS6879_Shoots-Roots_P Parameter: Tissue Value: Shoots
  misc_feature: MA Experiment ID: 20000496 Result: Up-regulated in Transcription
  misc_feature: MA Experiment 20000496 PARAMETER Experiment Name: At_Guard_Cells_P Parameter: Harvest Date Value: 7/19/2002
  misc_feature: MA Experiment 20000496 PARAMETER Experiment Name: At_Guard_Cells_P Parameter: Organism Value: Canola
  misc_feature: MA Experiment 20000496 PARAMETER Experiment Name: At_Guard_Cells_P Parameter: Tissue Value: Guard Cells vs. Leaves
  misc_feature: MA Experiment ID: 20001554 Result: Down-regulated in Transcription
  misc_feature: MA Experiment 20001554 PARAMETER Experiment Name: At_Drought_Soil_Dry_P Parameter: Age (day) Value: 21
  misc_feature: MA Experiment 20001554 PARAMETER Experiment Name: At_Drought_Soil_Dry_P Parameter: Organism Value: A. thaliana
  misc_feature: MA Experiment 20001554 PARAMETER Experiment Name: At_Drought_Soil_Dry_P Parameter: Plant Line Value: WS
  misc_feature: MA Experiment 20001554 PARAMETER Experiment Name: At_Drought_Soil_Dry_P Parameter: Post Timepoint (hr) Value: None
  misc_feature: MA Experiment 20001554 PARAMETER Experiment Name: At_Drought_Soil_Dry_P Parameter: Post-Treatment Value: None
  misc_feature: MA Experiment 20001554 PARAMETER Experiment Name: At_Drought_Soil_Dry_P Parameter: Timepoint (day) Value: 7
  misc_feature: MA Experiment 20001554 PARAMETER Experiment Name: At_Drought_Soil_Dry_P Parameter: Treatment Value: Drought vs. No Drought
  misc_feature: MA Experiment ID: 20001556 Result: Down-regulated in Transcription
  misc_feature: MA Experiment 20001556 PARAMETER Experiment Name: At_Drought_Soil_Dry_P Parameter: Age (day) Value: 26
  misc_feature: MA Experiment 20001556 PARAMETER Experiment Name: At_Drought_Soil_Dry_P Parameter: Organism Value: A. thaliana
  misc_feature: MA Experiment 20001556 PARAMETER Experiment Name: At_Drought_Soil_Dry_P Parameter: Plant Line Value: WS
  misc_feature: MA Experiment 20001556 PARAMETER Experiment Name: At_Drought_Soil_Dry_P Parameter: Post Timepoint (hr) Value: None
  misc_feature: MA Experiment 20001556 PARAMETER Experiment Name: At_Drought_Soil_Dry_P Parameter: Post-Treatment Value: None
  misc_feature: MA Experiment 20001556 PARAMETER Experiment Name: At_Drought_Soil_Dry_P Parameter: Timepoint (day) Value: 12
  misc_feature: MA Experiment 20001556 PARAMETER Experiment Name: At_Drought_Soil_Dry_P Parameter: Treatment Value: Drought vs. No Drought
  misc_feature: MA Experiment ID: 20001557 Result: Up-regulated in Transcription
  misc_feature: MA Experiment 20001557 PARAMETER Experiment Name: At_Drought_Soil_Dry_P Parameter: Age (day) Value: 27
  misc_feature: MA Experiment 20001557 PARAMETER Experiment Name: At_Drought_Soil_Dry_P Parameter: Organism Value: A. thaliana
  misc_feature: MA Experiment 20001557 PARAMETER Experiment Name: At_Drought_Soil_Dry_P Parameter: Plant Line Value: WS
  misc_feature: MA Experiment 20001557 PARAMETER Experiment Name: At_Drought_Soil_Dry_P Parameter: Post Timepoint (hr) Value: 3
  misc_feature: MA Experiment 20001557 PARAMETER Experiment Name: At_Drought_Soil_Dry_P Parameter: Post-Treatment Value: Re-Water vs. No Drought
  misc_feature: MA Experiment 20001557 PARAMETER Experiment Name: At_Drought_Soil_Dry_P Parameter: Timepoint (day) Value: 13
  misc_feature: MA Experiment 20001557 PARAMETER Experiment Name: At_Drought_Soil_Dry_P Parameter: Treatment Value: Drought vs. No Drought
  misc_feature: MA Experiment ID: 20001558 Result: Up-regulated in Transcription
  misc_feature: MA Experiment 20001558 PARAMETER Experiment Name: At_Drought_Soil_Dry_P Parameter: Age (day) Value: 27
  misc_feature: MA Experiment 20001558 PARAMETER Experiment Name: At_Drought_Soil_Dry_P Parameter: Organism Value: A. thaliana
  misc_feature: MA Experiment 20001558 PARAMETER Experiment Name: At_Drought_Soil_Dry_P Parameter: Plant Line Value: WS
  misc_feature: MA Experiment 20001558 PARAMETER Experiment Name: At_Drought_Soil_Dry_P Parameter: Post Timepoint (hr) Value: 6
  misc_feature: MA Experiment 20001558 PARAMETER Experiment Name: At_Drought_Soil_Dry_P Parameter: Post-Treatment Value: Re-Water vs. No Drought
  misc_feature: MA Experiment 20001558 PARAMETER Experiment Name: At_Drought_Soil_Dry_P Parameter: Timepoint (day) Value: 13
  misc_feature: MA Experiment 20001558 PARAMETER Experiment Name: At_Drought_Soil_Dry_P Parameter: Treatment Value: Drought vs. No Drought
  misc_feature: MA Experiment ID: 20001560 Result: Up-regulated in Transcription
  misc_feature: MA Experiment 20001560 PARAMETER Experiment Name: At_Drought_Soil_Dry_P Parameter: Age (day) Value: 28
  misc_feature: MA Experiment 20001560 PARAMETER Experiment Name: At_Drought_Soil_Dry_P Parameter: Organism Value: A. thaliana
  misc_feature: MA Experiment 20001560 PARAMETER Experiment Name: At_Drought_Soil_Dry_P Parameter: Plant Line Value: WS
  misc_feature: MA Experiment 20001560 PARAMETER Experiment Name: At_Drought_Soil_Dry_P Parameter: Post Timepoint (hr) Value: None
  misc_feature: MA Experiment 20001560 PARAMETER Experiment Name: At_Drought_Soil_Dry_P Parameter: Post-Treatment Value: None
  misc_feature: MA Experiment 20001560 PARAMETER Experiment Name: At_Drought_Soil_Dry_P Parameter: Timepoint (day) Value: 14
  misc_feature: MA Experiment 20001560 PARAMETER Experiment Name: At_Drought_Soil_Dry_P Parameter: Treatment Value: Drought vs. No Drought
  misc_feature: MA Experiment ID: 20001910 Result: Down-regulated in Transcription
  misc_feature: MA Experiment 20001910 PARAMETER Experiment Name: At_Drought_Reproduction_P Parameter: Age (day) Value: 37
  misc_feature: MA Experiment 20001910 PARAMETER Experiment Name: At_Drought_Reproduction_P Parameter: Organism Value: A. thaliana
  misc_feature: MA Experiment 20001910 PARAMETER Experiment Name: At_Drought_Reproduction_P Parameter: Plant Line Value: WS
  misc_feature: MA Experiment 20001910 PARAMETER Experiment Name: At_Drought_Reproduction_P Parameter: Timepoint (day) Value: 7
  misc_feature: MA Experiment 20001910 PARAMETER Experiment Name: At_Drought_Reproduction_P Parameter: Tissue Value: Flowers
  misc_feature: MA Experiment 20001910 PARAMETER Experiment Name: At_Drought_Reproduction_P Parameter: Treatment Value: Drought vs. No Drought
  misc_feature: MA Experiment ID: 20001911 Result: Down-regulated in Transcription
  misc_feature: MA Experiment 20001911 PARAMETER Experiment Name: At_Drought_Reproduction_P Parameter: Age (day) Value: 40
  misc_feature: MA Experiment 20001911 PARAMETER Experiment Name: At_Drought_Reproduction_P Parameter: Organism Value: A. thaliana
  misc_feature: MA Experiment 20001911 PARAMETER Experiment Name: At_Drought_Reproduction_P Parameter: Plant Line Value: WS
  misc_feature: MA Experiment 20001911 PARAMETER Experiment Name: At_Drought_Reproduction_P Parameter: Timepoint (day) Value: 10
  misc_feature: MA Experiment 20001911 PARAMETER Experiment Name: At_Drought_Reproduction_P Parameter: Tissue Value: Flowers
  misc_feature: MA Experiment 20001911 PARAMETER Experiment Name: At_Drought_Reproduction_P Parameter: Treatment Value: Drought vs. No Drought
aatctcacatcacaattcacatctcctcgaacaaacaaattataaacccattttccttcataaatttctaaaataaaaccccttaaactttcattcacatcatccaacccccaatgggtcgaatcttgaaccgtaccgtgttaatgactcttctagtcgtaacaatggccggaacagcattctccggtagcttcaacgaagagtttgacttaacttggggtgaacacagaggcaaaatcttcagtggaggaaaaatgttgtcactctcactagaccgggtttccgggtcgggttttaaatccaagaaagaatatttgttcggaagaatcgacatgcagcttaaactcgtcgccggtaactccgctggaaccgtcactgcctactacttgtcatcggaaggaccaacacacgacgagatagactttgagtttcttggtaatgaaacagggaagccttatgttcttcacactaatgtatttgctcaaggcaaaggaaacagagaacaacagttttatctctggtttgatccaaccaagaacttccacacttattctcttgtctggagaccacaacacatcatatttatggtagataatgttccaatcagagtattcaacaatgcagagcaacttggtgttccatttcccaagaaccaaccaatgaagatatactcgagtttatggaatgcagatgattgggctacaagaggtggtttggttaagacagattggtctaaagctcctttcacagcttactacagaggctttaacgctgcagcttgtactgtttcttcagggtcatctttctgtgatcctaagtttaagagttcttttactaatggtgaatctcaagtggctaatgagcttaatgcttatgggataagaagattaagatgggttcagaagtattttatgatttatgattattgttctgatttaaaaaggtttcctcaaggattcccaccagagtgtaggaagtctagagtctaaaaaccaatgattctctctttgttgttgtttagtgcaaattaaattctctttgttgtttctttaataaattgatttgatttttcttcg

SEQ ID NO: 28528 - protein, 291 aa, Arabidopsis thaliana
  peptide (1)..(291): Ceres Seq. ID no. 12421107
  misc_feature (27)..(208): Pfam Name: Glycosyl hydrolases family 16 Pfam Description: Glycosyl hydrolases family 16
  misc_feature (9)..(286): Homolog of NCBI NO: 22947852 NR Description: xyloglucan endotransglycosylase [Malus x
  misc_feature (9)..(287): Homolog of NCBI NO: 8886865 NR Description: xyloglucan endotransglycosylase XET1 [Asparagus
  misc_feature (8)..(286): Homolog of NCBI NO: 8886867 NR Description: xyloglucan endotransglycosylase XET2 [Asparagus
  misc_feature (9)..(288): Homolog of NCBI NO: 543905 NR Description: Brassinosteroid-regulated protein BRU1 precursor
  misc_feature (8)..(291): Homolog of NCBI NO: 15236412 NR Description: xyloglucan endotransglycosylase (XTR7)
  misc_feature (8)..(291): Homolog of NCBI NO: 38605153 NR Description: Probable xyloglucan
  misc_feature (1)..(291): Homolog of NCBI NO: 18403867 NR Description: xyloglucan endotransglycosylase, putative
  misc_feature (1)..(291): Homolog of NCBI NO: 21536689 NR Description: xyloglucan endotransglycosylase, putative
MGRILNRTVLMTLLVVTMAGTAFSGSFNEEFDLTWGEHRGKIFSGGKMLSLSLDRVSGSGFKSKKEYLFGRIDMQLKLVAGNSAGTVTAYYLSSEGPTHDEIDFEFLGNETGKPYVLHTNVFAQGKGNREQQFYLWFDPTKNFHTYSLVWRPQHIIFMVDNVPIRVFNNAEQLGVPFPKNQPMKIYSSLWNADDWATRGGLVKTDWSKAPFTAYYRGFNAAACTVSSGSSFCDPKFKSSFTNGESQVANELNAYGIRRLRWVQKYFMIYDYCSDLKRFPQGFPPECRKSRV

SEQ ID NO: 28529 - protein, 281 aa, Arabidopsis thaliana
  peptide (1)..(281): Ceres Seq. ID no. 12421108
  misc_feature (17)..(198): Pfam Name: Glycosyl hydrolases family 16 Pfam Description: Glycosyl hydrolases family 16
  misc_feature (1)..(276): Homolog of NCBI NO: 22947852 NR Description: xyloglucan endotransglycosylase [Malus x
  misc_feature (1)..(277): Homolog of NCBI NO: 8886865 NR Description: xyloglucan endotransglycosylase XET1 [Asparagus
  misc_feature (1)..(276): Homolog of NCBI NO: 8886867 NR Description: xyloglucan endotransglycosylase XET2 [Asparagus
  misc_feature (1)..(278): Homolog of NCBI NO: 543905 NR Description: Brassinosteroid-regulated protein BRU1 precursor
  misc_feature (1)..(281): Homolog of NCBI NO: 15236412 NR Description: xyloglucan endotransglycosylase (XTR7)
  misc_feature (1)..(281): Homolog of NCBI NO: 38605153 NR Description: Probable xyloglucan
  misc_feature (1)..(281): Homolog of NCBI NO: 18403867 NR Description: xyloglucan endotransglycosylase, putative
  misc_feature (1)..(281): Homolog of NCBI NO: 21536689 NR Description: xyloglucan endotransglycosylase, putative
MTLLVVTMAGTAFSGSFNEEFDLTWGEHRGKIFSGGKMLSLSLDRVSGSGFKSKKEYLFGRIDMQLKLVAGNSAGTVTAYYLSSEGPTHDEIDFEFLGNETGKPYVLHTNVFAQGKGNREQQFYLWFDPTKNFHTYSLVWRPQHIIFMVDNVPIRVFNNAEQLGVPFPKNQPMKIYSSLWNADDWATRGGLVKTDWSKAPFTAYYRGFNAAACTVSSGSSFCDPKFKSSFTNGESQVANELNAYGIRRLRWVQKYFMIYDYCSDLKRFPQGFPPECRKSRV

SEQ ID NO: 28530 - protein, 274 aa, Arabidopsis thaliana
  peptide (1)..(274): Ceres Seq. ID no. 12421109
  misc_feature (10)..(191): Pfam Name: Glycosyl hydrolases family 16 Pfam Description: Glycosyl hydrolases family 16
  misc_feature (1)..(269): Homolog of NCBI NO: 22947852 NR Description: xyloglucan endotransglycosylase [Malus x
  misc_feature (1)..(270): Homolog of NCBI NO: 8886865 NR Description: xyloglucan endotransglycosylase XET1 [Asparagus
  misc_feature (1)..(269): Homolog of NCBI NO: 8886867 NR Description: xyloglucan endotransglycosylase XET2 [Asparagus
  misc_feature (1)..(271): Homolog of NCBI NO: 543905 NR Description: Brassinosteroid-regulated protein BRU1 precursor
  misc_feature (1)..(274): Homolog of NCBI NO: 15236412 NR Description: xyloglucan endotransglycosylase (XTR7)
  misc_feature (1)..(274): Homolog of NCBI NO: 38605153 NR Description: Probable xyloglucan
  misc_feature (1)..(274): Homolog of NCBI NO: 18403867 NR Description: xyloglucan endotransglycosylase, putative
  misc_feature (1)..(274): Homolog of NCBI NO: 21536689 NR Description: xyloglucan endotransglycosylase, putative
MAGTAFSGSFNEEFDLTWGEHRGKIFSGGKMLSLSLDRVSGSGFKSKKEYLFGRIDMQLKLVAGNSAGTVTAYYLSSEGPTHDEIDFEFLGNETGKPYVLHTNVFAQGKGNREQQFYLWFDPTKNFHTYSLVWRPQHIIFMVDNVPIRVFNNAEQLGVPFPKNQPMKIYSSLWNADDWATRGGLVKTDWSKAPFTAYYRGFNAAACTVSSGSSFCDPKFKSSFTNGESQVANELNAYGIRRLRWVQKYFMIYDYCSDLKRFPQGFPPECRKSRV

SEQ ID NO: 28531 - DNA, 743 bp, Arabidopsis thaliana
  misc_feature (1)..(743): Ceres Seq. ID no. 12338308
  misc_feature: MA Experiment ID: 108461 Result: Up-regulated in Transcription
  misc_feature: MA Experiment 108461 PARAMETER Experiment Name: At_Germinating_Seeds_cDNA_P Parameter: Age (day) Value: 1 vs. 0
  misc_feature: MA Experiment 108461 PARAMETER Experiment Name: At_Germinating_Seeds_cDNA_P Parameter: Tissue Value: Germinating Seeds
  misc_feature: MA Experiment ID: 108488 Result: Down-regulated in Transcription
  misc_feature: MA Experiment ID: 20000179 Result: Up-regulated in Transcription
  misc_feature: MA Experiment 20000179 PARAMETER Experiment Name: At_Germinating_Seeds_P Parameter: Age (hr) Value: 6 vs. 0
  misc_feature: MA Experiment 20000179 PARAMETER Experiment Name: At_Germinating_Seeds_P Parameter: Tissue Value: Germinating Seeds
  misc_feature: MA Experiment ID: 20000180 Result: Up-regulated in Transcription
  misc_feature: MA Experiment 20000180 PARAMETER Experiment Name: At_Germinating_Seeds_P Parameter: Age (hr) Value: 24 vs. 0
  misc_feature: MA Experiment 20000180 PARAMETER Experiment Name: At_Germinating_Seeds_P Parameter: Tissue Value: Germinating Seeds
  misc_feature: MA Experiment ID: 20000214 Result: Down-regulated in Transcription
  misc_feature: MA Experiment 20000214 PARAMETER Experiment Name: At_4deg_Cold_P Parameter: Timepoint (hr) Value: 6
  misc_feature: MA Experiment ID: 20000224 Result: Up-regulated in Transcription
  misc_feature: MA Experiment ID: 20001558 Result: Down-regulated in Transcription
  misc_feature: MA Experiment 20001558 PARAMETER Experiment Name: At_Drought_Soil_Dry_P Parameter: Age (day) Value: 27
  misc_feature: MA Experiment 20001558 PARAMETER Experiment Name: At_Drought_Soil_Dry_P Parameter: Organism Value: A. thaliana
  misc_feature: MA Experiment 20001558 PARAMETER Experiment Name: At_Drought_Soil_Dry_P Parameter: Plant Line Value: WS
  misc_feature: MA Experiment 20001558 PARAMETER Experiment Name: At_Drought_Soil_Dry_P Parameter: Post Timepoint (hr) Value: 6
  misc_feature: MA Experiment 20001558 PARAMETER Experiment Name: At_Drought_Soil_Dry_P Parameter: Post-Treatment Value: Re-Water vs. No Drought
  misc_feature: MA Experiment 20001558 PARAMETER Experiment Name: At_Drought_Soil_Dry_P Parameter: Timepoint (day) Value: 13
  misc_feature: MA Experiment 20001558 PARAMETER Experiment Name: At_Drought_Soil_Dry_P Parameter: Treatment Value: Drought vs. No Drought
  misc_feature: Phenotype: WHOLE PLANT Other
  misc_feature: Phenotype: INFLORESCENCE Height-Short
  misc_feature: Phenotype: FERTILITY Fertility-Reduced
  misc_feature: Phenotype: FERTILITY Fertility-Reduced
  misc_feature: Phenotype: FERTILITY Fertility-Reduced
aagttgaggcatcgtcatcgtgaaatgtgcagctccggaaataaataatcactaaaataaccagatccgatctactgccccggtttctcgccggaatctccattctgtaaccggcgatcctctttctgttatggaagacgtgaaagggaaggagattattgatgatgctcctattgacaacaaggtttcagatgaaatggagagtgaggaaaatgcgatcaagaaaaagtatggaggattgttgcctaagaagattcctttgatatctaaggaccatgaacgtgcgttttttgactcagctgattgggctttaggcaagcaaaaaggacagaagccgaaagggcctttggaagctctccgcccaaaactgcagccaaccccgcaacagcaaccaagagcaagacgaatggcttattcttcaggcgaaactgaagacactgagattgataacaacgaagctccggatgaccaagcctgcgcatcagctgtggatagtaccaatttaaaggacgatggaggcgcaaaagacaacatcaaatcatgaacaacatatagagatctcttgaggagcgcaaacaaacaacatcacaagtcaatttacagaagaataagcgaccaggtttgctttgcaacggttgtaatatcaagtctcttaccttatcatacttgggactgcaaatctgtatcacttacaaacctcctggcttgaaacgtctattggacgattgcaaatgatttgcttt

SEQ ID NO: 28532 - protein, 137 aa, Arabidopsis thaliana
  peptide (1)..(137): Ceres Seq. ID no. 12338309
  misc_feature (17)..(104): Homolog of NCBI NO: 26453128 NR Description: unknown protein [Arabidopsis thaliana]
  misc_feature (17)..(104): Homolog of NCBI NO: 21592601 NR Description: unknown [Arabidopsis thaliana]
  misc_feature (17)..(104): Homolog of NCBI NO: 18414599 NR Description: Expressed protein
  misc_feature (38)..(99): Homolog of NCBI NO: 10176961 NR Description: gene_id:MHJ24.11~unknown protein [Arabidopsis
  misc_feature (35)..(114): Homolog of NCBI NO: 100536 NR Description: hypothetical protein - swollen duckweed
  misc_feature (35)..(102): Homolog of NCBI NO: 100535 NR Description: hypothetical protein - swollen duckweed
  misc_feature (1)..(99): Homolog of NCBI NO: 18424791 NR Description: expressed protein
  misc_feature (30)..(133): Homolog of NCBI NO: 4164473 NR Description: negatively light-regulated protein [Vernicia
  misc_feature (1)..(102): Homolog of NCBI NO: 34902768 NR Description: unnamed protein product [Oryza sativa (japonica
  misc_feature (1)..(137): Homolog of NCBI NO: 18409295 NR Description: expressed protein
MEDVKGKEIIDDAPIDNKVSDEMESEENAIKKKYGGLLPKKIPLISKDHERAFFDSADWALGKQKGQKPKGPLEALRPKLQPTPQQQPRARRMAYSSGETEDTEIDNNEAPDDQACASAVDSTNLKDDGGAKDNIKS

SEQ ID NO: 28533 - protein, 115 aa, Arabidopsis thaliana
  peptide (1)..(115): Ceres Seq. ID no. 12338310
  misc_feature (1)..(82): Homolog of NCBI NO: 26453128 NR Description: unknown protein [Arabidopsis thaliana]
  misc_feature (1)..(82): Homolog of NCBI NO: 21592601 NR Description: unknown [Arabidopsis thaliana]
  misc_feature (1)..(82): Homolog of NCBI NO: 18414599 NR Description: Expressed protein
  misc_feature (16)..(77): Homolog of NCBI NO: 10176961 NR Description: gene_id:MHJ24.11~unknown protein [Arabidopsis
  misc_feature (13)..(92): Homolog of NCBI NO: 100536 NR Description: hypothetical protein - swollen duckweed
  misc_feature (13)..(80): Homolog of NCBI NO: 100535 NR Description: hypothetical protein - swollen duckweed
  misc_feature (1)..(77): Homolog of NCBI NO: 18424791 NR Description: expressed protein
  misc_feature (8)..(111): Homolog of NCBI NO: 4164473 NR Description: negatively light-regulated protein [Vernicia
  misc_feature (1)..(80): Homolog of NCBI NO: 34902768 NR Description: unnamed protein product [Oryza sativa (japonica
  misc_feature (1)..(115): Homolog of NCBI NO: 18409295 NR Description: expressed protein
MESEENAIKKKYGGLLPKKIPLISKDHERAFFDSADWALGKQKGQKPKGPLEALRPKLQPTPQQQPRARRMAYSSGETEDTEIDNNEAPDDQACASAVDSTNLKDDGGAKDNIKS

SEQ ID NO: 28534 - DNA, 731 bp, Arabidopsis thaliana
  misc_feature (1)..(731): Ceres Seq. ID no. 12333813
  misc_feature: MA Experiment ID: 108434 Result: Up-regulated in Transcription
  misc_feature: MA Experiment 108434 PARAMETER Experiment Name: At_Root_Tips_cDNA_P Parameter: Tissue Value: Root Tips
  misc_feature: MA Experiment ID: 108462 Result: Up-regulated in Transcription
  misc_feature: MA Experiment 108462 PARAMETER Experiment Name: At_Germinating_Seeds_cDNA_P Parameter: Age (day) Value: 2 vs. 0
  misc_feature: MA Experiment 108462 PARAMETER Experiment Name: At_Germinating_Seeds_cDNA_P Parameter: Tissue Value: Germinating Seeds
  misc_feature: MA Experiment ID: 20000111 Result: Down-regulated in Transcription
  misc_feature: MA Experiment 20000111 PARAMETER Experiment Name: At_42deg_Heat_cDNA_P Parameter: Temperature (deg C) Value: 42 vs. 22
  misc_feature: MA Experiment 20000111 PARAMETER Experiment Name: At_42deg_Heat_cDNA_P Parameter: Timepoint (hr) Value: 6
  misc_feature: MA Experiment 20000111 PARAMETER Experiment Name: At_42deg_Heat_cDNA_P Parameter: Tissue Value: Aerial
  misc_feature: MA Experiment ID: 20000113 Result: Down-regulated in Transcription
  misc_feature: MA Experiment 20000113 PARAMETER Experiment Name: At_42deg_Heat_cDNA_P Parameter: Temperature (deg C) Value: 42 vs. 22
  misc_feature: MA Experiment 20000113 PARAMETER Experiment Name: At_42deg_Heat_cDNA_P Parameter: Timepoint (hr) Value: 8
  misc_feature: MA Experiment 20000113 PARAMETER Experiment Name: At_42deg_Heat_cDNA_P Parameter: Tissue Value: Aerial
  misc_feature: MA Experiment ID: 20000171 Result: Down-regulated in Transcription
  misc_feature: MA Experiment 20000171 PARAMETER Experiment Name: At_42deg_Heat_P Parameter: Age (day) Value: 14
  misc_feature: MA Experiment 20000171 PARAMETER Experiment Name: At_42deg_Heat_P Parameter: Organism Value: A. thaliana
  misc_feature: MA Experiment 20000171 PARAMETER Experiment Name: At_42deg_Heat_P Parameter: Plant Line Value: WS
  misc_feature: MA Experiment 20000171 PARAMETER Experiment Name: At_42deg_Heat_P Parameter: Temperature (deg C) Value: 42 vs. 22
  misc_feature: MA Experiment 20000171 PARAMETER Experiment Name: At_42deg_Heat_P Parameter: Timepoint (hr) Value: 1
  misc_feature: MA Experiment 20000171 PARAMETER Experiment Name: At_42deg_Heat_P Parameter: Tissue Value: Aerial
  misc_feature: MA Experiment ID: 20000173 Result: Down-regulated in Transcription
  misc_feature: MA Experiment 20000173 PARAMETER Experiment Name: At_42deg_Heat_P Parameter: Age (day) Value: 14
  misc_feature: MA Experiment 20000173 PARAMETER Experiment Name: At_42deg_Heat_P Parameter: Organism Value: A. thaliana
  misc_feature: MA Experiment 20000173 PARAMETER Experiment Name: At_42deg_Heat_P Parameter: Plant Line Value: WS
  misc_feature: MA Experiment 20000173 PARAMETER Experiment Name: At_42deg_Heat_P Parameter: Temperature (deg C) Value: 42 vs. 22
  misc_feature: MA Experiment 20000173 PARAMETER Experiment Name: At_42deg_Heat_P Parameter: Timepoint (hr) Value: 6
  misc_feature: MA Experiment 20000173 PARAMETER Experiment Name: At_42deg_Heat_P Parameter: Tissue Value: Aerial
  misc_feature: MA Experiment ID: 20000180 Result: Up-regulated in Transcription
  misc_feature: MA Experiment 20000180 PARAMETER Experiment Name: At_Germinating_Seeds_P Parameter: Age (hr) Value: 24 vs. 0
  misc_feature: MA Experiment 20000180 PARAMETER Experiment Name: At_Germinating_Seeds_P Parameter: Tissue Value: Germinating Seeds
  misc_feature: MA Experiment ID: 20000184 Result: Down-regulated in Transcription
  misc_feature: MA Experiment 20000184 PARAMETER Experiment Name: At_Shoots__P Parameter: Age (day) Value: 7
  misc_feature: MA Experiment 20000184 PARAMETER Experiment Name: At_Shoots__P Parameter: Tissue Value: Shoots vs. Whole Plant
  misc_feature: MA Experiment ID: 20000224 Result: Up-regulated in Transcription
  misc_feature: MA Experiment ID: 20000234 Result: Up-regulated in Transcription
  misc_feature: MA Experiment 20000234 PARAMETER Experiment Name: At_Siliques_P Parameter: Age (day) Value: 21
  misc_feature: MA Experiment 20000234 PARAMETER Experiment Name: At_Siliques_P Parameter: Organism Value: A. thaliana
  misc_feature: MA Experiment 20000234 PARAMETER Experiment Name: At_Siliques_P Parameter: Plant Line Value: WS
  misc_feature: MA Experiment 20000234 PARAMETER Experiment Name: At_Siliques_P Parameter: Tissue Value: Less Than 5mm Siliques vs. Whole Plant
  misc_feature: MA Experiment ID: 20000265 Result: Up-regulated in Transcription
  misc_feature: MA Experiment 20000265 PARAMETER Experiment Name: At_Open_Flower_P Parameter: Age (day) Value: 21
  misc_feature: MA Experiment 20000265 PARAMETER Experiment Name: At_Open_Flower_P Parameter: Plant Line Value: WS
  misc_feature: MA Experiment 20000265 PARAMETER Experiment Name: At_Open_Flower_P Parameter: Tissue Value: Closed Flower vs. Whole Plant
  misc_feature: MA Experiment ID: 20000286 Result: Up-regulated in Transcription
  misc_feature: MA Experiment 20000286 PARAMETER Experiment Name: At_Open_Flower_P Parameter: Age (day) Value: 21
  misc_feature: MA Experiment 20000286 PARAMETER Experiment Name: At_Open_Flower_P Parameter: Plant Line Value: WS
  misc_feature: MA Experiment 20000286 PARAMETER Experiment Name: At_Open_Flower_P Parameter: Tissue Value: Half Open vs. Whole Plant
  misc_feature: MA Experiment ID: 20000794 Result: Up-regulated in Transcription
  misc_feature: MA Experiment 20000794 PARAMETER Experiment Name: At_Petals_P Parameter: Age (day) Value: 23-25 days
  misc_feature: MA Experiment 20000794 PARAMETER Experiment Name: At_Petals_P Parameter: Plant Line Value: WS
  misc_feature: MA Experiment 20000794 PARAMETER Experiment Name: At_Petals_P Parameter: Tissue Value: Petals vs. Whole plant
actttttcaacttactttatcgtgcgtctgtacggaccacaaaaggctctctctttatttctctgtgagatttttttaggatctggagagccaaagatcatggaggaaagccaagaacttgccttgacccagttgagaaaatcggtcgagaaactctcttcttctactgagagtttgttgtttatgcgctagacaaaacaatcgcaagtggcaacaatggcaaagaagttggaggtgagaaattagtagccgttattgatctggcaaacattacatacaagaacctagatgctcgtggattgatcactggctttcaattcttacaatcttactacccggaacgccttgcaaaatgctacattttgcatatgcccggattcttcgtgaccgtttggaaattcgtctgccgttttctagagaaagcaactcaggaaaagattgtgatagttacggatggagaagaacagagaaaattcgaggaggagatcggagcagatgctttaccggaagagtacggtggccgagctaagctcacagcaatccaagatgttcttcttcctcaggctgctccagtaactctaacaaacaataatgtttagctctttatttttggaagcattaacctgaatatttgtaatggtcagaacataactagtggtacatctctaaatttccaaaagaagcaatgaaaacatgagaaagtaatgcgaatatattcaatctggtgactg

SEQ ID NO: 28535 - protein, 76 aa, Arabidopsis thaliana
  peptide (1)..(76): Ceres Seq. ID no. 12333814
  misc_feature (1)..(51): Pfam Name: CRAL/TRIO domain Pfam Description: CRAL/TRIO domain
  misc_feature (1)..(76): Homolog of NCBI NO: 30684014 NR Description: SEC14 cytosolic factor, putative [Arabidopsis
  misc_feature (1)..(75): Homolog of NCBI NO: 25402783 NR Description: protein F10B6.22 [imported] - Arabidopsis
MPGFFVTVWKFVCRFLEKATQEKIVIVTDGEEQRKFEEEIGADALPEEYGGRAKLTAIQDVLLPQAAPVTLTNNNV

SEQ ID NO: 28536 - protein, 63 aa, Arabidopsis thaliana
  peptide (1)..(63): Ceres Seq. ID no. 12333815
  misc_feature (34)..(57): Homolog of NCBI NO: 25402783 NR Description: protein F10B6.22 [imported] - Arabidopsis
TFSTYFIVRLYGPQKALSLFLCEIFLGSGEPKIMEESQELALTQLRKSVEKLSSSTESLLFMR

SEQ ID NO: 28537 - protein, 58 aa, Arabidopsis thaliana
  peptide (1)..(58): Ceres Seq. ID no. 12333816
MLHFAYARILRDRLEIRLPFSRESNSGKDCDSYGWRRTEKIRGGDRSRCFTGRVRWPS

SEQ ID NO: 28538 - DNA, 681 bp, Arabidopsis thaliana
  misc_feature (1)..(681): Ceres Seq. ID no. 12389159
  misc_feature: MA Experiment ID: 108434 Result: Down-regulated in Transcription
  misc_feature: MA Experiment 108434 PARAMETER Experiment Name: At_Root_Tips_cDNA_P Parameter: Tissue Value: Root Tips
  misc_feature: MA Experiment ID: 108462 Result: Down-regulated in Transcription
  misc_feature: MA Experiment 108462 PARAMETER Experiment Name: At_Germinating_Seeds_cDNA_P Parameter: Age (day) Value: 2 vs. 0
  misc_feature: MA Experiment 108462 PARAMETER Experiment Name: At_Germinating_Seeds_cDNA_P Parameter: Tissue Value: Germinating Seeds
  misc_feature: MA Experiment ID: 108463 Result: Down-regulated in Transcription
  misc_feature: MA Experiment 108463 PARAMETER Experiment Name: At_Germinating_Seeds_cDNA_P Parameter: Age (day) Value: 3 vs. 0
  misc_feature: MA Experiment 108463 PARAMETER Experiment Name: At_Germinating_Seeds_cDNA_P Parameter: Tissue Value: Germinating Seeds
  misc_feature: MA Experiment ID: 108561 Result: Up-regulated in Transcription
  misc_feature: MA Experiment 108561 PARAMETER Experiment Name: At_100uM_ABA_cDNA_P Parameter: Timepoint (hr) Value: 6
  misc_feature: MA Experiment 108561 PARAMETER Experiment Name: At_100uM_ABA_cDNA_P Parameter: Tissue Value: Aerial
  misc_feature: MA Experiment 108561 PARAMETER Experiment Name: At_100uM_ABA_cDNA_P Parameter: Treatment Value: 100uM ABA vs. No Treatment
  misc_feature: MA Experiment ID: 108576 Result: Up-regulated in Transcription
  misc_feature: MA Experiment 108576 PARAMETER Experiment Name: At_42deg_Heat_cDNA_P Parameter: Temperature (deg C) Value: 42 vs. 22
  misc_feature: MA Experiment 108576 PARAMETER Experiment Name: At_42deg_Heat_cDNA_P Parameter: Timepoint (hr) Value: 1
  misc_feature: MA Experiment 108576 PARAMETER Experiment Name: At_42deg_Heat_cDNA_P Parameter: Tissue Value: Aerial
  misc_feature: MA Experiment ID: 108595 Result: Up-regulated in Transcription
  misc_feature: MA Experiment 108595 PARAMETER Experiment Name: At_Ler-pi_Ovule_cDNA_P Parameter: Plant Line Value: null
  misc_feature: MA Experiment ID: 20000069 Result: Up-regulated in Transcription
  misc_feature: MA Experiment 20000069 PARAMETER Experiment Name: At_100uM_ABA_Mutants_cDNA_P Parameter: Plant Line Value: CS23
  misc_feature: MA Experiment 20000069 PARAMETER Experiment Name: At_100uM_ABA_Mutants_cDNA_P Parameter: Timepoint (hr) Value: 6
  misc_feature: MA Experiment 20000069 PARAMETER Experiment Name: At_100uM_ABA_Mutants_cDNA_P Parameter: Tissue Value: Aerial
  misc_feature: MA Experiment 20000069 PARAMETER Experiment Name: At_100uM_ABA_Mutants_cDNA_P Parameter: Treatment Value: 100uM ABA vs. No Treatment
  misc_feature: MA Experiment ID: 20000072 Result: Up-regulated in Transcription
  misc_feature: MA Experiment 20000072 PARAMETER Experiment Name: At_100uM_ABA_Mutants_cDNA_P Parameter: Plant Line Value: CS8105
  misc_feature: MA Experiment 20000072 PARAMETER Experiment Name: At_100uM_ABA_Mutants_cDNA_P Parameter: Timepoint (hr) Value: 6
  misc_feature: MA Experiment 20000072 PARAMETER Experiment Name: At_100uM_ABA_Mutants_cDNA_P Parameter: Tissue Value: Aerial
  misc_feature: MA Experiment 20000072 PARAMETER Experiment Name: At_100uM_ABA_Mutants_cDNA_P Parameter: Treatment Value: 100uM ABA vs. No Treatment
  misc_feature: MA Experiment ID: 20000093 Result: Up-regulated in Transcription
  misc_feature: MA Experiment 20000093 PARAMETER Experiment Name: At_42deg_Heat_cDNA_P Parameter: Temperature (deg C) Value: 42 vs. 22
  misc_feature: MA Experiment 20000093 PARAMETER Experiment Name: At_42deg_Heat_cDNA_P Parameter: Timepoint (hr) Value: 0.5
  misc_feature: MA Experiment 20000093 PARAMETER Experiment Name: At_42deg_Heat_cDNA_P Parameter: Tissue Value: Aerial
  misc_feature: MA Experiment ID: 20000111 Result: Up-regulated in Transcription
  misc_feature: MA Experiment 20000111 PARAMETER Experiment Name: At_42deg_Heat_cDNA_P Parameter: Temperature (deg C) Value: 42 vs. 22
  misc_feature: MA Experiment 20000111 PARAMETER Experiment Name: At_42deg_Heat_cDNA_P Parameter: Timepoint (hr) Value: 6
  misc_feature: MA Experiment 20000111 PARAMETER Experiment Name: At_42deg_Heat_cDNA_P Parameter: Tissue Value: Aerial
  misc_feature: MA Experiment ID: 20000112 Result: Up-regulated in Transcription
  misc_feature: MA Experiment 20000112 PARAMETER Experiment Name: At_42deg_Heat_cDNA_P Parameter: Temperature (deg C) Value: 42 vs. 22
  misc_feature: MA Experiment 20000112 PARAMETER Experiment Name: At_42deg_Heat_cDNA_P Parameter: Timepoint (hr) Value: 2
  misc_feature: MA Experiment 20000112 PARAMETER Experiment Name: At_42deg_Heat_cDNA_P Parameter: Tissue Value: Aerial
  misc_feature: MA Experiment ID: 20000113 Result: Up-regulated in Transcription
  misc_feature: MA Experiment 20000113 PARAMETER Experiment Name: At_42deg_Heat_cDNA_P Parameter: Temperature (deg C) Value: 42 vs. 22
  misc_feature: MA Experiment 20000113 PARAMETER Experiment Name: At_42deg_Heat_cDNA_P Parameter: Timepoint (hr) Value: 8
  misc_feature: MA Experiment 20000113 PARAMETER Experiment Name: At_42deg_Heat_cDNA_P Parameter: Tissue Value: Aerial
  misc_feature: MA Experiment ID: 20000144 Result: Up-regulated in Transcription
  misc_feature: MA Experiment 20000144 PARAMETER Experiment Name: At_42deg_Heat_cDNA_P Parameter: Temperature (deg C) Value: 42 vs. 22
  misc_feature: MA Experiment 20000144 PARAMETER Experiment Name: At_42deg_Heat_cDNA_P Parameter: Timepoint (hr) Value: 1
  misc_feature: MA Experiment 20000144 PARAMETER Experiment Name: At_42deg_Heat_cDNA_P Parameter: Tissue Value: Aerial
  misc_feature: MA Experiment ID: 20000314 Result: Up-regulated in Transcription
  misc_feature: MA Experiment 20000314 PARAMETER Experiment Name: At_14day_Shoots-Roots_Sub_P Parameter: Age (day) Value: 14
  misc_feature: MA Experiment 20000314 PARAMETER Experiment Name: At_14day_Shoots-Roots_Sub_P Parameter: Organism Value: A. thaliana
  misc_feature: MA Experiment 20000314 PARAMETER Experiment Name: At_14day_Shoots-Roots_Sub_P Parameter: Plant Line Value: WS
  misc_feature: MA Experiment 20000314 PARAMETER Experiment Name: At_14day_Shoots-Roots_Sub_P Parameter: Tissue Value: Roots vs. Whole Plant
  misc_feature: MA Experiment ID: 20000327 Result: Up-regulated in Transcription
  misc_feature: MA Experiment 20000327 PARAMETER Experiment Name: At_42deg_Heat_Sub_P Parameter: Age (day) Value: 14
  misc_feature: MA Experiment 20000327 PARAMETER Experiment Name: At_42deg_Heat_Sub_P Parameter: Organism Value: A. thaliana
  misc_feature: MA Experiment 20000327 PARAMETER Experiment Name: At_42deg_Heat_Sub_P Parameter: Plant Line Value: WS
  misc_feature: MA Experiment 20000327 PARAMETER Experiment Name: At_42deg_Heat_Sub_P Parameter: Temperature (deg C) Value: 42 vs. 22
  misc_feature: MA Experiment 20000327 PARAMETER Experiment Name: At_42deg_Heat_Sub_P Parameter: Timepoint (hr) Value: 1
  misc_feature: MA Experiment 20000327 PARAMETER Experiment Name: At_42deg_Heat_Sub_P Parameter: Tissue Value: Aerial
  misc_feature: MA Experiment ID: 20000328 Result: Up-regulated in Transcription
  misc_feature: MA Experiment 20000328 PARAMETER Experiment Name: At_42deg_Heat_Sub_P Parameter: Age (day) Value: 14
  misc_feature: MA Experiment 20000328 PARAMETER Experiment Name: At_42deg_Heat_Sub_P Parameter: Organism Value: A. thaliana
  misc_feature: MA Experiment 20000328 PARAMETER Experiment Name: At_42deg_Heat_Sub_P Parameter: Plant Line Value: WS
  misc_feature: MA Experiment 20000328 PARAMETER Experiment Name: At_42deg_Heat_Sub_P Parameter: Temperature (deg C) Value: 42 vs. 22
  misc_feature: MA Experiment 20000328 PARAMETER Experiment Name: At_42deg_Heat_Sub_P Parameter: Timepoint (hr) Value: 6
  misc_feature: MA Experiment 20000328 PARAMETER Experiment Name: At_42deg_Heat_Sub_P Parameter: Tissue Value: Aerial
  misc_feature: MA Experiment ID: 20000329 Result: Down-regulated in Transcription
  misc_feature: MA Experiment 20000329 PARAMETER Experiment Name: At_4deg_Cold_Sub_P Parameter: Age (day) Value: 14
  misc_feature: MA Experiment 20000329 PARAMETER Experiment Name: At_4deg_Cold_Sub_P Parameter: Organism Value: A. thaliana
  misc_feature: MA Experiment 20000329 PARAMETER Experiment Name: At_4deg_Cold_Sub_P Parameter: Plant Line Value: WS
  misc_feature: MA Experiment 20000329 PARAMETER Experiment Name: At_4deg_Cold_Sub_P Parameter: Temperature (deg C) Value: 4 vs. 22
  misc_feature: MA Experiment 20000329 PARAMETER Experiment Name: At_4deg_Cold_Sub_P Parameter: Timepoint (hr) Value: 6
  misc_feature: MA Experiment 20000329 PARAMETER Experiment Name: At_4deg_Cold_Sub_P Parameter: Tissue Value: Aerial
  misc_feature: MA Experiment ID: 20000347 Result: Up-regulated in Transcription
  misc_feature: MA Experiment 20000347 PARAMETER Experiment Name: At_2mM_SA_Sub_P Parameter: Age (day) Value: 14
  misc_feature: MA Experiment 20000347 PARAMETER Experiment Name: At_2mM_SA_Sub_P Parameter: Organism Value: A. thaliana
  misc_feature: MA Experiment 20000347 PARAMETER Experiment Name: At_2mM_SA_Sub_P Parameter: Plant Line Value: WS
  misc_feature: MA Experiment 20000347 PARAMETER Experiment Name: At_2mM_SA_Sub_P Parameter: Timepoint (hr) Value: 6
  misc_feature: MA Experiment 20000347 PARAMETER Experiment Name: At_2mM_SA_Sub_P Parameter: Tissue Value: Aerial
  misc_feature: MA Experiment 20000347 PARAMETER Experiment Name: At_2mM_SA_Sub_P Parameter: Treatment Value: 2mM SA vs. No Treatment
  misc_feature: MA Experiment ID: 20000355 Result: Up-regulated in Transcription
  misc_feature: MA Experiment 20000355 PARAMETER Experiment Name: At_Siliques_Sub_P Parameter: Age (day) Value: 21
  misc_feature: MA Experiment 20000355 PARAMETER Experiment Name: At_Siliques_Sub_P Parameter: Organism Value: A. thaliana
  misc_feature: MA Experiment 20000355 PARAMETER Experiment Name: At_Siliques_Sub_P Parameter: Plant Line Value: WS
  misc_feature: MA Experiment 20000355 PARAMETER Experiment Name: At_Siliques_Sub_P Parameter: Tissue Value: Less Than 5mm Siliques vs. Whole Plant
  misc_feature: MA Experiment ID: 20001807 Result: Down-regulated in Transcription
  misc_feature: MA Experiment 20001807 PARAMETER Experiment Name: At_50mM_NH4NO3_L-to-H_Sub_P Parameter: Timepoint (hr) Value: 6
  misc_feature: MA Experiment 20001807 PARAMETER Experiment Name: At_50mM_NH4NO3_L-to-H_Sub_P Parameter: Tissue Value: Leaf
  misc_feature: MA Experiment 20001807 PARAMETER Experiment Name: At_50mM_NH4NO3_L-to-H_Sub_P Parameter: Treatment Value: 50mM NH4NO3 vs 100mM Mannitol
actcaagtcaaacaaaactcttctattttcctctgtcttcaaaaccacagagatctcttcatggctccaattactgtcggcgatgttgtaccagacggaactatctctttcttcgatgaaaatgatcagcttcagaccgtctccgttcactctatcgccgccggtaaaaaagtcattctctttggtgttcctggtgctttcactcccacatgcagtatgagccatgtgcctggattcattgggaaagcagaggagctgaagtcaaagggtattgatgagatcatttgctttagtgtgaatgatccatttgtgatgaaggcatggggaaaaacatatccagagaacaagcatgtgaagtttgtagcagatgggtctggagaatacacgcatcttcttggacttgagcttgaccttaaggacaagggtcttggtattaggtcaaggagattcgctttgttgcttgataaccttaaggtgactgtagccaatgttgaatctggtggcgagttcacggtttccagcgcagaggatattctcaaggctctttaagaaactttatcgtttcgcttgttgtattgtgaatctaaactgctgtatgtgaagaagagatttctatagcttgatttcaatcaacaagcatgtgtttgacttgcttggcataataaagtatttgataaacgt

SEQ ID NO: 28539 - protein, 182 aa, Arabidopsis thaliana
  peptide (1)..(182): Ceres Seq. ID no. 12389160
  misc_feature (26)..(180): Pfam Name: AhpC/TSA family Pfam Description: AhpC/TSA family
  misc_feature (21)..(182): Homolog of NCBI NO: 30841938 NR Description: thioredoxin peroxidase 1 [Lycopersicon esculentum]
TQVKQNSSIFLCLQNHRDLFMAPITVGDVVPDGTISFFDENDQLQTVSVHSIAAGKKVILFGVPGAFTPTCSMSHVPGFIGKAEELKSKGIDEIICFSVNDPFVMKAWGKTYPENKHVKFVADGSGEYTHLLGLELDLKDKGLGIRSRRFALLLDNLKVTVANVESGGEFTVSSAEDILKAL

SEQ ID NO: 28540 - protein, 162 aa, Arabidopsis thaliana
  peptide (1)..(162): Ceres Seq. ID no. 12389161
  misc_feature (6)..(160): Pfam Name: AhpC/TSA family Pfam Description: AhpC/TSA family
  misc_feature (1)..(162): Homolog of NCBI NO: 30841938 NR Description: thioredoxin peroxidase 1 [Lycopersicon esculentum]
MAPITVGDVVPDGTISFFDENDQLQTVSVHSIAAGKKVILFGVPGAFTPTCSMSHVPGFIGKAEELKSKGIDEIICFSVNDPFVMKAWGKTYPENKHVKFVADGSGEYTHLLGLELDLKDKGLGIRSRRFALLLDNLKVTVANVESGGEFTVSSAEDILKAL

SEQ ID NO: 28541 - protein, 110 aa, Arabidopsis thaliana
  peptide (1)..(110): Ceres Seq. ID no. 12389162
  misc_feature (1)..(108): Pfam Name: AhpC/TSA family Pfam Description: AhpC/TSA family
  misc_feature (1)..(110): Homolog of NCBI NO: 30841938 NR Description: thioredoxin peroxidase 1 [Lycopersicon esculentum]
MSHVPGFIGKAEELKSKGIDEIICFSVNDPFVMKAWGKTYPENKHVKFVADGSGEYTHLLGLELDLKDKGLGIRSRRFALLLDNLKVTVANVESGGEFTVSSAEDILKAL

SEQ ID NO: 28542 - DNA, 1341 bp, Arabidopsis thaliana
  misc_feature (1)..(1341): Ceres Seq. ID no. 12370545
  misc_feature: MA Experiment ID: 20000169 Result: Down-regulated in Transcription
  misc_feature: MA Experiment 20000169 PARAMETER Experiment Name: At_100uM_ABA_P Parameter: Age (day) Value: 14
  misc_feature: MA Experiment 20000169 PARAMETER Experiment Name: At_100uM_ABA_P Parameter: Organism Value: A. thaliana
  misc_feature: MA Experiment 20000169 PARAMETER Experiment Name: At_100uM_ABA_P Parameter: Plant Line Value: WS
  misc_feature: MA Experiment 20000169 PARAMETER Experiment Name: At_100uM_ABA_P Parameter: Timepoint (hr) Value: 6
  misc_feature: MA Experiment 20000169 PARAMETER Experiment Name: At_100uM_ABA_P Parameter: Tissue Value: Aerial
  misc_feature: MA Experiment 20000169 PARAMETER Experiment Name: At_100uM_ABA_P Parameter: Treatment Value: 100uM ABA vs. No Treatment
  misc_feature: MA Experiment ID: 20000185 Result: Down-regulated in Transcription
  misc_feature: MA Experiment 20000185 PARAMETER Experiment Name: At_Roots__P Parameter: Age (day) Value: 7 vs. 21
  misc_feature: MA Experiment 20000185 PARAMETER Experiment Name: At_Roots__P Parameter: Organism Value: A. thaliana
  misc_feature: MA Experiment 20000185 PARAMETER Experiment Name: At_Roots__P Parameter: Tissue Value: Roots vs. Whole Plant
  misc_feature: MA Experiment ID: 20000265 Result: Up-regulated in Transcription
  misc_feature: MA Experiment 20000265 PARAMETER Experiment Name: At_Open_Flower_P Parameter: Age (day) Value: 21
  misc_feature: MA Experiment 20000265 PARAMETER Experiment Name: At_Open_Flower_P Parameter: Plant Line Value: WS
  misc_feature: MA Experiment 20000265 PARAMETER Experiment Name: At_Open_Flower_P Parameter: Tissue Value: Closed Flower vs. Whole Plant
  misc_feature: MA Experiment ID: 20000439 Result: Down-regulated in Transcription
  misc_feature: MA Experiment 20000439 PARAMETER Experiment Name: At_Roots__P Parameter: Age (day) Value: 14 vs. 21
  misc_feature: MA Experiment 20000439 PARAMETER Experiment Name: At_Roots__P Parameter: Organism Value: A. thaliana
  misc_feature: MA Experiment 20000439 PARAMETER Experiment Name: At_Roots__P Parameter: Tissue Value: Roots vs. Whole Plant
  misc_feature: MA Experiment ID: 20000496 Result: Up-regulated in Transcription
  misc_feature: MA Experiment 20000496 PARAMETER Experiment Name: At_Guard_Cells_P Parameter: Harvest Date Value: 7/19/2002
  misc_feature: MA Experiment 20000496 PARAMETER Experiment Name: At_Guard_Cells_P Parameter: Organism Value: Canola
  misc_feature: MA Experiment 20000496 PARAMETER Experiment Name: At_Guard_Cells_P Parameter: Tissue Value: Guard Cells vs. Leaves
  misc_feature: MA Experiment ID: 20001247 Result: Up-regulated in Transcription
  misc_feature: MA Experiment 20001247 PARAMETER Experiment Name: At_Far-red-induction_P Parameter: Age (day) Value: 7
  misc_feature: MA Experiment 20001247 PARAMETER Experiment Name: At_Far-red-induction_P Parameter: Light Value: Far-red vs. White
  misc_feature: MA Experiment 20001247 PARAMETER Experiment Name: At_Far-red-induction_P Parameter: Organism Value: A. thaliana
  misc_feature: MA Experiment 20001247 PARAMETER Experiment Name: At_Far-red-induction_P Parameter: Plant Line Value: Columbia
  misc_feature: MA Experiment 20001247 PARAMETER Experiment Name: At_Far-red-induction_P Parameter: Timepoint (hr) Value: 1
  misc_feature: MA Experiment 20001247 PARAMETER Experiment Name: At_Far-red-induction_P Parameter: Tissue Value: Whole Plant
  misc_feature: MA Experiment ID: 20001451 Result: Up-regulated in Transcription
  misc_feature: MA Experiment 20001451 PARAMETER Experiment Name: At_Far-red-induction_P Parameter: Age (day) Value: 7
  misc_feature: MA Experiment 20001451 PARAMETER Experiment Name: At_Far-red-induction_P Parameter: Light Value: Far-red vs. White
  misc_feature: MA Experiment 20001451 PARAMETER Experiment Name: At_Far-red-induction_P Parameter: Organism Value: A. thaliana
  misc_feature: MA Experiment 20001451 PARAMETER Experiment Name: At_Far-red-induction_P Parameter: Plant Line Value: Columbia
  misc_feature: MA Experiment 20001451 PARAMETER Experiment Name: At_Far-red-induction_P Parameter: Timepoint (hr) Value: 24
  misc_feature: MA Experiment 20001451 PARAMETER Experiment Name: At_Far-red-induction_P Parameter: Tissue Value: Whole Plant
  misc_feature: MA Experiment ID: 20001557 Result: Up-regulated in Transcription
  misc_feature: MA Experiment 20001557 PARAMETER Experiment Name: At_Drought_Soil_Dry_P Parameter: Age (day) Value: 27
  misc_feature: MA Experiment 20001557 PARAMETER Experiment Name: At_Drought_Soil_Dry_P Parameter: Organism Value: A. thaliana
  misc_feature: MA Experiment 20001557 PARAMETER Experiment Name: At_Drought_Soil_Dry_P Parameter: Plant Line Value: WS
  misc_feature: MA Experiment 20001557 PARAMETER Experiment Name: At_Drought_Soil_Dry_P Parameter: Post Timepoint (hr) Value: 3
  misc_feature: MA Experiment 20001557 PARAMETER Experiment Name: At_Drought_Soil_Dry_P Parameter: Post-Treatment Value: Re-Water vs. No Drought
  misc_feature: MA Experiment 20001557 PARAMETER Experiment Name: At_Drought_Soil_Dry_P Parameter: Timepoint (day) Value: 13
  misc_feature: MA Experiment 20001557 PARAMETER Experiment Name: At_Drought_Soil_Dry_P Parameter: Treatment Value: Drought vs. No Drought
  misc_feature: MA Experiment ID: 20001558 Result: Up-regulated in Transcription
  misc_feature: MA Experiment 20001558 PARAMETER Experiment Name: At_Drought_Soil_Dry_P Parameter: Age (day) Value: 27
  misc_feature: MA Experiment 20001558 PARAMETER Experiment Name: At_Drought_Soil_Dry_P Parameter: Organism Value: A. thaliana
  misc_feature: MA Experiment 20001558 PARAMETER Experiment Name: At_Drought_Soil_Dry_P Parameter: Plant Line Value: WS
  misc_feature: MA Experiment 20001558 PARAMETER Experiment Name: At_Drought_Soil_Dry_P Parameter: Post Timepoint (hr) Value: 6
  misc_feature: MA Experiment 20001558 PARAMETER Experiment Name: At_Drought_Soil_Dry_P Parameter: Post-Treatment Value: Re-Water vs. No Drought
  misc_feature: MA Experiment 20001558 PARAMETER Experiment Name: At_Drought_Soil_Dry_P Parameter: Timepoint (day) Value: 13
  misc_feature: MA Experiment 20001558 PARAMETER Experiment Name: At_Drought_Soil_Dry_P Parameter: Treatment Value: Drought vs. No Drought
  misc_feature: MA Experiment ID: 20001560 Result: Up-regulated in Transcription
  misc_feature: MA Experiment 20001560 PARAMETER Experiment Name: At_Drought_Soil_Dry_P Parameter: Age (day) Value: 28
  misc_feature: MA Experiment 20001560 PARAMETER Experiment Name: At_Drought_Soil_Dry_P Parameter: Organism Value: A. thaliana
  misc_feature: MA Experiment 20001560 PARAMETER Experiment Name: At_Drought_Soil_Dry_P Parameter: Plant Line Value: WS
  misc_feature: MA Experiment 20001560 PARAMETER Experiment Name: At_Drought_Soil_Dry_P Parameter: Post Timepoint (hr) Value: None
  misc_feature: MA Experiment 20001560 PARAMETER Experiment Name: At_Drought_Soil_Dry_P Parameter: Post-Treatment Value: None
  misc_feature: MA Experiment 20001560 PARAMETER Experiment Name: At_Drought_Soil_Dry_P Parameter: Timepoint (day) Value: 14
  misc_feature: MA Experiment 20001560 PARAMETER Experiment Name: At_Drought_Soil_Dry_P Parameter: Treatment Value: Drought vs. No Drought
aaatgagtttaaggtcctgcaaaaactgggtttttcctcgtgtacttgttcatcttatctcctctgcataaacttcattgaagaaaaagtcttttttattttgttgatctcttttaattaagatccttttgggtttaatttattaatctccaagaaaaaaaatggatatgagaagccatgaaatgatagagagaagaagagaagacaatggcaacaacaatggtggtgttgttattagtaacatcattagtactaatattgatgataattgcaatggtaataacaacaacactcgtgtctcttgcaactctcaaaccctagatcaccaccaatccaagtctccctcttcgttttccatctccgccgcagctaaacccaccgtaagataccgtgagtgtctaaagaatcatgcggcgagcgtcggcggaagtgttcacgacggatgcggcgagtttatgccgagtggtgaagaaggaacaatcgaagctctcagatgcgctgcttgtgattgtcaccgtaatttccaccggaaagaaatggacggcgttggaagctcggatttgatctctcaccaccgtcatcaccactaccaccataaccaatacggtggaggaggagggagaagacctccgccgccgaatatgatgcttaacccactcatgcttcctccgccaccgaattatcagccgattcaccaccacaagtatggaatgagtcctcccggaggaggaggaatggtgacgccgatgagcgttgcttacggcggtggaggaggaggagctgagtcgtctagtgaagatctgaatctgtacggacaatcaagcggagaaggagctggtgcggcggcgggacaaatggcgttttcgatgtcgtcgtctaagaaaagattcaggacaaagttcacgacggatcagaaggagaggatgatggactttgcggagaagctagggtggaggatgaacaagcaagacgaagaagagcttaagagattctgcggcgagatcggagtgaagagacaagtcttcaaagtttggatgcataacaacaagaacaatgctaagaaaccaccaacaccaacaactactctctaatcagtgatcatatgattaattgagagattatgtaagagattttcttttaatctacttttgttgttgttgtttatttaatgttttccttcttctaggtttttgtagtttgtacgatctttggatcaatcaatggatcttttgtttgcttagttaatgtttttaattttggtttgctttttttttttagtctttttattttattttgttgtcttttacccggatcgtacttgtaatcagcttctgttgcttc

SEQ ID NO: 28543 - protein, 309 aa, Arabidopsis thaliana
  peptide (1)..(309): Ceres Seq. ID no. 12370546
  misc_feature (71)..(130): Pfam Name: ZF-HD protein dimerisation region Pfam Description: ZF-HD protein dimerisation region
  misc_feature (204)..(301): Homolog of NCBI NO: 21554149 NR Description: unknown [Arabidopsis thaliana]
  misc_feature (17)..(128): Homolog of NCBI NO: 21554149 NR Description: unknown [Arabidopsis thaliana]
  misc_feature (58)..(128): Homolog of NCBI NO: 5091602 NR Description: 10A19I.6 [Oryza sativa]
  misc_feature (167)..(298): Homolog of NCBI NO: 5091602 NR Description: 10A19I.6 [Oryza sativa]
  misc_feature (67)..(307): Homolog of NCBI NO: 19387257 NR Description: hypothetical protein [Oryza sativa (japonica
  misc_feature (240)..(305): Homolog of NCBI NO: 15238445 NR Description: hypothetical protein common family; protein id:
  misc_feature (14)..(206): Homolog of NCBI NO: 15238445 NR Description: hypothetical protein common family; protein id:
  misc_feature (235)..(302): Homolog of NCBI NO: 15233925 NR Description: putative protein
  misc_feature (74)..(176): Homolog of NCBI NO: 15233925 NR Description: putative protein
  misc_feature (1)..(309): Homolog of NCBI NO: 18410804 NR Description: expressed protein
MDMRSHEMIERRREDNGNNNGGVVISNIISTNIDDNCNGNNNNTRVSCNSQTLDHHQSKSPSSFSISAAAKPTVRYRECLKNHAASVGGSVHDGCGEFMPSGEEGTIEALRCAACDCHRNFHRKEMDGVGSSDLISHHRHHHYHHNQYGGGGGRRPPPPNMMLNPLMLPPPPNYQPIHHHKYGMSPPGGGGMVTPMSVAYGGGGGGAESSSEDLNLYGQSSGEGAGAAAGQMAFSMSSSKKRFRTKFTTDQKERMMDFAEKLGWRMNKQDEEELKRFCGEIGVKRQVFKVWMHNNKNNAKKPPTPTTTL

SEQ ID NO: 28544 - protein, 307 aa, Arabidopsis thaliana
  peptide (1)..(307): Ceres Seq. ID no. 12370547
  misc_feature (69)..(128): Pfam Name: ZF-HD protein dimerisation region Pfam Description: ZF-HD protein dimerisation region
  misc_feature (202)..(299): Homolog of NCBI NO: 21554149 NR Description: unknown [Arabidopsis thaliana]
  misc_feature (15)..(126): Homolog of NCBI NO: 21554149 NR Description: unknown [Arabidopsis thaliana]
  misc_feature (56)..(126): Homolog of NCBI NO: 5091602 NR Description: 10A19I.6 [Oryza sativa]
  misc_feature (165)..(296): Homolog of NCBI NO: 5091602 NR Description: 10A19I.6 [Oryza sativa]
  misc_feature (65)..(305): Homolog of NCBI NO: 19387257 NR Description: hypothetical protein [Oryza sativa (japonica
  misc_feature (238)..(303): Homolog of NCBI NO: 15238445 NR Description: hypothetical protein common family; protein id:
  misc_feature (12)..(204): Homolog of NCBI NO: 15238445 NR Description: hypothetical protein common family; protein id:
  misc_feature (233)..(300): Homolog of NCBI NO: 15233925 NR Description: putative protein
  misc_feature (72)..(174): Homolog of NCBI NO: 15233925 NR Description: putative protein
  misc_feature (1)..(307): Homolog of NCBI NO: 18410804 NR Description: expressed protein
MRSHEMIERRREDNGNNNGGVVISNIISTNIDDNCNGNNNNTRVSCNSQTLDHHQSKSPSSFSISAAAKPTVRYRECLKNHAASVGGSVHDGCGEFMPSGEEGTIEALRCAACDCHRNFHRKEMDGVGSSDLISHHRHHHYHHNQYGGGGGRRPPPPNMMLNPLMLPPPPNYQPIHHHKYGMSPPGGGGMVTPMSVAYGGGGGGAESSSEDLNLYGQSSGEGAGAAAGQMAFSMSSSKKRFRTKFTTDQKERMMDFAEKLGWRMNKQDEEELKRFCGEIGVKRQVFKVWMHNNKNNAKKPPTPTTTL

SEQ ID NO: 28545 - protein, 302 aa, Arabidopsis thaliana
  peptide (1)..(302): Ceres Seq. ID no. 12370548
  misc_feature (64)..(123): Pfam Name: ZF-HD protein dimerisation region Pfam Description: ZF-HD protein dimerisation region
  misc_feature (197)..(294): Homolog of NCBI NO: 21554149 NR Description: unknown [Arabidopsis thaliana]
  misc_feature (10)..(121): Homolog of NCBI NO: 21554149 NR Description: unknown [Arabidopsis thaliana]
  misc_feature (51)..(121): Homolog of NCBI NO: 5091602 NR Description: 10A19I.6 [Oryza sativa]
  misc_feature (160)..(291): Homolog of NCBI NO: 5091602 NR Description: 10A19I.6 [Oryza sativa]
  misc_feature (60)..(300): Homolog of NCBI NO: 19387257 NR Description: hypothetical protein [Oryza sativa (japonica
  misc_feature (233)..(298): Homolog of NCBI NO: 15238445 NR Description: hypothetical protein common family; protein id:
  misc_feature (7)..(199): Homolog of NCBI NO: 15238445 NR Description: hypothetical protein common family; protein id:
  misc_feature (228)..(295): Homolog of NCBI NO: 15233925 NR Description: putative protein
  misc_feature (67)..(169): Homolog of NCBI NO: 15233925 NR Description: putative protein
  misc_feature (1)..(302): Homolog of NCBI NO: 18410804 NR Description: expressed protein
MIERRREDNGNNNGGVVISNIISTNIDDNCNGNNNNTRVSCNSQTLDHHQSKSPSSFSISAAAKPTVRYRECLKNHAASVGGSVHDGCGEFMPSGEEGTIEALRCAACDCHRNFHRKEMDGVGSSDLISHHRHHHYHHNQYGGGGGRRPPPPNMMLNPLMLPPPPNYQPIHHHKYGMSPPGGGGMVTPMSVAYGGGGGGAESSSEDLNLYGQSSGEGAGAAAGQMAFSMSSSKKRFRTKFTTDQKERMMDFAEKLGWRMNKQDEEELKRFCGEIGVKRQVFKVWMHNNKNNAKKPPTPTTTL

SEQ ID NO: 28546 - DNA, 1094 bp, Arabidopsis thaliana
  misc_feature (1)..(1094): Ceres Seq. ID no. 12333831
  misc_feature: MA Experiment ID: 108433 Result: Down-regulated in Transcription
  misc_feature: MA Experiment 108433 PARAMETER Experiment Name: At_rhl_Mutant2_cDNA_P Parameter: Age (day) Value: 7
  misc_feature: MA Experiment 108433 PARAMETER Experiment Name: At_rhl_Mutant2_cDNA_P Parameter: Organism Value: A. thaliana
  misc_feature: MA Experiment 108433 PARAMETER Experiment Name: At_rhl_Mutant2_cDNA_P Parameter: Plant Line Value: rhl Mutant vs. wt landsburg
  misc_feature: MA Experiment 108433 PARAMETER Experiment Name: At_rhl_Mutant2_cDNA_P Parameter: Tissue Value: Roots
  misc_feature: MA Experiment ID: 108434 Result: Up-regulated in Transcription
  misc_feature: MA Experiment 108434 PARAMETER Experiment Name: At_Root_Tips_cDNA_P Parameter: Tissue Value: Root Tips
  misc_feature: MA Experiment ID: 108435 Result: Up-regulated in Transcription
  misc_feature: MA Experiment 108435 PARAMETER Experiment Name: At_stm_Mutants_cDNA_P Parameter: Plant Line Value: wt Landsburg vs stm
  misc_feature: MA Experiment 108435 PARAMETER Experiment Name: At_stm_Mutants_cDNA_P Parameter: Tissue Value: Shoot Apical Meristem Region
  misc_feature: MA Experiment ID: 108462 Result: Down-regulated in Transcription
  misc_feature: MA Experiment 108462 PARAMETER Experiment Name: At_Germinating_Seeds_cDNA_P Parameter: Age (day) Value: 2 vs. 0
  misc_feature: MA Experiment 108462 PARAMETER Experiment Name: At_Germinating_Seeds_cDNA_P Parameter: Tissue Value: Germinating Seeds
  misc_feature: MA Experiment ID: 108463 Result: Down-regulated in Transcription
  misc_feature: MA Experiment 108463 PARAMETER Experiment Name: At_Germinating_Seeds_cDNA_P Parameter: Age (day) Value: 3 vs. 0
  misc_feature: MA Experiment 108463 PARAMETER Experiment Name: At_Germinating_Seeds_cDNA_P Parameter: Tissue Value: Germinating Seeds
  misc_feature: MA Experiment ID: 108464 Result: Down-regulated in Transcription
  misc_feature: MA Experiment 108464 PARAMETER Experiment Name: At_Germinating_Seeds_cDNA_P Parameter: Age (day) Value: 4 vs. 0
  misc_feature: MA Experiment 108464 PARAMETER Experiment Name: At_Germinating_Seeds_cDNA_P Parameter: Tissue Value: Germinating Seeds
  misc_feature: MA Experiment ID: 20000184 Result: Up-regulated in Transcription
  misc_feature: MA Experiment 20000184 PARAMETER Experiment Name: At_Shoots__P Parameter: Age (day) Value: 7
  misc_feature: MA Experiment 20000184 PARAMETER Experiment Name: At_Shoots__P Parameter: Tissue Value: Shoots vs. Whole Plant
  misc_feature: MA Experiment ID: 20000227 Result: Up-regulated in Transcription
  misc_feature: MA Experiment 20000227 PARAMETER Experiment Name: At_Root-Tips-vs-Tops_P Parameter: Tissue Value: Root Tips vs. Root Tops
  misc_feature: MA Experiment ID: 20000451 Result: Up-regulated in Transcription
  misc_feature: MA Experiment 20000451 PARAMETER Experiment Name: At_CS6879_Shoots-Roots_P Parameter: Age (day) Value: 14
  misc_feature: MA Experiment 20000451 PARAMETER Experiment Name: At_CS6879_Shoots-Roots_P Parameter: Organism Value: A. thaliana
  misc_feature: MA Experiment 20000451 PARAMETER Experiment Name: At_CS6879_Shoots-Roots_P Parameter: Plant Line Value: CS6879 vs. WS
  misc_feature: MA Experiment 20000451 PARAMETER Experiment Name: At_CS6879_Shoots-Roots_P Parameter: Tissue Value: Roots
  misc_feature: MA Experiment ID: 20000794 Result: Down-regulated in Transcription
  misc_feature: MA Experiment 20000794 PARAMETER Experiment Name: At_Petals_P Parameter: Age (day) Value: 23-25 days
  misc_feature: MA Experiment 20000794 PARAMETER Experiment Name: At_Petals_P Parameter: Plant Line Value: WS
  misc_feature: MA Experiment 20000794 PARAMETER Experiment Name: At_Petals_P Parameter: Tissue Value: Petals vs. Whole plant
  misc_feature: MA Experiment ID: 20001557 Result: Up-regulated in Transcription
  misc_feature: MA Experiment 20001557 PARAMETER Experiment Name: At_Drought_Soil_Dry_P Parameter: Age (day) Value: 27
  misc_feature: MA Experiment 20001557 PARAMETER Experiment Name: At_Drought_Soil_Dry_P Parameter: Organism Value: A. thaliana
  misc_feature: MA Experiment 20001557 PARAMETER Experiment Name: At_Drought_Soil_Dry_P Parameter: Plant Line Value: WS
  misc_feature: MA Experiment 20001557 PARAMETER Experiment Name: At_Drought_Soil_Dry_P Parameter: Post Timepoint (hr) Value: 3
  misc_feature: MA Experiment 20001557 PARAMETER Experiment Name: At_Drought_Soil_Dry_P Parameter: Post-Treatment Value: Re-Water vs. No Drought
  misc_feature: MA Experiment 20001557 PARAMETER Experiment Name: At_Drought_Soil_Dry_P Parameter: Timepoint (day) Value: 13
  misc_feature: MA Experiment 20001557 PARAMETER Experiment Name: At_Drought_Soil_Dry_P Parameter: Treatment Value: Drought vs. No Drought
  misc_feature: Phenotype: ROSETTE LEAVES Shape-Oval
  misc_feature: Phenotype: ROSETTE LEAVES Other
  misc_feature: Phenotype: WHOLE PLANT Color-Dark Green
  misc_feature: Phenotype: WHOLE PLANT Color-Dark Green
  misc_feature: Phenotype: WHOLE PLANT Size-Small
  misc_feature: Phenotype: WHOLE PLANT Size-Small
  misc_feature: Phenotype: INFLORESCENCE Height-Short
  misc_feature: Phenotype: INFLORESCENCE Strength-Weak
  misc_feature: Phenotype: ROSETTE LEAVES Shape-Serrate
  misc_feature: Phenotype: INFLORESCENCE Height-Short
  misc_feature: Phenotype: INFLORESCENCE Strength-Strong
  misc_feature: Phenotype: ROSETTE LEAVES Shape-Serrate
  misc_feature: Phenotype: ROSETTE LEAVES Other
  misc_feature: Phenotype: WHOLE PLANT Color-Dark Green
  misc_feature: Phenotype: INFLORESCENCE Height-Short
  misc_feature: Phenotype: INFLORESCENCE Strength-Strong
aactgccaaaactcttcgcttaattctccggcgtatacaagtcgccggcaaaaatgtcgatgtcgaagagctccaagatgcttcagttcataaactacaggatgcgagtaacaatccaagacggaagacagctaatcggaaaattcatggcgttcgatcgccacatgaatcttgttcttggcgactgcgaagagtttcgaaaacttcctccggcgaaaggtaataagaagacgaacgaagaaagagaagagcgtcgtacgcttggtttggttttacttagaggagaagaagtgatttcgatgactgtcgaaggtccaccgccacctgaagaatctcgcgccaaatctggatctgtaaccgctgtggctggtcccggaatcggtcgtgctgctggacgtggagtacctactggtccattggttcaagctcagcctggtttatctggtcctgttcgtggaattggtggacctgctcctggaatgatgcagcctcagatctctagaccaccacagattattcgtcctccgggacaaatgccaccacagcctccttttgctggtcaaggaggtcctcctccaccttatggtatgagaccaccgtatcctggtccaccaccgcctcagtatggtggacagcaaaggccaatgatgattcctccacctggtggtatgatgagaggacctcctccacctcatggtatgcaaggaccgcctccttctcgccctggaatgcctccccccggtggtgctccgatgtttgctccgcctcatcctggcatgccacctgctccgccaaatcaccataatcagcaacattgattaggagtcacttcatctacaacgaaagcaacatccacatgattgagttacccctcggctagtcgtagcgtttttctccgtgaagctcagagaattgatgagttcatattggtgatttctcgtggaaaaagcaactgattttagaaatagtgaacttgtaggagttacaaccttgctccatgaacttgaatgtattacttgtaaaagaggctctcaatggttttgactggcaattcggttctcaacatatattaggctatgttgctggttatgtac

SEQ ID NO: 28547 - protein, 254 aa, Arabidopsis thaliana
  peptide (1)..(254): Ceres Seq. ID no. 12333832
  misc_feature (7)..(85): Pfam Name: LSM domain Pfam Description: LSM domain
  misc_feature (1)..(229): Homolog of NCBI NO: 10720263 NR Description: Small nuclear ribonucleoprotein associated
  misc_feature (1)..(240): Homolog of NCBI NO: 12643865 NR Description: Small nuclear ribonucleoprotein associated
  misc_feature (1)..(229): Homolog of NCBI NO: 38150007 NR Description: small nuclear ribonucleoprotein polypeptide B/B'
  misc_feature (1)..(240): Homolog of NCBI NO: 8099650 NR Description: snRNP-associated protein; SmB [Danio rerio]
  misc_feature (1)..(229): Homolog of NCBI NO: 7208221 NR Description: small nuclear ribonucleoprotein B' [Macropus
  misc_feature (1)..(247): Homolog of NCBI NO: 33146808 NR Description: putative snRNP(small nuclear ribonucleoprotein
  misc_feature (1)..(247): Homolog of NCBI NO: 34900024 NR Description: putative snRNP protein [Oryza sativa (japonica
  misc_feature (1)..(253): Homolog of NCBI NO: 15237095 NR Description: putative snRNP protein
  misc_feature (1)..(254): Homolog of NCBI NO: 21536707 NR Description: putative snRNP protein [Arabidopsis thaliana]
  misc_feature (1)..(254): Homolog of NCBI NO: 15241519 NR Description: putative protein
MSMSKSSKMLQFINYRMRVTIQDGRQLIGKFMAFDRHMNLVLGDCEEFRKLPPAKGNKKTNEEREERRTLGLVLLRGEEVISMTVEGPPPPEESRAKSGSVTAVAGPGIGRAAGRGVPTGPLVQAQPGLSGPVRGIGGPAPGMMQPQISRPPQIIRPPGQMPPQPPFAGQGGPPPPYGMRPPYPGPPPPQYGGQQRPMMIPPPGGMMRGPPPPHGMQGPPPSRPGMPPPGGAPMFAPPHPGMPPAPPNHHNQQH

SEQ ID NO: 28548 - protein, 252 aa, Arabidopsis thaliana
  peptide (1)..(252): Ceres Seq. ID no. 12333833
  misc_feature (5)..(83): Pfam Name: LSM domain Pfam Description: LSM domain
  misc_feature (1)..(227): Homolog of NCBI NO: 10720263 NR Description: Small nuclear ribonucleoprotein associated
  misc_feature (1)..(238): Homolog of NCBI NO: 12643865 NR Description: Small nuclear ribonucleoprotein associated
  misc_feature (1)..(227): Homolog of NCBI NO: 38150007 NR Description: small nuclear ribonucleoprotein polypeptide B/B'
  misc_feature (1)..(238): Homolog of NCBI NO: 8099650 NR Description: snRNP-associated protein; SmB [Danio rerio]
  misc_feature (1)..(227): Homolog of NCBI NO: 7208221 NR Description: small nuclear ribonucleoprotein B' [Macropus
  misc_feature (1)..(245): Homolog of NCBI NO: 33146808 NR Description: putative snRNP(small nuclear ribonucleoprotein
  misc_feature (1)..(245): Homolog of NCBI NO: 34900024 NR Description: putative snRNP protein [Oryza sativa (japonica
  misc_feature (1)..(251): Homolog of NCBI NO: 15237095 NR Description: putative snRNP protein
  misc_feature (1)..(252): Homolog of NCBI NO: 21536707 NR Description: putative snRNP protein [Arabidopsis thaliana]
  misc_feature (1)..(252): Homolog of NCBI NO: 15241519 NR Description: putative protein
MSKSSKMLQFINYRMRVTIQDGRQLIGKFMAFDRHMNLVLGDCEEFRKLPPAKGNKKTNEEREERRTLGLVLLRGEEVISMTVEGPPPPEESRAKSGSVTAVAGPGIGRAAGRGVPTGPLVQAQPGLSGPVRGIGGPAPGMMQPQISRPPQIIRPPGQMPPQPPFAGQGGPPPPYGMRPPYPGPPPPQYGGQQRPMMIPPPGGMMRGPPPPHGMQGPPPSRPGMPPPGGAPMFAPPHPGMPPAPPNHHNQQH

SEQ ID NO: 28549 - protein, 246 aa, Arabidopsis thaliana
  peptide (1)..(246): Ceres Seq. ID no. 12333834
  misc_feature (1)..(77): Pfam Name: LSM domain Pfam Description: LSM domain
  misc_feature (1)..(221): Homolog of NCBI NO: 10720263 NR Description: Small nuclear ribonucleoprotein associated
  misc_feature (1)..(232): Homolog of NCBI NO: 12643865 NR Description: Small nuclear ribonucleoprotein associated
  misc_feature (1)..(221): Homolog of NCBI NO: 38150007 NR Description: small nuclear ribonucleoprotein polypeptide B/B'
  misc_feature (1)..(232): Homolog of NCBI NO: 8099650 NR Description: snRNP-associated protein; SmB [Danio rerio]
  misc_feature (1)..(221): Homolog of NCBI NO: 7208221 NR Description: small nuclear ribonucleoprotein B' [Macropus
  misc_feature (1)..(239): Homolog of NCBI NO: 33146808 NR Description: putative snRNP(small nuclear ribonucleoprotein
  misc_feature (1)..(239): Homolog of NCBI NO: 34900024 NR Description: putative snRNP protein [Oryza sativa (japonica
  misc_feature (1)..(245): Homolog of NCBI NO: 15237095 NR Description: putative snRNP protein
  misc_feature (1)..(246): Homolog of NCBI NO: 21536707 NR Description: putative snRNP protein [Arabidopsis thaliana]
  misc_feature (1)..(246): Homolog of NCBI NO: 15241519 NR Description: putative protein
MLQFINYRMRVTIQDGRQLIGKFMAFDRHMNLVLGDCEEFRKLPPAKGNKKTNEEREERRTLGLVLLRGEEVISMTVEGPPPPEESRAKSGSVTAVAGPGIGRAAGRGVPTGPLVQAQPGLSGPVRGIGGPAPGMMQPQISRPPQIIRPPGQMPPQPPFAGQGGPPPPYGMRPPYPGPPPPQYGGQQRPMMIPPPGGMMRGPPPPHGMQGPPPSRPGMPPPGGAPMFAPPHPGMPPAPPNHHNQQH

SEQ ID NO: 28550 - DNA, 1415 bp, Arabidopsis thaliana
  misc_feature (1)..(1415): Ceres Seq. ID no. 12396906
  misc_feature: MA Experiment ID: 108572 Result: Up-regulated in Transcription
  misc_feature: MA Experiment 108572 PARAMETER Experiment Name: At_Drought_cDNA_P Parameter: Timepoint (hr) Value: 1
  misc_feature: MA Experiment 108572 PARAMETER Experiment Name: At_Drought_cDNA_P Parameter: Tissue Value: Aerial
  misc_feature: MA Experiment 108572 PARAMETER Experiment Name: At_Drought_cDNA_P Parameter: Treatment Value: Drought vs. No Drought
  misc_feature: MA Experiment ID: 108576 Result: Up-regulated in Transcription
  misc_feature: MA Experiment 108576 PARAMETER Experiment Name: At_42deg_Heat_cDNA_P Parameter: Temperature (deg C) Value: 42 vs. 22
  misc_feature: MA Experiment 108576 PARAMETER Experiment Name: At_42deg_Heat_cDNA_P Parameter: Timepoint (hr) Value: 1
  misc_feature: MA Experiment 108576 PARAMETER Experiment Name: At_42deg_Heat_cDNA_P Parameter: Tissue Value: Aerial
  misc_feature: MA Experiment ID: 20000111 Result: Up-regulated in Transcription
  misc_feature: MA Experiment 20000111 PARAMETER Experiment Name: At_42deg_Heat_cDNA_P Parameter: Temperature (deg C) Value: 42 vs. 22
  misc_feature: MA Experiment 20000111 PARAMETER Experiment Name: At_42deg_Heat_cDNA_P Parameter: Timepoint (hr) Value: 6
  misc_feature: MA Experiment 20000111 PARAMETER Experiment Name: At_42deg_Heat_cDNA_P Parameter: Tissue Value: Aerial
gccattaccggggagagagtgaaattagggctgagcgagagagattctgaaataatttcttttacggcggtgaagatgactgagctaacgtcggcgatggacattgacgtagacgaaattcagcctcgcaagccgataaacaagggcaaagacgtcgtcggttttggacctccgccgcagagtaaggcgacgccttgggttgagaagtatcgacctcagtcgcttgatgacgtggctgcacatcgtgacattattgatacgattgataggctgaccaatgagaacaaattgccccatcttctgttgtatggtcctcccggtactggcaaaacatccaccattctagctgttgcccggaaactatatggaccaaagtaccggaatatgattcttgaactgaacgcatcagacgatagaggaatcgatgttgtaaggcagcagattcaagatttcgctagcacgcagagtttctctttaggaaaatcttcggtgaagttggttttgctagatgaagcagatgccatgacaaaagatgctcagtttgccttgcgtagagtgattgagaaatacactaagagtactaggtttgcgctcattggaaaccatgtcaataagatcatcccagctttgcagtcgagatgtactcgatttagatttgcccctcttgatggagttcatatgagtcaacgtcttaaacatgtaatagaagctgaaaggcttgttgtaagtgactgtggtttggcagctcttgtacggctgagcaatggggacatgagaaaagcattgaacattttgcagtcaacgcatatggcgtcaaaggaaattacagaggaagagtcaaagcaaattacagaggaagacgtttacctctgcaccggaaacccattgcccaaggacattgagcagatatctcactggcttctgaataaaccatttgatgagtgctacaaagacgtttcagaaatcaagacgagaaaaggacttgccattgttgatatcgtcaaagagattaccttgtttatttttaaaatcaagatgccttccgctgtcagagttcaactgataaacgatttggcagacattgagtacagattaagttttggttgcaacgacaaactgcagcttggagctatcatttctactttcacacatgcccggtctatcattgttggtgcagcaaagtaaaccatgtttttaccattttggaacccgcagtagctcgccaccttaacaaaccgctagaatgttttatctccgtgatgttttcctgatagtctctgtacattttgtggcgtttgtgaccaataggcttgctttttatttcttatgaagagtttcaatgccaccttgttatcctcttctcatctcctcgaatttgtaactttcaatttcttgatcaaattatgttttaatga

SEQ ID NO: 28551 - protein, 394 aa, Arabidopsis thaliana
  peptide (1)..(394): Ceres Seq. ID no. 12396907
  misc_feature (99)..(222): Pfam Name: ATPase family associated with various cellular Pfam Description: ATPase family associated with various cellular
  misc_feature (46)..(388): Homolog of NCBI NO: 30913228 NR Description: Activator 1 subunit 3 (Replication factor C
  misc_feature (46)..(381): Homolog of NCBI NO: 13431787 NR Description: Activator 1 40 kDa subunit (Replication factor C
  misc_feature (65)..(389): Homolog of NCBI NO: 19921076 NR Description: CG5313-PA [Drosophila melanogaster]
  misc_feature (60)..(372): Homolog of NCBI NO: 34872605 NR Description: similar to replication factor C 5 isoform 1
  misc_feature (72)..(393): Homolog of NCBI NO: 23271821 NR Description: Similar to replication factor C (activator 1) 5,
  misc_feature (60)..(393): Homolog of NCBI NO: 20841441 NR Description: replication factor C (activator 1) 5 [Mus
  misc_feature (65)..(393): Homolog of NCBI NO: 6677723 NR Description: replication factor C (activator 1) 5, 36.5kDa
  misc_feature (56)..(393): Homolog of NCBI NO: 27882432 NR Description: Similar to replication factor C (activator 1) 5
  misc_feature (26)..(393): Homolog of NCBI NO: 10798790 NR Description: replication factor C 36kDa subunit
  misc_feature (26)..(394): Homolog of NCBI NO: 15223967 NR Description: putative replication factor C
AITGERVKLGLSERDSEIISFTAVKMTELTSAMDIDVDEIQPRKPINKGKDVVGFGPPPQSKATPWVEKYRPQSLDDVAAHRDIIDTIDRLTNENKLPHLLLYGPPGTGKTSTILAVARKLYGPKYRNMILELNASDDRGIDVVRQQIQDFASTQSFSLGKSSVKLVLLDEADAMTKDAQFALRRVIEKYTKSTRFALIGNHVNKIIPALQSRCTRFRFAPLDGVHMSQRLKHVIEAERLVVSDCGLAALVRLSNGDMRKALNILQSTHMASKEITEEESKQITEEDVYLCTGNPLPKDIEQISHWLLNKPFDECYKDVSEIKTRKGLAIVDIVKEITLFIFKIKMPSAVRVQLINDLADIEYRLSFGCNDKLQLGAIISTFTHARSIIVGAAK

SEQ ID NO: 28552 - protein, 369 aa, Arabidopsis thaliana
  peptide (1)..(369): Ceres Seq. ID no. 12396908
  misc_feature (74)..(197): Pfam Name: ATPase family associated with various cellular Pfam Description: ATPase family associated with various cellular
  misc_feature (21)..(363): Homolog of NCBI NO: 30913228 NR Description: Activator 1 subunit 3 (Replication factor C
  misc_feature (21)..(356): Homolog of NCBI NO: 13431787 NR Description: Activator 1 40 kDa subunit (Replication factor C
  misc_feature (40)..(364): Homolog of NCBI NO: 19921076 NR Description: CG5313-PA [Drosophila melanogaster]
  misc_feature (35)..(347): Homolog of NCBI NO: 34872605 NR Description: similar to replication factor C 5 isoform 1
  misc_feature (47)..(368): Homolog of NCBI NO: 23271821 NR Description: Similar to replication factor C (activator 1) 5,
  misc_feature (35)..(368): Homolog of NCBI NO: 20841441 NR Description: replication factor C (activator 1) 5 [Mus
  misc_feature (40)..(368): Homolog of NCBI NO: 6677723 NR Description: replication factor C (activator 1) 5, 36.5kDa
  misc_feature (31)..(368): Homolog of NCBI NO: 27882432 NR Description: Similar to replication factor C (activator 1) 5
  misc_feature (1)..(368): Homolog of NCBI NO: 10798790 NR Description: replication factor C 36kDa subunit
  misc_feature (1)..(369): Homolog of NCBI NO: 15223967 NR Description: putative replication factor C
MTELTSAMDIDVDEIQPRKPINKGKDVVGFGPPPQSKATPWVEKYRPQSLDDVAAHRDIIDTIDRLTNENKLPHLLLYGPPGTGKTSTILAVARKLYGPKYRNMILELNASDDRGIDVVRQQIQDFASTQSFSLGKSSVKLVLLDEADAMTKDAQFALRRVIEKYTKSTRFALIGNHVNKIIPALQSRCTRFRFAPLDGVHMSQRLKHVIEAERLVVSDCGLAALVRLSNGDMRKALNILQSTHMASKEITEEESKQITEEDVYLCTGNPLPKDIEQISHWLLNKPFDECYKDVSEIKTRKGLAIVDIVKEITLFIFKIKMPSAVRVQLINDLADIEYRLSFGCNDKLQLGAIISTFTHARSIIVGAAK

SEQ ID NO: 28553 - protein, 362 aa, Arabidopsis thaliana
  peptide (1)..(362): Ceres Seq. ID no. 12396909
  misc_feature (67)..(190): Pfam Name: ATPase family associated with various cellular Pfam Description: ATPase family associated with various cellular
  misc_feature (14)..(356): Homolog of NCBI NO: 30913228 NR Description: Activator 1 subunit 3 (Replication factor C
  misc_feature (14)..(349): Homolog of NCBI NO: 13431787 NR Description: Activator 1 40 kDa subunit (Replication factor C
  misc_feature (33)..(357): Homolog of NCBI NO: 19921076 NR Description: CG5313-PA [Drosophila melanogaster]
  misc_feature (28)..(340): Homolog of NCBI NO: 34872605 NR Description: similar to replication factor C 5 isoform 1
  misc_feature (40)..(361): Homolog of NCBI NO: 23271821 NR Description: Similar to replication factor C (activator 1) 5,
  misc_feature (28)..(361): Homolog of NCBI NO: 20841441 NR Description: replication factor C (activator 1) 5 [Mus
  misc_feature (33)..(361): Homolog of NCBI NO: 6677723 NR Description: replication factor C (activator 1) 5, 36.5kDa
  misc_feature (24)..(361): Homolog of NCBI NO: 27882432 NR Description: Similar to replication factor C (activator 1) 5
  misc_feature (1)..(361): Homolog of NCBI NO: 10798790 NR Description: replication factor C 36kDa subunit
  misc_feature (1)..(362): Homolog of NCBI NO: 15223967 NR Description: putative replication factor C
MDIDVDEIQPRKPINKGKDVVGFGPPPQSKATPWVEKYRPQSLDDVAAHRDIIDTIDRLTNENKLPHLLLYGPPGTGKTSTILAVARKLYGPKYRNMILELNASDDRGIDVVRQQIQDFASTQSFSLGKSSVKLVLLDEADAMTKDAQFALRRVIEKYTKSTRFALIGNHVNKIIPALQSRCTRFRFAPLDGVHMSQRLKHVIEAERLVVSDCGLAALVRLSNGDMRKALNILQSTHMASKEITEEESKQITEEDVYLCTGNPLPKDIEQISHWLLNKPFDECYKDVSEIKTRKGLAIVDIVKEITLFIFKIKMPSAVRVQLINDLADIEYRLSFGCNDKLQLGAIISTFTHARSIIVGAAK

SEQ ID NO: 28554 - DNA, 800 bp, Arabidopsis thaliana
  misc_feature (1)..(800): Ceres Seq. ID no. 12331823
  misc_feature: MA Experiment ID: 108435 Result: Down-regulated in Transcription
  misc_feature: MA Experiment 108435 PARAMETER Experiment Name: At_stm_Mutants_cDNA_P Parameter: Plant Line Value: wt Landsburg vs stm
  misc_feature: MA Experiment 108435 PARAMETER Experiment Name: At_stm_Mutants_cDNA_P Parameter: Tissue Value: Shoot Apical Meristem Region
  misc_feature: MA Experiment ID: 108595 Result: Down-regulated in Transcription
  misc_feature: MA Experiment 108595 PARAMETER Experiment Name: At_Ler-pi_Ovule_cDNA_P Parameter: Plant Line Value: null
  misc_feature: MA Experiment ID: 20000439 Result: Down-regulated in Transcription
  misc_feature: MA Experiment 20000439 PARAMETER Experiment Name: At_Roots__P Parameter: Age (day) Value: 14 vs. 21
  misc_feature: MA Experiment 20000439 PARAMETER Experiment Name: At_Roots__P Parameter: Organism Value: A. thaliana
  misc_feature: MA Experiment 20000439 PARAMETER Experiment Name: At_Roots__P Parameter: Tissue Value: Roots vs. Whole Plant
  misc_feature: MA Experiment ID: 20001905 Result: Down-regulated in Transcription
  misc_feature: MA Experiment 20001905 PARAMETER Experiment Name: At_Drought_Reproduction_P Parameter: Age (day) Value: 40
  misc_feature: MA Experiment 20001905 PARAMETER Experiment Name: At_Drought_Reproduction_P Parameter: Organism Value: A. thaliana
  misc_feature: MA Experiment 20001905 PARAMETER Experiment Name: At_Drought_Reproduction_P Parameter: Plant Line Value: WS
  misc_feature: MA Experiment 20001905 PARAMETER Experiment Name: At_Drought_Reproduction_P Parameter: Timepoint (day) Value: 10
  misc_feature: MA Experiment 20001905 PARAMETER Experiment Name: At_Drought_Reproduction_P Parameter: Tissue Value: Rosettes
  misc_feature: MA Experiment 20001905 PARAMETER Experiment Name: At_Drought_Reproduction_P Parameter: Treatment Value: Drought vs. No Drought
ctacattttctcttccattagtttcgttatctttttattttctctatctatctggatattattttttcacttggggatttggagaaacctctcctctctctatctatagccatggctgctttcacttgtacctctcgtcctccgatttctctccgctccgagaccagaatcgtatcctcatcaccatcggcttcttctctctcttctcggcggatgttcgccgtcttaccggaatcatcaggtttgagaatccgtctttctctctctccggcttcgttgacctcgattcatcaacctagggtttctcgattacgaagagccgtcgtctgtgaagctcaggaaactactaccgatattcaagtggtcaatgactcgacatgggactctctagttcttaaagcaactgggcctgtagttgtcgacttttgggcaccatggtgtggaccttgcaagatgattgatccgcttgtaaacgatctagcacagcattacactgggaagatcaagttctacaaattaaacactgatgaatctcctaatactcccggccagtacggagttagaagcatcccaacgatcatgatctttgtcggtggcgagaagaaggatacaatcataggtgcagtgcccaaaaccacactcacatctagcctcgacaagttcttgccatgaaatatcacttgtggagtctgtaagatctcgtatctctctgtctctcgttcttgttctcattatctctgtaactcattatcactgaacatctagacctggataaataatatgatgtcatgtcttatgtc

SEQ ID NO: 28555 - protein, 186 aa, Arabidopsis thaliana
  peptide (1)..(186): Ceres Seq. ID no. 12331824
  misc_feature (20)..(185): Homolog of NCBI NO: 1351239 NR Description: Thioredoxin M-type, chloroplast precursor (TRX-M)
  misc_feature (20)..(185): Homolog of NCBI NO: 1388088 NR Description: thioredoxin m
  misc_feature (12)..(185): Homolog of NCBI NO: 15594012 NR Description: putative thioredoxin m2 [Pisum sativum]
  misc_feature (21)..(185): Homolog of NCBI NO: 15232567 NR Description: thioredoxin m4
  misc_feature (21)..(185): Homolog of NCBI NO: 6539614 NR Description: thioredoxin m4 [Arabidopsis thaliana]
  misc_feature (1)..(185): Homolog of NCBI NO: 11135407 NR Description: Thioredoxin M-type, chloroplast precursor (TRX-M)
  misc_feature (1)..(185): Homolog of NCBI NO: 30678634 NR Description: thioredoxin M-type 1, chloroplast precursor
  misc_feature (1)..(186): Homolog of NCBI NO: 21618235 NR Description: putative M-type thioredoxin [Arabidopsis thaliana]
  misc_feature (1)..(186): Homolog of NCBI NO: 6539610 NR Description: thioredoxin m2 [Arabidopsis thaliana]
  misc_feature (1)..(186): Homolog of NCBI NO: 15236327 NR Description: putative M-type thioredoxin
MAAFTCTSRPPISLRSETRIVSSSPSASSLSSRRMFAVLPESSGLRIRLSLSPASLTSIHQPRVSRLRRAVVCEAQETTTDIQVVNDSTWDSLVLKATGPVVVDFWAPWCGPCKMIDPLVNDLAQHYTGKIKFYKLNTDESPNTPGQYGVRSIPTIMIFVGGEKKDTIIGAVPKTTLTSSLDKFLP

SEQ ID NO: 28556 - protein, 152 aa, Arabidopsis thaliana
  peptide (1)..(152): Ceres Seq. ID no. 12331825
  misc_feature (1)..(151): Homolog of NCBI NO: 1351239 NR Description: Thioredoxin M-type, chloroplast precursor (TRX-M)
  misc_feature (1)..(151): Homolog of NCBI NO: 1388088 NR Description: thioredoxin m
  misc_feature (1)..(151): Homolog of NCBI NO: 15594012 NR Description: putative thioredoxin m2 [Pisum sativum]
  misc_feature (1)..(151): Homolog of NCBI NO: 15232567 NR Description: thioredoxin m4
  misc_feature (1)..(151): Homolog of NCBI NO: 6539614 NR Description: thioredoxin m4 [Arabidopsis thaliana]
  misc_feature (1)..(151): Homolog of NCBI NO: 11135407 NR Description: Thioredoxin M-type, chloroplast precursor (TRX-M)
  misc_feature (1)..(151): Homolog of NCBI NO: 30678634 NR Description: thioredoxin M-type 1, chloroplast precursor
  misc_feature (1)..(152): Homolog of NCBI NO: 21618235 NR Description: putative M-type thioredoxin [Arabidopsis thaliana]
  misc_feature (1)..(152): Homolog of NCBI NO: 6539610 NR Description: thioredoxin m2 [Arabidopsis thaliana]
  misc_feature (1)..(152): Homolog of NCBI NO: 15236327 NR Description: putative M-type thioredoxin
MFAVLPESSGLRIRLSLSPASLTSIHQPRVSRLRRAVVCEAQETTTDIQVVNDSTWDSLVLKATGPVVVDFWAPWCGPCKMIDPLVNDLAQHYTGKIKFYKLNTDESPNTPGQYGVRSIPTIMIFVGGEKKDTIIGAVPKTTLTSSLDKFLP

SEQ ID NO: 28557 - protein, 98 aa, Arabidopsis thaliana
  peptide (1)..(98): Ceres Seq. ID no. 12331826
TFSLPLVSLSFYFLYLSGYYFFTWGFGETSPLSIYSHGCFHLYLSSSDFSPLRDQNRILITIGFFSLFSADVRRLTGIIRFENPSFSLSGFVDLDSST

SEQ ID NO: 28558 - DNA, 960 bp, Arabidopsis thaliana
  misc_feature (1)..(960): Ceres Seq. ID no. 13488570
  misc_feature: MA Experiment ID: 108462 Result: Down-regulated in Transcription
  misc_feature: MA Experiment 108462 PARAMETER Experiment Name: At_Germinating_Seeds_cDNA_P Parameter: Age (day) Value: 2 vs. 0
  misc_feature: MA Experiment 108462 PARAMETER Experiment Name: At_Germinating_Seeds_cDNA_P Parameter: Tissue Value: Germinating Seeds
  misc_feature: MA Experiment ID: 108463 Result: Down-regulated in Transcription
  misc_feature: MA Experiment 108463 PARAMETER Experiment Name: At_Germinating_Seeds_cDNA_P Parameter: Age (day) Value: 3 vs. 0
  misc_feature: MA Experiment 108463 PARAMETER Experiment Name: At_Germinating_Seeds_cDNA_P Parameter: Tissue Value: Germinating Seeds
  misc_feature: MA Experiment ID: 108464 Result: Down-regulated in Transcription
  misc_feature: MA Experiment 108464 PARAMETER Experiment Name: At_Germinating_Seeds_cDNA_P Parameter: Age (day) Value: 4 vs. 0
  misc_feature: MA Experiment 108464 PARAMETER Experiment Name: At_Germinating_Seeds_cDNA_P Parameter: Tissue Value: Germinating Seeds
  misc_feature: MA Experiment ID: 108561 Result: Down-regulated in Transcription
  misc_feature: MA Experiment 108561 PARAMETER Experiment Name: At_100uM_ABA_cDNA_P Parameter: Timepoint (hr) Value: 6
  misc_feature: MA Experiment 108561 PARAMETER Experiment Name: At_100uM_ABA_cDNA_P Parameter: Tissue Value: Aerial
  misc_feature: MA Experiment 108561 PARAMETER Experiment Name: At_100uM_ABA_cDNA_P Parameter: Treatment Value: 100uM ABA vs. No Treatment
  misc_feature: MA Experiment ID: 108572 Result: Down-regulated in Transcription
  misc_feature: MA Experiment 108572 PARAMETER Experiment Name: At_Drought_cDNA_P Parameter: Timepoint (hr) Value: 1
  misc_feature: MA Experiment 108572 PARAMETER Experiment Name: At_Drought_cDNA_P Parameter: Tissue Value: Aerial
  misc_feature: MA Experiment 108572 PARAMETER Experiment Name: At_Drought_cDNA_P Parameter: Treatment Value: Drought vs. No Drought
  misc_feature: MA Experiment ID: 108573 Result: Down-regulated in Transcription
  misc_feature: MA Experiment 108573 PARAMETER Experiment Name: At_Drought_cDNA_P Parameter: Timepoint (hr) Value: 6
  misc_feature: MA Experiment 108573 PARAMETER Experiment Name: At_Drought_cDNA_P Parameter: Tissue Value: Aerial
  misc_feature: MA Experiment 108573 PARAMETER Experiment Name: At_Drought_cDNA_P Parameter: Treatment Value: Drought vs. No Drought
  misc_feature: MA Experiment ID: 108595 Result: Down-regulated in Transcription
  misc_feature: MA Experiment 108595 PARAMETER Experiment Name: At_Ler-pi_Ovule_cDNA_P Parameter: Plant Line Value: null
  misc_feature: MA Experiment ID: 108605 Result: Down-regulated in Transcription
  misc_feature: MA Experiment 108605 PARAMETER Experiment Name: At_100uM_ABA_cDNA_P Parameter: Timepoint (hr) Value: 6
  misc_feature: MA Experiment 108605 PARAMETER Experiment Name: At_100uM_ABA_cDNA_P Parameter: Tissue Value: Aerial
  misc_feature: MA Experiment 108605 PARAMETER Experiment Name: At_100uM_ABA_cDNA_P Parameter: Treatment Value: 100uM ABA vs. No Treatment
  misc_feature: MA Experiment ID: 108607 Result: Down-regulated in Transcription
  misc_feature: MA Experiment 108607 PARAMETER Experiment Name: At_100uM_ABA_cDNA_P Parameter: Timepoint (hr) Value: 4
  misc_feature: MA Experiment 108607 PARAMETER Experiment Name: At_100uM_ABA_cDNA_P Parameter: Tissue Value: Aerial
  misc_feature: MA Experiment 108607 PARAMETER Experiment Name: At_100uM_ABA_cDNA_P Parameter: Treatment Value: 100uM ABA vs. No Treatment
  misc_feature: MA Experiment ID: 108668 Result: Down-regulated in Transcription
  misc_feature: MA Experiment 108668 PARAMETER Experiment Name: At_2mM_SA_cDNA_P Parameter: Plant Line Value: WS
  misc_feature: MA Experiment 108668 PARAMETER Experiment Name: At_2mM_SA_cDNA_P Parameter: Timepoint (hr) Value: 6
  misc_feature: MA Experiment 108668 PARAMETER Experiment Name: At_2mM_SA_cDNA_P Parameter: Treatment Value: 2mM SA vs. No Treatment
  misc_feature: MA Experiment ID: 20000069 Result: Down-regulated in Transcription
  misc_feature: MA Experiment 20000069 PARAMETER Experiment Name: At_100uM_ABA_Mutants_cDNA_P Parameter: Plant Line Value: CS23
  misc_feature: MA Experiment 20000069 PARAMETER Experiment Name: At_100uM_ABA_Mutants_cDNA_P Parameter: Timepoint (hr) Value: 6
  misc_feature: MA Experiment 20000069 PARAMETER Experiment Name: At_100uM_ABA_Mutants_cDNA_P Parameter: Tissue Value: Aerial
  misc_feature: MA Experiment 20000069 PARAMETER Experiment Name: At_100uM_ABA_Mutants_cDNA_P Parameter: Treatment Value: 100uM ABA vs. No Treatment
  misc_feature: MA Experiment ID: 20000070 Result: Down-regulated in Transcription
  misc_feature: MA Experiment 20000070 PARAMETER Experiment Name: At_100uM_ABA_Mutants_cDNA_P Parameter: Plant Line Value: CS24
  misc_feature: MA Experiment 20000070 PARAMETER Experiment Name: At_100uM_ABA_Mutants_cDNA_P Parameter: Timepoint (hr) Value: 6
  misc_feature: MA Experiment 20000070 PARAMETER Experiment Name: At_100uM_ABA_Mutants_cDNA_P Parameter: Tissue Value: Aerial
  misc_feature: MA Experiment 20000070 PARAMETER Experiment Name: At_100uM_ABA_Mutants_cDNA_P Parameter: Treatment Value: 100uM ABA vs. No Treatment
  misc_feature: MA Experiment ID: 20000071 Result: Down-regulated in Transcription
  misc_feature: MA Experiment 20000071 PARAMETER Experiment Name: At_100uM_ABA_Mutants_cDNA_P Parameter: Plant Line Value: CS8104
  misc_feature: MA Experiment 20000071 PARAMETER Experiment Name: At_100uM_ABA_Mutants_cDNA_P Parameter: Timepoint (hr) Value: 6
  misc_feature: MA Experiment 20000071 PARAMETER Experiment Name: At_100uM_ABA_Mutants_cDNA_P Parameter: Tissue Value: Aerial
  misc_feature: MA Experiment 20000071 PARAMETER Experiment Name: At_100uM_ABA_Mutants_cDNA_P Parameter: Treatment Value: 100uM ABA vs. No Treatment
  misc_feature: MA Experiment ID: 20000117 Result: Down-regulated in Transcription
  misc_feature: MA Experiment 20000117 PARAMETER Experiment Name: At_100uM_ABA_Mutants_cDNA_P Parameter: Plant Line Value: Columbia
  misc_feature: MA Experiment 20000117 PARAMETER Experiment Name: At_100uM_ABA_Mutants_cDNA_P Parameter: Timepoint (hr) Value: 6
  misc_feature: MA Experiment 20000117 PARAMETER Experiment Name: At_100uM_ABA_Mutants_cDNA_P Parameter: Tissue Value: Aerial
  misc_feature: MA Experiment 20000117 PARAMETER Experiment Name: At_100uM_ABA_Mutants_cDNA_P Parameter: Treatment Value: 100uM ABA vs. No Treatment
  misc_feature: MA Experiment ID: 20000169 Result: Down-regulated in Transcription
  misc_feature: MA Experiment 20000169 PARAMETER Experiment Name: At_100uM_ABA_P Parameter: Age (day) Value: 14
  misc_feature: MA Experiment 20000169 PARAMETER Experiment Name: At_100uM_ABA_P Parameter: Organism Value: A. thaliana
  misc_feature: MA Experiment 20000169 PARAMETER Experiment Name: At_100uM_ABA_P Parameter: Plant Line Value: WS
  misc_feature: MA Experiment 20000169 PARAMETER Experiment Name: At_100uM_ABA_P Parameter: Timepoint (hr) Value: 6
  misc_feature: MA Experiment 20000169 PARAMETER Experiment Name: At_100uM_ABA_P Parameter: Tissue Value: Aerial
  misc_feature: MA Experiment 20000169 PARAMETER Experiment Name: At_100uM_ABA_P Parameter: Treatment Value: 100uM ABA vs. No Treatment
  misc_feature: MA Experiment ID: 20000179 Result: Down-regulated in Transcription
  misc_feature: MA Experiment 20000179 PARAMETER Experiment Name: At_Germinating_Seeds_P Parameter: Age (hr) Value: 6 vs. 0
  misc_feature: MA Experiment 20000179 PARAMETER Experiment Name: At_Germinating_Seeds_P Parameter: Tissue Value: Germinating Seeds
  misc_feature: MA Experiment ID: 20000234 Result: Up-regulated in Transcription
  misc_feature: MA Experiment 20000234 PARAMETER Experiment Name: At_Siliques_P Parameter: Age (day) Value: 21
  misc_feature: MA Experiment 20000234 PARAMETER Experiment Name: At_Siliques_P Parameter: Organism Value: A. thaliana
  misc_feature: MA Experiment 20000234 PARAMETER Experiment Name: At_Siliques_P Parameter: Plant Line Value: WS
  misc_feature: MA Experiment 20000234 PARAMETER Experiment Name: At_Siliques_P Parameter: Tissue Value: Less Than 5mm Siliques vs. Whole Plant
  misc_feature: MA Experiment ID: 20000235 Result: Up-regulated in Transcription
  misc_feature: MA Experiment 20000235 PARAMETER Experiment Name: At_Siliques_P Parameter: Age (day) Value: 21
  misc_feature: MA Experiment 20000235 PARAMETER Experiment Name: At_Siliques_P Parameter: Organism Value: A. thaliana
  misc_feature: MA Experiment 20000235 PARAMETER Experiment Name: At_Siliques_P Parameter: Plant Line Value: WS
  misc_feature: MA Experiment 20000235 PARAMETER Experiment Name: At_Siliques_P Parameter: Tissue Value: 5-10mm Siliques vs. Whole Plant
  misc_feature: MA Experiment ID: 20000264 Result: Up-regulated in Transcription
  misc_feature: MA Experiment 20000264 PARAMETER Experiment Name: At_Open_Flower_P Parameter: Age (day) Value: 21
  misc_feature: MA Experiment 20000264 PARAMETER Experiment Name: At_Open_Flower_P Parameter: Plant Line Value: WS
  misc_feature: MA Experiment 20000264 PARAMETER Experiment Name: At_Open_Flower_P Parameter: Tissue Value: Open Flower vs. Whole Plant
  misc_feature: MA Experiment ID: 20000286 Result: Up-regulated in Transcription
  misc_feature: MA Experiment 20000286 PARAMETER Experiment Name: At_Open_Flower_P Parameter: Age (day) Value: 21
  misc_feature: MA Experiment 20000286 PARAMETER Experiment Name: At_Open_Flower_P Parameter: Plant Line Value: WS
  misc_feature: MA Experiment 20000286 PARAMETER Experiment Name: At_Open_Flower_P Parameter: Tissue Value: Half Open vs. Whole Plant
  misc_feature: MA Experiment ID: 20000436 Result: Down-regulated in Transcription
  misc_feature: MA Experiment 20000436 PARAMETER Experiment Name: At_Drought_P Parameter: Age (day) Value: 7
  misc_feature: MA Experiment 20000436 PARAMETER Experiment Name: At_Drought_P Parameter: Organism Value: A. thaliana
  misc_feature: MA Experiment 20000436 PARAMETER Experiment Name: At_Drought_P Parameter: Plant Line Value: WS
  misc_feature: MA Experiment 20000436 PARAMETER Experiment Name: At_Drought_P Parameter: Timepoint (hr) Value: 12
  misc_feature: MA Experiment 20000436 PARAMETER Experiment Name: At_Drought_P Parameter: Tissue Value: Whole Plant
  misc_feature: MA Experiment 20000436 PARAMETER Experiment Name: At_Drought_P Parameter: Treatment Value: Drought vs. No Drought
  misc_feature: MA Experiment ID: 20000437 Result: Down-regulated in Transcription
  misc_feature: MA Experiment 20000437 PARAMETER Experiment Name: At_Drought_P Parameter: Age (day) Value: 8
  misc_feature: MA Experiment 20000437 PARAMETER Experiment Name: At_Drought_P Parameter: Organism Value: A. thaliana
  misc_feature: MA Experiment 20000437 PARAMETER Experiment Name: At_Drought_P Parameter: Plant Line Value: WS
  misc_feature: MA Experiment 20000437 PARAMETER Experiment Name: At_Drought_P Parameter: Timepoint (hr) Value: 24
  misc_feature: MA Experiment 20000437 PARAMETER Experiment Name: At_Drought_P Parameter: Tissue Value: Whole Plant
  misc_feature: MA Experiment 20000437 PARAMETER Experiment Name: At_Drought_P Parameter: Treatment Value: Drought vs. No Drought
  misc_feature: MA Experiment ID: 20000445 Result: Down-regulated in Transcription
  misc_feature: MA Experiment 20000445 PARAMETER Experiment Name: At_100uM_NAA__P Parameter: Age (day) Value: 14
  misc_feature: MA Experiment 20000445 PARAMETER Experiment Name: At_100uM_NAA__P Parameter: Organism Value: A. thaliana
  misc_feature: MA Experiment 20000445 PARAMETER Experiment Name: At_100uM_NAA__P Parameter: Plant Line Value: WS
  misc_feature: MA Experiment 20000445 PARAMETER Experiment Name: At_100uM_NAA__P Parameter: Timepoint (hr) Value: 6
  misc_feature: MA Experiment 20000445 PARAMETER Experiment Name: At_100uM_NAA__P Parameter: Tissue Value: Aerial
  misc_feature: MA Experiment 20000445 PARAMETER Experiment Name: At_100uM_NAA__P Parameter: Treatment Value: 100uM NAA vs. No Treatment
  misc_feature: MA Experiment ID: 20001248 Result: Down-regulated in Transcription
  misc_feature: MA Experiment 20001248 PARAMETER Experiment Name: At_Far-red-induction_P Parameter: Age (day) Value: 7
  misc_feature: MA Experiment 20001248 PARAMETER Experiment Name: At_Far-red-induction_P Parameter: Light Value: Far-red vs. White
  misc_feature: MA Experiment 20001248 PARAMETER Experiment Name: At_Far-red-induction_P Parameter: Organism Value: A. thaliana
  misc_feature: MA Experiment 20001248 PARAMETER Experiment Name: At_Far-red-induction_P Parameter: Plant Line Value: Columbia
  misc_feature: MA Experiment 20001248 PARAMETER Experiment Name: At_Far-red-induction_P Parameter: Timepoint (hr) Value: 4
  misc_feature: MA Experiment 20001248 PARAMETER Experiment Name: At_Far-red-induction_P Parameter: Tissue Value: Whole Plant
  misc_feature: MA Experiment ID: 20001451 Result: Down-regulated in Transcription
  misc_feature: MA Experiment 20001451 PARAMETER Experiment Name: At_Far-red-induction_P Parameter: Age (day) Value: 7
  misc_feature: MA Experiment 20001451 PARAMETER Experiment Name: At_Far-red-induction_P Parameter: Light Value: Far-red vs. White
  misc_feature: MA Experiment 20001451 PARAMETER Experiment Name: At_Far-red-induction_P Parameter: Organism Value: A. thaliana
  misc_feature: MA Experiment 20001451 PARAMETER Experiment Name: At_Far-red-induction_P Parameter: Plant Line Value: Columbia
  misc_feature: MA Experiment 20001451 PARAMETER Experiment Name: At_Far-red-induction_P Parameter: Timepoint (hr) Value: 24
  misc_feature: MA Experiment 20001451 PARAMETER Experiment Name: At_Far-red-induction_P Parameter: Tissue Value: Whole Plant
  misc_feature: MA Experiment ID: 20001558 Result: Up-regulated in Transcription
  misc_feature: MA Experiment 20001558 PARAMETER Experiment Name: At_Drought_Soil_Dry_P Parameter: Age (day) Value: 27
  misc_feature: MA Experiment 20001558 PARAMETER Experiment Name: At_Drought_Soil_Dry_P Parameter: Organism Value: A. thaliana
  misc_feature: MA Experiment 20001558 PARAMETER Experiment Name: At_Drought_Soil_Dry_P Parameter: Plant Line Value: WS
  misc_feature: MA Experiment 20001558 PARAMETER Experiment Name: At_Drought_Soil_Dry_P Parameter: Post Timepoint (hr) Value: 6
  misc_feature: MA Experiment 20001558 PARAMETER Experiment Name: At_Drought_Soil_Dry_P Parameter: Post-Treatment Value: Re-Water vs. No Drought
  misc_feature: MA Experiment 20001558 PARAMETER Experiment Name: At_Drought_Soil_Dry_P Parameter: Timepoint (day) Value: 13
  misc_feature: MA Experiment 20001558 PARAMETER Experiment Name: At_Drought_Soil_Dry_P Parameter: Treatment Value: Drought vs. No Drought
  misc_feature: MA Experiment ID: 20001757 Result: Up-regulated in Transcription
  misc_feature: MA Experiment 20001757 PARAMETER Experiment Name: At_50mM_NH4NO3_L-to-H_P Parameter: Timepoint (hr) Value: 6
  misc_feature: MA Experiment 20001757 PARAMETER Experiment Name: At_50mM_NH4NO3_L-to-H_P Parameter: Tissue Value: Leaf
  misc_feature: MA Experiment 20001757 PARAMETER Experiment Name: At_50mM_NH4NO3_L-to-H_P Parameter: Treatment Value: 50mM NH4NO3 vs 100mM Mannitol
  misc_feature: MA Experiment ID: 20001905 Result: Down-regulated in Transcription
  misc_feature: MA Experiment 20001905 PARAMETER Experiment Name: At_Drought_Reproduction_P Parameter: Age (day) Value: 40
  misc_feature: MA Experiment 20001905 PARAMETER Experiment Name: At_Drought_Reproduction_P Parameter: Organism Value: A. thaliana
  misc_feature: MA Experiment 20001905 PARAMETER Experiment Name: At_Drought_Reproduction_P Parameter: Plant Line Value: WS
  misc_feature: MA Experiment 20001905 PARAMETER Experiment Name: At_Drought_Reproduction_P Parameter: Timepoint (day) Value: 10
  misc_feature: MA Experiment 20001905 PARAMETER Experiment Name: At_Drought_Reproduction_P Parameter: Tissue Value: Rosettes
  misc_feature: MA Experiment 20001905 PARAMETER Experiment Name: At_Drought_Reproduction_P Parameter: Treatment Value: Drought vs. No Drought
aaattcacactactatcttcttcttcttcgatttagcacagaagctgcagttttatcaatgttctccctttcgtttccatcttcttcttctgcccttttaccttctctcgttgctttcgattcttcgcgtcgtctctctttgcaaccaaagaagttaaatcgtcttcaaagtcacttattttcacctcaacatctctcattctctcagtctaatgtctctcgttacagagcgttttgtgtttcttcaagctctcctccagagggaacagtctccgtagtcgatttccatgagaaagattggtcctttctcgaatctatggaaattgactccactgaacatactcagaagattgagaggatcataaaggctggagaattatccgaatcttcgagggttttggtttcaattagctccgaaacattcgttgatcgtttggtagaatcttcaccttctcagcttttgctcattgtccatgactccctttttacgttagcctgtatcaaagagaagtacgacaaagtcaaatgttggcaaggagaaatgatctatgtcccggagaaatggtctccattagacgctgtgtttctctactttcttccagctttgccttttgacctcgacgaactgttcaagacactctctcaacgttgttcctcaggtgcaagagtagtaatcagtcacccgcaaggtagactaggcttggagcagcaaaggaaagagttttcagatgtggtcgtctctgatttacctgatgagtccacattgagtaatgttgctgagaagcattcatttgagctaacccagtttgttgatgagcaaggcctttatctcgctgttctgaaatcctctaaacaatagtagattatgtcaagagaacatctgttgtatgagattatatttttgcctgttgtgttgtgatgaaatatacagccaacaatggagaaattattcattctgag

SEQ ID NO: 28559 - protein, 285 aa, Arabidopsis thaliana
  peptide (1)..(285): Ceres Seq. ID no. 13488571
  misc_feature (27)..(281): Homolog of NCBI NO: 34902316 NR Description: Unknown protein [Oryza sativa (japonica
  misc_feature (20)..(220): Homolog of NCBI NO: 28207166 NR Description: hypothetical protein [Arabidopsis thaliana]
  misc_feature (20)..(285): Homolog of NCBI NO: 28207164 NR Description: hypothetical protein [Arabidopsis thaliana]
  misc_feature (20)..(285): Homolog of NCBI NO: 15227474 NR Description: expressed protein [Arabidopsis thaliana]
NSHYYLLLLRFSTEAAVLSMFSLSFPSSSSALLPSLVAFDSSRRLSLQPKKLNRLQSHLFSPQHLSFSQSNVSRYRAFCVSSSSPPEGTVSVVDFHEKDWSFLESMEIDSTEHTQKIERIIKAGELSESSRVLVSISSETFVDRLVESSPSQLLLIVHDSLFTLACIKEKYDKVKCWQGEMIYVPEKWSPLDAVFLYFLPALPFDLDELFKTLSQRCSSGARVVISHPQGRLGLEQQRKEFSDVVVSDLPDESTLSNVAEKHSFELTQFVDEQGLYLAVLKSSKQ

SEQ ID NO: 28560 - protein, 266 aa, Arabidopsis thaliana
  peptide (1)..(266): Ceres Seq. ID no. 13488572
  misc_feature (8)..(262): Homolog of NCBI NO: 34902316 NR Description: Unknown protein [Oryza sativa (japonica
  misc_feature (1)..(201): Homolog of NCBI NO: 28207166 NR Description: hypothetical protein [Arabidopsis thaliana]
  misc_feature (1)..(266): Homolog of NCBI NO: 28207164 NR Description: hypothetical protein [Arabidopsis thaliana]
  misc_feature (1)..(266): Homolog of NCBI NO: 15227474 NR Description: expressed protein [Arabidopsis thaliana]
MFSLSFPSSSSALLPSLVAFDSSRRLSLQPKKLNRLQSHLFSPQHLSFSQSNVSRYRAFCVSSSSPPEGTVSVVDFHEKDWSFLESMEIDSTEHTQKIERIIKAGELSESSRVLVSISSETFVDRLVESSPSQLLLIVHDSLFTLACIKEKYDKVKCWQGEMIYVPEKWSPLDAVFLYFLPALPFDLDELFKTLSQRCSSGARVVISHPQGRLGLEQQRKEFSDVVVSDLPDESTLSNVAEKHSFELTQFVDEQGLYLAVLKSSKQ

SEQ ID NO: 28561 - protein, 180 aa, Arabidopsis thaliana
  peptide (1)..(180): Ceres Seq. ID no. 13488573
  misc_feature (1)..(176): Homolog of NCBI NO: 34902316 NR Description: Unknown protein [Oryza sativa (japonica
  misc_feature (1)..(115): Homolog of NCBI NO: 28207166 NR Description: hypothetical protein [Arabidopsis thaliana]
  misc_feature (1)..(180): Homolog of NCBI NO: 28207164 NR Description: hypothetical protein [Arabidopsis thaliana]
  misc_feature (1)..(180): Homolog of NCBI NO: 15227474 NR Description: expressed protein [Arabidopsis thaliana]
MEIDSTEHTQKIERIIKAGELSESSRVLVSISSETFVDRLVESSPSQLLLIVHDSLFTLACIKEKYDKVKCWQGEMIYVPEKWSPLDAVFLYFLPALPFDLDELFKTLSQRCSSGARVVISHPQGRLGLEQQRKEFSDVVVSDLPDESTLSNVAEKHSFELTQFVDEQGLYLAVLKSSKQ

SEQ ID NO: 28562 - DNA, 966 bp, Arabidopsis thaliana
  misc_feature (1)..(966): Ceres Seq. ID no. 12322155
  misc_feature: MA Experiment ID: 108434 Result: Up-regulated in Transcription
  misc_feature: MA Experiment 108434 PARAMETER Experiment Name: At_Root_Tips_cDNA_P Parameter: Tissue Value: Root Tips
  misc_feature: MA Experiment ID: 108462 Result: Down-regulated in Transcription
  misc_feature: MA Experiment 108462 PARAMETER Experiment Name: At_Germinating_Seeds_cDNA_P Parameter: Age (day) Value: 2 vs. 0
  misc_feature: MA Experiment 108462 PARAMETER Experiment Name: At_Germinating_Seeds_cDNA_P Parameter: Tissue Value: Germinating Seeds
  misc_feature: MA Experiment ID: 108463 Result: Down-regulated in Transcription
  misc_feature: MA Experiment 108463 PARAMETER Experiment Name: At_Germinating_Seeds_cDNA_P Parameter: Age (day) Value: 3 vs. 0
  misc_feature: MA Experiment 108463 PARAMETER Experiment Name: At_Germinating_Seeds_cDNA_P Parameter: Tissue Value: Germinating Seeds
agaagaaagagctccgtccccaaaaacaaaggaaacaaaaaatcagtcggcgaaacgggaagagatctatcggaaatcttacggcggcggaagtcatggcgaacatagaatcagaagcagtcgatttcgagccagaggaggatgaccttatggacgaagaaggtacagctattgacggagctgatgtttctccacgcgcgggacatccgaggcttaagtcggctattgccggagctaatggcgaatcagcaaagaagaccaaaggccgtgggtttcgcgaggagaaagattccgatcgtcagcgtcgtctttcctcacgcgatttcgaatcacttggttcagatggccgtcctggtcccagagatccgttgaaggatggattatcttggtctctggagttcatgaggagacacaggaggaggatataaccaatgcttttggtgattttggggagattaagaatctaaatctcaatctcgatcgccgtagtggttatgtcaagggatatgctttgatagaatatgagaagaaggaagaagcacagagcgctatttcagcaatgaatggtgctgagcttctaacacagaatgttagcgttgactgggccttcagcagcggtcccagtggtggtgaatcttacaggagaaagaactcgaggtatgggaggtcgcaacgttcaagaagtccgagaagacgttactgattgtatgatttggtggagagttctccccatatctctctgtattagggattccctctcttatctgtaaggtactgatgcaagacgctgagtgttgaacaaatttttttctggggtttttgtagggtttggctgcttttgcattggtttatctctttatgcatttgcatgggattgttgcgtttaaacaccatgagatctgttttaatgctttgtattggtaaaagaagagaaacattggatgaggaagaatgttttaattttcg

SEQ ID NO: 28563 - protein, 141 aa, Arabidopsis thaliana
  peptide (1)..(141): Ceres Seq. ID no. 12322156
  misc_feature (32)..(141): Homolog of NCBI NO: 15010564 NR Description: At1g51510/F5D21_5 [Arabidopsis thaliana]
  misc_feature (32)..(119): Homolog of NCBI NO: 30524687 NR Description: salt tolerance protein 4 [Beta vulgaris]
  misc_feature (32)..(120): Homolog of NCBI NO: 25405472 NR Description: probable RNA-binding protein 35994-37391
  misc_feature (32)..(120): Homolog of NCBI NO: 21536738 NR Description: RNA-binding protein, putative [Arabidopsis
  misc_feature (32)..(120): Homolog of NCBI NO: 18403559 NR Description: RNA-binding protein, putative
KKELRPQKQRKQKISRRNGKRSIGNLTAAEVMANIESEAVDFEPEEDDLMDEEGTAIDGADVSPRAGHPRLKSAIAGANGESAKKTKGRGFREEKDSDRQRRLSSRDFESLGSDGRPGPRDPLKDGLSWSLEFMRRHRRRI

SEQ ID NO: 28564 - protein, 110 aa, Arabidopsis thaliana
  peptide (1)..(110): Ceres Seq. ID no. 12322157
  misc_feature (1)..(110): Homolog of NCBI NO: 15010564 NR Description: At1g51510/F5D21_5 [Arabidopsis thaliana]
  misc_feature (1)..(88): Homolog of NCBI NO: 30524687 NR Description: salt tolerance protein 4 [Beta vulgaris]
  misc_feature (1)..(89): Homolog of NCBI NO: 25405472 NR Description: probable RNA-binding protein 35994-37391
  misc_feature (1)..(89): Homolog of NCBI NO: 21536738 NR Description: RNA-binding protein, putative [Arabidopsis
  misc_feature (1)..(89): Homolog of NCBI NO: 18403559 NR Description: RNA-binding protein, putative
MANIESEAVDFEPEEDDLMDEEGTAIDGADVSPRAGHPRLKSAIAGANGESAKKTKGRGFREEKDSDRQRRLSSRDFESLGSDGRPGPRDPLKDGLSWSLEFMRRHRRRI

SEQ ID NO: 28565 - protein, 92 aa, Arabidopsis thaliana
  peptide (1)..(92): Ceres Seq. ID no. 12322158
  misc_feature (1)..(92): Homolog of NCBI NO: 15010564 NR Description: At1g51510/F5D21_5 [Arabidopsis thaliana]
  misc_feature (1)..(70): Homolog of NCBI NO: 30524687 NR Description: salt tolerance protein 4 [Beta vulgaris]
  misc_feature (1)..(71): Homolog of NCBI NO: 25405472 NR Description: probable RNA-binding protein 35994-37391
  misc_feature (1)..(71): Homolog of NCBI NO: 21536738 NR Description: RNA-binding protein, putative [Arabidopsis
  misc_feature (1)..(71): Homolog of NCBI NO: 18403559 NR Description: RNA-binding protein, putative
MDEEGTAIDGADVSPRAGHPRLKSAIAGANGESAKKTKGRGFREEKDSDRQRRLSSRDFESLGSDGRPGPRDPLKDGLSWSLEFMRRHRRRI

SEQ ID NO: 28566 - DNA, 822 bp, Arabidopsis thaliana
  misc_feature (1)..(822): Ceres Seq. ID no. 12396880
  misc_feature: MA Experiment ID: 108434 Result: Up-regulated in Transcription
  misc_feature: MA Experiment 108434 PARAMETER Experiment Name: At_Root_Tips_cDNA_P Parameter: Tissue Value: Root Tips
  misc_feature: MA Experiment ID: 108462 Result: Down-regulated in Transcription
  misc_feature: MA Experiment 108462 PARAMETER Experiment Name: At_Germinating_Seeds_cDNA_P Parameter: Age (day) Value: 2 vs. 0
  misc_feature: MA Experiment 108462 PARAMETER Experiment Name: At_Germinating_Seeds_cDNA_P Parameter: Tissue Value: Germinating Seeds
  misc_feature: MA Experiment ID: 108463 Result: Down-regulated in Transcription
  misc_feature: MA Experiment 108463 PARAMETER Experiment Name: At_Germinating_Seeds_cDNA_P Parameter: Age (day) Value: 3 vs. 0
  misc_feature: MA Experiment 108463 PARAMETER Experiment Name: At_Germinating_Seeds_cDNA_P Parameter: Tissue Value: Germinating Seeds
  misc_feature: MA Experiment ID: 108464 Result: Down-regulated in Transcription
  misc_feature: MA Experiment 108464 PARAMETER Experiment Name: At_Germinating_Seeds_cDNA_P Parameter: Age (day) Value: 4 vs. 0
  misc_feature: MA Experiment 108464 PARAMETER Experiment Name: At_Germinating_Seeds_cDNA_P Parameter: Tissue Value: Germinating Seeds
  misc_feature: MA Experiment ID: 108573 Result: Down-regulated in Transcription
  misc_feature: MA Experiment 108573 PARAMETER Experiment Name: At_Drought_cDNA_P Parameter: Timepoint (hr) Value: 6
  misc_feature: MA Experiment 108573 PARAMETER Experiment Name: At_Drought_cDNA_P Parameter: Tissue Value: Aerial
  misc_feature: MA Experiment 108573 PARAMETER Experiment Name: At_Drought_cDNA_P Parameter: Treatment Value: Drought vs. No Drought
  misc_feature: MA Experiment ID: 108605 Result: Down-regulated in Transcription
  misc_feature: MA Experiment 108605 PARAMETER Experiment Name: At_100uM_ABA_cDNA_P Parameter: Timepoint (hr) Value: 6
  misc_feature: MA Experiment 108605 PARAMETER Experiment Name: At_100uM_ABA_cDNA_P Parameter: Tissue Value: Aerial
  misc_feature: MA Experiment 108605 PARAMETER Experiment Name: At_100uM_ABA_cDNA_P Parameter: Treatment Value: 100uM ABA vs. No Treatment
  misc_feature: MA Experiment ID: 108609 Result: Down-regulated in Transcription
  misc_feature: MA Experiment 108609 PARAMETER Experiment Name: At_100uM_ABA_cDNA_P Parameter: Timepoint (hr) Value: 24
  misc_feature: MA Experiment 108609 PARAMETER Experiment Name: At_100uM_ABA_cDNA_P Parameter: Tissue Value: Aerial
  misc_feature: MA Experiment 108609 PARAMETER Experiment Name: At_100uM_ABA_cDNA_P Parameter: Treatment Value: 100uM ABA vs. No Treatment
  misc_feature: MA Experiment ID: 20000090 Result: Up-regulated in Transcription
  misc_feature: MA Experiment ID: 20000113 Result: Up-regulated in Transcription
  misc_feature: MA Experiment 20000113 PARAMETER Experiment Name: At_42deg_Heat_cDNA_P Parameter: Temperature (deg C) Value: 42 vs. 22
  misc_feature: MA Experiment 20000113 PARAMETER Experiment Name: At_42deg_Heat_cDNA_P Parameter: Timepoint (hr) Value: 8
  misc_feature: MA Experiment 20000113 PARAMETER Experiment Name: At_42deg_Heat_cDNA_P Parameter: Tissue Value: Aerial
  misc_feature: MA Experiment ID: 20000173 Result: Up-regulated in Transcription
  misc_feature: MA Experiment 20000173 PARAMETER Experiment Name: At_42deg_Heat_P Parameter: Age (day) Value: 14
  misc_feature: MA Experiment 20000173 PARAMETER Experiment Name: At_42deg_Heat_P Parameter: Organism Value: A. thaliana
  misc_feature: MA Experiment 20000173 PARAMETER Experiment Name: At_42deg_Heat_P Parameter: Plant Line Value: WS
  misc_feature: MA Experiment 20000173 PARAMETER Experiment Name: At_42deg_Heat_P Parameter: Temperature (deg C) Value: 42 vs. 22
  misc_feature: MA Experiment 20000173 PARAMETER Experiment Name: At_42deg_Heat_P Parameter: Timepoint (hr) Value: 6
  misc_feature: MA Experiment 20000173 PARAMETER Experiment Name: At_42deg_Heat_P Parameter: Tissue Value: Aerial
  misc_feature: MA Experiment ID: 20000456 Result: Up-regulated in Transcription
  misc_feature: MA Experiment 20000456 PARAMETER Experiment Name: At_100uM_BA_P Parameter: Age (day) Value: 14
  misc_feature: MA Experiment 20000456 PARAMETER Experiment Name: At_100uM_BA_P Parameter: Organism Value: A. thaliana
  misc_feature: MA Experiment 20000456 PARAMETER Experiment Name: At_100uM_BA_P Parameter: Plant Line Value: WS
  misc_feature: MA Experiment 20000456 PARAMETER Experiment Name: At_100uM_BA_P Parameter: Timepoint (hr) Value: 6
  misc_feature: MA Experiment 20000456 PARAMETER Experiment Name: At_100uM_BA_P Parameter: Tissue Value: Aerial
  misc_feature: MA Experiment 20000456 PARAMETER Experiment Name: At_100uM_BA_P Parameter: Treatment Value: 100uM BA vs. No Treatment
  misc_feature: MA Experiment ID: 20000794 Result: Down-regulated in Transcription
  misc_feature: MA Experiment 20000794 PARAMETER Experiment Name: At_Petals_P Parameter: Age (day) Value: 23-25 days
  misc_feature: MA Experiment 20000794 PARAMETER Experiment Name: At_Petals_P Parameter: Plant Line Value: WS
  misc_feature: MA Experiment 20000794 PARAMETER Experiment Name: At_Petals_P Parameter: Tissue Value: Petals vs. Whole plant
  misc_feature: MA Experiment ID: 20001458 Result: Up-regulated in Transcription
  misc_feature: MA Experiment 20001458 PARAMETER Experiment Name: At_50mM_NH4NO3_L-to-H_P Parameter: Age (day) Value: Undefined
  misc_feature: MA Experiment 20001458 PARAMETER Experiment Name: At_50mM_NH4NO3_L-to-H_P Parameter: Organism Value: Undefined
  misc_feature: MA Experiment 20001458 PARAMETER Experiment Name: At_50mM_NH4NO3_L-to-H_P Parameter: Plant Line Value: Undefined
  misc_feature: MA Experiment 20001458 PARAMETER Experiment Name: At_50mM_NH4NO3_L-to-H_P Parameter: Timepoint (hr) Value: 2
  misc_feature: MA Experiment 20001458 PARAMETER Experiment Name: At_50mM_NH4NO3_L-to-H_P Parameter: Tissue Value: Siliques
  misc_feature: MA Experiment 20001458 PARAMETER Experiment Name: At_50mM_NH4NO3_L-to-H_P Parameter: Treatment Value: 50mM NH4NO3 vs. 100mM Manitol
  misc_feature: MA Experiment ID: 20001557 Result: Up-regulated in Transcription
  misc_feature: MA Experiment 20001557 PARAMETER Experiment Name: At_Drought_Soil_Dry_P Parameter: Age (day) Value: 27
  misc_feature: MA Experiment 20001557 PARAMETER Experiment Name: At_Drought_Soil_Dry_P Parameter: Organism Value: A. thaliana
  misc_feature: MA Experiment 20001557 PARAMETER Experiment Name: At_Drought_Soil_Dry_P Parameter: Plant Line Value: WS
  misc_feature: MA Experiment 20001557 PARAMETER Experiment Name: At_Drought_Soil_Dry_P Parameter: Post Timepoint (hr) Value: 3
  misc_feature: MA Experiment 20001557 PARAMETER Experiment Name: At_Drought_Soil_Dry_P Parameter: Post-Treatment Value: Re-Water vs. No Drought
  misc_feature: MA Experiment 20001557 PARAMETER Experiment Name: At_Drought_Soil_Dry_P Parameter: Timepoint (day) Value: 13
  misc_feature: MA Experiment 20001557 PARAMETER Experiment Name: At_Drought_Soil_Dry_P Parameter: Treatment Value: Drought vs. No Drought
  misc_feature: MA Experiment ID: 20001558 Result: Up-regulated in Transcription
  misc_feature: MA Experiment 20001558 PARAMETER Experiment Name: At_Drought_Soil_Dry_P Parameter: Age (day) Value: 27
  misc_feature: MA Experiment 20001558 PARAMETER Experiment Name: At_Drought_Soil_Dry_P Parameter: Organism Value: A. thaliana
  misc_feature: MA Experiment 20001558 PARAMETER Experiment Name: At_Drought_Soil_Dry_P Parameter: Plant Line Value: WS
  misc_feature: MA Experiment 20001558 PARAMETER Experiment Name: At_Drought_Soil_Dry_P Parameter: Post Timepoint (hr) Value: 6
  misc_feature: MA Experiment 20001558 PARAMETER Experiment Name: At_Drought_Soil_Dry_P Parameter: Post-Treatment Value: Re-Water vs. No Drought
  misc_feature: MA Experiment 20001558 PARAMETER Experiment Name: At_Drought_Soil_Dry_P Parameter: Timepoint (day) Value: 13
  misc_feature: MA Experiment 20001558 PARAMETER Experiment Name: At_Drought_Soil_Dry_P Parameter: Treatment Value: Drought vs. No Drought
  misc_feature: MA Experiment ID: 20001757 Result: Up-regulated in Transcription
  misc_feature: MA Experiment 20001757 PARAMETER Experiment Name: At_50mM_NH4NO3_L-to-H_P Parameter: Timepoint (hr) Value: 6
  misc_feature: MA Experiment 20001757 PARAMETER Experiment Name: At_50mM_NH4NO3_L-to-H_P Parameter: Tissue Value: Leaf
  misc_feature: MA Experiment 20001757 PARAMETER Experiment Name: At_50mM_NH4NO3_L-to-H_P Parameter: Treatment Value: 50mM NH4NO3 vs 100mM Mannitol
gtcgctctcaattaaaccctaaaaccctcctcagaagagaggcagagagaaaaaaaacgcagtctttgcggaatctgtgaaaggagaaaagatgagaccaccaatgagaggcggcgggggtttccgtggaaggggaggacgagacggtggtggtggcggtaggttcggtggaggaggcggtagattcggtggaggaggaggacgctttggtggtggaggcggtcgctttggtggttttagagacgaaggtcctcctagcgaagtcgtggaggttgcaactttcgttcatgcttgcgagggagatgctgtgaccaaactctcacaggagaagattcctcattttaacgctccgatctacctagagaacaagactcagattgggaaagtagatgaaatctttggcccaattaatgaatctttgttttctatcaaaatgatggaaggtattgtagccacctcgtattctccaggagataagttcttcatcgacccttacaagcttttgccactcgctcgattccttcctcagccaaagggtcagtcaacgggtggacgtggaggtgcaggtcgtggaagaggtgatagtagaggtcgtggaagaggtggatcatttagtagaggtagaggtgctccaagaggtggtagatttccaccacgcggtggctctcgtggaagctttagaggccgaggaagattttaggttcttctcctgctttataagccttatccaaacttgtaccctttgttttatgaatgactatcgttctcccgtattctcaattttcaagactttggttttatctatggagtaaaaatatttgc

SEQ ID NO: 28567 - protein, 202 aa, Arabidopsis thaliana
  peptide (1)..(202): Ceres Seq. ID no. 12396881
  misc_feature (51)..(152): Pfam Name: Gar1 protein RNA binding region Pfam Description: Gar1 protein RNA binding region
  misc_feature (6)..(200): Homolog of NCBI NO: 28279152 NR Description: Similar to nucleolar protein family A, member 1
  misc_feature (7)..(200): Homolog of NCBI NO: 26344814 NR Description: unnamed protein product [Mus musculus]
  misc_feature (7)..(200): Homolog of NCBI NO: 13384710 NR Description: nucleolar protein family A, member 1
  misc_feature (7)..(200): Homolog of NCBI NO: 28913737 NR Description: Similar to nucleolar protein family A, member 1
  misc_feature (6)..(200): Homolog of NCBI NO: 18256903 NR Description: Similar to nucleolar protein family A, member 1
  misc_feature (7)..(200): Homolog of NCBI NO: 9506713 NR Description: nucleolar protein family A, member 1; GAR1
  misc_feature (1)..(201): Homolog of NCBI NO: 15238764 NR Description: putative protein; protein id: At5g18180.1
  misc_feature (1)..(201): Homolog of NCBI NO: 6006850 NR Description: putative GAR1 protein [Arabidopsis thaliana]
  misc_feature (1)..(202): Homolog of NCBI NO: 21536739 NR Description: putative GAR1 protein [Arabidopsis thaliana]
  misc_feature (1)..(202): Homolog of NCBI NO: 18396707 NR Description: putative GAR1 protein
MRPPMRGGGGFRGRGGRDGGGGGRFGGGGGRFGGGGGRFGGGGGRFGGFRDEGPPSEVVEVATFVHACEGDAVTKLSQEKIPHFNAPIYLENKTQIGKVDEIFGPINESLFSIKMMEGIVATSYSPGDKFFIDPYKLLPLARFLPQPKGQSTGGRGGAGRGRGDSRGRGRGGSFSRGRGAPRGGRFPPRGGSRGSFRGRGRF

SEQ ID NO: 28568 - protein, 198 aa, Arabidopsis thaliana
  peptide (1)..(198): Ceres Seq. ID no. 12396882
  misc_feature (47)..(148): Pfam Name: Gar1 protein RNA binding region Pfam Description: Gar1 protein RNA binding region
  misc_feature (2)..(196): Homolog of NCBI NO: 28279152 NR Description: Similar to nucleolar protein family A, member 1
  misc_feature (3)..(196): Homolog of NCBI NO: 26344814 NR Description: unnamed protein product [Mus musculus]
  misc_feature (3)..(196): Homolog of NCBI NO: 13384710 NR Description: nucleolar protein family A, member 1
  misc_feature (3)..(196): Homolog of NCBI NO: 28913737 NR Description: Similar to nucleolar protein family A, member 1
  misc_feature (2)..(196): Homolog of NCBI NO: 18256903 NR Description: Similar to nucleolar protein family A, member 1
  misc_feature (3)..(196): Homolog of NCBI NO: 9506713 NR Description: nucleolar protein family A, member 1; GAR1
  misc_feature (1)..(197): Homolog of NCBI NO: 15238764 NR Description: putative protein; protein id: At5g18180.1
  misc_feature (1)..(197): Homolog of NCBI NO: 6006850 NR Description: putative GAR1 protein [Arabidopsis thaliana]
  misc_feature (1)..(198): Homolog of NCBI NO: 21536739 NR Description: putative GAR1 protein [Arabidopsis thaliana]
  misc_feature (1)..(198): Homolog of NCBI NO: 18396707 NR Description: putative GAR1 protein
MRGGGGFRGRGGRDGGGGGRFGGGGGRFGGGGGRFGGGGGRFGGFRDEGPPSEVVEVATFVHACEGDAVTKLSQEKIPHFNAPIYLENKTQIGKVDEIFGPINESLFSIKMMEGIVATSYSPGDKFFIDPYKLLPLARFLPQPKGQSTGGRGGAGRGRGDSRGRGRGGSFSRGRGAPRGGRFPPRGGSRGSFRGRGRF

SEQ ID NO: 28569 - DNA, 847 bp, Arabidopsis thaliana
  misc_feature (1)..(847): Ceres Seq. ID no. 13496902
  misc_feature: MA Experiment ID: 108434 Result: Down-regulated in Transcription
  misc_feature: MA Experiment 108434 PARAMETER Experiment Name: At_Root_Tips_cDNA_P Parameter: Tissue Value: Root Tips
  misc_feature: MA Experiment ID: 108461 Result: Up-regulated in Transcription
  misc_feature: MA Experiment 108461 PARAMETER Experiment Name: At_Germinating_Seeds_cDNA_P Parameter: Age (day) Value: 1 vs. 0
  misc_feature: MA Experiment 108461 PARAMETER Experiment Name: At_Germinating_Seeds_cDNA_P Parameter: Tissue Value: Germinating Seeds
  misc_feature: MA Experiment ID: 108462 Result: Up-regulated in Transcription
  misc_feature: MA Experiment 108462 PARAMETER Experiment Name: At_Germinating_Seeds_cDNA_P Parameter: Age (day) Value: 2 vs. 0
  misc_feature: MA Experiment 108462 PARAMETER Experiment Name: At_Germinating_Seeds_cDNA_P Parameter: Tissue Value: Germinating Seeds
  misc_feature: MA Experiment ID: 20000071 Result: Down-regulated in Transcription
  misc_feature: MA Experiment 20000071 PARAMETER Experiment Name: At_100uM_ABA_Mutants_cDNA_P Parameter: Plant Line Value: CS8104
  misc_feature: MA Experiment 20000071 PARAMETER Experiment Name: At_100uM_ABA_Mutants_cDNA_P Parameter: Timepoint (hr) Value: 6
  misc_feature: MA Experiment 20000071 PARAMETER Experiment Name: At_100uM_ABA_Mutants_cDNA_P Parameter: Tissue Value: Aerial
  misc_feature: MA Experiment 20000071 PARAMETER Experiment Name: At_100uM_ABA_Mutants_cDNA_P Parameter: Treatment Value: 100uM ABA vs. No Treatment
  misc_feature: MA Experiment ID: 20000086 Result: Down-regulated in Transcription
  misc_feature: MA Experiment 20000086 PARAMETER Experiment Name: At_100uM_ABA_Mutants_cDNA_P Parameter: Plant Line Value: CS22
  misc_feature: MA Experiment 20000086 PARAMETER Experiment Name: At_100uM_ABA_Mutants_cDNA_P Parameter: Timepoint (hr) Value: 6
  misc_feature: MA Experiment 20000086 PARAMETER Experiment Name: At_100uM_ABA_Mutants_cDNA_P Parameter: Tissue Value: Aerial
  misc_feature: MA Experiment 20000086 PARAMETER Experiment Name: At_100uM_ABA_Mutants_cDNA_P Parameter: Treatment Value: 100uM ABA vs. No Treatment
  misc_feature: MA Experiment ID: 20000089 Result: Down-regulated in Transcription
  misc_feature: MA Experiment ID: 20000090 Result: Down-regulated in Transcription
  misc_feature: MA Experiment ID: 20000117 Result: Down-regulated in Transcription
  misc_feature: MA Experiment 20000117 PARAMETER Experiment Name: At_100uM_ABA_Mutants_cDNA_P Parameter: Plant Line Value: Columbia
  misc_feature: MA Experiment 20000117 PARAMETER Experiment Name: At_100uM_ABA_Mutants_cDNA_P Parameter: Timepoint (hr) Value: 6
  misc_feature: MA Experiment 20000117 PARAMETER Experiment Name: At_100uM_ABA_Mutants_cDNA_P Parameter: Tissue Value: Aerial
  misc_feature: MA Experiment 20000117 PARAMETER Experiment Name: At_100uM_ABA_Mutants_cDNA_P Parameter: Treatment Value: 100uM ABA vs. No Treatment
  misc_feature: MA Experiment ID: 20000185 Result: Down-regulated in Transcription
  misc_feature: MA Experiment 20000185 PARAMETER Experiment Name: At_Roots__P Parameter: Age (day) Value: 7 vs. 21
  misc_feature: MA Experiment 20000185 PARAMETER Experiment Name: At_Roots__P Parameter: Organism Value: A. thaliana
  misc_feature: MA Experiment 20000185 PARAMETER Experiment Name: At_Roots__P Parameter: Tissue Value: Roots vs. Whole Plant
  misc_feature: MA Experiment ID: 20000234 Result: Up-regulated in Transcription
  misc_feature: MA Experiment 20000234 PARAMETER Experiment Name: At_Siliques_P Parameter: Age (day) Value: 21
  misc_feature: MA Experiment 20000234 PARAMETER Experiment Name: At_Siliques_P Parameter: Organism Value: A. thaliana
  misc_feature: MA Experiment 20000234 PARAMETER Experiment Name: At_Siliques_P Parameter: Plant Line Value: WS
  misc_feature: MA Experiment 20000234 PARAMETER Experiment Name: At_Siliques_P Parameter: Tissue Value: Less Than 5mm Siliques vs. Whole Plant
  misc_feature: MA Experiment ID: 20000264 Result: Up-regulated in Transcription
  misc_feature: MA Experiment 20000264 PARAMETER Experiment Name: At_Open_Flower_P Parameter: Age (day) Value: 21
  misc_feature: MA Experiment 20000264 PARAMETER Experiment Name: At_Open_Flower_P Parameter: Plant Line Value: WS
  misc_feature: MA Experiment 20000264 PARAMETER Experiment Name: At_Open_Flower_P Parameter: Tissue Value: Open Flower vs. Whole Plant
  misc_feature: MA Experiment ID: 20000286 Result: Up-regulated in Transcription
  misc_feature: MA Experiment 20000286 PARAMETER Experiment Name: At_Open_Flower_P Parameter: Age (day) Value: 21
  misc_feature: MA Experiment 20000286 PARAMETER Experiment Name: At_Open_Flower_P Parameter: Plant Line Value: WS
  misc_feature: MA Experiment 20000286 PARAMETER Experiment Name: At_Open_Flower_P Parameter: Tissue Value: Half Open vs. Whole Plant
  misc_feature: MA Experiment ID: 20000436 Result: Down-regulated in Transcription
  misc_feature: MA Experiment 20000436 PARAMETER Experiment Name: At_Drought_P Parameter: Age (day) Value: 7
  misc_feature: MA Experiment 20000436 PARAMETER Experiment Name: At_Drought_P Parameter: Organism Value: A. thaliana
  misc_feature: MA Experiment 20000436 PARAMETER Experiment Name: At_Drought_P Parameter: Plant Line Value: WS
  misc_feature: MA Experiment 20000436 PARAMETER Experiment Name: At_Drought_P Parameter: Timepoint (hr) Value: 12
  misc_feature: MA Experiment 20000436 PARAMETER Experiment Name: At_Drought_P Parameter: Tissue Value: Whole Plant
  misc_feature: MA Experiment 20000436 PARAMETER Experiment Name: At_Drought_P Parameter: Treatment Value: Drought vs. No Drought
  misc_feature: MA Experiment ID: 20000439 Result: Down-regulated in Transcription
  misc_feature: MA Experiment 20000439 PARAMETER Experiment Name: At_Roots__P Parameter: Age (day) Value: 14 vs. 21
  misc_feature: MA Experiment 20000439 PARAMETER Experiment Name: At_Roots__P Parameter: Organism Value: A. thaliana
  misc_feature: MA Experiment 20000439 PARAMETER Experiment Name: At_Roots__P Parameter: Tissue Value: Roots vs. Whole Plant
  misc_feature: MA Experiment ID: 20000445 Result: Down-regulated in Transcription
  misc_feature: MA Experiment 20000445 PARAMETER Experiment Name: At_100uM_NAA__P Parameter: Age (day) Value: 14
  misc_feature: MA Experiment 20000445 PARAMETER Experiment Name: At_100uM_NAA__P Parameter: Organism Value: A. thaliana
  misc_feature: MA Experiment 20000445 PARAMETER Experiment Name: At_100uM_NAA__P Parameter: Plant Line Value: WS
  misc_feature: MA Experiment 20000445 PARAMETER Experiment Name: At_100uM_NAA__P Parameter: Timepoint (hr) Value: 6
  misc_feature: MA Experiment 20000445 PARAMETER Experiment Name: At_100uM_NAA__P Parameter: Tissue Value: Aerial
  misc_feature: MA Experiment 20000445 PARAMETER Experiment Name: At_100uM_NAA__P Parameter: Treatment Value: 100uM NAA vs. No Treatment
  misc_feature: MA Experiment ID: 20000573 Result: Down-regulated in Transcription
  misc_feature: MA Experiment 20000573 PARAMETER Experiment Name: At_100uM_ABA_Mutants__P Parameter: Organism Value: A. thaliana
  misc_feature: MA Experiment 20000573 PARAMETER Experiment Name: At_100uM_ABA_Mutants__P Parameter: Plant Line Value: CS22 vs. Ler wt
  misc_feature: MA Experiment 20000573 PARAMETER Experiment Name: At_100uM_ABA_Mutants__P Parameter: Timepoint (hr) Value: N/A
  misc_feature: MA Experiment 20000573 PARAMETER Experiment Name: At_100uM_ABA_Mutants__P Parameter: Tissue Value: Whole Plant
  misc_feature: MA Experiment 20000573 PARAMETER Experiment Name: At_100uM_ABA_Mutants__P Parameter: Treatment Value: None
  misc_feature: MA Experiment ID: 20000794 Result: Up-regulated in Transcription
  misc_feature: MA Experiment 20000794 PARAMETER Experiment Name: At_Petals_P Parameter: Age (day) Value: 23-25 days
  misc_feature: MA Experiment 20000794 PARAMETER Experiment Name: At_Petals_P Parameter: Plant Line Value: WS
  misc_feature: MA Experiment 20000794 PARAMETER Experiment Name: At_Petals_P Parameter: Tissue Value: Petals vs. Whole plant
  misc_feature: MA Experiment ID: 20001247 Result: Up-regulated in Transcription
  misc_feature: MA Experiment 20001247 PARAMETER Experiment Name: At_Far-red-induction_P Parameter: Age (day) Value: 7
  misc_feature: MA Experiment 20001247 PARAMETER Experiment Name: At_Far-red-induction_P Parameter: Light Value: Far-red vs. White
  misc_feature: MA Experiment 20001247 PARAMETER Experiment Name: At_Far-red-induction_P Parameter: Organism Value: A. thaliana
  misc_feature: MA Experiment 20001247 PARAMETER Experiment Name: At_Far-red-induction_P Parameter: Plant Line Value: Columbia
  misc_feature: MA Experiment 20001247 PARAMETER Experiment Name: At_Far-red-induction_P Parameter: Timepoint (hr) Value: 1
  misc_feature: MA Experiment 20001247 PARAMETER Experiment Name: At_Far-red-induction_P Parameter: Tissue Value: Whole Plant
  misc_feature: MA Experiment ID: 20001248 Result: Down-regulated in Transcription
  misc_feature: MA Experiment 20001248 PARAMETER Experiment Name: At_Far-red-induction_P Parameter: Age (day) Value: 7
  misc_feature: MA Experiment 20001248 PARAMETER Experiment Name: At_Far-red-induction_P Parameter: Light Value: Far-red vs. White
  misc_feature: MA Experiment 20001248 PARAMETER Experiment Name: At_Far-red-induction_P Parameter: Organism Value: A. thaliana
  misc_feature: MA Experiment 20001248 PARAMETER Experiment Name: At_Far-red-induction_P Parameter: Plant Line Value: Columbia
  misc_feature: MA Experiment 20001248 PARAMETER Experiment Name: At_Far-red-induction_P Parameter: Timepoint (hr) Value: 4
  misc_feature: MA Experiment 20001248 PARAMETER Experiment Name: At_Far-red-induction_P Parameter: Tissue Value: Whole Plant
  misc_feature: MA Experiment ID: 20001756 Result: Up-regulated in Transcription
  misc_feature: MA Experiment 20001756 PARAMETER Experiment Name: At_50mM_NH4NO3_L-to-H_P Parameter: Timepoint (hr) Value: 4
  misc_feature: MA Experiment 20001756 PARAMETER Experiment Name: At_50mM_NH4NO3_L-to-H_P Parameter: Tissue Value: Leaf
  misc_feature: MA Experiment 20001756 PARAMETER Experiment Name: At_50mM_NH4NO3_L-to-H_P Parameter: Treatment Value: 50mM NH4NO3 vs 100mM Mannitol
  misc_feature: MA Experiment ID: 20001757 Result: Up-regulated in Transcription
  misc_feature: MA Experiment 20001757 PARAMETER Experiment Name: At_50mM_NH4NO3_L-to-H_P Parameter: Timepoint (hr) Value: 6
  misc_feature: MA Experiment 20001757 PARAMETER Experiment Name: At_50mM_NH4NO3_L-to-H_P Parameter: Tissue Value: Leaf
  misc_feature: MA Experiment 20001757 PARAMETER Experiment Name: At_50mM_NH4NO3_L-to-H_P Parameter: Treatment Value: 50mM NH4NO3 vs 100mM Mannitol
  misc_feature: MA Experiment ID: 20001905 Result: Down-regulated in Transcription
  misc_feature: MA Experiment 20001905 PARAMETER Experiment Name: At_Drought_Reproduction_P Parameter: Age (day) Value: 40
  misc_feature: MA Experiment 20001905 PARAMETER Experiment Name: At_Drought_Reproduction_P Parameter: Organism Value: A. thaliana
  misc_feature: MA Experiment 20001905 PARAMETER Experiment Name: At_Drought_Reproduction_P Parameter: Plant Line Value: WS
  misc_feature: MA Experiment 20001905 PARAMETER Experiment Name: At_Drought_Reproduction_P Parameter: Timepoint (day) Value: 10
  misc_feature: MA Experiment 20001905 PARAMETER Experiment Name: At_Drought_Reproduction_P Parameter: Tissue Value: Rosettes
  misc_feature: MA Experiment 20001905 PARAMETER Experiment Name: At_Drought_Reproduction_P Parameter: Treatment Value: Drought vs. No Drought
  misc_feature: MA Experiment ID: 20001911 Result: Down-regulated in Transcription
  misc_feature: MA Experiment 20001911 PARAMETER Experiment Name: At_Drought_Reproduction_P Parameter: Age (day) Value: 40
  misc_feature: MA Experiment 20001911 PARAMETER Experiment Name: At_Drought_Reproduction_P Parameter: Organism Value: A. thaliana
  misc_feature: MA Experiment 20001911 PARAMETER Experiment Name: At_Drought_Reproduction_P Parameter: Plant Line Value: WS
  misc_feature: MA Experiment 20001911 PARAMETER Experiment Name: At_Drought_Reproduction_P Parameter: Timepoint (day) Value: 10
  misc_feature: MA Experiment 20001911 PARAMETER Experiment Name: At_Drought_Reproduction_P Parameter: Tissue Value: Flowers
  misc_feature: MA Experiment 20001911 PARAMETER Experiment Name: At_Drought_Reproduction_P Parameter: Treatment Value: Drought vs. No Drought
atgactgcttcactttctctttctcttttgttcaagtagtttgggagagagaagagaagaagaagacaccctttaagcaaaacagaggattttcattctctgttctgtttgaattattactaatctatcatcttgttgttctcttcgtcgacaatgtcgggaaacaaagaagaagaggatcctcgtatccatggaatcaaaactaagatccgtgtcgttccagattttcccaagaaaggaataatgtttcaagacataacaacagtgttgttggatccgaaagccttcaaagacacaattgatctgtttgtggagaggtacagagacaagaacatctcagtggttgcaggaatagaggctcgtggtttcctattcggtccaccgatcgcgctagccattggagcaaaatttgttcctctgcgcaaacccaagaaactacctggtgaaacaatatttgaggaatacgagttggaatatggaaatgaccgcctagagatgcacataggagccgtcgaggctggcgatcgagctttggtcgttgatgatcttatcgcgactggtggtactctctgcgctgccattaacttgctcgagagggttggagcagaagttgtggaatgtgcatgtgtgatcgagttacccgaattaaagggaaggcagagacttaaggggaagccactatgtatgcttgtggagtaccgatgatgattttagctttacttatttggataaaattattcggttaattaatttatgctccgaaaattcggattatgcagacttcttattattggattctacaatattttgatttaaattctagcggattagctggaagaaataatcc

SEQ ID NO: 28570 - protein, 183 aa, Arabidopsis thaliana
  peptide (1)..(183): Ceres Seq. ID no. 13496903
  misc_feature (9)..(181): Homolog of NCBI NO: 15238973 NR Description: adenine phosphoribosyltransferase - like protein
  misc_feature (5)..(181): Homolog of NCBI NO: 30689934 NR Description: adenine phosphoribosyltransferase 1, APRT
  misc_feature (9)..(181): Homolog of NCBI NO: 9711921 NR Description: Adenine phosphoribosyltransferase [Hordeum
  misc_feature (9)..(181): Homolog of NCBI NO: 2499932 NR Description: Adenine phosphoribosyltransferase 1 (APRT)
  misc_feature (1)..(181): Homolog of NCBI NO: 18396344 NR Description: adenine phosphoribosyltransferase 1, APRT
  misc_feature (5)..(180): Homolog of NCBI NO: 32492063 NR Description: adenine phosphoribosyltransferase [Brassica napus]
  misc_feature (5)..(181): Homolog of NCBI NO: 33354190 NR Description: putative adenine phosphoribosyl transferase
  misc_feature (1)..(183): Homolog of NCBI NO: 15234553 NR Description: adenine phosphoribosyltransferase -related
  misc_feature (1)..(183): Homolog of NCBI NO: 21536749 NR Description: adenine phosphoribosyltransferase (EC
  misc_feature (1)..(183): Homolog of NCBI NO: 15235709 NR Description: adenine phosphoribosyltransferase (EC 2.4.2.7) -
MSGNKEEEDPRIHGIKTKIRVVPDFPKKGIMFQDITTVLLDPKAFKDTIDLFVERYRDKNISVVAGIEARGFLFGPPIALAIGAKFVPLRKPKKLPGETIFEEYELEYGNDRLEMHIGAVEAGDRALVVDDLIATGGTLCAAINLLERVGAEVVECACVIELPELKGRQRLKGKPLCMLVEYR

SEQ ID NO: 28571 - protein, 153 aa, Arabidopsis thaliana
  peptide (1)..(153): Ceres Seq. ID no. 13496904
  misc_feature (1)..(151): Homolog of NCBI NO: 15238973 NR Description: adenine phosphoribosyltransferase - like protein
  misc_feature (1)..(151): Homolog of NCBI NO: 30689934 NR Description: adenine phosphoribosyltransferase 1, APRT
  misc_feature (1)..(151): Homolog of NCBI NO: 9711921 NR Description: Adenine phosphoribosyltransferase [Hordeum
  misc_feature (1)..(151): Homolog of NCBI NO: 2499932 NR Description: Adenine phosphoribosyltransferase 1 (APRT)
  misc_feature (1)..(151): Homolog of NCBI NO: 18396344 NR Description: adenine phosphoribosyltransferase 1, APRT
  misc_feature (1)..(150): Homolog of NCBI NO: 32492063 NR Description: adenine phosphoribosyltransferase [Brassica napus]
  misc_feature (1)..(151): Homolog of NCBI NO: 33354190 NR Description: putative adenine phosphoribosyl transferase
  misc_feature (1)..(153): Homolog of NCBI NO: 15234553 NR Description: adenine phosphoribosyltransferase -related
  misc_feature (1)..(153): Homolog of NCBI NO: 21536749 NR Description: adenine phosphoribosyltransferase (EC
  misc_feature (1)..(153): Homolog of NCBI NO: 15235709 NR Description: adenine phosphoribosyltransferase (EC 2.4.2.7) -
MFQDITTVLLDPKAFKDTIDLFVERYRDKNISVVAGIEARGFLFGPPIALAIGAKFVPLRKPKKLPGETIFEEYELEYGNDRLEMHIGAVEAGDRALVVDDLIATGGTLCAAINLLERVGAEVVECACVIELPELKGRQRLKGKPLCMLVEYR

SEQ ID NO: 28572 - DNA, 1072 bp, Arabidopsis thaliana
  misc_feature (1)..(1072): Ceres Seq. ID no. 13622027
  misc_feature: MA Experiment ID: 20000090 Result: Down-regulated in Transcription
  misc_feature: MA Experiment ID: 20000171 Result: Down-regulated in Transcription
  misc_feature: MA Experiment 20000171 PARAMETER Experiment Name: At_42deg_Heat_P Parameter: Age (day) Value: 14
  misc_feature: MA Experiment 20000171 PARAMETER Experiment Name: At_42deg_Heat_P Parameter: Organism Value: A. thaliana
  misc_feature: MA Experiment 20000171 PARAMETER Experiment Name: At_42deg_Heat_P Parameter: Plant Line Value: WS
  misc_feature: MA Experiment 20000171 PARAMETER Experiment Name: At_42deg_Heat_P Parameter: Temperature (deg C) Value: 42 vs. 22
  misc_feature: MA Experiment 20000171 PARAMETER Experiment Name: At_42deg_Heat_P Parameter: Timepoint (hr) Value: 1
  misc_feature: MA Experiment 20000171 PARAMETER Experiment Name: At_42deg_Heat_P Parameter: Tissue Value: Aerial
  misc_feature: MA Experiment ID: 20000173 Result: Down-regulated in Transcription
  misc_feature: MA Experiment 20000173 PARAMETER Experiment Name: At_42deg_Heat_P Parameter: Age (day) Value: 14
  misc_feature: MA Experiment 20000173 PARAMETER Experiment Name: At_42deg_Heat_P Parameter: Organism Value: A. thaliana
  misc_feature: MA Experiment 20000173 PARAMETER Experiment Name: At_42deg_Heat_P Parameter: Plant Line Value: WS
  misc_feature: MA Experiment 20000173 PARAMETER Experiment Name: At_42deg_Heat_P Parameter: Temperature (deg C) Value: 42 vs. 22
  misc_feature: MA Experiment 20000173 PARAMETER Experiment Name: At_42deg_Heat_P Parameter: Timepoint (hr) Value: 6
  misc_feature: MA Experiment 20000173 PARAMETER Experiment Name: At_42deg_Heat_P Parameter: Tissue Value: Aerial
  misc_feature: MA Experiment ID: 20000182 Result: Down-regulated in Transcription
  misc_feature: MA Experiment 20000182 PARAMETER Experiment Name: At_2mM_SA_P Parameter: Age (day) Value: 14
  misc_feature: MA Experiment 20000182 PARAMETER Experiment Name: At_2mM_SA_P Parameter: Organism Value: A. thaliana
  misc_feature: MA Experiment 20000182 PARAMETER Experiment Name: At_2mM_SA_P Parameter: Plant Line Value: WS
  misc_feature: MA Experiment 20000182 PARAMETER Experiment Name: At_2mM_SA_P Parameter: Timepoint (hr) Value: 6
  misc_feature: MA Experiment 20000182 PARAMETER Experiment Name: At_2mM_SA_P Parameter: Tissue Value: Aerial
  misc_feature: MA Experiment 20000182 PARAMETER Experiment Name: At_2mM_SA_P Parameter: Treatment Value: 2mM SA vs. No Treatment
  misc_feature: MA Experiment ID: 20000184 Result: Up-regulated in Transcription
  misc_feature: MA Experiment 20000184 PARAMETER Experiment Name: At_Shoots__P Parameter: Age (day) Value: 7
  misc_feature: MA Experiment 20000184 PARAMETER Experiment Name: At_Shoots__P Parameter: Tissue Value: Shoots vs. Whole Plant
  misc_feature: MA Experiment ID: 20000227 Result: Up-regulated in Transcription
  misc_feature: MA Experiment 20000227 PARAMETER Experiment Name: At_Root-Tips-vs-Tops_P Parameter: Tissue Value: Root Tips vs. Root Tops
  misc_feature: MA Experiment ID: 20000264 Result: Up-regulated in Transcription
  misc_feature: MA Experiment 20000264 PARAMETER Experiment Name: At_Open_Flower_P Parameter: Age (day) Value: 21
  misc_feature: MA Experiment 20000264 PARAMETER Experiment Name: At_Open_Flower_P Parameter: Plant Line Value: WS
  misc_feature: MA Experiment 20000264 PARAMETER Experiment Name: At_Open_Flower_P Parameter: Tissue Value: Open Flower vs. Whole Plant
  misc_feature: MA Experiment ID: 20000265 Result: Up-regulated in Transcription
  misc_feature: MA Experiment 20000265 PARAMETER Experiment Name: At_Open_Flower_P Parameter: Age (day) Value: 21
  misc_feature: MA Experiment 20000265 PARAMETER Experiment Name: At_Open_Flower_P Parameter: Plant Line Value: WS
  misc_feature: MA Experiment 20000265 PARAMETER Experiment Name: At_Open_Flower_P Parameter: Tissue Value: Closed Flower vs. Whole Plant
  misc_feature: MA Experiment ID: 20000286 Result: Up-regulated in Transcription
  misc_feature: MA Experiment 20000286 PARAMETER Experiment Name: At_Open_Flower_P Parameter: Age (day) Value: 21
  misc_feature: MA Experiment 20000286 PARAMETER Experiment Name: At_Open_Flower_P Parameter: Plant Line Value: WS
  misc_feature: MA Experiment 20000286 PARAMETER Experiment Name: At_Open_Flower_P Parameter: Tissue Value: Half Open vs. Whole Plant
  misc_feature: MA Experiment ID: 20000438 Result: Up-regulated in Transcription
  misc_feature: MA Experiment 20000438 PARAMETER Experiment Name: At_Shoots__P Parameter: Age (day) Value: 14
  misc_feature: MA Experiment 20000438 PARAMETER Experiment Name: At_Shoots__P Parameter: Tissue Value: Shoots vs. Whole Plant
  misc_feature: MA Experiment ID: 20000443 Result: Down-regulated in Transcription
  misc_feature: MA Experiment 20000443 PARAMETER Experiment Name: At_1uM_BR-BRZ__P Parameter: Tissue Value: Shoot Apices
  misc_feature: MA Experiment 20000443 PARAMETER Experiment Name: At_1uM_BR-BRZ__P Parameter: Treatment Value: 1uM BRZ vs. No Treatment
  misc_feature: MA Experiment ID: 20000460 Result: Up-regulated in Transcription
  misc_feature: MA Experiment 20000460 PARAMETER Experiment Name: At_10percent_PEG_P Parameter: Age (day) Value: 12
  misc_feature: MA Experiment 20000460 PARAMETER Experiment Name: At_10percent_PEG_P Parameter: Organism Value: A. thaliana
  misc_feature: MA Experiment 20000460 PARAMETER Experiment Name: At_10percent_PEG_P Parameter: Plant Line Value: WS
  misc_feature: MA Experiment 20000460 PARAMETER Experiment Name: At_10percent_PEG_P Parameter: Timepoint (day) Value: 12
  misc_feature: MA Experiment 20000460 PARAMETER Experiment Name: At_10percent_PEG_P Parameter: Tissue Value: Whole Plant
  misc_feature: MA Experiment 20000460 PARAMETER Experiment Name: At_10percent_PEG_P Parameter: Treatment Value: 10percent PEG vs. No Treatment
  misc_feature: MA Experiment ID: 20000527 Result: Up-regulated in Transcription
  misc_feature: MA Experiment 20000527 PARAMETER Experiment Name: At_10percent_PEG_P Parameter: Age (day) Value: 20
  misc_feature: MA Experiment 20000527 PARAMETER Experiment Name: At_10percent_PEG_P Parameter: Organism Value: A. thaliana
  misc_feature: MA Experiment 20000527 PARAMETER Experiment Name: At_10percent_PEG_P Parameter: Plant Line Value: WS
  misc_feature: MA Experiment 20000527 PARAMETER Experiment Name: At_10percent_PEG_P Parameter: Timepoint (day) Value: 20
  misc_feature: MA Experiment 20000527 PARAMETER Experiment Name: At_10percent_PEG_P Parameter: Tissue Value: Whole Plant
  misc_feature: MA Experiment 20000527 PARAMETER Experiment Name: At_10percent_PEG_P Parameter: Treatment Value: 10percent PEG vs. No Treatment
  misc_feature: MA Experiment ID: 20000573 Result: Down-regulated in Transcription
  misc_feature: MA Experiment 20000573 PARAMETER Experiment Name: At_100uM_ABA_Mutants__P Parameter: Organism Value: A. thaliana
  misc_feature: MA Experiment 20000573 PARAMETER Experiment Name: At_100uM_ABA_Mutants__P Parameter: Plant Line Value: CS22 vs. Ler wt
  misc_feature: MA Experiment 20000573 PARAMETER Experiment Name: At_100uM_ABA_Mutants__P Parameter: Timepoint (hr) Value: N/A
  misc_feature: MA Experiment 20000573 PARAMETER Experiment Name: At_100uM_ABA_Mutants__P Parameter: Tissue Value: Whole Plant
  misc_feature: MA Experiment 20000573 PARAMETER Experiment Name: At_100uM_ABA_Mutants__P Parameter: Treatment Value: None
  misc_feature: MA Experiment ID: 20000574 Result: Down-regulated in Transcription
  misc_feature: MA Experiment 20000574 PARAMETER Experiment Name: At_100uM_ABA_Mutants__P Parameter: Organism Value: A. thaliana
  misc_feature: MA Experiment 20000574 PARAMETER Experiment Name: At_100uM_ABA_Mutants__P Parameter: Plant Line Value: CS23 vs. Ler wt
  misc_feature: MA Experiment 20000574 PARAMETER Experiment Name: At_100uM_ABA_Mutants__P Parameter: Timepoint (hr) Value: N/A
  misc_feature: MA Experiment 20000574 PARAMETER Experiment Name: At_100uM_ABA_Mutants__P Parameter: Tissue Value: Whole Plant
  misc_feature: MA Experiment 20000574 PARAMETER Experiment Name: At_100uM_ABA_Mutants__P Parameter: Treatment Value: None
  misc_feature: MA Experiment ID: 20000794 Result: Up-regulated in Transcription
  misc_feature: MA Experiment 20000794 PARAMETER Experiment Name: At_Petals_P Parameter: Age (day) Value: 23-25 days
  misc_feature: MA Experiment 20000794 PARAMETER Experiment Name: At_Petals_P Parameter: Plant Line Value: WS
  misc_feature: MA Experiment 20000794 PARAMETER Experiment Name: At_Petals_P Parameter: Tissue Value: Petals vs. Whole plant
  misc_feature: MA Experiment ID: 20001450 Result: Up-regulated in Transcription
  misc_feature: MA Experiment 20001450 PARAMETER Experiment Name: At_Far-red-induction_P Parameter: Age (day) Value: 7
  misc_feature: MA Experiment 20001450 PARAMETER Experiment Name: At_Far-red-induction_P Parameter: Light Value: Far-red vs. White
  misc_feature: MA Experiment 20001450 PARAMETER Experiment Name: At_Far-red-induction_P Parameter: Organism Value: A. thaliana
  misc_feature: MA Experiment 20001450 PARAMETER Experiment Name: At_Far-red-induction_P Parameter: Plant Line Value: Columbia
  misc_feature: MA Experiment 20001450 PARAMETER Experiment Name: At_Far-red-induction_P Parameter: Timepoint (hr) Value: 8
  misc_feature: MA Experiment 20001450 PARAMETER Experiment Name: At_Far-red-induction_P Parameter: Tissue Value: Whole Plant
  misc_feature: MA Experiment ID: 20001557 Result: Down-regulated in Transcription
  misc_feature: MA Experiment 20001557 PARAMETER Experiment Name: At_Drought_Soil_Dry_P Parameter: Age (day) Value: 27
  misc_feature: MA Experiment 20001557 PARAMETER Experiment Name: At_Drought_Soil_Dry_P Parameter: Organism Value: A. thaliana
  misc_feature: MA Experiment 20001557 PARAMETER Experiment Name: At_Drought_Soil_Dry_P Parameter: Plant Line Value: WS
  misc_feature: MA Experiment 20001557 PARAMETER Experiment Name: At_Drought_Soil_Dry_P Parameter: Post Timepoint (hr) Value: 3
  misc_feature: MA Experiment 20001557 PARAMETER Experiment Name: At_Drought_Soil_Dry_P Parameter: Post-Treatment Value: Re-Water vs. No Drought
  misc_feature: MA Experiment 20001557 PARAMETER Experiment Name: At_Drought_Soil_Dry_P Parameter: Timepoint (day) Value: 13
  misc_feature: MA Experiment 20001557 PARAMETER Experiment Name: At_Drought_Soil_Dry_P Parameter: Treatment Value: Drought vs. No Drought
atcatcatcatcatctctttcttcttccaaaagtcataatcatgtcaaagtctctagctggattggcggttttggccgctctttttattgcggttgatgcgtttaggccttctggttaactaatggtcacgctacattctatggaggaagtgacgcttctggaacaatgggtggagcttgtggttacggagatctttactcggcggggtacgggacaatgacggcggcgttaagcacggctctgttcaacgacggagcttcttgcggagaatgctataggataacgtgtgatcacgcggcggactcacggtggtgcttgaaaggagcttctgtggttattacagccactaacttttgcccaccaaactttgctttgcctaacaacaacggtggttggtgcaatccgccgcttaaacatttcgacatggcacaacccgcttgggaaaagatcggaatttacagaggaggaatcgttcccgtcgttttccaaagagtaagctgttacaagaaaggaggagttagattcagaataaacggaagagactacttcgagctagtgaatattcaaaatgtaggaggagcaggttctattaaatctgtatccatcaaaggatcaaagactggttggttagccatgtctcgtaactggggagctaattggcaatcgaatgcttatctagatggtcaagctctctctttctccattaccactactgatggtgctactagagtctttctcaatgttgttccttcttcttggtcttttggacagatttattcttccaacgttcagttttaagttttttttttttgttttgtatgaaatatcattggcagtggtcgcgctttgagtctgtttcttttctccctgagcgacccgccctctttgttttttttatcttatggtatgatgggtctgttaatacaaaagacccgatatgatttgagggtatatgattatatgaagtgtattgtatttgaatgtttcagactcgaaaaagattctgtagcaaaaggagttttaacacatttgtacttggttttgtttatatgaagtttgttttagtttttt

SEQ ID NO: 28573 - protein, 210 aa, Arabidopsis thaliana
  peptide (1)..(210): Ceres Seq. ID no. 13622028
  misc_feature (118)..(195): Pfam Name: Pollen allergen Pfam Description: Pollen allergen
  misc_feature (1)..(210): Homolog of NCBI NO: 21536750 NR Description: Alpha-expansin 11 precursor (At-EXP11) (AtEx11)
  misc_feature (1)..(210): Homolog of NCBI NO: 15223799 NR Description: expansin, putative (EXP11) [Arabidopsis thaliana]
MGGACGYGDLYSAGYGTMTAALSTALFNDGASCGECYRITCDHAADSRWCLKGASVVITATNFCPPNFALPNNNGGWCNPPLKHFDMAQPAWEKIGIYRGGIVPVVFQRVSCYKKGGVRFRINGRDYFELVNIQNVGGAGSIKSVSIKGSKTGWLAMSRNWGANWQSNAYLDGQALSFSITTTDGATRVFLNVVPSSWSFGQIYSSNVQF

SEQ ID NO: 28574 - protein, 193 aa, Arabidopsis thaliana
  peptide (1)..(193): Ceres Seq. ID no. 13622029
  misc_feature (101)..(178): Pfam Name: Pollen allergen Pfam Description: Pollen allergen
  misc_feature (1)..(193): Homolog of NCBI NO: 21536750 NR Description: Alpha-expansin 11 precursor (At-EXP11) (AtEx11)
  misc_feature (1)..(193): Homolog of NCBI NO: 15223799 NR Description: expansin, putative (EXP11) [Arabidopsis thaliana]
MTAALSTALFNDGASCGECYRITCDHAADSRWCLKGASVVITATNFCPPNFALPNNNGGWCNPPLKHFDMAQPAWEKIGIYRGGIVPVVFQRVSCYKKGGVRFRINGRDYFELVNIQNVGGAGSIKSVSIKGSKTGWLAMSRNWGANWQSNAYLDGQALSFSITTTDGATRVFLNVVPSSWSFGQIYSSNVQF

SEQ ID NO: 28575 - protein, 124 aa, Arabidopsis thaliana
  peptide (1)..(124): Ceres Seq. ID no. 13622030
  misc_feature (32)..(109): Pfam Name: Pollen allergen Pfam Description: Pollen allergen
  misc_feature (1)..(124): Homolog of NCBI NO: 21536750 NR Description: Alpha-expansin 11 precursor (At-EXP11) (AtEx11)
  misc_feature (1)..(124): Homolog of NCBI NO: 15223799 NR Description: expansin, putative (EXP11) [Arabidopsis thaliana]
MAQPAWEKIGIYRGGIVPVVFQRVSCYKKGGVRFRINGRDYFELVNIQNVGGAGSIKSVSIKGSKTGWLAMSRNWGANWQSNAYLDGQALSFSITTTDGATRVFLNVVPSSWSFGQIYSSNVQF

SEQ ID NO: 28576 - DNA, 1748 bp, Arabidopsis thaliana
  misc_feature (1)..(1748): Ceres Seq. ID no. 13580541
  misc_feature: MA Experiment ID: 108462 Result: Up-regulated in Transcription
  misc_feature: MA Experiment 108462 PARAMETER Experiment Name: At_Germinating_Seeds_cDNA_P Parameter: Age (day) Value: 2 vs. 0
  misc_feature: MA Experiment 108462 PARAMETER Experiment Name: At_Germinating_Seeds_cDNA_P Parameter: Tissue Value: Germinating Seeds
  misc_feature: MA Experiment ID: 108463 Result: Up-regulated in Transcription
  misc_feature: MA Experiment 108463 PARAMETER Experiment Name: At_Germinating_Seeds_cDNA_P Parameter: Age (day) Value: 3 vs. 0
  misc_feature: MA Experiment 108463 PARAMETER Experiment Name: At_Germinating_Seeds_cDNA_P Parameter: Tissue Value: Germinating Seeds
  misc_feature: MA Experiment ID: 108464 Result: Up-regulated in Transcription
  misc_feature: MA Experiment 108464 PARAMETER Experiment Name: At_Germinating_Seeds_cDNA_P Parameter: Age (day) Value: 4 vs. 0
  misc_feature: MA Experiment 108464 PARAMETER Experiment Name: At_Germinating_Seeds_cDNA_P Parameter: Tissue Value: Germinating Seeds
  misc_feature: MA Experiment ID: 108561 Result: Up-regulated in Transcription
  misc_feature: MA Experiment 108561 PARAMETER Experiment Name: At_100uM_ABA_cDNA_P Parameter: Timepoint (hr) Value: 6
  misc_feature: MA Experiment 108561 PARAMETER Experiment Name: At_100uM_ABA_cDNA_P Parameter: Tissue Value: Aerial
  misc_feature: MA Experiment 108561 PARAMETER Experiment Name: At_100uM_ABA_cDNA_P Parameter: Treatment Value: 100uM ABA vs. No Treatment
  misc_feature: MA Experiment ID: 108572 Result: Up-regulated in Transcription
  misc_feature: MA Experiment 108572 PARAMETER Experiment Name: At_Drought_cDNA_P Parameter: Timepoint (hr) Value: 1
  misc_feature: MA Experiment 108572 PARAMETER Experiment Name: At_Drought_cDNA_P Parameter: Tissue Value: Aerial
  misc_feature: MA Experiment 108572 PARAMETER Experiment Name: At_Drought_cDNA_P Parameter: Treatment Value: Drought vs. No Drought
  misc_feature: MA Experiment ID: 108573 Result: Up-regulated in Transcription
  misc_feature: MA Experiment 108573 PARAMETER Experiment Name: At_Drought_cDNA_P Parameter: Timepoint (hr) Value: 6
  misc_feature: MA Experiment 108573 PARAMETER Experiment Name: At_Drought_cDNA_P Parameter: Tissue Value: Aerial
  misc_feature: MA Experiment 108573 PARAMETER Experiment Name: At_Drought_cDNA_P Parameter: Treatment Value: Drought vs. No Drought
  misc_feature: MA Experiment ID: 108595 Result: Down-regulated in Transcription
  misc_feature: MA Experiment 108595 PARAMETER Experiment Name: At_Ler-pi_Ovule_cDNA_P Parameter: Plant Line Value: null
  misc_feature: MA Experiment ID: 108605 Result: Up-regulated in Transcription
  misc_feature: MA Experiment 108605 PARAMETER Experiment Name: At_100uM_ABA_cDNA_P Parameter: Timepoint (hr) Value: 6
  misc_feature: MA Experiment 108605 PARAMETER Experiment Name: At_100uM_ABA_cDNA_P Parameter: Tissue Value: Aerial
  misc_feature: MA Experiment 108605 PARAMETER Experiment Name: At_100uM_ABA_cDNA_P Parameter: Treatment Value: 100uM ABA vs. No Treatment
  misc_feature: MA Experiment ID: 108607 Result: Up-regulated in Transcription
  misc_feature: MA Experiment 108607 PARAMETER Experiment Name: At_100uM_ABA_cDNA_P Parameter: Timepoint (hr) Value: 4
  misc_feature: MA Experiment 108607 PARAMETER Experiment Name: At_100uM_ABA_cDNA_P Parameter: Tissue Value: Aerial
  misc_feature: MA Experiment 108607 PARAMETER Experiment Name: At_100uM_ABA_cDNA_P Parameter: Treatment Value: 100uM ABA vs. No Treatment
  misc_feature: MA Experiment ID: 108609 Result: Up-regulated in Transcription
  misc_feature: MA Experiment 108609 PARAMETER Experiment Name: At_100uM_ABA_cDNA_P Parameter: Timepoint (hr) Value: 24
  misc_feature: MA Experiment 108609 PARAMETER Experiment Name: At_100uM_ABA_cDNA_P Parameter: Tissue Value: Aerial
  misc_feature: MA Experiment 108609 PARAMETER Experiment Name: At_100uM_ABA_cDNA_P Parameter: Treatment Value: 100uM ABA vs. No Treatment
  misc_feature: MA Experiment ID: 20000069 Result: Up-regulated in Transcription
  misc_feature: MA Experiment 20000069 PARAMETER Experiment Name: At_100uM_ABA_Mutants_cDNA_P Parameter: Plant Line Value: CS23
  misc_feature: MA Experiment 20000069 PARAMETER Experiment Name: At_100uM_ABA_Mutants_cDNA_P Parameter: Timepoint (hr) Value: 6
  misc_feature: MA Experiment 20000069 PARAMETER Experiment Name: At_100uM_ABA_Mutants_cDNA_P Parameter: Tissue Value: Aerial
  misc_feature: MA Experiment 20000069 PARAMETER Experiment Name: At_100uM_ABA_Mutants_cDNA_P Parameter: Treatment Value: 100uM ABA vs. No Treatment
  misc_feature: MA Experiment ID: 20000070 Result: Up-regulated in Transcription
  misc_feature: MA Experiment 20000070 PARAMETER Experiment Name: At_100uM_ABA_Mutants_cDNA_P Parameter: Plant Line Value: CS24
  misc_feature: MA Experiment 20000070 PARAMETER Experiment Name: At_100uM_ABA_Mutants_cDNA_P Parameter: Timepoint (hr) Value: 6
  misc_feature: MA Experiment 20000070 PARAMETER Experiment Name: At_100uM_ABA_Mutants_cDNA_P Parameter: Tissue Value: Aerial
  misc_feature: MA Experiment 20000070 PARAMETER Experiment Name: At_100uM_ABA_Mutants_cDNA_P Parameter: Treatment Value: 100uM ABA vs. No Treatment
  misc_feature: MA Experiment ID: 20000071 Result: Up-regulated in Transcription
  misc_feature: MA Experiment 20000071 PARAMETER Experiment Name: At_100uM_ABA_Mutants_cDNA_P Parameter: Plant Line Value: CS8104
  misc_feature: MA Experiment 20000071 PARAMETER Experiment Name: At_100uM_ABA_Mutants_cDNA_P Parameter: Timepoint (hr) Value: 6
  misc_feature: MA Experiment 20000071 PARAMETER Experiment Name: At_100uM_ABA_Mutants_cDNA_P Parameter: Tissue Value: Aerial
  misc_feature: MA Experiment 20000071 PARAMETER Experiment Name: At_100uM_ABA_Mutants_cDNA_P Parameter: Treatment Value: 100uM ABA vs. No Treatment
  misc_feature: MA Experiment ID: 20000072 Result: Up-regulated in Transcription
  misc_feature: MA Experiment 20000072 PARAMETER Experiment Name: At_100uM_ABA_Mutants_cDNA_P Parameter: Plant Line Value: CS8105
  misc_feature: MA Experiment 20000072 PARAMETER Experiment Name: At_100uM_ABA_Mutants_cDNA_P Parameter: Timepoint (hr) Value: 6
  misc_feature: MA Experiment 20000072 PARAMETER Experiment Name: At_100uM_ABA_Mutants_cDNA_P Parameter: Tissue Value: Aerial
  misc_feature: MA Experiment 20000072 PARAMETER Experiment Name: At_100uM_ABA_Mutants_cDNA_P Parameter: Treatment Value: 100uM ABA vs. No Treatment
  misc_feature: MA Experiment ID: 20000086 Result: Up-regulated in Transcription
  misc_feature: MA Experiment 20000086 PARAMETER Experiment Name: At_100uM_ABA_Mutants_cDNA_P Parameter: Plant Line Value: CS22
  misc_feature: MA Experiment 20000086 PARAMETER Experiment Name: At_100uM_ABA_Mutants_cDNA_P Parameter: Timepoint (hr) Value: 6
  misc_feature: MA Experiment 20000086 PARAMETER Experiment Name: At_100uM_ABA_Mutants_cDNA_P Parameter: Tissue Value: Aerial
  misc_feature: MA Experiment 20000086 PARAMETER Experiment Name: At_100uM_ABA_Mutants_cDNA_P Parameter: Treatment Value: 100uM ABA vs. No Treatment
  misc_feature: MA Experiment ID: 20000087 Result: Up-regulated in Transcription
  misc_feature: MA Experiment 20000087 PARAMETER Experiment Name: At_100uM_ABA_Mutants_cDNA_P Parameter: Plant Line Value: WS
  misc_feature: MA Experiment 20000087 PARAMETER Experiment Name: At_100uM_ABA_Mutants_cDNA_P Parameter: Timepoint (hr) Value: 6
  misc_feature: MA Experiment 20000087 PARAMETER Experiment Name: At_100uM_ABA_Mutants_cDNA_P Parameter: Tissue Value: Aerial
  misc_feature: MA Experiment 20000087 PARAMETER Experiment Name: At_100uM_ABA_Mutants_cDNA_P Parameter: Treatment Value: 100uM ABA vs. No Treatment
  misc_feature: MA Experiment ID: 20000088 Result: Up-regulated in Transcription
  misc_feature: MA Experiment 20000088 PARAMETER Experiment Name: At_100uM_ABA_Mutants_cDNA_P Parameter: Plant Line Value: Landsberg
  misc_feature: MA Experiment 20000088 PARAMETER Experiment Name: At_100uM_ABA_Mutants_cDNA_P Parameter: Timepoint (hr) Value: 6
  misc_feature: MA Experiment 20000088 PARAMETER Experiment Name: At_100uM_ABA_Mutants_cDNA_P Parameter: Tissue Value: Aerial
  misc_feature: MA Experiment 20000088 PARAMETER Experiment Name: At_100uM_ABA_Mutants_cDNA_P Parameter: Treatment Value: 100uM ABA vs. No Treatment
  misc_feature: MA Experiment ID: 20000113 Result: Down-regulated in Transcription
  misc_feature: MA Experiment 20000113 PARAMETER Experiment Name: At_42deg_Heat_cDNA_P Parameter: Temperature (deg C) Value: 42 vs. 22
  misc_feature: MA Experiment 20000113 PARAMETER Experiment Name: At_42deg_Heat_cDNA_P Parameter: Timepoint (hr) Value: 8
  misc_feature: MA Experiment 20000113 PARAMETER Experiment Name: At_42deg_Heat_cDNA_P Parameter: Tissue Value: Aerial
  misc_feature: MA Experiment ID: 20000117 Result: Up-regulated in Transcription
  misc_feature: MA Experiment 20000117 PARAMETER Experiment Name: At_100uM_ABA_Mutants_cDNA_P Parameter: Plant Line Value: Columbia
  misc_feature: MA Experiment 20000117 PARAMETER Experiment Name: At_100uM_ABA_Mutants_cDNA_P Parameter: Timepoint (hr) Value: 6
  misc_feature: MA Experiment 20000117 PARAMETER Experiment Name: At_100uM_ABA_Mutants_cDNA_P Parameter: Tissue Value: Aerial
  misc_feature: MA Experiment 20000117 PARAMETER Experiment Name: At_100uM_ABA_Mutants_cDNA_P Parameter: Treatment Value: 100uM ABA vs. No Treatment
  misc_feature: MA Experiment ID: 20000169 Result: Up-regulated in Transcription
  misc_feature: MA Experiment 20000169 PARAMETER Experiment Name: At_100uM_ABA_P Parameter: Age (day) Value: 14
  misc_feature: MA Experiment 20000169 PARAMETER Experiment Name: At_100uM_ABA_P Parameter: Organism Value: A. thaliana
  misc_feature: MA Experiment 20000169 PARAMETER Experiment Name: At_100uM_ABA_P Parameter: Plant Line Value: WS
  misc_feature: MA Experiment 20000169 PARAMETER Experiment Name: At_100uM_ABA_P Parameter: Timepoint (hr) Value: 6
  misc_feature: MA Experiment 20000169 PARAMETER Experiment Name: At_100uM_ABA_P Parameter: Tissue Value: Aerial
  misc_feature: MA Experiment 20000169 PARAMETER Experiment Name: At_100uM_ABA_P Parameter: Treatment Value: 100uM ABA vs. No Treatment
  misc_feature: MA Experiment ID: 20000180 Result: Up-regulated in Transcription
  misc_feature: MA Experiment 20000180 PARAMETER Experiment Name: At_Germinating_Seeds_P Parameter: Age (hr) Value: 24 vs. 0
  misc_feature: MA Experiment 20000180 PARAMETER Experiment Name: At_Germinating_Seeds_P Parameter: Tissue Value: Germinating Seeds
  misc_feature: MA Experiment ID: 20000184 Result: Down-regulated in Transcription
  misc_feature: MA Experiment 20000184 PARAMETER Experiment Name: At_Shoots__P Parameter: Age (day) Value: 7
  misc_feature: MA Experiment 20000184 PARAMETER Experiment Name: At_Shoots__P Parameter: Tissue Value: Shoots vs. Whole Plant
  misc_feature: MA Experiment ID: 20000224 Result: Up-regulated in Transcription
  misc_feature: MA Experiment ID: 20000234 Result: Down-regulated in Transcription
  misc_feature: MA Experiment 20000234 PARAMETER Experiment Name: At_Siliques_P Parameter: Age (day) Value: 21
  misc_feature: MA Experiment 20000234 PARAMETER Experiment Name: At_Siliques_P Parameter: Organism Value: A. thaliana
  misc_feature: MA Experiment 20000234 PARAMETER Experiment Name: At_Siliques_P Parameter: Plant Line Value: WS
  misc_feature: MA Experiment 20000234 PARAMETER Experiment Name: At_Siliques_P Parameter: Tissue Value: Less Than 5mm Siliques vs. Whole Plant
  misc_feature: MA Experiment ID: 20000267 Result: Up-regulated in Transcription
  misc_feature: MA Experiment 20000267 PARAMETER Experiment Name: At_Drought_P Parameter: Age (day) Value: 7
  misc_feature: MA Experiment 20000267 PARAMETER Experiment Name: At_Drought_P Parameter: Organism Value: A. thaliana
  misc_feature: MA Experiment 20000267 PARAMETER Experiment Name: At_Drought_P Parameter: Plant Line Value: WS
  misc_feature: MA Experiment 20000267 PARAMETER Experiment Name: At_Drought_P Parameter: Timepoint (hr) Value: 6
  misc_feature: MA Experiment 20000267 PARAMETER Experiment Name: At_Drought_P Parameter: Tissue Value: Whole Plant
  misc_feature: MA Experiment 20000267 PARAMETER Experiment Name: At_Drought_P Parameter: Treatment Value: Drought vs. No Drought
  misc_feature: MA Experiment ID: 20000268 Result: Up-regulated in Transcription
  misc_feature: MA Experiment 20000268 PARAMETER Experiment Name: At_100mM_NaCl__P Parameter: Age (day) Value: 14
  misc_feature: MA Experiment 20000268 PARAMETER Experiment Name: At_100mM_NaCl__P Parameter: Organism Value: A. thaliana
  misc_feature: MA Experiment 20000268 PARAMETER Experiment Name: At_100mM_NaCl__P Parameter: Plant Line Value: WS
  misc_feature: MA Experiment 20000268 PARAMETER Experiment Name: At_100mM_NaCl__P Parameter: Timepoint (hr) Value: 6
  misc_feature: MA Experiment 20000268 PARAMETER Experiment Name: At_100mM_NaCl__P Parameter: Tissue Value: Whole Plant
  misc_feature: MA Experiment 20000268 PARAMETER Experiment Name: At_100mM_NaCl__P Parameter: Treatment Value: 100mM NaCl vs. No Treatment
  misc_feature: MA Experiment ID: 20000436 Result: Up-regulated in Transcription
  misc_feature: MA Experiment 20000436 PARAMETER Experiment Name: At_Drought_P Parameter: Age (day) Value: 7
  misc_feature: MA Experiment 20000436 PARAMETER Experiment Name: At_Drought_P Parameter: Organism Value: A. thaliana
  misc_feature: MA Experiment 20000436 PARAMETER Experiment Name: At_Drought_P Parameter: Plant Line Value: WS
  misc_feature: MA Experiment 20000436 PARAMETER Experiment Name: At_Drought_P Parameter: Timepoint (hr) Value: 12
  misc_feature: MA Experiment 20000436 PARAMETER Experiment Name: At_Drought_P Parameter: Tissue Value: Whole Plant
  misc_feature: MA Experiment 20000436 PARAMETER Experiment Name: At_Drought_P Parameter: Treatment Value: Drought vs. No Drought
  misc_feature: MA Experiment ID: 20000437 Result: Up-regulated in Transcription
  misc_feature: MA Experiment 20000437 PARAMETER Experiment Name: At_Drought_P Parameter: Age (day) Value: 8
  misc_feature: MA Experiment 20000437 PARAMETER Experiment Name: At_Drought_P Parameter: Organism Value: A. thaliana
  misc_feature: MA Experiment 20000437 PARAMETER Experiment Name: At_Drought_P Parameter: Plant Line Value: WS
  misc_feature: MA Experiment 20000437 PARAMETER Experiment Name: At_Drought_P Parameter: Timepoint (hr) Value: 24
  misc_feature: MA Experiment 20000437 PARAMETER Experiment Name: At_Drought_P Parameter: Tissue Value: Whole Plant
  misc_feature: MA Experiment 20000437 PARAMETER Experiment Name: At_Drought_P Parameter: Treatment Value: Drought vs. No Drought
  misc_feature: MA Experiment ID: 20000439 Result: Down-regulated in Transcription
  misc_feature: MA Experiment 20000439 PARAMETER Experiment Name: At_Roots__P Parameter: Age (day) Value: 14 vs. 21
  misc_feature: MA Experiment 20000439 PARAMETER Experiment Name: At_Roots__P Parameter: Organism Value: A. thaliana
  misc_feature: MA Experiment 20000439 PARAMETER Experiment Name: At_Roots__P Parameter: Tissue Value: Roots vs. Whole Plant
  misc_feature: MA Experiment ID: 20000453 Result: Up-regulated in Transcription
  misc_feature: MA Experiment 20000453 PARAMETER Experiment Name: At_100uM_ABA_P Parameter: Age (day) Value: 15
  misc_feature: MA Experiment 20000453 PARAMETER Experiment Name: At_100uM_ABA_P Parameter: Organism Value: A. thaliana
  misc_feature: MA Experiment 20000453 PARAMETER Experiment Name: At_100uM_ABA_P Parameter: Plant Line Value: WS
  misc_feature: MA Experiment 20000453 PARAMETER Experiment Name: At_100uM_ABA_P Parameter: Timepoint (hr) Value: 24
  misc_feature: MA Experiment 20000453 PARAMETER Experiment Name: At_100uM_ABA_P Parameter: Tissue Value: Aerial
  misc_feature: MA Experiment 20000453 PARAMETER Experiment Name: At_100uM_ABA_P Parameter: Treatment Value: 100uM ABA vs. No Treatment
  misc_feature: MA Experiment ID: 20000495 Result: Down-regulated in Transcription
  misc_feature: MA Experiment 20000495 PARAMETER Experiment Name: At_Guard_Cells_P Parameter: Harvest Date Value: 8/2/2002
  misc_feature: MA Experiment 20000495 PARAMETER Experiment Name: At_Guard_Cells_P Parameter: Organism Value: A. thaliana
  misc_feature: MA Experiment 20000495 PARAMETER Experiment Name: At_Guard_Cells_P Parameter: Tissue Value: Guard Cells vs. Leaves
  misc_feature: MA Experiment ID: 20001451 Result: Down-regulated in Transcription
  misc_feature: MA Experiment 20001451 PARAMETER Experiment Name: At_Far-red-induction_P Parameter: Age (day) Value: 7
  misc_feature: MA Experiment 20001451 PARAMETER Experiment Name: At_Far-red-induction_P Parameter: Light Value: Far-red vs. White
  misc_feature: MA Experiment 20001451 PARAMETER Experiment Name: At_Far-red-induction_P Parameter: Organism Value: A. thaliana
  misc_feature: MA Experiment 20001451 PARAMETER Experiment Name: At_Far-red-induction_P Parameter: Plant Line Value: Columbia
  misc_feature: MA Experiment 20001451 PARAMETER Experiment Name: At_Far-red-induction_P Parameter: Timepoint (hr) Value: 24
  misc_feature: MA Experiment 20001451 PARAMETER Experiment Name: At_Far-red-induction_P Parameter: Tissue Value: Whole Plant
  misc_feature: MA Experiment ID: 20001554 Result: Up-regulated in Transcription
  misc_feature: MA Experiment 20001554 PARAMETER Experiment Name: At_Drought_Soil_Dry_P Parameter: Age (day) Value: 21
  misc_feature: MA Experiment 20001554 PARAMETER Experiment Name: At_Drought_Soil_Dry_P Parameter: Organism Value: A. thaliana
  misc_feature: MA Experiment 20001554 PARAMETER Experiment Name: At_Drought_Soil_Dry_P Parameter: Plant Line Value: WS
  misc_feature: MA Experiment 20001554 PARAMETER Experiment Name: At_Drought_Soil_Dry_P Parameter: Post Timepoint (hr) Value: None
  misc_feature: MA Experiment 20001554 PARAMETER Experiment Name: At_Drought_Soil_Dry_P Parameter: Post-Treatment Value: None
  misc_feature: MA Experiment 20001554 PARAMETER Experiment Name: At_Drought_Soil_Dry_P Parameter: Timepoint (day) Value: 7
  misc_feature: MA Experiment 20001554 PARAMETER Experiment Name: At_Drought_Soil_Dry_P Parameter: Treatment Value: Drought vs. No Drought
  misc_feature: MA Experiment ID: 20001555 Result: Up-regulated in Transcription
  misc_feature: MA Experiment 20001555 PARAMETER Experiment Name: At_Drought_Soil_Dry_P Parameter: Age (day) Value: 24
  misc_feature: MA Experiment 20001555 PARAMETER Experiment Name: At_Drought_Soil_Dry_P Parameter: Organism Value: A. thaliana
  misc_feature: MA Experiment 20001555 PARAMETER Experiment Name: At_Drought_Soil_Dry_P Parameter: Plant Line Value: WS
  misc_feature: MA Experiment 20001555 PARAMETER Experiment Name: At_Drought_Soil_Dry_P Parameter: Post Timepoint (hr) Value: None
  misc_feature: MA Experiment 20001555 PARAMETER Experiment Name: At_Drought_Soil_Dry_P Parameter: Post-Treatment Value: None
  misc_feature: MA Experiment 20001555 PARAMETER Experiment Name: At_Drought_Soil_Dry_P Parameter: Timepoint (day) Value: 10
  misc_feature: MA Experiment 20001555 PARAMETER Experiment Name: At_Drought_Soil_Dry_P Parameter: Treatment Value: Drought vs. No Drought
  misc_feature: MA Experiment ID: 20001558 Result: Down-regulated in Transcription
  misc_feature: MA Experiment 20001558 PARAMETER Experiment Name: At_Drought_Soil_Dry_P Parameter: Age (day) Value: 27
  misc_feature: MA Experiment 20001558 PARAMETER Experiment Name: At_Drought_Soil_Dry_P Parameter: Organism Value: A. thaliana
  misc_feature: MA Experiment 20001558 PARAMETER Experiment Name: At_Drought_Soil_Dry_P Parameter: Plant Line Value: WS
  misc_feature: MA Experiment 20001558 PARAMETER Experiment Name: At_Drought_Soil_Dry_P Parameter: Post Timepoint (hr) Value: 6
  misc_feature: MA Experiment 20001558 PARAMETER Experiment Name: At_Drought_Soil_Dry_P Parameter: Post-Treatment Value: Re-Water vs. No Drought
  misc_feature: MA Experiment 20001558 PARAMETER Experiment Name: At_Drought_Soil_Dry_P Parameter: Timepoint (day) Value: 13
  misc_feature: MA Experiment 20001558 PARAMETER Experiment Name: At_Drought_Soil_Dry_P Parameter: Treatment Value: Drought vs. No Drought
  misc_feature: MA Experiment ID: 20001559 Result: Up-regulated in Transcription
  misc_feature: MA Experiment 20001559 PARAMETER Experiment Name: At_Drought_Soil_Dry_P Parameter: Age (day) Value: 28
  misc_feature: MA Experiment 20001559 PARAMETER Experiment Name: At_Drought_Soil_Dry_P Parameter: Organism Value: A. thaliana
  misc_feature: MA Experiment 20001559 PARAMETER Experiment Name: At_Drought_Soil_Dry_P Parameter: Plant Line Value: WS
  misc_feature: MA Experiment 20001559 PARAMETER Experiment Name: At_Drought_Soil_Dry_P Parameter: Post Timepoint (hr) Value: 29
  misc_feature: MA Experiment 20001559 PARAMETER Experiment Name: At_Drought_Soil_Dry_P Parameter: Post-Treatment Value: Re-Water vs. No Drought
  misc_feature: MA Experiment 20001559 PARAMETER Experiment Name: At_Drought_Soil_Dry_P Parameter: Timepoint (day) Value: 14
  misc_feature: MA Experiment 20001559 PARAMETER Experiment Name: At_Drought_Soil_Dry_P Parameter: Treatment Value: Drought vs. No Drought
  misc_feature: MA Experiment ID: 20001904 Result: Up-regulated in Transcription
  misc_feature: MA Experiment 20001904 PARAMETER Experiment Name: At_Drought_Reproduction_P Parameter: Age (day) Value: 37
  misc_feature: MA Experiment 20001904 PARAMETER Experiment Name: At_Drought_Reproduction_P Parameter: Organism Value: A. thaliana
  misc_feature: MA Experiment 20001904 PARAMETER Experiment Name: At_Drought_Reproduction_P Parameter: Plant Line Value: WS
  misc_feature: MA Experiment 20001904 PARAMETER Experiment Name: At_Drought_Reproduction_P Parameter: Timepoint (day) Value: 7
  misc_feature: MA Experiment 20001904 PARAMETER Experiment Name: At_Drought_Reproduction_P Parameter: Tissue Value: Rosettes
  misc_feature: MA Experiment 20001904 PARAMETER Experiment Name: At_Drought_Reproduction_P Parameter: Treatment Value: Drought vs. No Drought
  misc_feature: MA Experiment ID: 20001905 Result: Up-regulated in Transcription
  misc_feature: MA Experiment 20001905 PARAMETER Experiment Name: At_Drought_Reproduction_P Parameter: Age (day) Value: 40
  misc_feature: MA Experiment 20001905 PARAMETER Experiment Name: At_Drought_Reproduction_P Parameter: Organism Value: A. thaliana
  misc_feature: MA Experiment 20001905 PARAMETER Experiment Name: At_Drought_Reproduction_P Parameter: Plant Line Value: WS
  misc_feature: MA Experiment 20001905 PARAMETER Experiment Name: At_Drought_Reproduction_P Parameter: Timepoint (day) Value: 10
  misc_feature: MA Experiment 20001905 PARAMETER Experiment Name: At_Drought_Reproduction_P Parameter: Tissue Value: Rosettes
  misc_feature: MA Experiment 20001905 PARAMETER Experiment Name: At_Drought_Reproduction_P Parameter: Treatment Value: Drought vs. No Drought
atcagaagagtaaataaacatcaaaatccaacaaaccaaactagaaaaatgtcagtagttttactctcttctacttctgcaacaatcaccaaatcccaatccaaaaagattccctttttatctcccaccacaaaattcccattaaaggtctcaatttctccatcaagatcgaaacttttccacaaccctttacgcgtggcggcgccgccgtctgtacccacttcggattcgacggaggagaagcggatcgaagaagaatacggcggagataaggaagaagaagggtctgagtttaagtggagagatcattggtatccagtttctttggttgaggatttggatccgaatgtgccaaccccgttccagctcttgggtcgagaccttgtactctggtttgatcggaatgatcagaaatgggcagcctttgatgatctctgccctcaccggctcgctcctttatctgaaggaaggttggatgagaatggacacttgcaatgttcgtatcatggatggtcatttggtgggtgtggatcttgcactaggattcctcaggctgctacttcaggtcctgaagctcgtgctgttaaatccccgagagcttgtgctattaagttcccgacaatggtgtctcaaggtcttctctttgtgtggcctgatgaaaatggttgggatagagccaattcaattgaaccccctaggttgccggatgatttcgataaaccggaattttcgacggtgacaattcaaagggatcttttctatggatatgatactctcatggaaaatgtatctgatccttcccatatagattttgctcatcacaaggttacaggaagaagagacagagccaaaccattgccgttcaaggtggagtcaagtgggccttggggtttccaaggtgcgaatgatgacagtccaaggataaccgcaaaatttgttgctccgtgctattctatgaacaaaattgagttagatgcgaaactaccaatcgtcggtaatcaaaaatgggtcatttggatttgctcattcaatataccaatggctccaggaaagacccgttccatcgtttgcagcgcccgtaacttctttcagttctctgtaccaggaccagcttggtggcaggttgtaccaagatggtatgaacactggacttcgaacttagtctatgacggagacatgatcgtacttcaaggacaagagaaagtattcctcgctaaatcaatggagtcaccagactacgacgtgaacaaacagtacacaaagctcacattcactccaacccaggcagaccgttttgttctagcattcagaaactggctcagacggcatggtaagagtcagcctgaatggttcggctccaccccgtctaaccaacctctcccttccactgtcttaaccaagcgtcagatgctagatagatttgatcagcatacacaagtatgctcttcctgcaaaggagcttacaacagtttccaaatcctcaagaagtttctcgttggcgcgacggttttctgggccgccacggctggtgttccttctgatgttcagattcgactggttcttgctggtttatcactgatatcagctgcttctgcatatgctttacatgaacaagagaagaactttgtgtttagagattatgtacattctgaaatcgagtagatttgttgtgtatatgtataatcatcatacaaagtacaaacattgtaaatcaaaatccagaggaacttttagcagtttacatctgc

SEQ ID NO: 28577 - protein, 553 aa, Arabidopsis thaliana
  peptide (1)..(553): Ceres Seq. ID no. 13580542
  misc_feature (103)..(212): Pfam Name: Rieske [2Fe-2S] domain Pfam Description: Rieske [2Fe-2S] domain
  misc_feature (40)..(550): Homolog of NCBI NO: 30102998 NR Description: putative cell death suppressor protein
  misc_feature (37)..(537): Homolog of NCBI NO: 1935912 NR Description: lethal leaf-spot 1 [Zea mays]
  misc_feature (64)..(553): Homolog of NCBI NO: 15451611 NR Description: Putative cell death suppressor protein [Oryza
  misc_feature (93)..(553): Homolog of NCBI NO: 1935909 NR Description: lethal leaf-spot 1 [Zea mays]
  misc_feature (37)..(553): Homolog of NCBI NO: 7489721 NR Description: cell death suppressor protein lls1 - maize
  misc_feature (18)..(553): Homolog of NCBI NO: 30088964 NR Description: lethal leaf spot 1-like protein [Vigna
  misc_feature (18)..(553): Homolog of NCBI NO: 16973465 NR Description: lethal leaf spot 1-like protein [Lycopersicon
  misc_feature (45)..(553): Homolog of NCBI NO: 1935914 NR Description: lethal leaf-spot 1 homolog [Arabidopsis thaliana]
  misc_feature (17)..(553): Homolog of NCBI NO: 37962886 NR Description: accelerated cell death 1 [Arabidopsis thaliana]
  misc_feature (17)..(553): Homolog of NCBI NO: 15230543 NR Description: Rieske [2Fe-2S] domain-containing protein
IRRVNKHQNPTNQTRKMSVVLLSSTSATITKSQSKKIPFLSPTTKFPLKVSISPSRSKLFHNPLRVAAPPSVPTSDSTEEKRIEEEYGGDKEEEGSEFKWRDHWYPVSLVEDLDPNVPTPFQLLGRDLVLWFDRNDQKWAAFDDLCPHRLAPLSEGRLDENGHLQCSYHGWSFGGCGSCTRIPQAATSGPEARAVKSPRACAIKFPTMVSQGLLFVWPDENGWDRANSIEPPRLPDDFDKPEFSTVTIQRDLFYGYDTLMENVSDPSHIDFAHHKVTGRRDRAKPLPFKVESSGPWGFQGANDDSPRITAKFVAPCYSMNKIELDAKLPIVGNQKWVIWICSFNIPMAPGKTRSIVCSARNFFQFSVPGPAWWQVVPRWYEHWTSNLVYDGDMIVLQGQEKVFLAKSMESPDYDVNKQYTKLTFTPTQADRFVLAFRNWLRRHGKSQPEWFGSTPSNQPLPSTVLTKRQMLDRFDQHTQVCSSCKGAYNSFQILKKFLVGATVFWAATAGVPSDVQIRLVLAGLSLISAASAYALHEQEKNFVFRDYVHSEIE

SEQ ID NO: 28578 - protein, 537 aa, Arabidopsis thaliana
  peptide (1)..(537): Ceres Seq. ID no. 13580543
  misc_feature (87)..(196): Pfam Name: Rieske [2Fe-2S] domain Pfam Description: Rieske [2Fe-2S] domain
  misc_feature (24)..(534): Homolog of NCBI NO: 30102998 NR Description: putative cell death suppressor protein
  misc_feature (21)..(521): Homolog of NCBI NO: 1935912 NR Description: lethal leaf-spot 1 [Zea mays]
  misc_feature (48)..(537): Homolog of NCBI NO: 15451611 NR Description: Putative cell death suppressor protein [Oryza
  misc_feature (77)..(537): Homolog of NCBI NO: 1935909 NR Description: lethal leaf-spot 1 [Zea mays]
  misc_feature (21)..(537): Homolog of NCBI NO: 7489721 NR Description: cell death suppressor protein lls1 - maize
  misc_feature (2)..(537): Homolog of NCBI NO: 30088964 NR Description: lethal leaf spot 1-like protein [Vigna
  misc_feature (2)..(537): Homolog of NCBI NO: 16973465 NR Description: lethal leaf spot 1-like protein [Lycopersicon
  misc_feature (29)..(537): Homolog of NCBI NO: 1935914 NR Description: lethal leaf-spot 1 homolog [Arabidopsis thaliana]
  misc_feature (1)..(537): Homolog of NCBI NO: 37962886 NR Description: accelerated cell death 1 [Arabidopsis thaliana]
  misc_feature (1)..(537): Homolog of NCBI NO: 15230543 NR Description: Rieske [2Fe-2S] domain-containing protein
MSVVLLSSTSATITKSQSKKIPFLSPTTKFPLKVSISPSRSKLFHNPLRVAAPPSVPTSDSTEEKRIEEEYGGDKEEEGSEFKWRDHWYPVSLVEDLDPNVPTPFQLLGRDLVLWFDRNDQKWAAFDDLCPHRLAPLSEGRLDENGHLQCSYHGWSFGGCGSCTRIPQAATSGPEARAVKSPRACAIKFPTMVSQGLLFVWPDENGWDRANSIEPPRLPDDFDKPEFSTVTIQRDLFYGYDTLMENVSDPSHIDFAHHKVTGRRDRAKPLPFKVESSGPWGFQGANDDSPRITAKFVAPCYSMNKIELDAKLPIVGNQKWVIWICSFNIPMAPGKTRSIVCSARNFFQFSVPGPAWWQVVPRWYEHWTSNLVYDGDMIVLQGQEKVFLAKSMESPDYDVNKQYTKLTFTPTQADRFVLAFRNWLRRHGKSQPEWFGSTPSNQPLPSTVLTKRQMLDRFDQHTQVCSSCKGAYNSFQILKKFLVGATVFWAATAGVPSDVQIRLVLAGLSLISAASAYALHEQEKNFVFRDYVHSEIE

SEQ ID NO: 28579 - protein, 346 aa, Arabidopsis thaliana
  peptide (1)..(346): Ceres Seq. ID no. 13580544
  misc_feature (1)..(343): Homolog of NCBI NO: 30102998 NR Description: putative cell death suppressor protein
  misc_feature (1)..(330): Homolog of NCBI NO: 1935912 NR Description: lethal leaf-spot 1 [Zea mays]
  misc_feature (1)..(346): Homolog of NCBI NO: 15451611 NR Description: Putative cell death suppressor protein [Oryza
  misc_feature (1)..(346): Homolog of NCBI NO: 1935909 NR Description: lethal leaf-spot 1 [Zea mays]
  misc_feature (1)..(346): Homolog of NCBI NO: 7489721 NR Description: cell death suppressor protein lls1 - maize
  misc_feature (1)..(346): Homolog of NCBI NO: 30088964 NR Description: lethal leaf spot 1-like protein [Vigna
  misc_feature (1)..(346): Homolog of NCBI NO: 16973465 NR Description: lethal leaf spot 1-like protein [Lycopersicon
  misc_feature (1)..(346): Homolog of NCBI NO: 1935914 NR Description: lethal leaf-spot 1 homolog [Arabidopsis thaliana]
  misc_feature (1)..(346): Homolog of NCBI NO: 37962886 NR Description: accelerated cell death 1 [Arabidopsis thaliana]
  misc_feature (1)..(346): Homolog of NCBI NO: 15230543 NR Description: Rieske [2Fe-2S] domain-containing protein
MVSQGLLFVWPDENGWDRANSIEPPRLPDDFDKPEFSTVTIQRDLFYGYDTLMENVSDPSHIDFAHHKVTGRRDRAKPLPFKVESSGPWGFQGANDDSPRITAKFVAPCYSMNKIELDAKLPIVGNQKWVIWICSFNIPMAPGKTRSIVCSARNFFQFSVPGPAWWQVVPRWYEHWTSNLVYDGDMIVLQGQEKVFLAKSMESPDYDVNKQYTKLTFTPTQADRFVLAFRNWLRRHGKSQPEWFGSTPSNQPLPSTVLTKRQMLDRFDQHTQVCSSCKGAYNSFQILKKFLVGATVFWAATAGVPSDVQIRLVLAGLSLISAASAYALHEQEKNFVFRDYVHSEIE

SEQ ID NO: 28580 - DNA, 895 bp, Arabidopsis thaliana
  misc_feature (1)..(895): Ceres Seq. ID no. 12482479
  misc_feature: MA Experiment ID: 20000180 Result: Up-regulated in Transcription
  misc_feature: MA Experiment 20000180 PARAMETER Experiment Name: At_Germinating_Seeds_P Parameter: Age (hr) Value: 24 vs. 0
  misc_feature: MA Experiment 20000180 PARAMETER Experiment Name: At_Germinating_Seeds_P Parameter: Tissue Value: Germinating Seeds
  misc_feature: MA Experiment ID: 20000264 Result: Up-regulated in Transcription
  misc_feature: MA Experiment 20000264 PARAMETER Experiment Name: At_Open_Flower_P Parameter: Age (day) Value: 21
  misc_feature: MA Experiment 20000264 PARAMETER Experiment Name: At_Open_Flower_P Parameter: Plant Line Value: WS
  misc_feature: MA Experiment 20000264 PARAMETER Experiment Name: At_Open_Flower_P Parameter: Tissue Value: Open Flower vs. Whole Plant
  misc_feature: MA Experiment ID: 20000265 Result: Up-regulated in Transcription
  misc_feature: MA Experiment 20000265 PARAMETER Experiment Name: At_Open_Flower_P Parameter: Age (day) Value: 21
  misc_feature: MA Experiment 20000265 PARAMETER Experiment Name: At_Open_Flower_P Parameter: Plant Line Value: WS
  misc_feature: MA Experiment 20000265 PARAMETER Experiment Name: At_Open_Flower_P Parameter: Tissue Value: Closed Flower vs. Whole Plant
  misc_feature: MA Experiment ID: 20000286 Result: Up-regulated in Transcription
  misc_feature: MA Experiment 20000286 PARAMETER Experiment Name: At_Open_Flower_P Parameter: Age (day) Value: 21
  misc_feature: MA Experiment 20000286 PARAMETER Experiment Name: At_Open_Flower_P Parameter: Plant Line Value: WS
  misc_feature: MA Experiment 20000286 PARAMETER Experiment Name: At_Open_Flower_P Parameter: Tissue Value: Half Open vs. Whole Plant
  misc_feature: MA Experiment ID: 20001555 Result: Up-regulated in Transcription
  misc_feature: MA Experiment 20001555 PARAMETER Experiment Name: At_Drought_Soil_Dry_P Parameter: Age (day) Value: 24
  misc_feature: MA Experiment 20001555 PARAMETER Experiment Name: At_Drought_Soil_Dry_P Parameter: Organism Value: A. thaliana
  misc_feature: MA Experiment 20001555 PARAMETER Experiment Name: At_Drought_Soil_Dry_P Parameter: Plant Line Value: WS
  misc_feature: MA Experiment 20001555 PARAMETER Experiment Name: At_Drought_Soil_Dry_P Parameter: Post Timepoint (hr) Value: None
  misc_feature: MA Experiment 20001555 PARAMETER Experiment Name: At_Drought_Soil_Dry_P Parameter: Post-Treatment Value: None
  misc_feature: MA Experiment 20001555 PARAMETER Experiment Name: At_Drought_Soil_Dry_P Parameter: Timepoint (day) Value: 10
  misc_feature: MA Experiment 20001555 PARAMETER Experiment Name: At_Drought_Soil_Dry_P Parameter: Treatment Value: Drought vs. No Drought
  misc_feature: MA Experiment ID: 20001560 Result: Up-regulated in Transcription
  misc_feature: MA Experiment 20001560 PARAMETER Experiment Name: At_Drought_Soil_Dry_P Parameter: Age (day) Value: 28
  misc_feature: MA Experiment 20001560 PARAMETER Experiment Name: At_Drought_Soil_Dry_P Parameter: Organism Value: A. thaliana
  misc_feature: MA Experiment 20001560 PARAMETER Experiment Name: At_Drought_Soil_Dry_P Parameter: Plant Line Value: WS
  misc_feature: MA Experiment 20001560 PARAMETER Experiment Name: At_Drought_Soil_Dry_P Parameter: Post Timepoint (hr) Value: None
  misc_feature: MA Experiment 20001560 PARAMETER Experiment Name: At_Drought_Soil_Dry_P Parameter: Post-Treatment Value: None
  misc_feature: MA Experiment 20001560 PARAMETER Experiment Name: At_Drought_Soil_Dry_P Parameter: Timepoint (day) Value: 14
  misc_feature: MA Experiment 20001560 PARAMETER Experiment Name: At_Drought_Soil_Dry_P Parameter: Treatment Value: Drought vs. No Drought
accactttaccacttatcaaagcttcttcaaagcttgcaaaaaattctccacagtctcgaagaagtagaagaagatgggtaaggaagatgaccgaggagaagagtacctgttcaagattgtcctaatcggcgattccgctgtcggaaaatcgaacttgctgtctcgattttcgcgggatgagttcgacacgaactcaaaagcgacaatcggagtggaatttcagacgcagctggttgaaatcgaagggaaagaagtgaaagctcagatctgggacactgctggtcaagagaggtttagagctgtcacttctgcttattacagaggtgcttttggtgctctcatcgtttatgacatcactcgaggtgacactttcgaaagcgttaaacgttggctccaggaactcaacactcattgtgacacggcagtggcacaaatgctagttgggaataaatgcgatttggaggatataagagcggtgagtgtggaggaagggaaagctcttgcggaggaagaaggattgttctttatggaaacatcggctctggacgccacaaatgtagacaaagcctttgagatcgttatcagagagatcttcaacaatgtcagccgcaaacttctcaactctgatgcttacaaagcagagctttccgttaaccgggtcagccttgtcaacaaccaagatggctccgagagctcttggcggaatccgtcttgttgctcccgatgatttcaatcaatcttgtttttaccagagaaagctttataaggttataattatcatttatgaagtcagacttataataagatacttgcaatctgttttgtcttgatactacacattggttctggccgagggattaaacaaaaatgacctgaccgaatagagaaaatggc

SEQ ID NO: 28581 - protein, 217 aa, Arabidopsis thaliana
  peptide (1)..(217): Ceres Seq. ID no. 12482480
  misc_feature (14)..(175): Pfam Name: Ras family Pfam Description: Ras family
  misc_feature (1)..(216): Homolog of NCBI NO: 7438428 NR Description: GTP-binding protein - garden pea
  misc_feature (1)..(217): Homolog of NCBI NO: 15231462 NR Description: GTP-binding protein, putative
MGKEDDRGEEYLFKIVLIGDSAVGKSNLLSRFSRDEFDTNSKATIGVEFQTQLVEIEGKEVKAQIWDTAGQERFRAVTSAYYRGAFGALIVYDITRGDTFESVKRWLQELNTHCDTAVAQMLVGNKCDLEDIRAVSVEEGKALAEEEGLFFMETSALDATNVDKAFEIVIREIFNNVSRKLLNSDAYKAELSVNRVSLVNNQDGSESSWRNPSCCSR

SEQ ID NO: 28582 - DNA, 597 bp, Arabidopsis thaliana
  misc_feature (1)..(597): Ceres Seq. ID no. 12579462
  misc_feature: MA Experiment ID: 108569 Result: Down-regulated in Transcription
  misc_feature: MA Experiment 108569 PARAMETER Experiment Name: At_0.001%_MeJA__cDNA_P Parameter: Timepoint (hr) Value: 6
  misc_feature: MA Experiment 108569 PARAMETER Experiment Name: At_0.001%_MeJA__cDNA_P Parameter: Tissue Value: Aerial
  misc_feature: MA Experiment 108569 PARAMETER Experiment Name: At_0.001%_MeJA__cDNA_P Parameter: Treatment Value: 0.001% MeJA vs. No Treatment
  misc_feature: MA Experiment ID: 20000173 Result: Down-regulated in Transcription
  misc_feature: MA Experiment 20000173 PARAMETER Experiment Name: At_42deg_Heat_P Parameter: Age (day) Value: 14
  misc_feature: MA Experiment 20000173 PARAMETER Experiment Name: At_42deg_Heat_P Parameter: Organism Value: A. thaliana
  misc_feature: MA Experiment 20000173 PARAMETER Experiment Name: At_42deg_Heat_P Parameter: Plant Line Value: WS
  misc_feature: MA Experiment 20000173 PARAMETER Experiment Name: At_42deg_Heat_P Parameter: Temperature (deg C) Value: 42 vs. 22
  misc_feature: MA Experiment 20000173 PARAMETER Experiment Name: At_42deg_Heat_P Parameter: Timepoint (hr) Value: 6
  misc_feature: MA Experiment 20000173 PARAMETER Experiment Name: At_42deg_Heat_P Parameter: Tissue Value: Aerial
  misc_feature: MA Experiment ID: 20001560 Result: Up-regulated in Transcription
  misc_feature: MA Experiment 20001560 PARAMETER Experiment Name: At_Drought_Soil_Dry_P Parameter: Age (day) Value: 28
  misc_feature: MA Experiment 20001560 PARAMETER Experiment Name: At_Drought_Soil_Dry_P Parameter: Organism Value: A. thaliana
  misc_feature: MA Experiment 20001560 PARAMETER Experiment Name: At_Drought_Soil_Dry_P Parameter: Plant Line Value: WS
  misc_feature: MA Experiment 20001560 PARAMETER Experiment Name: At_Drought_Soil_Dry_P Parameter: Post Timepoint (hr) Value: None
  misc_feature: MA Experiment 20001560 PARAMETER Experiment Name: At_Drought_Soil_Dry_P Parameter: Post-Treatment Value: None
  misc_feature: MA Experiment 20001560 PARAMETER Experiment Name: At_Drought_Soil_Dry_P Parameter: Timepoint (day) Value: 14
  misc_feature: MA Experiment 20001560 PARAMETER Experiment Name: At_Drought_Soil_Dry_P Parameter: Treatment Value: Drought vs. No Drought
  misc_feature: MA Experiment ID: 20001911 Result: Down-regulated in Transcription
  misc_feature: MA Experiment 20001911 PARAMETER Experiment Name: At_Drought_Reproduction_P Parameter: Age (day) Value: 40
  misc_feature: MA Experiment 20001911 PARAMETER Experiment Name: At_Drought_Reproduction_P Parameter: Organism Value: A. thaliana
  misc_feature: MA Experiment 20001911 PARAMETER Experiment Name: At_Drought_Reproduction_P Parameter: Plant Line Value: WS
  misc_feature: MA Experiment 20001911 PARAMETER Experiment Name: At_Drought_Reproduction_P Parameter: Timepoint (day) Value: 10
  misc_feature: MA Experiment 20001911 PARAMETER Experiment Name: At_Drought_Reproduction_P Parameter: Tissue Value: Flowers
  misc_feature: MA Experiment 20001911 PARAMETER Experiment Name: At_Drought_Reproduction_P Parameter: Treatment Value: Drought vs. No Drought
aagcgaatagcggaagaacagaaaaagggaaattctgaggaaaggtagaagaatcgagtcggaaaaatggaaacgacgaagagtaacagcagcgagtccgatgtcaacgccaaatgggacgcttgtctcgatctcactgctcgtcgctttgtctactcttccctcggcggcgctttcgccggtcttctcttcttcaggagtccggttacgagatgggcgtcgattgcttttggtgctggaattggtattggttctgcatacacagattgttctcgtgtttttgatgcgtcttcttcaacttcagctactttattagcagctcccaagagtacagagacttctgtatctcaggcagcagaagagtgaagacaacgaggaagcttggaggtaaaaaaccaaacattgatagggttacattacgaaatggtaattgatcttgcaggacaaggcttttgagataacgccattgttaaaaaaaaacttttgcttctcagtgtggttttgtacactgatgtcaaaattgttaatgacccactcattttttttgttttgaaaaatcttatgttcttttacttgagaaataattcctccggtttg

SEQ ID NO: 28583 - protein, 99 aa, Arabidopsis thaliana; identical to SEQ ID NO: 24405
  peptide (1)..(99): Ceres Seq. ID no. 12579463
  misc_feature (1)..(73): Pfam Name: Domain of unknown function (DUF543) Pfam Description: Domain of unknown function (DUF543)
  misc_feature (1)..(73): Pfam Name: Domain of unknown function (DUF543) Pfam Description: Domain of unknown function (DUF543)
  misc_feature (2)..(95): Homolog of NCBI NO: 25406151 NR Description: unknown protein T9N14.2 [imported] - Arabidopsis
  misc_feature (2)..(99): Homolog of NCBI NO: 21553491 NR Description: unknown [Arabidopsis thaliana]
  misc_feature (2)..(95): Homolog of NCBI NO: 25406151 NR Description: unknown protein T9N14.2 [imported] - Arabidopsis
  misc_feature (2)..(99): Homolog of NCBI NO: 18410008 NR Description: unknown protein
  misc_feature (1)..(99): Homolog of NCBI NO: 18395129 NR Description: expressed protein
  misc_feature (2)..(99): Homolog of NCBI NO: 21553491 NR Description: unknown [Arabidopsis thaliana]
  misc_feature (2)..(99): Homolog of NCBI NO: 18410008 NR Description: unknown protein
  misc_feature (1)..(99): Homolog of NCBI NO: 18395129 NR Description: expressed protein

SEQ ID NO: 28584 - protein, 71 aa, Arabidopsis thaliana; identical to SEQ ID NO: 24406
  peptide (1)..(71): Ceres Seq. ID no. 12579464

SEQ ID NO: 28585 - protein, 56 aa, Arabidopsis thaliana; identical to SEQ ID NO: 24407
  peptide (1)..(56): Ceres Seq. ID no. 12579465

SEQ ID NO: 28586 - DNA, 826 bp, Arabidopsis thaliana
  misc_feature (1)..(826): Ceres Seq. ID no. 12393708
  misc_feature: MA Experiment ID: 108434 Result: Down-regulated in Transcription
  misc_feature: MA Experiment 108434 PARAMETER Experiment Name: At_Root_Tips_cDNA_P Parameter: Tissue Value: Root Tips
  misc_feature: MA Experiment ID: 108435 Result: Down-regulated in Transcription
  misc_feature: MA Experiment 108435 PARAMETER Experiment Name: At_stm_Mutants_cDNA_P Parameter: Plant Line Value: wt Landsburg vs stm
  misc_feature: MA Experiment 108435 PARAMETER Experiment Name: At_stm_Mutants_cDNA_P Parameter: Tissue Value: Shoot Apical Meristem Region
  misc_feature: MA Experiment ID: 108461 Result: Up-regulated in Transcription
  misc_feature: MA Experiment 108461 PARAMETER Experiment Name: At_Germinating_Seeds_cDNA_P Parameter: Age (day) Value: 1 vs. 0
  misc_feature: MA Experiment 108461 PARAMETER Experiment Name: At_Germinating_Seeds_cDNA_P Parameter: Tissue Value: Germinating Seeds
  misc_feature: MA Experiment ID: 108462 Result: Up-regulated in Transcription
  misc_feature: MA Experiment 108462 PARAMETER Experiment Name: At_Germinating_Seeds_cDNA_P Parameter: Age (day) Value: 2 vs. 0
  misc_feature: MA Experiment 108462 PARAMETER Experiment Name: At_Germinating_Seeds_cDNA_P Parameter: Tissue Value: Germinating Seeds
  misc_feature: MA Experiment ID: 108464 Result: Up-regulated in Transcription
  misc_feature: MA Experiment 108464 PARAMETER Experiment Name: At_Germinating_Seeds_cDNA_P Parameter: Age (day) Value: 4 vs. 0
  misc_feature: MA Experiment 108464 PARAMETER Experiment Name: At_Germinating_Seeds_cDNA_P Parameter: Tissue Value: Germinating Seeds
  misc_feature: MA Experiment ID: 108488 Result: Up-regulated in Transcription
  misc_feature: MA Experiment ID: 108489 Result: Down-regulated in Transcription
  misc_feature: MA Experiment ID: 108501 Result: Up-regulated in Transcription
  misc_feature: MA Experiment 108501 PARAMETER Experiment Name: At_ap2_floral_buds_cDNA_P Parameter: Plant Line Value: ap2 (Ler.)
  misc_feature: MA Experiment 108501 PARAMETER Experiment Name: At_ap2_floral_buds_cDNA_P Parameter: Tissue Value: Closed Flower
  misc_feature: MA Experiment ID: 108594 Result: Down-regulated in Transcription
  misc_feature: MA Experiment 108594 PARAMETER Experiment Name: At_Ler-rhl_Root_cDNA_P Parameter: Plant Line Value: null
  misc_feature: MA Experiment ID: 108595 Result: Down-regulated in Transcription
  misc_feature: MA Experiment 108595 PARAMETER Experiment Name: At_Ler-pi_Ovule_cDNA_P Parameter: Plant Line Value: null
  misc_feature: MA Experiment ID: 108605 Result: Up-regulated in Transcription
  misc_feature: MA Experiment 108605 PARAMETER Experiment Name: At_100uM_ABA_cDNA_P Parameter: Timepoint (hr) Value: 6
  misc_feature: MA Experiment 108605 PARAMETER Experiment Name: At_100uM_ABA_cDNA_P Parameter: Tissue Value: Aerial
  misc_feature: MA Experiment 108605 PARAMETER Experiment Name: At_100uM_ABA_cDNA_P Parameter: Treatment Value: 100uM ABA vs. No Treatment
  misc_feature: MA Experiment ID: 20000090 Result: Down-regulated in Transcription
  misc_feature: MA Experiment ID: 20000111 Result: Down-regulated in Transcription
  misc_feature: MA Experiment 20000111 PARAMETER Experiment Name: At_42deg_Heat_cDNA_P Parameter: Temperature (deg C) Value: 42 vs. 22
  misc_feature: MA Experiment 20000111 PARAMETER Experiment Name: At_42deg_Heat_cDNA_P Parameter: Timepoint (hr) Value: 6
  misc_feature: MA Experiment 20000111 PARAMETER Experiment Name: At_42deg_Heat_cDNA_P Parameter: Tissue Value: Aerial
  misc_feature: MA Experiment ID: 20000113 Result: Down-regulated in Transcription
  misc_feature: MA Experiment 20000113 PARAMETER Experiment Name: At_42deg_Heat_cDNA_P Parameter: Temperature (deg C) Value: 42 vs. 22
  misc_feature: MA Experiment 20000113 PARAMETER Experiment Name: At_42deg_Heat_cDNA_P Parameter: Timepoint (hr) Value: 8
  misc_feature: MA Experiment 20000113 PARAMETER Experiment Name: At_42deg_Heat_cDNA_P Parameter: Tissue Value: Aerial
  misc_feature: MA Experiment ID: 20000169 Result: Up-regulated in Transcription
  misc_feature: MA Experiment 20000169 PARAMETER Experiment Name: At_100uM_ABA_P Parameter: Age (day) Value: 14
  misc_feature: MA Experiment 20000169 PARAMETER Experiment Name: At_100uM_ABA_P Parameter: Organism Value: A. thaliana
  misc_feature: MA Experiment 20000169 PARAMETER Experiment Name: At_100uM_ABA_P Parameter: Plant Line Value: WS
  misc_feature: MA Experiment 20000169 PARAMETER Experiment Name: At_100uM_ABA_P Parameter: Timepoint (hr) Value: 6
  misc_feature: MA Experiment 20000169 PARAMETER Experiment Name: At_100uM_ABA_P Parameter: Tissue Value: Aerial
  misc_feature: MA Experiment 20000169 PARAMETER Experiment Name: At_100uM_ABA_P Parameter: Treatment Value: 100uM ABA vs. No Treatment
  misc_feature: MA Experiment ID: 20000180 Result: Up-regulated in Transcription
  misc_feature: MA Experiment 20000180 PARAMETER Experiment Name: At_Germinating_Seeds_P Parameter: Age (hr) Value: 24 vs. 0
  misc_feature: MA Experiment 20000180 PARAMETER Experiment Name: At_Germinating_Seeds_P Parameter: Tissue Value: Germinating Seeds
  misc_feature: MA Experiment ID: 20000185 Result: Down-regulated in Transcription
  misc_feature: MA Experiment 20000185 PARAMETER Experiment Name: At_Roots__P Parameter: Age (day) Value: 7 vs. 21
  misc_feature: MA Experiment 20000185 PARAMETER Experiment Name: At_Roots__P Parameter: Organism Value: A. thaliana
  misc_feature: MA Experiment 20000185 PARAMETER Experiment Name: At_Roots__P Parameter: Tissue Value: Roots vs. Whole Plant
  misc_feature: MA Experiment ID: 20000224 Result: Up-regulated in Transcription
  misc_feature: MA Experiment ID: 20000439 Result: Down-regulated in Transcription
  misc_feature: MA Experiment 20000439 PARAMETER Experiment Name: At_Roots__P Parameter: Age (day) Value: 14 vs. 21
  misc_feature: MA Experiment 20000439 PARAMETER Experiment Name: At_Roots__P Parameter: Organism Value: A. thaliana
  misc_feature: MA Experiment 20000439 PARAMETER Experiment Name: At_Roots__P Parameter: Tissue Value: Roots vs. Whole Plant
  misc_feature: MA Experiment ID: 20000451 Result: Up-regulated in Transcription
  misc_feature: MA Experiment 20000451 PARAMETER Experiment Name: At_CS6879_Shoots-Roots_P Parameter: Age (day) Value: 14
  misc_feature: MA Experiment 20000451 PARAMETER Experiment Name: At_CS6879_Shoots-Roots_P Parameter: Organism Value: A. thaliana
  misc_feature: MA Experiment 20000451 PARAMETER Experiment Name: At_CS6879_Shoots-Roots_P Parameter: Plant Line Value: CS6879 vs. WS
  misc_feature: MA Experiment 20000451 PARAMETER Experiment Name: At_CS6879_Shoots-Roots_P Parameter: Tissue Value: Roots
  misc_feature: MA Experiment ID: 20000496 Result: Down-regulated in Transcription
  misc_feature: MA Experiment 20000496 PARAMETER Experiment Name: At_Guard_Cells_P Parameter: Harvest Date Value: 7/19/2002
  misc_feature: MA Experiment 20000496 PARAMETER Experiment Name: At_Guard_Cells_P Parameter: Organism Value: Canola
  misc_feature: MA Experiment 20000496 PARAMETER Experiment Name: At_Guard_Cells_P Parameter: Tissue Value: Guard Cells vs. Leaves
  misc_feature: MA Experiment ID: 20000573 Result: Down-regulated in Transcription
  misc_feature: MA Experiment 20000573 PARAMETER Experiment Name: At_100uM_ABA_Mutants__P Parameter: Organism Value: A. thaliana
  misc_feature: MA Experiment 20000573 PARAMETER Experiment Name: At_100uM_ABA_Mutants__P Parameter: Plant Line Value: CS22 vs. Ler wt
  misc_feature: MA Experiment 20000573 PARAMETER Experiment Name: At_100uM_ABA_Mutants__P Parameter: Timepoint (hr) Value: N/A
  misc_feature: MA Experiment 20000573 PARAMETER Experiment Name: At_100uM_ABA_Mutants__P Parameter: Tissue Value: Whole Plant
  misc_feature: MA Experiment 20000573 PARAMETER Experiment Name: At_100uM_ABA_Mutants__P Parameter: Treatment Value: None
  misc_feature: MA Experiment ID: 20000576 Result: Up-regulated in Transcription
  misc_feature: MA Experiment 20000576 PARAMETER Experiment Name: At_100uM_ABA_Mutants__P Parameter: Organism Value: A. thaliana
  misc_feature: MA Experiment 20000576 PARAMETER Experiment Name: At_100uM_ABA_Mutants__P Parameter: Plant Line Value: CS23
  misc_feature: MA Experiment 20000576 PARAMETER Experiment Name: At_100uM_ABA_Mutants__P Parameter: Timepoint (hr) Value: 6
  misc_feature: MA Experiment 20000576 PARAMETER Experiment Name: At_100uM_ABA_Mutants__P Parameter: Tissue Value: Whole Plant
  misc_feature: MA Experiment 20000576 PARAMETER Experiment Name: At_100uM_ABA_Mutants__P Parameter: Treatment Value: 1uM ABA vs. No Treatment
  misc_feature: MA Experiment ID: 20000794 Result: Down-regulated in Transcription
  misc_feature: MA Experiment 20000794 PARAMETER Experiment Name: At_Petals_P Parameter: Age (day) Value: 23-25 days
  misc_feature: MA Experiment 20000794 PARAMETER Experiment Name: At_Petals_P Parameter: Plant Line Value: WS
  misc_feature: MA Experiment 20000794 PARAMETER Experiment Name: At_Petals_P Parameter: Tissue Value: Petals vs. Whole plant
  misc_feature: MA Experiment ID: 20001248 Result: Down-regulated in Transcription
  misc_feature: MA Experiment 20001248 PARAMETER Experiment Name: At_Far-red-induction_P Parameter: Age (day) Value: 7
  misc_feature: MA Experiment 20001248 PARAMETER Experiment Name: At_Far-red-induction_P Parameter: Light Value: Far-red vs. White
  misc_feature: MA Experiment 20001248 PARAMETER Experiment Name: At_Far-red-induction_P Parameter: Organism Value: A. thaliana
  misc_feature: MA Experiment 20001248 PARAMETER Experiment Name: At_Far-red-induction_P Parameter: Plant Line Value: Columbia
  misc_feature: MA Experiment 20001248 PARAMETER Experiment Name: At_Far-red-induction_P Parameter: Timepoint (hr) Value: 4
  misc_feature: MA Experiment 20001248 PARAMETER Experiment Name: At_Far-red-induction_P Parameter: Tissue Value: Whole Plant
  misc_feature: MA Experiment ID: 20001451 Result: Down-regulated in Transcription
  misc_feature: MA Experiment 20001451 PARAMETER Experiment Name: At_Far-red-induction_P Parameter: Age (day) Value: 7
  misc_feature: MA Experiment 20001451 PARAMETER Experiment Name: At_Far-red-induction_P Parameter: Light Value: Far-red vs. White
  misc_feature: MA Experiment 20001451 PARAMETER Experiment Name: At_Far-red-induction_P Parameter: Organism Value: A. thaliana
  misc_feature: MA Experiment 20001451 PARAMETER Experiment Name: At_Far-red-induction_P Parameter: Plant Line Value: Columbia
  misc_feature: MA Experiment 20001451 PARAMETER Experiment Name: At_Far-red-induction_P Parameter: Timepoint (hr) Value: 24
  misc_feature: MA Experiment 20001451 PARAMETER Experiment Name: At_Far-red-induction_P Parameter: Tissue Value: Whole Plant
ccacaacacaacttcagctttaagacagctaaaactaaatacaaagaaacagagatgggtttggttacagaggaggtgagagctaaggcagagatgtacaccggagatgagatatgtagagagaagacaaagtgtttcctcaaggaaatatctatgcccaatggtttattaccattgaaggatatagaagaggttgggtatgacagagagtcaggtgttgtatggctgaagcagaagaagagcatcactcacaagttcacagagatagataagcttgtctcctatggaaccgaagtcacagccattgttgagaccgggaaaatcaagaagctcactggagtcaaagccaaggaacttcttatttgggtcactatcaatgagatctataccgaggaaccccctaccaagatcacgttcaagacaccgaccacactgtccaggactttcccggtcacagcttttatagtcccagaagaacctgccaaggaggaacctgccaaagaggaacctgccaaggagaagagcagcgaagccaccgaggccaaggaggctgttgcaatcaaggaggctgtcgcagtcaaagaggcggcctaatcagctcagcttcagcagataaaagagacccgaatttttaagtgtacttcaagaatttgaacaaatcatggagagttagtgtttctcactgctctaactatcatgtattatctacctaccacttgttgctgcttgttttacctgtaataagatatcaatatcatcctgttccactaaaacttatccttaattatctataaactacaatacagctggttctgtatgtcacttc

SEQ ID NO: 28587 - protein, 197 aa, Arabidopsis thaliana
  peptide (1)..(197): Ceres Seq. ID no. 12393709
  misc_feature (21)..(166): Pfam Name: Protein of unknown function, DUF538 Pfam Description: Protein of unknown function, DUF538
  misc_feature (24)..(159): Homolog of NCBI NO: 34915378 NR Description: hypothetical protein~similar to Oryza sativa
  misc_feature (24)..(158): Homolog of NCBI NO: 34915376 NR Description: hypothetical protein~similar to Oryza sativa
  misc_feature (24)..(154): Homolog of NCBI NO: 34915418 NR Description: hypothetical protein~similar to Arabidopsis
  misc_feature (24)..(158): Homolog of NCBI NO: 33146557 NR Description: unknown protein [Oryza sativa (japonica
  misc_feature (24)..(158): Homolog of NCBI NO: 34915422 NR Description: hypothetical protein~similar to Arabidopsis
  misc_feature (24)..(158): Homolog of NCBI NO: 34915426 NR Description: hypothetical protein~similar to Arabidopsis
  misc_feature (24)..(176): Homolog of NCBI NO: 34903866 NR Description: unnamed protein product [Oryza sativa (japonica
  misc_feature (24)..(158): Homolog of NCBI NO: 34915410 NR Description: hypothetical protein~similar to Arabidopsis
  misc_feature (19)..(190): Homolog of NCBI NO: 18405887 NR Description: expressed protein
  misc_feature (19)..(197): Homolog of NCBI NO: 18391006 NR Description: expressed protein
PQHNFSFKTAKTKYKETEMGLVTEEVRAKAEMYTGDEICREKTKCFLKEISMPNGLLPLKDIEEVGYDRESGVVWLKQKKSITHKFTEIDKLVSYGTEVTAIVETGKIKKLTGVKAKELLIWVTINEIYTEEPPTKITFKTPTTLSRTFPVTAFIVPEEPAKEEPAKEEPAKEKSSEATEAKEAVAIKEAVAVKEAA

SEQ ID NO: 28588 - protein, 179 aa, Arabidopsis thaliana
  peptide (1)..(179): Ceres Seq. ID no. 12393710
  misc_feature (3)..(148): Pfam Name: Protein of unknown function, DUF538 Pfam Description: Protein of unknown function, DUF538
  misc_feature (6)..(141): Homolog of NCBI NO: 34915378 NR Description: hypothetical protein~similar to Oryza sativa
  misc_feature (6)..(140): Homolog of NCBI NO: 34915376 NR Description: hypothetical protein~similar to Oryza sativa
  misc_feature (6)..(136): Homolog of NCBI NO: 34915418 NR Description: hypothetical protein~similar to Arabidopsis
  misc_feature (6)..(140): Homolog of NCBI NO: 33146557 NR Description: unknown protein [Oryza sativa (japonica
  misc_feature (6)..(140): Homolog of NCBI NO: 34915422 NR Description: hypothetical protein~similar to Arabidopsis
  misc_feature (6)..(140): Homolog of NCBI NO: 34915426 NR Description: hypothetical protein~similar to Arabidopsis
  misc_feature (6)..(158): Homolog of NCBI NO: 34903866 NR Description: unnamed protein product [Oryza sativa (japonica
  misc_feature (6)..(140): Homolog of NCBI NO: 34915410 NR Description: hypothetical protein~similar to Arabidopsis
  misc_feature (1)..(172): Homolog of NCBI NO: 18405887 NR Description: expressed protein
  misc_feature (1)..(179): Homolog of NCBI NO: 18391006 NR Description: expressed protein
MGLVTEEVRAKAEMYTGDEICREKTKCFLKEISMPNGLLPLKDIEEVGYDRESGVVWLKQKKSITHKFTEIDKLVSYGTEVTAIVETGKIKKLTGVKAKELLIWVTINEIYTEEPPTKITFKTPTTLSRTFPVTAFIVPEEPAKEEPAKEEPAKEKSSEATEAKEAVAIKEAVAVKEAA

SEQ ID NO: 28589 - protein, 166 aa, Arabidopsis thaliana
  peptide (1)..(166): Ceres Seq. ID no. 12393711
  misc_feature (1)..(135): Pfam Name: Protein of unknown function, DUF538 Pfam Description: Protein of unknown function, DUF538
  misc_feature (1)..(128): Homolog of NCBI NO: 34915378 NR Description: hypothetical protein~similar to Oryza sativa
  misc_feature (1)..(127): Homolog of NCBI NO: 34915376 NR Description: hypothetical protein~similar to Oryza sativa
  misc_feature (1)..(123): Homolog of NCBI NO: 34915418 NR Description: hypothetical protein~similar to Arabidopsis
  misc_feature (1)..(127): Homolog of NCBI NO: 33146557 NR Description: unknown protein [Oryza sativa (japonica
  misc_feature (1)..(127): Homolog of NCBI NO: 34915422 NR Description: hypothetical protein~similar to Arabidopsis
  misc_feature (1)..(127): Homolog of NCBI NO: 34915426 NR Description: hypothetical protein~similar to Arabidopsis
  misc_feature (1)..(145): Homolog of NCBI NO: 34903866 NR Description: unnamed protein product [Oryza sativa (japonica
  misc_feature (1)..(127): Homolog of NCBI NO: 34915410 NR Description: hypothetical protein~similar to Arabidopsis
  misc_feature (1)..(159): Homolog of NCBI NO: 18405887 NR Description: expressed protein
  misc_feature (1)..(166): Homolog of NCBI NO: 18391006 NR Description: expressed protein
MYTGDEICREKTKCFLKEISMPNGLLPLKDIEEVGYDRESGVVWLKQKKSITHKFTEIDKLVSYGTEVTAIVETGKIKKLTGVKAKELLIWVTINEIYTEEPPTKITFKTPTTLSRTFPVTAFIVPEEPAKEEPAKEEPAKEKSSEATEAKEAVAIKEAVAVKEAA

SEQ ID NO: 28590 - DNA, 1044 bp, Arabidopsis thaliana
  misc_feature (1)..(1044): Ceres Seq. ID no. 13491459
  misc_feature: MA Experiment ID: 108434 Result: Up-regulated in Transcription
  misc_feature: MA Experiment 108434 PARAMETER Experiment Name: At_Root_Tips_cDNA_P Parameter: Tissue Value: Root Tips
  misc_feature: MA Experiment ID: 108461 Result: Up-regulated in Transcription
  misc_feature: MA Experiment 108461 PARAMETER Experiment Name: At_Germinating_Seeds_cDNA_P Parameter: Age (day) Value: 1 vs. 0
  misc_feature: MA Experiment 108461 PARAMETER Experiment Name: At_Germinating_Seeds_cDNA_P Parameter: Tissue Value: Germinating Seeds
  misc_feature: MA Experiment ID: 108462 Result: Up-regulated in Transcription
  misc_feature: MA Experiment 108462 PARAMETER Experiment Name: At_Germinating_Seeds_cDNA_P Parameter: Age (day) Value: 2 vs. 0
  misc_feature: MA Experiment 108462 PARAMETER Experiment Name: At_Germinating_Seeds_cDNA_P Parameter: Tissue Value: Germinating Seeds
  misc_feature: MA Experiment ID: 108463 Result: Up-regulated in Transcription
  misc_feature: MA Experiment 108463 PARAMETER Experiment Name: At_Germinating_Seeds_cDNA_P Parameter: Age (day) Value: 3 vs. 0
  misc_feature: MA Experiment 108463 PARAMETER Experiment Name: At_Germinating_Seeds_cDNA_P Parameter: Tissue Value: Germinating Seeds
  misc_feature: MA Experiment ID: 108464 Result: Up-regulated in Transcription
  misc_feature: MA Experiment 108464 PARAMETER Experiment Name: At_Germinating_Seeds_cDNA_P Parameter: Age (day) Value: 4 vs. 0
  misc_feature: MA Experiment 108464 PARAMETER Experiment Name: At_Germinating_Seeds_cDNA_P Parameter: Tissue Value: Germinating Seeds
  misc_feature: MA Experiment ID: 20000071 Result: Down-regulated in Transcription
  misc_feature: MA Experiment 20000071 PARAMETER Experiment Name: At_100uM_ABA_Mutants_cDNA_P Parameter: Plant Line Value: CS8104
  misc_feature: MA Experiment 20000071 PARAMETER Experiment Name: At_100uM_ABA_Mutants_cDNA_P Parameter: Timepoint (hr) Value: 6
  misc_feature: MA Experiment 20000071 PARAMETER Experiment Name: At_100uM_ABA_Mutants_cDNA_P Parameter: Tissue Value: Aerial
  misc_feature: MA Experiment 20000071 PARAMETER Experiment Name: At_100uM_ABA_Mutants_cDNA_P Parameter: Treatment Value: 100uM ABA vs. No Treatment
  misc_feature: MA Experiment ID: 20000072 Result: Down-regulated in Transcription
  misc_feature: MA Experiment 20000072 PARAMETER Experiment Name: At_100uM_ABA_Mutants_cDNA_P Parameter: Plant Line Value: CS8105
  misc_feature: MA Experiment 20000072 PARAMETER Experiment Name: At_100uM_ABA_Mutants_cDNA_P Parameter: Timepoint (hr) Value: 6
  misc_feature: MA Experiment 20000072 PARAMETER Experiment Name: At_100uM_ABA_Mutants_cDNA_P Parameter: Tissue Value: Aerial
  misc_feature: MA Experiment 20000072 PARAMETER Experiment Name: At_100uM_ABA_Mutants_cDNA_P Parameter: Treatment Value: 100uM ABA vs. No Treatment
  misc_feature: MA Experiment ID: 20000093 Result: Down-regulated in Transcription
  misc_feature: MA Experiment 20000093 PARAMETER Experiment Name: At_42deg_Heat_cDNA_P Parameter: Temperature (deg C) Value: 42 vs. 22
  misc_feature: MA Experiment 20000093 PARAMETER Experiment Name: At_42deg_Heat_cDNA_P Parameter: Timepoint (hr) Value: 0.5
  misc_feature: MA Experiment 20000093 PARAMETER Experiment Name: At_42deg_Heat_cDNA_P Parameter: Tissue Value: Aerial
  misc_feature: MA Experiment ID: 20000111 Result: Down-regulated in Transcription
  misc_feature: MA Experiment 20000111 PARAMETER Experiment Name: At_42deg_Heat_cDNA_P Parameter: Temperature (deg C) Value: 42 vs. 22
  misc_feature: MA Experiment 20000111 PARAMETER Experiment Name: At_42deg_Heat_cDNA_P Parameter: Timepoint (hr) Value: 6
  misc_feature: MA Experiment 20000111 PARAMETER Experiment Name: At_42deg_Heat_cDNA_P Parameter: Tissue Value: Aerial
  misc_feature: MA Experiment ID: 20000112 Result: Down-regulated in Transcription
  misc_feature: MA Experiment 20000112 PARAMETER Experiment Name: At_42deg_Heat_cDNA_P Parameter: Temperature (deg C) Value: 42 vs. 22
  misc_feature: MA Experiment 20000112 PARAMETER Experiment Name: At_42deg_Heat_cDNA_P Parameter: Timepoint (hr) Value: 2
  misc_feature: MA Experiment 20000112 PARAMETER Experiment Name: At_42deg_Heat_cDNA_P Parameter: Tissue Value: Aerial
  misc_feature: MA Experiment ID: 20000117 Result: Down-regulated in Transcription
  misc_feature: MA Experiment 20000117 PARAMETER Experiment Name: At_100uM_ABA_Mutants_cDNA_P Parameter: Plant Line Value: Columbia
  misc_feature: MA Experiment 20000117 PARAMETER Experiment Name: At_100uM_ABA_Mutants_cDNA_P Parameter: Timepoint (hr) Value: 6
  misc_feature: MA Experiment 20000117 PARAMETER Experiment Name: At_100uM_ABA_Mutants_cDNA_P Parameter: Tissue Value: Aerial
  misc_feature: MA Experiment 20000117 PARAMETER Experiment Name: At_100uM_ABA_Mutants_cDNA_P Parameter: Treatment Value: 100uM ABA vs. No Treatment
  misc_feature: MA Experiment ID: 20000144 Result: Down-regulated in Transcription
  misc_feature: MA Experiment 20000144 PARAMETER Experiment Name: At_42deg_Heat_cDNA_P Parameter: Temperature (deg C) Value: 42 vs. 22
  misc_feature: MA Experiment 20000144 PARAMETER Experiment Name: At_42deg_Heat_cDNA_P Parameter: Timepoint (hr) Value: 1
  misc_feature: MA Experiment 20000144 PARAMETER Experiment Name: At_42deg_Heat_cDNA_P Parameter: Tissue Value: Aerial
  misc_feature: MA Experiment ID: 20000171 Result: Down-regulated in Transcription
  misc_feature: MA Experiment 20000171 PARAMETER Experiment Name: At_42deg_Heat_P Parameter: Age (day) Value: 14
  misc_feature: MA Experiment 20000171 PARAMETER Experiment Name: At_42deg_Heat_P Parameter: Organism Value: A. thaliana
  misc_feature: MA Experiment 20000171 PARAMETER Experiment Name: At_42deg_Heat_P Parameter: Plant Line Value: WS
  misc_feature: MA Experiment 20000171 PARAMETER Experiment Name: At_42deg_Heat_P Parameter: Temperature (deg C) Value: 42 vs. 22
  misc_feature: MA Experiment 20000171 PARAMETER Experiment Name: At_42deg_Heat_P Parameter: Timepoint (hr) Value: 1
  misc_feature: MA Experiment 20000171 PARAMETER Experiment Name: At_42deg_Heat_P Parameter: Tissue Value: Aerial
  misc_feature: MA Experiment ID: 20000173 Result: Down-regulated in Transcription
  misc_feature: MA Experiment 20000173 PARAMETER Experiment Name: At_42deg_Heat_P Parameter: Age (day) Value: 14
  misc_feature: MA Experiment 20000173 PARAMETER Experiment Name: At_42deg_Heat_P Parameter: Organism Value: A. thaliana
  misc_feature: MA Experiment 20000173 PARAMETER Experiment Name: At_42deg_Heat_P Parameter: Plant Line Value: WS
  misc_feature: MA Experiment 20000173 PARAMETER Experiment Name: At_42deg_Heat_P Parameter: Temperature (deg C) Value: 42 vs. 22
  misc_feature: MA Experiment 20000173 PARAMETER Experiment Name: At_42deg_Heat_P Parameter: Timepoint (hr) Value: 6
  misc_feature: MA Experiment 20000173 PARAMETER Experiment Name: At_42deg_Heat_P Parameter: Tissue Value: Aerial
  misc_feature: MA Experiment ID: 20000180 Result: Up-regulated in Transcription
  misc_feature: MA Experiment 20000180 PARAMETER Experiment Name: At_Germinating_Seeds_P Parameter: Age (hr) Value: 24 vs. 0
  misc_feature: MA Experiment 20000180 PARAMETER Experiment Name: At_Germinating_Seeds_P Parameter: Tissue Value: Germinating Seeds
  misc_feature: MA Experiment ID: 20000227 Result: Down-regulated in Transcription
  misc_feature: MA Experiment 20000227 PARAMETER Experiment Name: At_Root-Tips-vs-Tops_P Parameter: Tissue Value: Root Tips vs. Root Tops
  misc_feature: MA Experiment ID: 20000436 Result: Down-regulated in Transcription
  misc_feature: MA Experiment 20000436 PARAMETER Experiment Name: At_Drought_P Parameter: Age (day) Value: 7
  misc_feature: MA Experiment 20000436 PARAMETER Experiment Name: At_Drought_P Parameter: Organism Value: A. thaliana
  misc_feature: MA Experiment 20000436 PARAMETER Experiment Name: At_Drought_P Parameter: Plant Line Value: WS
  misc_feature: MA Experiment 20000436 PARAMETER Experiment Name: At_Drought_P Parameter: Timepoint (hr) Value: 12
  misc_feature: MA Experiment 20000436 PARAMETER Experiment Name: At_Drought_P Parameter: Tissue Value: Whole Plant
  misc_feature: MA Experiment 20000436 PARAMETER Experiment Name: At_Drought_P Parameter: Treatment Value: Drought vs. No Drought
  misc_feature: MA Experiment ID: 20000437 Result: Down-regulated in Transcription
  misc_feature: MA Experiment 20000437 PARAMETER Experiment Name: At_Drought_P Parameter: Age (day) Value: 8
  misc_feature: MA Experiment 20000437 PARAMETER Experiment Name: At_Drought_P Parameter: Organism Value: A. thaliana
  misc_feature: MA Experiment 20000437 PARAMETER Experiment Name: At_Drought_P Parameter: Plant Line Value: WS
  misc_feature: MA Experiment 20000437 PARAMETER Experiment Name: At_Drought_P Parameter: Timepoint (hr) Value: 24
  misc_feature: MA Experiment 20000437 PARAMETER Experiment Name: At_Drought_P Parameter: Tissue Value: Whole Plant
  misc_feature: MA Experiment 20000437 PARAMETER Experiment Name: At_Drought_P Parameter: Treatment Value: Drought vs. No Drought
  misc_feature: MA Experiment ID: 20000444 Result: Up-regulated in Transcription
  misc_feature: MA Experiment 20000444 PARAMETER Experiment Name: At_100uM_NAA__P Parameter: Age (day) Value: 14
  misc_feature: MA Experiment 20000444 PARAMETER Experiment Name: At_100uM_NAA__P Parameter: Organism Value: A. thaliana
  misc_feature: MA Experiment 20000444 PARAMETER Experiment Name: At_100uM_NAA__P Parameter: Plant Line Value: WS
  misc_feature: MA Experiment 20000444 PARAMETER Experiment Name: At_100uM_NAA__P Parameter: Timepoint (hr) Value: 1
  misc_feature: MA Experiment 20000444 PARAMETER Experiment Name: At_100uM_NAA__P Parameter: Tissue Value: Aerial
  misc_feature: MA Experiment 20000444 PARAMETER Experiment Name: At_100uM_NAA__P Parameter: Treatment Value: 100uM NAA vs. No Treatment
  misc_feature: MA Experiment ID: 20001247 Result: Up-regulated in Transcription
  misc_feature: MA Experiment 20001247 PARAMETER Experiment Name: At_Far-red-induction_P Parameter: Age (day) Value: 7
  misc_feature: MA Experiment 20001247 PARAMETER Experiment Name: At_Far-red-induction_P Parameter: Light Value: Far-red vs. White
  misc_feature: MA Experiment 20001247 PARAMETER Experiment Name: At_Far-red-induction_P Parameter: Organism Value: A. thaliana
  misc_feature: MA Experiment 20001247 PARAMETER Experiment Name: At_Far-red-induction_P Parameter: Plant Line Value: Columbia
  misc_feature: MA Experiment 20001247 PARAMETER Experiment Name: At_Far-red-induction_P Parameter: Timepoint (hr) Value: 1
  misc_feature: MA Experiment 20001247 PARAMETER Experiment Name: At_Far-red-induction_P Parameter: Tissue Value: Whole Plant
  misc_feature: MA Experiment ID: 20001248 Result: Up-regulated in Transcription
  misc_feature: MA Experiment 20001248 PARAMETER Experiment Name: At_Far-red-induction_P Parameter: Age (day) Value: 7
  misc_feature: MA Experiment 20001248 PARAMETER Experiment Name: At_Far-red-induction_P Parameter: Light Value: Far-red vs. White
  misc_feature: MA Experiment 20001248 PARAMETER Experiment Name: At_Far-red-induction_P Parameter: Organism Value: A. thaliana
  misc_feature: MA Experiment 20001248 PARAMETER Experiment Name: At_Far-red-induction_P Parameter: Plant Line Value: Columbia
  misc_feature: MA Experiment 20001248 PARAMETER Experiment Name: At_Far-red-induction_P Parameter: Timepoint (hr) Value: 4
  misc_feature: MA Experiment 20001248 PARAMETER Experiment Name: At_Far-red-induction_P Parameter: Tissue Value: Whole Plant
  misc_feature: MA Experiment ID: 20001450 Result: Up-regulated in Transcription
  misc_feature: MA Experiment 20001450 PARAMETER Experiment Name: At_Far-red-induction_P Parameter: Age (day) Value: 7
  misc_feature: MA Experiment 20001450 PARAMETER Experiment Name: At_Far-red-induction_P Parameter: Light Value: Far-red vs. White
  misc_feature: MA Experiment 20001450 PARAMETER Experiment Name: At_Far-red-induction_P Parameter: Organism Value: A. thaliana
  misc_feature: MA Experiment 20001450 PARAMETER Experiment Name: At_Far-red-induction_P Parameter: Plant Line Value: Columbia
  misc_feature: MA Experiment 20001450 PARAMETER Experiment Name: At_Far-red-induction_P Parameter: Timepoint (hr) Value: 8
  misc_feature: MA Experiment 20001450 PARAMETER Experiment Name: At_Far-red-induction_P Parameter: Tissue Value: Whole Plant
  misc_feature: MA Experiment ID: 20001451 Result: Up-regulated in Transcription
  misc_feature: MA Experiment 20001451 PARAMETER Experiment Name: At_Far-red-induction_P Parameter: Age (day) Value: 7
  misc_feature: MA Experiment 20001451 PARAMETER Experiment Name: At_Far-red-induction_P Parameter: Light Value: Far-red vs. White
  misc_feature: MA Experiment 20001451 PARAMETER Experiment Name: At_Far-red-induction_P Parameter: Organism Value: A. thaliana
  misc_feature: MA Experiment 20001451 PARAMETER Experiment Name: At_Far-red-induction_P Parameter: Plant Line Value: Columbia
  misc_feature: MA Experiment 20001451 PARAMETER Experiment Name: At_Far-red-induction_P Parameter: Timepoint (hr) Value: 24
  misc_feature: MA Experiment 20001451 PARAMETER Experiment Name: At_Far-red-induction_P Parameter: Tissue Value: Whole Plant
  misc_feature: MA Experiment ID: 20001555 Result: Down-regulated in Transcription
  misc_feature: MA Experiment 20001555 PARAMETER Experiment Name: At_Drought_Soil_Dry_P Parameter: Age (day) Value: 24
  misc_feature: MA Experiment 20001555 PARAMETER Experiment Name: At_Drought_Soil_Dry_P Parameter: Organism Value: A. thaliana
  misc_feature: MA Experiment 20001555 PARAMETER Experiment Name: At_Drought_Soil_Dry_P Parameter: Plant Line Value: WS
  misc_feature: MA Experiment 20001555 PARAMETER Experiment Name: At_Drought_Soil_Dry_P Parameter: Post Timepoint (hr) Value: None
  misc_feature: MA Experiment 20001555 PARAMETER Experiment Name: At_Drought_Soil_Dry_P Parameter: Post-Treatment Value: None
  misc_feature: MA Experiment 20001555 PARAMETER Experiment Name: At_Drought_Soil_Dry_P Parameter: Timepoint (day) Value: 10
  misc_feature: MA Experiment 20001555 PARAMETER Experiment Name: At_Drought_Soil_Dry_P Parameter: Treatment Value: Drought vs. No Drought
  misc_feature: MA Experiment ID: 20001757 Result: Up-regulated in Transcription
  misc_feature: MA Experiment 20001757 PARAMETER Experiment Name: At_50mM_NH4NO3_L-to-H_P Parameter: Timepoint (hr) Value: 6
  misc_feature: MA Experiment 20001757 PARAMETER Experiment Name: At_50mM_NH4NO3_L-to-H_P Parameter: Tissue Value: Leaf
  misc_feature: MA Experiment 20001757 PARAMETER Experiment Name: At_50mM_NH4NO3_L-to-H_P Parameter: Treatment Value: 50mM NH4NO3 vs 100mM Mannitol
  misc_feature: MA Experiment ID: 20001904 Result: Down-regulated in Transcription
  misc_feature: MA Experiment 20001904 PARAMETER Experiment Name: At_Drought_Reproduction_P Parameter: Age (day) Value: 37
  misc_feature: MA Experiment 20001904 PARAMETER Experiment Name: At_Drought_Reproduction_P Parameter: Organism Value: A. thaliana
  misc_feature: MA Experiment 20001904 PARAMETER Experiment Name: At_Drought_Reproduction_P Parameter: Plant Line Value: WS
  misc_feature: MA Experiment 20001904 PARAMETER Experiment Name: At_Drought_Reproduction_P Parameter: Timepoint (day) Value: 7
  misc_feature: MA Experiment 20001904 PARAMETER Experiment Name: At_Drought_Reproduction_P Parameter: Tissue Value: Rosettes
  misc_feature: MA Experiment 20001904 PARAMETER Experiment Name: At_Drought_Reproduction_P Parameter: Treatment Value: Drought vs. No Drought
  misc_feature: MA Experiment ID: 20001905 Result: Down-regulated in Transcription
  misc_feature: MA Experiment 20001905 PARAMETER Experiment Name: At_Drought_Reproduction_P Parameter: Age (day) Value: 40
  misc_feature: MA Experiment 20001905 PARAMETER Experiment Name: At_Drought_Reproduction_P Parameter: Organism Value: A. thaliana
  misc_feature: MA Experiment 20001905 PARAMETER Experiment Name: At_Drought_Reproduction_P Parameter: Plant Line Value: WS
  misc_feature: MA Experiment 20001905 PARAMETER Experiment Name: At_Drought_Reproduction_P Parameter: Timepoint (day) Value: 10
  misc_feature: MA Experiment 20001905 PARAMETER Experiment Name: At_Drought_Reproduction_P Parameter: Tissue Value: Rosettes
  misc_feature: MA Experiment 20001905 PARAMETER Experiment Name: At_Drought_Reproduction_P Parameter: Treatment Value: Drought vs. No Drought
  misc_feature: MA Experiment ID: 20001906 Result: Down-regulated in Transcription
  misc_feature: MA Experiment 20001906 PARAMETER Experiment Name: At_Drought_Reproduction_P Parameter: Age (day) Value: 35
  misc_feature: MA Experiment 20001906 PARAMETER Experiment Name: At_Drought_Reproduction_P Parameter: Organism Value: A. thaliana
  misc_feature: MA Experiment 20001906 PARAMETER Experiment Name: At_Drought_Reproduction_P Parameter: Plant Line Value: WS
  misc_feature: MA Experiment 20001906 PARAMETER Experiment Name: At_Drought_Reproduction_P Parameter: Timepoint (day) Value: 5
  misc_feature: MA Experiment 20001906 PARAMETER Experiment Name: At_Drought_Reproduction_P Parameter: Tissue Value: Siliques
  misc_feature: MA Experiment 20001906 PARAMETER Experiment Name: At_Drought_Reproduction_P Parameter: Treatment Value: Drought vs. No Drought
  misc_feature: MA Experiment ID: 20001908 Result: Down-regulated in Transcription
  misc_feature: MA Experiment 20001908 PARAMETER Experiment Name: At_Drought_Reproduction_P Parameter: Age (day) Value: 40
  misc_feature: MA Experiment 20001908 PARAMETER Experiment Name: At_Drought_Reproduction_P Parameter: Organism Value: A. thaliana
  misc_feature: MA Experiment 20001908 PARAMETER Experiment Name: At_Drought_Reproduction_P Parameter: Plant Line Value: WS
  misc_feature: MA Experiment 20001908 PARAMETER Experiment Name: At_Drought_Reproduction_P Parameter: Timepoint (day) Value: 10
  misc_feature: MA Experiment 20001908 PARAMETER Experiment Name: At_Drought_Reproduction_P Parameter: Tissue Value: Siliques
  misc_feature: MA Experiment 20001908 PARAMETER Experiment Name: At_Drought_Reproduction_P Parameter: Treatment Value: Drought vs. No Drought
  misc_feature: MA Experiment ID: 20001911 Result: Down-regulated in Transcription
  misc_feature: MA Experiment 20001911 PARAMETER Experiment Name: At_Drought_Reproduction_P Parameter: Age (day) Value: 40
  misc_feature: MA Experiment 20001911 PARAMETER Experiment Name: At_Drought_Reproduction_P Parameter: Organism Value: A. thaliana
  misc_feature: MA Experiment 20001911 PARAMETER Experiment Name: At_Drought_Reproduction_P Parameter: Plant Line Value: WS
  misc_feature: MA Experiment 20001911 PARAMETER Experiment Name: At_Drought_Reproduction_P Parameter: Timepoint (day) Value: 10
  misc_feature: MA Experiment 20001911 PARAMETER Experiment Name: At_Drought_Reproduction_P Parameter: Tissue Value: Flowers
  misc_feature: MA Experiment 20001911 PARAMETER Experiment Name: At_Drought_Reproduction_P Parameter: Treatment Value: Drought vs. No Drought
atcaacaagtctttctctctctctagacaaccacaagaacacaaaacacacaaaaacaaagaggttctttctttgaagaagaaatggaaaaagttgatgtttatgatgagcttgttaacctaaaggcaacagagctgagattgggattaccagggacagaagaaactgtttcttgtggaaaaagcaacaaaagagttttacctgaagctactgagaaagagattgaatccactggaaaaactgaaaccgcttctcctccaaaggctcagattgttggatggccaccagttagatcttacagaaagaacaatgttcagacaaagaagagtgaatctgaaggtcaaggaaactatgtgaaagtaagtatggatggtgctccatatctaaggaagatagatctaacgatgtataaacaatatccagagttgatgaaatcacttgaaaacatgtttaaattctctgtgggagaatattttgagagagaaggatataaaggctcagactttgtacctacttatgaagacaaagatggtgattggatgcttgttggtgatgttccttgggagatgtttgtttcgtcttgtaagaggctaaggatcatgaaaggatctgaagttaaaggtttaggttgtggtggtctttaacaaacctaattgagagataaagatcaaagagaaagattcaaaaacagagttttttgttctgtttcttgaaacagagtaaatatagctctgaaactgctcgggttcttggggagagatgtttcatacaatcatactttgtgaatgtttacctcatcggtaaaaagagagatgcttaaaatggtcttaagcataaaagtgtgagaaagatctaaatctaaactttagctgtaactctgtctccattaaagagaaaggttttgtggtattagaaagatctaatctgaagattatctttgtgtttttcactttttataatgttcttatcgaacagctttgatgtttttgatgtaattacccatttttctgttctgtttctcttcaaattaagatctgtctttgc

SEQ ID NO: 28591 - protein, 186 aa, Arabidopsis thaliana
  peptide (1)..(186): Ceres Seq. ID no. 13491460
  misc_feature (11)..(185): Pfam Name: AUX/IAA family Pfam Description: AUX/IAA family
  misc_feature (11)..(184): Homolog of NCBI NO: 4887014 NR Description: Nt-iaa2.5 deduced protein [Nicotiana tabacum]
  misc_feature (1)..(181): Homolog of NCBI NO: 4887016 NR Description: Nt-iaa4.3 deduced protein [Nicotiana tabacum]
  misc_feature (1)..(181): Homolog of NCBI NO: 4887018 NR Description: Nt-iaa4.5 deduced protein [Nicotiana tabacum]
  misc_feature (1)..(183): Homolog of NCBI NO: 416641 NR Description: Auxin-induced protein 22B (Indole-3-acetic acid
  misc_feature (1)..(184): Homolog of NCBI NO: 4887012 NR Description: Nt-iaa2.3 deduced protein [Nicotiana tabacum]
  misc_feature (7)..(183): Homolog of NCBI NO: 11131103 NR Description: Auxin-induced protein 22D (Indole-3-acetic acid
  misc_feature (7)..(184): Homolog of NCBI NO: 34550779 NR Description: Gbiaa-Re [Gossypium barbadense]
  misc_feature (8)..(184): Homolog of NCBI NO: 15219692 NR Description: auxin-responsive protein IAA3 (Indoleacetic
  misc_feature (1)..(186): Homolog of NCBI NO: 99663 NR Description: auxin-induced protein AUX2-11 - Arabidopsis
  misc_feature (1)..(186): Homolog of NCBI NO: 15239950 NR Description: auxin-responsive protein IAA4 (Indoleacetic
MEKVDVYDELVNLKATELRLGLPGTEETVSCGKSNKRVLPEATEKEIESTGKTETASPPKAQIVGWPPVRSYRKNNVQTKKSESEGQGNYVKVSMDGAPYLRKIDLTMYKQYPELMKSLENMFKFSVGEYFEREGYKGSDFVPTYEDKDGDWMLVGDVPWEMFVSSCKRLRIMKGSEVKGLGCGGL

SEQ ID NO: 28592 - DNA, 1398 bp, Arabidopsis thaliana
  misc_feature (1)..(1398): Ceres Seq. ID no. 13576792
  misc_feature: MA Experiment ID: 108434 Result: Down-regulated in Transcription
  misc_feature: MA Experiment 108434 PARAMETER Experiment Name: At_Root_Tips_cDNA_P Parameter: Tissue Value: Root Tips
  misc_feature: MA Experiment ID: 108462 Result: Up-regulated in Transcription
  misc_feature: MA Experiment 108462 PARAMETER Experiment Name: At_Germinating_Seeds_cDNA_P Parameter: Age (day) Value: 2 vs. 0
  misc_feature: MA Experiment 108462 PARAMETER Experiment Name: At_Germinating_Seeds_cDNA_P Parameter: Tissue Value: Germinating Seeds
  misc_feature: MA Experiment ID: 108501 Result: Up-regulated in Transcription
  misc_feature: MA Experiment 108501 PARAMETER Experiment Name: At_ap2_floral_buds_cDNA_P Parameter: Plant Line Value: ap2 (Ler.)
  misc_feature: MA Experiment 108501 PARAMETER Experiment Name: At_ap2_floral_buds_cDNA_P Parameter: Tissue Value: Closed Flower
  misc_feature: MA Experiment ID: 20000180 Result: Up-regulated in Transcription
  misc_feature: MA Experiment 20000180 PARAMETER Experiment Name: At_Germinating_Seeds_P Parameter: Age (hr) Value: 24 vs. 0
  misc_feature: MA Experiment 20000180 PARAMETER Experiment Name: At_Germinating_Seeds_P Parameter: Tissue Value: Germinating Seeds
  misc_feature: MA Experiment ID: 20000573 Result: Down-regulated in Transcription
  misc_feature: MA Experiment 20000573 PARAMETER Experiment Name: At_100uM_ABA_Mutants__P Parameter: Organism Value: A. thaliana
  misc_feature: MA Experiment 20000573 PARAMETER Experiment Name: At_100uM_ABA_Mutants__P Parameter: Plant Line Value: CS22 vs. Ler wt
  misc_feature: MA Experiment 20000573 PARAMETER Experiment Name: At_100uM_ABA_Mutants__P Parameter: Timepoint (hr) Value: N/A
  misc_feature: MA Experiment 20000573 PARAMETER Experiment Name: At_100uM_ABA_Mutants__P Parameter: Tissue Value: Whole Plant
  misc_feature: MA Experiment 20000573 PARAMETER Experiment Name: At_100uM_ABA_Mutants__P Parameter: Treatment Value: None
  misc_feature: MA Experiment ID: 20001555 Result: Up-regulated in Transcription
  misc_feature: MA Experiment 20001555 PARAMETER Experiment Name: At_Drought_Soil_Dry_P Parameter: Age (day) Value: 24
  misc_feature: MA Experiment 20001555 PARAMETER Experiment Name: At_Drought_Soil_Dry_P Parameter: Organism Value: A. thaliana
  misc_feature: MA Experiment 20001555 PARAMETER Experiment Name: At_Drought_Soil_Dry_P Parameter: Plant Line Value: WS
  misc_feature: MA Experiment 20001555 PARAMETER Experiment Name: At_Drought_Soil_Dry_P Parameter: Post Timepoint (hr) Value: None
  misc_feature: MA Experiment 20001555 PARAMETER Experiment Name: At_Drought_Soil_Dry_P Parameter: Post-Treatment Value: None
  misc_feature: MA Experiment 20001555 PARAMETER Experiment Name: At_Drought_Soil_Dry_P Parameter: Timepoint (day) Value: 10
  misc_feature: MA Experiment 20001555 PARAMETER Experiment Name: At_Drought_Soil_Dry_P Parameter: Treatment Value: Drought vs. No Drought
  misc_feature: MA Experiment ID: 20001556 Result: Up-regulated in Transcription
  misc_feature: MA Experiment 20001556 PARAMETER Experiment Name: At_Drought_Soil_Dry_P Parameter: Age (day) Value: 26
  misc_feature: MA Experiment 20001556 PARAMETER Experiment Name: At_Drought_Soil_Dry_P Parameter: Organism Value: A. thaliana
  misc_feature: MA Experiment 20001556 PARAMETER Experiment Name: At_Drought_Soil_Dry_P Parameter: Plant Line Value: WS
  misc_feature: MA Experiment 20001556 PARAMETER Experiment Name: At_Drought_Soil_Dry_P Parameter: Post Timepoint (hr) Value: None
  misc_feature: MA Experiment 20001556 PARAMETER Experiment Name: At_Drought_Soil_Dry_P Parameter: Post-Treatment Value: None
  misc_feature: MA Experiment 20001556 PARAMETER Experiment Name: At_Drought_Soil_Dry_P Parameter: Timepoint (day) Value: 12
  misc_feature: MA Experiment 20001556 PARAMETER Experiment Name: At_Drought_Soil_Dry_P Parameter: Treatment Value: Drought vs. No Drought
atagagaagtgaagagacagagatagttgtgacagagagattcatggcggaagcttgcggagtgagaaggatgaagctgggaagccaaggccttgaggtatctgcgcaaggccttggttgcatgggcctctccgctttctacggtgctcccaagccggaaaatgaagccatcgctctcatccaccacgctattcactccggcgttactctccttgacacctccgatatctacggccctgagaccaatgaagttctcctcggaaaggctctcaaggatggggtgagagaaaaagtggaacttgcgaccaaatttggaatcagttatgcagaggggaaaagagaggtcagaggagatcctgaatatgtaagggctgcttgtgaggcaagtttaaagaggctagatattgcctgcatcgatctctattatcagcatcgtgtcgatactcgtgtccctatcgaaatcactatgggagaactgaagaagctggttgaagagggtaaaataaagtacattggtttgtctgaagcctctgcctcaactatcagaagagcacatgctgttcacccaattactgccgtgcagatagaatggtccttgtggacgagagatgtggaagaagaaatcattccgacctgcagggaacttgggattgggattgttgcttacagtcctctaggacgaggtttcttcgcatctggacccaagcttgttgagaacctagaaaaggatgacttcagaaaggctctaccaagattccaagaggaaaacttagaccacaacaagattgtttatgaaaaagtttgtgcaatatcggagaagaaagggtgcactcctggacaactagccctggcatgggttcatcaccagggagatgacgtttgccctatcccaggaaccactaagatcgagaacctcaaacagaacattggagctttgtcagtgaaactcactcctgaagagatgactgagcttgaggccattgcccaaccaggttttgtgaaaggagatagatacagtaacatgataccaactttcaagaacgctgagacaccaccattgtctgcttggaaagccgcttaaaaccggctgaagtttctacggttgtggtggtgcatcatgacattgaagtggtcttaactttctgtcagctagatcagtgtgttggggaataatggtgcgtcttcgagagtagagtatcattcccacggaaacccaagtatcatggttaatgccttgaagaataaataatgtagagttccccaagtgaaaacttcaattttacatttccatacattgtaaccaaactctataaataaagtgttgtgatacataccttaccaaaaaaggctatctatattgtaaaattcatcttctactcaataacttgtgcttctctc

SEQ ID NO: 28593 - protein, 345 aa, Arabidopsis thaliana
  peptide (1)..(345): Ceres Seq. ID no. 13576793
  misc_feature (285)..(345): Homolog of NCBI NO: 25316328 NR Description: hypothetical protein F8A5.23 [imported] -
  misc_feature (10)..(246): Homolog of NCBI NO: 25316328 NR Description: hypothetical protein F8A5.23 [imported] -
  misc_feature (10)..(344): Homolog of NCBI NO: 25316214 NR Description: hypothetical protein F8A5.20 [imported] -
  misc_feature (1)..(344): Homolog of NCBI NO: 30696451 NR Description: aldo/keto reductase family [Arabidopsis thaliana]
  misc_feature (1)..(344): Homolog of NCBI NO: 30102704 NR Description: At1g60680 [Arabidopsis thaliana]
  misc_feature (1)..(345): Homolog of NCBI NO: 25316216 NR Description: hypothetical protein F8A5.24 [imported] -
  misc_feature (1)..(344): Homolog of NCBI NO: 15219786 NR Description: aldo/keto reductase family [Arabidopsis thaliana]
  misc_feature (1)..(345): Homolog of NCBI NO: 30696459 NR Description: aldo/keto reductase family [Arabidopsis thaliana]
  misc_feature (1)..(345): Homolog of NCBI NO: 6562980 NR Description: auxin-induced atb2 [Arabidopsis thaliana]
  misc_feature (1)..(345): Homolog of NCBI NO: 18406861 NR Description: aldo/keto reductase family [Arabidopsis thaliana]
MAEACGVRRMKLGSQGLEVSAQGLGCMGLSAFYGAPKPENEAIALIHHAIHSGVTLLDTSDIYGPETNEVLLGKALKDGVREKVELATKFGISYAEGKREVRGDPEYVRAACEASLKRLDIACIDLYYQHRVDTRVPIEITMGELKKLVEEGKIKYIGLSEASASTIRRAHAVHPITAVQIEWSLWTRDVEEEIIPTCRELGIGIVAYSPLGRGFFASGPKLVENLEKDDFRKALPRFQEENLDHNKIVYEKVCAISEKKGCTPGQLALAWVHHQGDDVCPIPGTTKIENLKQNIGALSVKLTPEEMTELEAIAQPGFVKGDRYSNMIPTFKNAETPPLSAWKAA

SEQ ID NO: 28594 - protein, 336 aa, Arabidopsis thaliana
  peptide (1)..(336): Ceres Seq. ID no. 13576794
  misc_feature (276)..(336): Homolog of NCBI NO: 25316328 NR Description: hypothetical protein F8A5.23 [imported] -
  misc_feature (1)..(237): Homolog of NCBI NO: 25316328 NR Description: hypothetical protein F8A5.23 [imported] -
  misc_feature (1)..(335): Homolog of NCBI NO: 25316214 NR Description: hypothetical protein F8A5.20 [imported] -
  misc_feature (1)..(335): Homolog of NCBI NO: 30696451 NR Description: aldo/keto reductase family [Arabidopsis thaliana]
  misc_feature (1)..(335): Homolog of NCBI NO: 30102704 NR Description: At1g60680 [Arabidopsis thaliana]
  misc_feature (1)..(336): Homolog of NCBI NO: 25316216 NR Description: hypothetical protein F8A5.24 [imported] -
  misc_feature (1)..(335): Homolog of NCBI NO: 15219786 NR Description: aldo/keto reductase family [Arabidopsis thaliana]
  misc_feature (1)..(336): Homolog of NCBI NO: 30696459 NR Description: aldo/keto reductase family [Arabidopsis thaliana]
  misc_feature (1)..(336): Homolog of NCBI NO: 6562980 NR Description: auxin-induced atb2 [Arabidopsis thaliana]
  misc_feature (1)..(336): Homolog of NCBI NO: 18406861 NR Description: aldo/keto reductase family [Arabidopsis thaliana]
MKLGSQGLEVSAQGLGCMGLSAFYGAPKPENEAIALIHHAIHSGVTLLDTSDIYGPETNEVLLGKALKDGVREKVELATKFGISYAEGKREVRGDPEYVRAACEASLKRLDIACIDLYYQHRVDTRVPIEITMGELKKLVEEGKIKYIGLSEASASTIRRAHAVHPITAVQIEWSLWTRDVEEEIIPTCRELGIGIVAYSPLGRGFFASGPKLVENLEKDDFRKALPRFQEENLDHNKIVYEKVCAISEKKGCTPGQLALAWVHHQGDDVCPIPGTTKIENLKQNIGALSVKLTPEEMTELEAIAQPGFVKGDRYSNMIPTFKNAETPPLSAWKAA

SEQ ID NO: 28595 - protein, 319 aa, Arabidopsis thaliana
  peptide (1)..(319): Ceres Seq. ID no. 13576795
  misc_feature (259)..(319): Homolog of NCBI NO: 25316328 NR Description: hypothetical protein F8A5.23 [imported] -
  misc_feature (1)..(220): Homolog of NCBI NO: 25316328 NR Description: hypothetical protein F8A5.23 [imported] -
  misc_feature (1)..(318): Homolog of NCBI NO: 25316214 NR Description: hypothetical protein F8A5.20 [imported] -
  misc_feature (1)..(318): Homolog of NCBI NO: 30696451 NR Description: aldo/keto reductase family [Arabidopsis thaliana]
  misc_feature (1)..(318): Homolog of NCBI NO: 30102704 NR Description: At1g60680 [Arabidopsis thaliana]
  misc_feature (1)..(319): Homolog of NCBI NO: 25316216 NR Description: hypothetical protein F8A5.24 [imported] -
  misc_feature (1)..(318): Homolog of NCBI NO: 15219786 NR Description: aldo/keto reductase family [Arabidopsis thaliana]
  misc_feature (1)..(319): Homolog of NCBI NO: 30696459 NR Description: aldo/keto reductase family [Arabidopsis thaliana]
  misc_feature (1)..(319): Homolog of NCBI NO: 6562980 NR Description: auxin-induced atb2 [Arabidopsis thaliana]
  misc_feature (1)..(319): Homolog of NCBI NO: 18406861 NR Description: aldo/keto reductase family [Arabidopsis thaliana]
MGLSAFYGAPKPENEAIALIHHAIHSGVTLLDTSDIYGPETNEVLLGKALKDGVREKVELATKFGISYAEGKREVRGDPEYVRAACEASLKRLDIACIDLYYQHRVDTRVPIEITMGELKKLVEEGKIKYIGLSEASASTIRRAHAVHPITAVQIEWSLWTRDVEEEIIPTCRELGIGIVAYSPLGRGFFASGPKLVENLEKDDFRKALPRFQEENLDHNKIVYEKVCAISEKKGCTPGQLALAWVHHQGDDVCPIPGTTKIENLKQNIGALSVKLTPEEMTELEAIAQPGFVKGDRYSNMIPTFKNAETPPLSAWKAA

SEQ ID NO: 28596 - DNA, 2940 bp, Arabidopsis thaliana
  misc_feature (1)..(2940): Ceres Seq. ID no. 13490223
  misc_feature: MA Experiment ID: 108595 Result: Down-regulated in Transcription
  misc_feature: MA Experiment 108595 PARAMETER Experiment Name: At_Ler-pi_Ovule_cDNA_P Parameter: Plant Line Value: null
  misc_feature: MA Experiment ID: 20001904 Result: Up-regulated in Transcription
  misc_feature: MA Experiment 20001904 PARAMETER Experiment Name: At_Drought_Reproduction_P Parameter: Age (day) Value: 37
  misc_feature: MA Experiment 20001904 PARAMETER Experiment Name: At_Drought_Reproduction_P Parameter: Organism Value: A. thaliana
  misc_feature: MA Experiment 20001904 PARAMETER Experiment Name: At_Drought_Reproduction_P Parameter: Plant Line Value: WS
  misc_feature: MA Experiment 20001904 PARAMETER Experiment Name: At_Drought_Reproduction_P Parameter: Timepoint (day) Value: 7
  misc_feature: MA Experiment 20001904 PARAMETER Experiment Name: At_Drought_Reproduction_P Parameter: Tissue Value: Rosettes
  misc_feature: MA Experiment 20001904 PARAMETER Experiment Name: At_Drought_Reproduction_P Parameter: Treatment Value: Drought vs. No Drought
ctccgccggcgaacagttttattatctctctctttctgcgtgttccaatttcttccacaaaaccctaattttctcttaaaccctgaaattcgtgtaacctttcaacaatctcttcaattttgttttcgattctgaatccattgtttacgaatctctcatctaaagctacattcttcgttaaatcgtttttaatcgactcgctcactcgtgagttgactcgtcagctgtttccataattgcttattgaatttttatacgatgatgtttcaatatggaagaaactagaggaatttctgatccagagaatgggagttcgagttacggcggtaaaccgccgaatccactctccttctcttcttcctccgccgctgctgccgtttacaggcaaaccttcgacggcgagcgatcgttggcgccgtgtaataagaggtcactggttcgacactcatctctcgtgaagacaatggtgtcagatatatctgttgagaatgagtttactatagagaagaacaagtctgagtttgttcctgctacgcgttctggagcttggtctgatattggctccaggtcaagcatggaagatgcttatctatgcgttgataatttcatggatagctttggccttctgaattctgaggctggtccaagtgccttctatggggtatttgatggacatggtgggaagcatgccgctgagtttgcatgtcaccatataccgaggtacattgttgaagatcaagagtttcctagtgaaatcaataaggtgttatcttcagcatttcttcaaacagacactgccttcttagaggcgtgttcattggatgggagccttgcttcaggaactactgctttggcagctattctttttggaaggtcgttggtggtagcaaacgctggagattgcagagcagtcttatcccgtcagggaaaagccattgaaatgtcaagagaccacaaacccatgagcagtaaggaaaggagacgcattgaagcatcgggtggacatgtattcgatggctatctaaatggacaacttaatgtggctcgagcgctaggtgactttcatatggaaggcatgaagaagaagaaagatggttctgattgtggacctctaattgcagagcctgagctcatgacaacaaaactaacagaagaggatgagttccttataattgggtgtgacggggtttgggatgtgttcatgagccagaatgctgtagattttgccagaaggagactacaggagcacaatgacccggtcatgtgtagtaaggagctggttgaggaagctttgaagaggaagagtgctgataatgtgacggcagtggttgtgtgtcttcagccacagccaccaccgaacttggtagcgccgaggttgagagttcacagaagcttctcggcggagggtttaaaagatttacagagctacttggatggcttgggaaactaattgggggacatgaggatggtgacgaatgattgatttctctgtttttgttttgtcttttcttacaattttatagtttggggtttggaggttttgttctgttaaattctcgcaatttgagtaagttataacatgaggcggcatacaataatttattgtttggtaggatatatttttttgtcacttttgcataataataattctgcttcagtctcatttgttttgtaactagaaagttattccaattcctgcgtttaccgaatatgttgtgttcttgcagaatgacgtatgttagatatgcagtaaactcgagggtcggctttgaccacatcgccacttatcggtttgcggatgctggaaaagtcagtctagtgatgaggctgagtgagccatcgtcagttactattttatcgtgaaactctgaacaacgagattgtcccggatattcaaatgaggaacaaggcccaatagtccgatcaaagtgggctattcgtatcgcttacgaggcctatacgatggtaattgaattcacgcgcattcatcagcgcgtgatttggagttgctcaatttcagatcgcacaggctctgttaatcatctcctcctccgaaagacagagaaagagacaaatcaaattcattcatatcaaagagatagagagaaaatgtccggtgtggctattcatgcgagttcatggggcgcggctctggtgagaatctccccgtacactttctccgccatcggaatcgccatctccatcggcgtctctgttcttggtgctgcctggggaatttacattaccggaagtagtttgatcggtgccgccattgaagctcctcgaatcacttccaagaatctcatcagtgtaatcttctgtgaagccgtggctatatacggtgttattgtggcaatcatattacaaacgaagttggagagtgtaccatcatcaaagatgtatgatgctgagtctctaagagctggatatgcaatctttgcttctggaatcattgttggattcgcaaaccttgtatgcgggttatgtgtaggaatcattggaagcagttgcgcattgtctgatgctcagaactcgacgctctttgttaagattcttgtgattgagatctttgggagtgctctcgggttatttggagttatcgttgggattattatgtcagctcaagctacatggcctacaaaatagagatatataaactggtaacttatggacttgtactctatagtctatacattctatgatctatttttcaaagttccggataaaaattacacttctttgctgttatatctcttgtgtagaagaaaaaccatgtgtgattaagattctccttgagttgaatccctattttttggtaatgttcaaatttggtaataagtcacttggagaaacctcttcatgcttgtactctttggttctcttttgacaaatgataagagagtctgtaaatttttgatgagcattgaatgagctttaaac

SEQ ID NO: 28597 - protein, 392 aa, Arabidopsis thaliana
  peptide (1)..(392): Ceres Seq. ID no. 13490224
  misc_feature (88)..(349): Pfam Name: Protein phosphatase 2C Pfam Description: Protein phosphatase 2C
  misc_feature (76)..(389): Homolog of NCBI NO: 30684431 NR Description: protein phosphatase 2C (PP2C) -related
  misc_feature (83)..(388): Homolog of NCBI NO: 34894410 NR Description: putative protein phosphatase
  misc_feature (49)..(390): Homolog of NCBI NO: 15230495 NR Description: protein phosphatase 2C (PP2C), putative
  misc_feature (27)..(389): Homolog of NCBI NO: 15226152 NR Description: protein phosphatase 2C (PP2C) [Arabidopsis
  misc_feature (78)..(387): Homolog of NCBI NO: 24413992 NR Description: putative DNA-binding protein phosphatase 2C
  misc_feature (84)..(388): Homolog of NCBI NO: 37536524 NR Description: putative protein phosphatase-2C
  misc_feature (57)..(388): Homolog of NCBI NO: 10140768 NR Description: putative protein phosphatase-2C [Oryza sativa]
  misc_feature (54)..(389): Homolog of NCBI NO: 21693562 NR Description: DNA-binding protein phosphatase 2C [Nicotiana
  misc_feature (11)..(390): Homolog of NCBI NO: 20146108 NR Description: protein phosphatase 2C [Mesembryanthemum
  misc_feature (1)..(392): Homolog of NCBI NO: 15224766 NR Description: protein phosphatase 2C (PP2C), putative
MEETRGISDPENGSSSYGGKPPNPLSFSSSSAAAAVYRQTFDGERSLAPCNKRSLVRHSSLVKTMVSDISVENEFTIEKNKSEFVPATRSGAWSDIGSRSSMEDAYLCVDNFMDSFGLLNSEAGPSAFYGVFDGHGGKHAAEFACHHIPRYIVEDQEFPSEINKVLSSAFLQTDTAFLEACSLDGSLASGTTALAAILFGRSLVVANAGDCRAVLSRQGKAIEMSRDHKPMSSKERRRIEASGGHVFDGYLNGQLNVARALGDFHMEGMKKKKDGSDCGPLIAEPELMTTKLTEEDEFLIIGCDGVWDVFMSQNAVDFARRRLQEHNDPVMCSKELVEEALKRKSADNVTAVVVCLQPQPPPNLVAPRLRVHRSFSAEGLKDLQSYLDGLGN

SEQ ID NO: 28598 - protein, 328 aa, Arabidopsis thaliana
  peptide (1)..(328): Ceres Seq. ID no. 13490225
  misc_feature (24)..(285): Pfam Name: Protein phosphatase 2C Pfam Description: Protein phosphatase 2C
  misc_feature (12)..(325): Homolog of NCBI NO: 30684431 NR Description: protein phosphatase 2C (PP2C) -related
  misc_feature (19)..(324): Homolog of NCBI NO: 34894410 NR Description: putative protein phosphatase
  misc_feature (1)..(326): Homolog of NCBI NO: 15230495 NR Description: protein phosphatase 2C (PP2C), putative
  misc_feature (1)..(325): Homolog of NCBI NO: 15226152 NR Description: protein phosphatase 2C (PP2C) [Arabidopsis
  misc_feature (14)..(323): Homolog of NCBI NO: 24413992 NR Description: putative DNA-binding protein phosphatase 2C
  misc_feature (20)..(324): Homolog of NCBI NO: 37536524 NR Description: putative protein phosphatase-2C
  misc_feature (1)..(324): Homolog of NCBI NO: 10140768 NR Description: putative protein phosphatase-2C [Oryza sativa]
  misc_feature (1)..(325): Homolog of NCBI NO: 21693562 NR Description: DNA-binding protein phosphatase 2C [Nicotiana
  misc_feature (1)..(326): Homolog of NCBI NO: 20146108 NR Description: protein phosphatase 2C [Mesembryanthemum
  misc_feature (1)..(328): Homolog of NCBI NO: 15224766 NR Description: protein phosphatase 2C (PP2C), putative
MVSDISVENEFTIEKNKSEFVPATRSGAWSDIGSRSSMEDAYLCVDNFMDSFGLLNSEAGPSAFYGVFDGHGGKHAAEFACHHIPRYIVEDQEFPSEINKVLSSAFLQTDTAFLEACSLDGSLASGTTALAAILFGRSLVVANAGDCRAVLSRQGKAIEMSRDHKPMSSKERRRIEASGGHVFDGYLNGQLNVARALGDFHMEGMKKKKDGSDCGPLIAEPELMTTKLTEEDEFLIIGCDGVWDVFMSQNAVDFARRRLQEHNDPVMCSKELVEEALKRKSADNVTAVVVCLQPQPPPNLVAPRLRVHRSFSAEGLKDLQSYLDGLGN

SEQ ID NO: 28599 - protein, 291 aa, Arabidopsis thaliana
  peptide (1)..(291): Ceres Seq. ID no. 13490226
  misc_feature (1)..(248): Pfam Name: Protein phosphatase 2C Pfam Description: Protein phosphatase 2C
  misc_feature (1)..(288): Homolog of NCBI NO: 30684431 NR Description: protein phosphatase 2C (PP2C) -related
  misc_feature (1)..(287): Homolog of NCBI NO: 34894410 NR Description: putative protein phosphatase
  misc_feature (1)..(289): Homolog of NCBI NO: 15230495 NR Description: protein phosphatase 2C (PP2C), putative
  misc_feature (1)..(288): Homolog of NCBI NO: 15226152 NR Description: protein phosphatase 2C (PP2C) [Arabidopsis
  misc_feature (1)..(286): Homolog of NCBI NO: 24413992 NR Description: putative DNA-binding protein phosphatase 2C
  misc_feature (1)..(287): Homolog of NCBI NO: 37536524 NR Description: putative protein phosphatase-2C
  misc_feature (1)..(287): Homolog of NCBI NO: 10140768 NR Description: putative protein phosphatase-2C [Oryza sativa]
  misc_feature (1)..(288): Homolog of NCBI NO: 21693562 NR Description: DNA-binding protein phosphatase 2C [Nicotiana
  misc_feature (1)..(289): Homolog of NCBI NO: 20146108 NR Description: protein phosphatase 2C [Mesembryanthemum
  misc_feature (1)..(291): Homolog of NCBI NO: 15224766 NR Description: protein phosphatase 2C (PP2C), putative
MEDAYLCVDNFMDSFGLLNSEAGPSAFYGVFDGHGGKHAAEFACHHIPRYIVEDQEFPSEINKVLSSAFLQTDTAFLEACSLDGSLASGTTALAAILFGRSLVVANAGDCRAVLSRQGKAIEMSRDHKPMSSKERRRIEASGGHVFDGYLNGQLNVARALGDFHMEGMKKKKDGSDCGPLIAEPELMTTKLTEEDEFLIIGCDGVWDVFMSQNAVDFARRRLQEHNDPVMCSKELVEEALKRKSADNVTAVVVCLQPQPPPNLVAPRLRVHRSFSAEGLKDLQSYLDGLGN

SEQ ID NO: 28600 - DNA, 703 bp, Arabidopsis thaliana
  misc_feature (1)..(703): Ceres Seq. ID no. 12330136
  misc_feature: MA Experiment ID: 108434 Result: Down-regulated in Transcription
  misc_feature: MA Experiment 108434 PARAMETER Experiment Name: At_Root_Tips_cDNA_P Parameter: Tissue Value: Root Tips
  misc_feature: MA Experiment ID: 108461 Result: Down-regulated in Transcription
  misc_feature: MA Experiment 108461 PARAMETER Experiment Name: At_Germinating_Seeds_cDNA_P Parameter: Age (day) Value: 1 vs. 0
  misc_feature: MA Experiment 108461 PARAMETER Experiment Name: At_Germinating_Seeds_cDNA_P Parameter: Tissue Value: Germinating Seeds
  misc_feature: MA Experiment ID: 108462 Result: Down-regulated in Transcription
  misc_feature: MA Experiment 108462 PARAMETER Experiment Name: At_Germinating_Seeds_cDNA_P Parameter: Age (day) Value: 2 vs. 0
  misc_feature: MA Experiment 108462 PARAMETER Experiment Name: At_Germinating_Seeds_cDNA_P Parameter: Tissue Value: Germinating Seeds
  misc_feature: MA Experiment ID: 108463 Result: Down-regulated in Transcription
  misc_feature: MA Experiment 108463 PARAMETER Experiment Name: At_Germinating_Seeds_cDNA_P Parameter: Age (day) Value: 3 vs. 0
  misc_feature: MA Experiment 108463 PARAMETER Experiment Name: At_Germinating_Seeds_cDNA_P Parameter: Tissue Value: Germinating Seeds
  misc_feature: MA Experiment ID: 108464 Result: Down-regulated in Transcription
  misc_feature: MA Experiment 108464 PARAMETER Experiment Name: At_Germinating_Seeds_cDNA_P Parameter: Age (day) Value: 4 vs. 0
  misc_feature: MA Experiment 108464 PARAMETER Experiment Name: At_Germinating_Seeds_cDNA_P Parameter: Tissue Value: Germinating Seeds
  misc_feature: MA Experiment ID: 108469 Result: Up-regulated in Transcription
  misc_feature: MA Experiment ID: 108488 Result: Down-regulated in Transcription
  misc_feature: MA Experiment ID: 108489 Result: Up-regulated in Transcription
  misc_feature: MA Experiment ID: 108561 Result: Up-regulated in Transcription
  misc_feature: MA Experiment 108561 PARAMETER Experiment Name: At_100uM_ABA_cDNA_P Parameter: Timepoint (hr) Value: 6
  misc_feature: MA Experiment 108561 PARAMETER Experiment Name: At_100uM_ABA_cDNA_P Parameter: Tissue Value: Aerial
  misc_feature: MA Experiment 108561 PARAMETER Experiment Name: At_100uM_ABA_cDNA_P Parameter: Treatment Value: 100uM ABA vs. No Treatment
  misc_feature: MA Experiment ID: 108573 Result: Up-regulated in Transcription
  misc_feature: MA Experiment 108573 PARAMETER Experiment Name: At_Drought_cDNA_P Parameter: Timepoint (hr) Value: 6
  misc_feature: MA Experiment 108573 PARAMETER Experiment Name: At_Drought_cDNA_P Parameter: Tissue Value: Aerial
  misc_feature: MA Experiment 108573 PARAMETER Experiment Name: At_Drought_cDNA_P Parameter: Treatment Value: Drought vs. No Drought
  misc_feature: MA Experiment ID: 108574 Result: Up-regulated in Transcription
  misc_feature: MA Experiment 108574 PARAMETER Experiment Name: At_Wounding__cDNA_P Parameter: Timepoint (hr) Value: 1
  misc_feature: MA Experiment 108574 PARAMETER Experiment Name: At_Wounding__cDNA_P Parameter: Tissue Value: Aerial
  misc_feature: MA Experiment 108574 PARAMETER Experiment Name: At_Wounding__cDNA_P Parameter: Treatment Value: Wounding vs. No Wounding
  misc_feature: MA Experiment ID: 108576 Result: Up-regulated in Transcription
  misc_feature: MA Experiment 108576 PARAMETER Experiment Name: At_42deg_Heat_cDNA_P Parameter: Temperature (deg C) Value: 42 vs. 22
  misc_feature: MA Experiment 108576 PARAMETER Experiment Name: At_42deg_Heat_cDNA_P Parameter: Timepoint (hr) Value: 1
  misc_feature: MA Experiment 108576 PARAMETER Experiment Name: At_42deg_Heat_cDNA_P Parameter: Tissue Value: Aerial
  misc_feature: MA Experiment ID: 108577 Result: Up-regulated in Transcription
  misc_feature: MA Experiment 108577 PARAMETER Experiment Name: At_42deg_Heat_cDNA_P Parameter: Temperature (deg C) Value: 42 vs. 22
  misc_feature: MA Experiment 108577 PARAMETER Experiment Name: At_42deg_Heat_cDNA_P Parameter: Timepoint (hr) Value: 6
  misc_feature: MA Experiment 108577 PARAMETER Experiment Name: At_42deg_Heat_cDNA_P Parameter: Tissue Value: Aerial
  misc_feature: MA Experiment ID: 108585 Result: Up-regulated in Transcription
  misc_feature: MA Experiment 108585 PARAMETER Experiment Name: At_5mM_NaNP_cDNA_P Parameter: Timepoint (hr) Value: 6
  misc_feature: MA Experiment 108585 PARAMETER Experiment Name: At_5mM_NaNP_cDNA_P Parameter: Tissue Value: Aerial
  misc_feature: MA Experiment 108585 PARAMETER Experiment Name: At_5mM_NaNP_cDNA_P Parameter: Treatment Value: null
  misc_feature: MA Experiment ID: 108595 Result: Up-regulated in Transcription
  misc_feature: MA Experiment 108595 PARAMETER Experiment Name: At_Ler-pi_Ovule_cDNA_P Parameter: Plant Line Value: null
  misc_feature: MA Experiment ID: 108607 Result: Up-regulated in Transcription
  misc_feature: MA Experiment 108607 PARAMETER Experiment Name: At_100uM_ABA_cDNA_P Parameter: Timepoint (hr) Value: 4
  misc_feature: MA Experiment 108607 PARAMETER Experiment Name: At_100uM_ABA_cDNA_P Parameter: Tissue Value: Aerial
  misc_feature: MA Experiment 108607 PARAMETER Experiment Name: At_100uM_ABA_cDNA_P Parameter: Treatment Value: 100uM ABA vs. No Treatment
  misc_feature: MA Experiment ID: 108608 Result: Up-regulated in Transcription
  misc_feature: MA Experiment 108608 PARAMETER Experiment Name: At_100uM_ABA_cDNA_P Parameter: Timepoint (hr) Value: 1
  misc_feature: MA Experiment 108608 PARAMETER Experiment Name: At_100uM_ABA_cDNA_P Parameter: Tissue Value: Aerial
  misc_feature: MA Experiment 108608 PARAMETER Experiment Name: At_100uM_ABA_cDNA_P Parameter: Treatment Value: 100uM ABA vs. No Treatment
  misc_feature: MA Experiment ID: 108667 Result: Up-regulated in Transcription
  misc_feature: MA Experiment 108667 PARAMETER Experiment Name: At_2mM_SA_cDNA_P Parameter: Plant Line Value: WS
  misc_feature: MA Experiment 108667 PARAMETER Experiment Name: At_2mM_SA_cDNA_P Parameter: Timepoint (hr) Value: 1
  misc_feature: MA Experiment 108667 PARAMETER Experiment Name: At_2mM_SA_cDNA_P Parameter: Treatment Value: 2mM SA vs. No Treatment
  misc_feature: MA Experiment ID: 108668 Result: Up-regulated in Transcription
  misc_feature: MA Experiment 108668 PARAMETER Experiment Name: At_2mM_SA_cDNA_P Parameter: Plant Line Value: WS
  misc_feature: MA Experiment 108668 PARAMETER Experiment Name: At_2mM_SA_cDNA_P Parameter: Timepoint (hr) Value: 6
  misc_feature: MA Experiment 108668 PARAMETER Experiment Name: At_2mM_SA_cDNA_P Parameter: Treatment Value: 2mM SA vs. No Treatment
  misc_feature: MA Experiment ID: 20000069 Result: Up-regulated in Transcription
  misc_feature: MA Experiment 20000069 PARAMETER Experiment Name: At_100uM_ABA_Mutants_cDNA_P Parameter: Plant Line Value: CS23
  misc_feature: MA Experiment 20000069 PARAMETER Experiment Name: At_100uM_ABA_Mutants_cDNA_P Parameter: Timepoint (hr) Value: 6
  misc_feature: MA Experiment 20000069 PARAMETER Experiment Name: At_100uM_ABA_Mutants_cDNA_P Parameter: Tissue Value: Aerial
  misc_feature: MA Experiment 20000069 PARAMETER Experiment Name: At_100uM_ABA_Mutants_cDNA_P Parameter: Treatment Value: 100uM ABA vs. No Treatment
  misc_feature: MA Experiment ID: 20000070 Result: Up-regulated in Transcription
  misc_feature: MA Experiment 20000070 PARAMETER Experiment Name: At_100uM_ABA_Mutants_cDNA_P Parameter: Plant Line Value: CS24
  misc_feature: MA Experiment 20000070 PARAMETER Experiment Name: At_100uM_ABA_Mutants_cDNA_P Parameter: Timepoint (hr) Value: 6
  misc_feature: MA Experiment 20000070 PARAMETER Experiment Name: At_100uM_ABA_Mutants_cDNA_P Parameter: Tissue Value: Aerial
  misc_feature: MA Experiment 20000070 PARAMETER Experiment Name: At_100uM_ABA_Mutants_cDNA_P Parameter: Treatment Value: 100uM ABA vs. No Treatment
  misc_feature: MA Experiment ID: 20000071 Result: Up-regulated in Transcription
  misc_feature: MA Experiment 20000071 PARAMETER Experiment Name: At_100uM_ABA_Mutants_cDNA_P Parameter: Plant Line Value: CS8104
  misc_feature: MA Experiment 20000071 PARAMETER Experiment Name: At_100uM_ABA_Mutants_cDNA_P Parameter: Timepoint (hr) Value: 6
  misc_feature: MA Experiment 20000071 PARAMETER Experiment Name: At_100uM_ABA_Mutants_cDNA_P Parameter: Tissue Value: Aerial
  misc_feature: MA Experiment 20000071 PARAMETER Experiment Name: At_100uM_ABA_Mutants_cDNA_P Parameter: Treatment Value: 100uM ABA vs. No Treatment
  misc_feature: MA Experiment ID: 20000072 Result: Up-regulated in Transcription
  misc_feature: MA Experiment 20000072 PARAMETER Experiment Name: At_100uM_ABA_Mutants_cDNA_P Parameter: Plant Line Value: CS8105
  misc_feature: MA Experiment 20000072 PARAMETER Experiment Name: At_100uM_ABA_Mutants_cDNA_P Parameter: Timepoint (hr) Value: 6
  misc_feature: MA Experiment 20000072 PARAMETER Experiment Name: At_100uM_ABA_Mutants_cDNA_P Parameter: Tissue Value: Aerial
  misc_feature: MA Experiment 20000072 PARAMETER Experiment Name: At_100uM_ABA_Mutants_cDNA_P Parameter: Treatment Value: 100uM ABA vs. No Treatment
  misc_feature: MA Experiment ID: 20000086 Result: Up-regulated in Transcription
  misc_feature: MA Experiment 20000086 PARAMETER Experiment Name: At_100uM_ABA_Mutants_cDNA_P Parameter: Plant Line Value: CS22
  misc_feature: MA Experiment 20000086 PARAMETER Experiment Name: At_100uM_ABA_Mutants_cDNA_P Parameter: Timepoint (hr) Value: 6
  misc_feature: MA Experiment 20000086 PARAMETER Experiment Name: At_100uM_ABA_Mutants_cDNA_P Parameter: Tissue Value: Aerial
  misc_feature: MA Experiment 20000086 PARAMETER Experiment Name: At_100uM_ABA_Mutants_cDNA_P Parameter: Treatment Value: 100uM ABA vs. No Treatment
  misc_feature: MA Experiment ID: 20000087 Result: Up-regulated in Transcription
  misc_feature: MA Experiment 20000087 PARAMETER Experiment Name: At_100uM_ABA_Mutants_cDNA_P Parameter: Plant Line Value: WS
  misc_feature: MA Experiment 20000087 PARAMETER Experiment Name: At_100uM_ABA_Mutants_cDNA_P Parameter: Timepoint (hr) Value: 6
  misc_feature: MA Experiment 20000087 PARAMETER Experiment Name: At_100uM_ABA_Mutants_cDNA_P Parameter: Tissue Value: Aerial
  misc_feature: MA Experiment 20000087 PARAMETER Experiment Name: At_100uM_ABA_Mutants_cDNA_P Parameter: Treatment Value: 100uM ABA vs. No Treatment
  misc_feature: MA Experiment ID: 20000112 Result: Up-regulated in Transcription
  misc_feature: MA Experiment 20000112 PARAMETER Experiment Name: At_42deg_Heat_cDNA_P Parameter: Temperature (deg C) Value: 42 vs. 22
  misc_feature: MA Experiment 20000112 PARAMETER Experiment Name: At_42deg_Heat_cDNA_P Parameter: Timepoint (hr) Value: 2
  misc_feature: MA Experiment 20000112 PARAMETER Experiment Name: At_42deg_Heat_cDNA_P Parameter: Tissue Value: Aerial
  misc_feature: MA Experiment ID: 20000113 Result: Up-regulated in Transcription
  misc_feature: MA Experiment 20000113 PARAMETER Experiment Name: At_42deg_Heat_cDNA_P Parameter: Temperature (deg C) Value: 42 vs. 22
  misc_feature: MA Experiment 20000113 PARAMETER Experiment Name: At_42deg_Heat_cDNA_P Parameter: Timepoint (hr) Value: 8
  misc_feature: MA Experiment 20000113 PARAMETER Experiment Name: At_42deg_Heat_cDNA_P Parameter: Tissue Value: Aerial
  misc_feature: MA Experiment ID: 20000117 Result: Up-regulated in Transcription
  misc_feature: MA Experiment 20000117 PARAMETER Experiment Name: At_100uM_ABA_Mutants_cDNA_P Parameter: Plant Line Value: Columbia
  misc_feature: MA Experiment 20000117 PARAMETER Experiment Name: At_100uM_ABA_Mutants_cDNA_P Parameter: Timepoint (hr) Value: 6
  misc_feature: MA Experiment 20000117 PARAMETER Experiment Name: At_100uM_ABA_Mutants_cDNA_P Parameter: Tissue Value: Aerial
  misc_feature: MA Experiment 20000117 PARAMETER Experiment Name: At_100uM_ABA_Mutants_cDNA_P Parameter: Treatment Value: 100uM ABA vs. No Treatment
  misc_feature: MA Experiment ID: 20000144 Result: Up-regulated in Transcription
  misc_feature: MA Experiment 20000144 PARAMETER Experiment Name: At_42deg_Heat_cDNA_P Parameter: Temperature (deg C) Value: 42 vs. 22
  misc_feature: MA Experiment 20000144 PARAMETER Experiment Name: At_42deg_Heat_cDNA_P Parameter: Timepoint (hr) Value: 1
  misc_feature: MA Experiment 20000144 PARAMETER Experiment Name: At_42deg_Heat_cDNA_P Parameter: Tissue Value: Aerial
  misc_feature: MA Experiment ID: 20000166 Result: Up-regulated in Transcription
  misc_feature: MA Experiment 20000166 PARAMETER Experiment Name: At_100uM_ABA_P Parameter: Age (day) Value: 14
  misc_feature: MA Experiment 20000166 PARAMETER Experiment Name: At_100uM_ABA_P Parameter: Organism Value: A. thaliana
  misc_feature: MA Experiment 20000166 PARAMETER Experiment Name: At_100uM_ABA_P Parameter: Plant Line Value: WS
  misc_feature: MA Experiment 20000166 PARAMETER Experiment Name: At_100uM_ABA_P Parameter: Timepoint (hr) Value: 1
  misc_feature: MA Experiment 20000166 PARAMETER Experiment Name: At_100uM_ABA_P Parameter: Tissue Value: Aerial
  misc_feature: MA Experiment 20000166 PARAMETER Experiment Name: At_100uM_ABA_P Parameter: Treatment Value: 100uM ABA vs. No Treatment
  misc_feature: MA Experiment ID: 20000171 Result: Up-regulated in Transcription
  misc_feature: MA Experiment 20000171 PARAMETER Experiment Name: At_42deg_Heat_P Parameter: Age (day) Value: 14
  misc_feature: MA Experiment 20000171 PARAMETER Experiment Name: At_42deg_Heat_P Parameter: Organism Value: A. thaliana
  misc_feature: MA Experiment 20000171 PARAMETER Experiment Name: At_42deg_Heat_P Parameter: Plant Line Value: WS
  misc_feature: MA Experiment 20000171 PARAMETER Experiment Name: At_42deg_Heat_P Parameter: Temperature (deg C) Value: 42 vs. 22
  misc_feature: MA Experiment 20000171 PARAMETER Experiment Name: At_42deg_Heat_P Parameter: Timepoint (hr) Value: 1
  misc_feature: MA Experiment 20000171 PARAMETER Experiment Name: At_42deg_Heat_P Parameter: Tissue Value: Aerial
  misc_feature: MA Experiment ID: 20000173 Result: Up-regulated in Transcription
  misc_feature: MA Experiment 20000173 PARAMETER Experiment Name: At_42deg_Heat_P Parameter: Age (day) Value: 14
  misc_feature: MA Experiment 20000173 PARAMETER Experiment Name: At_42deg_Heat_P Parameter: Organism Value: A. thaliana
  misc_feature: MA Experiment 20000173 PARAMETER Experiment Name: At_42deg_Heat_P Parameter: Plant Line Value: WS
  misc_feature: MA Experiment 20000173 PARAMETER Experiment Name: At_42deg_Heat_P Parameter: Temperature (deg C) Value: 42 vs. 22
  misc_feature: MA Experiment 20000173 PARAMETER Experiment Name: At_42deg_Heat_P Parameter: Timepoint (hr) Value: 6
  misc_feature: MA Experiment 20000173 PARAMETER Experiment Name: At_42deg_Heat_P Parameter: Tissue Value: Aerial
  misc_feature: MA Experiment ID: 20000179 Result: Down-regulated in Transcription
  misc_feature: MA Experiment 20000179 PARAMETER Experiment Name: At_Germinating_Seeds_P Parameter: Age (hr) Value: 6 vs. 0
  misc_feature: MA Experiment 20000179 PARAMETER Experiment Name: At_Germinating_Seeds_P Parameter: Tissue Value: Germinating Seeds
  misc_feature: MA Experiment ID: 20000180 Result: Down-regulated in Transcription
  misc_feature: MA Experiment 20000180 PARAMETER Experiment Name: At_Germinating_Seeds_P Parameter: Age (hr) Value: 24 vs. 0
  misc_feature: MA Experiment 20000180 PARAMETER Experiment Name: At_Germinating_Seeds_P Parameter: Tissue Value: Germinating Seeds
  misc_feature: MA Experiment ID: 20000182 Result: Up-regulated in Transcription
  misc_feature: MA Experiment 20000182 PARAMETER Experiment Name: At_2mM_SA_P Parameter: Age (day) Value: 14
  misc_feature: MA Experiment 20000182 PARAMETER Experiment Name: At_2mM_SA_P Parameter: Organism Value: A. thaliana
  misc_feature: MA Experiment 20000182 PARAMETER Experiment Name: At_2mM_SA_P Parameter: Plant Line Value: WS
  misc_feature: MA Experiment 20000182 PARAMETER Experiment Name: At_2mM_SA_P Parameter: Timepoint (hr) Value: 6
  misc_feature: MA Experiment 20000182 PARAMETER Experiment Name: At_2mM_SA_P Parameter: Tissue Value: Aerial
  misc_feature: MA Experiment 20000182 PARAMETER Experiment Name: At_2mM_SA_P Parameter: Treatment Value: 2mM SA vs. No Treatment
  misc_feature: MA Experiment ID: 20000184 Result: Down-regulated in Transcription
  misc_feature: MA Experiment 20000184 PARAMETER Experiment Name: At_Shoots__P Parameter: Age (day) Value: 7
  misc_feature: MA Experiment 20000184 PARAMETER Experiment Name: At_Shoots__P Parameter: Tissue Value: Shoots vs. Whole Plant
  misc_feature: MA Experiment ID: 20000234 Result: Down-regulated in Transcription
  misc_feature: MA Experiment 20000234 PARAMETER Experiment Name: At_Siliques_P Parameter: Age (day) Value: 21
  misc_feature: MA Experiment 20000234 PARAMETER Experiment Name: At_Siliques_P Parameter: Organism Value: A. thaliana
  misc_feature: MA Experiment 20000234 PARAMETER Experiment Name: At_Siliques_P Parameter: Plant Line Value: WS
  misc_feature: MA Experiment 20000234 PARAMETER Experiment Name: At_Siliques_P Parameter: Tissue Value: Less Than 5mm Siliques vs. Whole Plant
  misc_feature: MA Experiment ID: 20000235 Result: Down-regulated in Transcription
  misc_feature: MA Experiment 20000235 PARAMETER Experiment Name: At_Siliques_P Parameter: Age (day) Value: 21
  misc_feature: MA Experiment 20000235 PARAMETER Experiment Name: At_Siliques_P Parameter: Organism Value: A. thaliana
  misc_feature: MA Experiment 20000235 PARAMETER Experiment Name: At_Siliques_P Parameter: Plant Line Value: WS
  misc_feature: MA Experiment 20000235 PARAMETER Experiment Name: At_Siliques_P Parameter: Tissue Value: 5-10mm Siliques vs. Whole Plant
  misc_feature: MA Experiment ID: 20000264 Result: Down-regulated in Transcription
  misc_feature: MA Experiment 20000264 PARAMETER Experiment Name: At_Open_Flower_P Parameter: Age (day) Value: 21
  misc_feature: MA Experiment 20000264 PARAMETER Experiment Name: At_Open_Flower_P Parameter: Plant Line Value: WS
  misc_feature: MA Experiment 20000264 PARAMETER Experiment Name: At_Open_Flower_P Parameter: Tissue Value: Open Flower vs. Whole Plant
  misc_feature: MA Experiment ID: 20000265 Result: Down-regulated in Transcription
  misc_feature: MA Experiment 20000265 PARAMETER Experiment Name: At_Open_Flower_P Parameter: Age (day) Value: 21
  misc_feature: MA Experiment 20000265 PARAMETER Experiment Name: At_Open_Flower_P Parameter: Plant Line Value: WS
  misc_feature: MA Experiment 20000265 PARAMETER Experiment Name: At_Open_Flower_P Parameter: Tissue Value: Closed Flower vs. Whole Plant
  misc_feature: MA Experiment ID: 20000286 Result: Down-regulated in Transcription
  misc_feature: MA Experiment 20000286 PARAMETER Experiment Name: At_Open_Flower_P Parameter: Age (day) Value: 21
  misc_feature: MA Experiment 20000286 PARAMETER Experiment Name: At_Open_Flower_P Parameter: Plant Line Value: WS
  misc_feature: MA Experiment 20000286 PARAMETER Experiment Name: At_Open_Flower_P Parameter: Tissue Value: Half Open vs. Whole Plant
  misc_feature: MA Experiment ID: 20000437 Result: Up-regulated in Transcription
  misc_feature: MA Experiment 20000437 PARAMETER Experiment Name: At_Drought_P Parameter: Age (day) Value: 8
  misc_feature: MA Experiment 20000437 PARAMETER Experiment Name: At_Drought_P Parameter: Organism Value: A. thaliana
  misc_feature: MA Experiment 20000437 PARAMETER Experiment Name: At_Drought_P Parameter: Plant Line Value: WS
  misc_feature: MA Experiment 20000437 PARAMETER Experiment Name: At_Drought_P Parameter: Timepoint (hr) Value: 24
  misc_feature: MA Experiment 20000437 PARAMETER Experiment Name: At_Drought_P Parameter: Tissue Value: Whole Plant
  misc_feature: MA Experiment 20000437 PARAMETER Experiment Name: At_Drought_P Parameter: Treatment Value: Drought vs. No Drought
  misc_feature: MA Experiment ID: 20000438 Result: Down-regulated in Transcription
  misc_feature: MA Experiment 20000438 PARAMETER Experiment Name: At_Shoots__P Parameter: Age (day) Value: 14
  misc_feature: MA Experiment 20000438 PARAMETER Experiment Name: At_Shoots__P Parameter: Tissue Value: Shoots vs. Whole Plant
  misc_feature: MA Experiment ID: 20000453 Result: Up-regulated in Transcription
  misc_feature: MA Experiment 20000453 PARAMETER Experiment Name: At_100uM_ABA_P Parameter: Age (day) Value: 15
  misc_feature: MA Experiment 20000453 PARAMETER Experiment Name: At_100uM_ABA_P Parameter: Organism Value: A. thaliana
  misc_feature: MA Experiment 20000453 PARAMETER Experiment Name: At_100uM_ABA_P Parameter: Plant Line Value: WS
  misc_feature: MA Experiment 20000453 PARAMETER Experiment Name: At_100uM_ABA_P Parameter: Timepoint (hr) Value: 24
  misc_feature: MA Experiment 20000453 PARAMETER Experiment Name: At_100uM_ABA_P Parameter: Tissue Value: Aerial
  misc_feature: MA Experiment 20000453 PARAMETER Experiment Name: At_100uM_ABA_P Parameter: Treatment Value: 100uM ABA vs. No Treatment
  misc_feature: MA Experiment ID: 20000456 Result: Up-regulated in Transcription
  misc_feature: MA Experiment 20000456 PARAMETER Experiment Name: At_100uM_BA_P Parameter: Age (day) Value: 14
  misc_feature: MA Experiment 20000456 PARAMETER Experiment Name: At_100uM_BA_P Parameter: Organism Value: A. thaliana
  misc_feature: MA Experiment 20000456 PARAMETER Experiment Name: At_100uM_BA_P Parameter: Plant Line Value: WS
  misc_feature: MA Experiment 20000456 PARAMETER Experiment Name: At_100uM_BA_P Parameter: Timepoint (hr) Value: 6
  misc_feature: MA Experiment 20000456 PARAMETER Experiment Name: At_100uM_BA_P Parameter: Tissue Value: Aerial
  misc_feature: MA Experiment 20000456 PARAMETER Experiment Name: At_100uM_BA_P Parameter: Treatment Value: 100uM BA vs. No Treatment
  misc_feature: MA Experiment ID: 20000460 Result: Up-regulated in Transcription
  misc_feature: MA Experiment 20000460 PARAMETER Experiment Name: At_10percent_PEG_P Parameter: Age (day) Value: 12
  misc_feature: MA Experiment 20000460 PARAMETER Experiment Name: At_10percent_PEG_P Parameter: Organism Value: A. thaliana
  misc_feature: MA Experiment 20000460 PARAMETER Experiment Name: At_10percent_PEG_P Parameter: Plant Line Value: WS
  misc_feature: MA Experiment 20000460 PARAMETER Experiment Name: At_10percent_PEG_P Parameter: Timepoint (day) Value: 12
  misc_feature: MA Experiment 20000460 PARAMETER Experiment Name: At_10percent_PEG_P Parameter: Tissue Value: Whole Plant
  misc_feature: MA Experiment 20000460 PARAMETER Experiment Name: At_10percent_PEG_P Parameter: Treatment Value: 10percent PEG vs. No Treatment
  misc_feature: MA Experiment ID: 20000506 Result: Up-regulated in Transcription
  misc_feature: MA Experiment 20000506 PARAMETER Experiment Name: At_Wounding_P Parameter: Organism Value: A. thaliana
  misc_feature: MA Experiment 20000506 PARAMETER Experiment Name: At_Wounding_P Parameter: Plant Line Value: WS
  misc_feature: MA Experiment 20000506 PARAMETER Experiment Name: At_Wounding_P Parameter: Timepoint (hr) Value: 6
  misc_feature: MA Experiment 20000506 PARAMETER Experiment Name: At_Wounding_P Parameter: Tissue Value: Aerial
  misc_feature: MA Experiment 20000506 PARAMETER Experiment Name: At_Wounding_P Parameter: Treatment Value: Wounding vs. No Wounding
  misc_feature: MA Experiment ID: 20000527 Result: Down-regulated in Transcription
  misc_feature: MA Experiment 20000527 PARAMETER Experiment Name: At_10percent_PEG_P Parameter: Age (day) Value: 20
  misc_feature: MA Experiment 20000527 PARAMETER Experiment Name: At_10percent_PEG_P Parameter: Organism Value: A. thaliana
  misc_feature: MA Experiment 20000527 PARAMETER Experiment Name: At_10percent_PEG_P Parameter: Plant Line Value: WS
  misc_feature: MA Experiment 20000527 PARAMETER Experiment Name: At_10percent_PEG_P Parameter: Timepoint (day) Value: 20
  misc_feature: MA Experiment 20000527 PARAMETER Experiment Name: At_10percent_PEG_P Parameter: Tissue Value: Whole Plant
  misc_feature: MA Experiment 20000527 PARAMETER Experiment Name: At_10percent_PEG_P Parameter: Treatment Value: 10percent PEG vs. No Treatment
  misc_feature: MA Experiment ID: 20000574 Result: Up-regulated in Transcription
  misc_feature: MA Experiment 20000574 PARAMETER Experiment Name: At_100uM_ABA_Mutants__P Parameter: Organism Value: A. thaliana
  misc_feature: MA Experiment 20000574 PARAMETER Experiment Name: At_100uM_ABA_Mutants__P Parameter: Plant Line Value: CS23 vs. Ler wt
  misc_feature: MA Experiment 20000574 PARAMETER Experiment Name: At_100uM_ABA_Mutants__P Parameter: Timepoint (hr) Value: N/A
  misc_feature: MA Experiment 20000574 PARAMETER Experiment Name: At_100uM_ABA_Mutants__P Parameter: Tissue Value: Whole Plant
  misc_feature: MA Experiment 20000574 PARAMETER Experiment Name: At_100uM_ABA_Mutants__P Parameter: Treatment Value: None
  misc_feature: MA Experiment ID: 20000576 Result: Down-regulated in Transcription
  misc_feature: MA Experiment 20000576 PARAMETER Experiment Name: At_100uM_ABA_Mutants__P Parameter: Organism Value: A. thaliana
  misc_feature: MA Experiment 20000576 PARAMETER Experiment Name: At_100uM_ABA_Mutants__P Parameter: Plant Line Value: CS23
  misc_feature: MA Experiment 20000576 PARAMETER Experiment Name: At_100uM_ABA_Mutants__P Parameter: Timepoint (hr) Value: 6
  misc_feature: MA Experiment 20000576 PARAMETER Experiment Name: At_100uM_ABA_Mutants__P Parameter: Tissue Value: Whole Plant
  misc_feature: MA Experiment 20000576 PARAMETER Experiment Name: At_100uM_ABA_Mutants__P Parameter: Treatment Value: 1uM ABA vs. No Treatment
  misc_feature: MA Experiment ID: 20000709 Result: Up-regulated in Transcription
  misc_feature: MA Experiment 20000709 PARAMETER Experiment Name: At_15mM_NH4NO3_L-to-H_P Parameter: Age (hr) Value: 14
  misc_feature: MA Experiment 20000709 PARAMETER Experiment Name: At_15mM_NH4NO3_L-to-H_P Parameter: Organism Value: A. thaliana
  misc_feature: MA Experiment 20000709 PARAMETER Experiment Name: At_15mM_NH4NO3_L-to-H_P Parameter: Plant Line Value: WS
  misc_feature: MA Experiment 20000709 PARAMETER Experiment Name: At_15mM_NH4NO3_L-to-H_P Parameter: Timepoint (hr) Value: 4
  misc_feature: MA Experiment 20000709 PARAMETER Experiment Name: At_15mM_NH4NO3_L-to-H_P Parameter: Tissue Value: Aerial
  misc_feature: MA Experiment 20000709 PARAMETER Experiment Name: At_15mM_NH4NO3_L-to-H_P Parameter: Treatment Value: 15mM NH4NO3 vs. 30mM Mannitol
  misc_feature: MA Experiment ID: 20000794 Result: Down-regulated in Transcription
  misc_feature: MA Experiment 20000794 PARAMETER Experiment Name: At_Petals_P Parameter: Age (day) Value: 23-25 days
  misc_feature: MA Experiment 20000794 PARAMETER Experiment Name: At_Petals_P Parameter: Plant Line Value: WS
  misc_feature: MA Experiment 20000794 PARAMETER Experiment Name: At_Petals_P Parameter: Tissue Value: Petals vs. Whole plant
  misc_feature: MA Experiment ID: 20001247 Result: Up-regulated in Transcription
  misc_feature: MA Experiment 20001247 PARAMETER Experiment Name: At_Far-red-induction_P Parameter: Age (day) Value: 7
  misc_feature: MA Experiment 20001247 PARAMETER Experiment Name: At_Far-red-induction_P Parameter: Light Value: Far-red vs. White
  misc_feature: MA Experiment 20001247 PARAMETER Experiment Name: At_Far-red-induction_P Parameter: Organism Value: A. thaliana
  misc_feature: MA Experiment 20001247 PARAMETER Experiment Name: At_Far-red-induction_P Parameter: Plant Line Value: Columbia
  misc_feature: MA Experiment 20001247 PARAMETER Experiment Name: At_Far-red-induction_P Parameter: Timepoint (hr) Value: 1
  misc_feature: MA Experiment 20001247 PARAMETER Experiment Name: At_Far-red-induction_P Parameter: Tissue Value: Whole Plant
  misc_feature: MA Experiment ID: 20001557 Result: Up-regulated in Transcription
  misc_feature: MA Experiment 20001557 PARAMETER Experiment Name: At_Drought_Soil_Dry_P Parameter: Age (day) Value: 27
  misc_feature: MA Experiment 20001557 PARAMETER Experiment Name: At_Drought_Soil_Dry_P Parameter: Organism Value: A. thaliana
  misc_feature: MA Experiment 20001557 PARAMETER Experiment Name: At_Drought_Soil_Dry_P Parameter: Plant Line Value: WS
  misc_feature: MA Experiment 20001557 PARAMETER Experiment Name: At_Drought_Soil_Dry_P Parameter: Post Timepoint (hr) Value: 3
  misc_feature: MA Experiment 20001557 PARAMETER Experiment Name: At_Drought_Soil_Dry_P Parameter: Post-Treatment Value: Re-Water vs. No Drought
  misc_feature: MA Experiment 20001557 PARAMETER Experiment Name: At_Drought_Soil_Dry_P Parameter: Timepoint (day) Value: 13
  misc_feature: MA Experiment 20001557 PARAMETER Experiment Name: At_Drought_Soil_Dry_P Parameter: Treatment Value: Drought vs. No Drought
  misc_feature: MA Experiment ID: 20001558 Result: Up-regulated in Transcription
  misc_feature: MA Experiment 20001558 PARAMETER Experiment Name: At_Drought_Soil_Dry_P Parameter: Age (day) Value: 27
  misc_feature: MA Experiment 20001558 PARAMETER Experiment Name: At_Drought_Soil_Dry_P Parameter: Organism Value: A. thaliana
  misc_feature: MA Experiment 20001558 PARAMETER Experiment Name: At_Drought_Soil_Dry_P Parameter: Plant Line Value: WS
  misc_feature: MA Experiment 20001558 PARAMETER Experiment Name: At_Drought_Soil_Dry_P Parameter: Post Timepoint (hr) Value: 6
  misc_feature: MA Experiment 20001558 PARAMETER Experiment Name: At_Drought_Soil_Dry_P Parameter: Post-Treatment Value: Re-Water vs. No Drought
  misc_feature: MA Experiment 20001558 PARAMETER Experiment Name: At_Drought_Soil_Dry_P Parameter: Timepoint (day) Value: 13
  misc_feature: MA Experiment 20001558 PARAMETER Experiment Name: At_Drought_Soil_Dry_P Parameter: Treatment Value: Drought vs. No Drought
  misc_feature: MA Experiment ID: 20001560 Result: Up-regulated in Transcription
  misc_feature: MA Experiment 20001560 PARAMETER Experiment Name: At_Drought_Soil_Dry_P Parameter: Age (day) Value: 28
  misc_feature: MA Experiment 20001560 PARAMETER Experiment Name: At_Drought_Soil_Dry_P Parameter: Organism Value: A. thaliana
  misc_feature: MA Experiment 20001560 PARAMETER Experiment Name: At_Drought_Soil_Dry_P Parameter: Plant Line Value: WS
  misc_feature: MA Experiment 20001560 PARAMETER Experiment Name: At_Drought_Soil_Dry_P Parameter: Post Timepoint (hr) Value: None
  misc_feature: MA Experiment 20001560 PARAMETER Experiment Name: At_Drought_Soil_Dry_P Parameter: Post-Treatment Value: None
  misc_feature: MA Experiment 20001560 PARAMETER Experiment Name: At_Drought_Soil_Dry_P Parameter: Timepoint (day) Value: 14
  misc_feature: MA Experiment 20001560 PARAMETER Experiment Name: At_Drought_Soil_Dry_P Parameter: Treatment Value: Drought vs. No Drought
  misc_feature: MA Experiment ID: 20001772 Result: Down-regulated in Transcription
  misc_feature: MA Experiment 20001772 PARAMETER Experiment Name: At_Far-red-enriched-adult_P Parameter: Age (day) Value: 29
  misc_feature: MA Experiment 20001772 PARAMETER Experiment Name: At_Far-red-enriched-adult_P Parameter: Light Value: Far-red enriched vs. White
  misc_feature: MA Experiment 20001772 PARAMETER Experiment Name: At_Far-red-enriched-adult_P Parameter: Organism Value: A. thaliana
  misc_feature: MA Experiment 20001772 PARAMETER Experiment Name: At_Far-red-enriched-adult_P Parameter: Plant Line Value: Columbia
  misc_feature: MA Experiment 20001772 PARAMETER Experiment Name: At_Far-red-enriched-adult_P Parameter: Timepoint (hr) Value: 24
  misc_feature: MA Experiment 20001772 PARAMETER Experiment Name: At_Far-red-enriched-adult_P Parameter: Tissue Value: Aerial
  misc_feature: MA Experiment ID: 20001773 Result: Down-regulated in Transcription
  misc_feature: MA Experiment 20001773 PARAMETER Experiment Name: At_Far-red-enriched-adult_P Parameter: Age (day) Value: 30
  misc_feature: MA Experiment 20001773 PARAMETER Experiment Name: At_Far-red-enriched-adult_P Parameter: Light Value: Far-red enriched vs. White
  misc_feature: MA Experiment 20001773 PARAMETER Experiment Name: At_Far-red-enriched-adult_P Parameter: Organism Value: A. thaliana
  misc_feature: MA Experiment 20001773 PARAMETER Experiment Name: At_Far-red-enriched-adult_P Parameter: Plant Line Value: Columbia
  misc_feature: MA Experiment 20001773 PARAMETER Experiment Name: At_Far-red-enriched-adult_P Parameter: Timepoint (hr) Value: 48
  misc_feature: MA Experiment 20001773 PARAMETER Experiment Name: At_Far-red-enriched-adult_P Parameter: Tissue Value: Aerial
  misc_feature: MA Experiment ID: 20001904 Result: Up-regulated in Transcription
  misc_feature: MA Experiment 20001904 PARAMETER Experiment Name: At_Drought_Reproduction_P Parameter: Age (day) Value: 37
  misc_feature: MA Experiment 20001904 PARAMETER Experiment Name: At_Drought_Reproduction_P Parameter: Organism Value: A. thaliana
  misc_feature: MA Experiment 20001904 PARAMETER Experiment Name: At_Drought_Reproduction_P Parameter: Plant Line Value: WS
  misc_feature: MA Experiment 20001904 PARAMETER Experiment Name: At_Drought_Reproduction_P Parameter: Timepoint (day) Value: 7
  misc_feature: MA Experiment 20001904 PARAMETER Experiment Name: At_Drought_Reproduction_P Parameter: Tissue Value: Rosettes
  misc_feature: MA Experiment 20001904 PARAMETER Experiment Name: At_Drought_Reproduction_P Parameter: Treatment Value: Drought vs. No Drought
  misc_feature: MA Experiment ID: 20001911 Result: Up-regulated in Transcription
  misc_feature: MA Experiment 20001911 PARAMETER Experiment Name: At_Drought_Reproduction_P Parameter: Age (day) Value: 40
  misc_feature: MA Experiment 20001911 PARAMETER Experiment Name: At_Drought_Reproduction_P Parameter: Organism Value: A. thaliana
  misc_feature: MA Experiment 20001911 PARAMETER Experiment Name: At_Drought_Reproduction_P Parameter: Plant Line Value: WS
  misc_feature: MA Experiment 20001911 PARAMETER Experiment Name: At_Drought_Reproduction_P Parameter: Timepoint (day) Value: 10
  misc_feature: MA Experiment 20001911 PARAMETER Experiment Name: At_Drought_Reproduction_P Parameter: Tissue Value: Flowers
  misc_feature: MA Experiment 20001911 PARAMETER Experiment Name: At_Drought_Reproduction_P Parameter: Treatment Value: Drought vs. No Drought
atagaagaacaacaacaacaacaacaacaacacacgaagaagaagaagagaagcttatggcaggaggaggaacagaagcgtttcctgatcttggagagcattgccaagaccctgattgcaaattactcgattttctcccttttacatgcgacggctgcaaattggtgttttgtttggagcatagatcatacaagtcacataactgtccgaaatctgatcacgggagcagaacagtttccatctgtgaaacatgttctatagcgattgaaacaactggttttgatgaaagaggaatcaaatctttgcttgagaaacacgaaagatccggagattgtgatccaaacaagaaaaagaaaccaacgtgtcctgtaaaacgttgcaaagagattctgacttttgcgaataaccttacttgcaaagattgtggagtcaagttctgtttgaaacaccggtttccgacagatcatgtttgtaacaagaagaccattaataccgcgggaacaagatcgaggtggaacgagaggtttatggaagctttgagtttaagaaaccagaaaggatgtggaagaggaagctctgtttcatcaaaatctccagcatcagttagatcgttttagtttcttctcttgtgacaatactttgcatcaaccaattccttctttacgttctcatgtattttccattgtttgcaagaaagaagatt

SEQ ID NO: 28601 - protein, 204 aa, Arabidopsis thaliana
  peptide (1)..(204): Ceres Seq. ID no. 12330137
  misc_feature (121)..(166): Pfam Name: AN1-like Zinc finger Pfam Description: AN1-like Zinc finger
  misc_feature (27)..(157): Homolog of NCBI NO: 19111158 NR Description: arsenite inducible RNA associated protein [Mus
  misc_feature (27)..(158): Homolog of NCBI NO: 34876869 NR Description: similar to RIKEN cDNA 1110060O18 [Rattus
  misc_feature (27)..(158): Homolog of NCBI NO: 21312112 NR Description: RIKEN cDNA 1110060O18 [Mus musculus]
  misc_feature (27)..(158): Homolog of NCBI NO: 15079311 NR Description: RIKEN cDNA 1110060O18 gene [Mus musculus]
  misc_feature (27)..(169): Homolog of NCBI NO: 34871288 NR Description: similar to arsenite inducible RNA associated
  misc_feature (27)..(166): Homolog of NCBI NO: 33416395 NR Description: Unknown (protein for MGC:66295) [Danio rerio]
  misc_feature (23)..(157): Homolog of NCBI NO: 33146779 NR Description: putative arsenite inducible RNA associated
  misc_feature (23)..(201): Homolog of NCBI NO: 15230311 NR Description: putative protein; protein id: At3g57480.1
  misc_feature (23)..(197): Homolog of NCBI NO: 30688811 NR Description: zinc finger protein (PMZ) -related [Arabidopsis
  misc_feature (19)..(204): Homolog of NCBI NO: 15232930 NR Description: zinc finger protein (PMZ), putative
RRTTTTTTTTHEEEEEKLMAGGGTEAFPDLGEHCQDPDCKLLDFLPFTCDGCKLVFCLEHRSYKSHNCPKSDHGSRTVSICETCSIAIETTGFDERGIKSLLEKHERSGDCDPNKKKKPTCPVKRCKEILTFANNLTCKDCGVKFCLKHRFPTDHVCNKKTINTAGTRSRWNERFMEALSLRNQKGCGRGSSVSSKSPASVRSF

SEQ ID NO: 28602 - protein, 186 aa, Arabidopsis thaliana
  peptide (1)..(186): Ceres Seq. ID no. 12330138
  misc_feature (103)..(148): Pfam Name: AN1-like Zinc finger Pfam Description: AN1-like Zinc finger
  misc_feature (9)..(139): Homolog of NCBI NO: 19111158 NR Description: arsenite inducible RNA associated protein [Mus
  misc_feature (9)..(140): Homolog of NCBI NO: 34876869 NR Description: similar to RIKEN cDNA 1110060O18 [Rattus
  misc_feature (9)..(140): Homolog of NCBI NO: 21312112 NR Description: RIKEN cDNA 1110060O18 [Mus musculus]
  misc_feature (9)..(140): Homolog of NCBI NO: 15079311 NR Description: RIKEN cDNA 1110060O18 gene [Mus musculus]
  misc_feature (9)..(151): Homolog of NCBI NO: 34871288 NR Description: similar to arsenite inducible RNA associated
  misc_feature (9)..(148): Homolog of NCBI NO: 33416395 NR Description: Unknown (protein for MGC:66295) [Danio rerio]
  misc_feature (5)..(139): Homolog of NCBI NO: 33146779 NR Description: putative arsenite inducible RNA associated
  misc_feature (5)..(183): Homolog of NCBI NO: 15230311 NR Description: putative protein; protein id: At3g57480.1
  misc_feature (5)..(179): Homolog of NCBI NO: 30688811 NR Description: zinc finger protein (PMZ) -related [Arabidopsis
  misc_feature (1)..(186): Homolog of NCBI NO: 15232930 NR Description: zinc finger protein (PMZ), putative
MAGGGTEAFPDLGEHCQDPDCKLLDFLPFTCDGCKLVFCLEHRSYKSHNCPKSDHGSRTVSICETCSIAIETTGFDERGIKSLLEKHERSGDCDPNKKKKPTCPVKRCKEILTFANNLTCKDCGVKFCLKHRFPTDHVCNKKTINTAGTRSRWNERFMEALSLRNQKGCGRGSSVSSKSPASVRSF

SEQ ID NO: 28603 - DNA, 983 bp, Arabidopsis thaliana
  misc_feature (1)..(983): Ceres Seq. ID no. 12335989
  misc_feature: MA Experiment ID: 108576 Result: Down-regulated in Transcription
  misc_feature: MA Experiment 108576 PARAMETER Experiment Name: At_42deg_Heat_cDNA_P Parameter: Temperature (deg C) Value: 42 vs. 22
  misc_feature: MA Experiment 108576 PARAMETER Experiment Name: At_42deg_Heat_cDNA_P Parameter: Timepoint (hr) Value: 1
  misc_feature: MA Experiment 108576 PARAMETER Experiment Name: At_42deg_Heat_cDNA_P Parameter: Tissue Value: Aerial
  misc_feature: MA Experiment ID: 108577 Result: Down-regulated in Transcription
  misc_feature: MA Experiment 108577 PARAMETER Experiment Name: At_42deg_Heat_cDNA_P Parameter: Temperature (deg C) Value: 42 vs. 22
  misc_feature: MA Experiment 108577 PARAMETER Experiment Name: At_42deg_Heat_cDNA_P Parameter: Timepoint (hr) Value: 6
  misc_feature: MA Experiment 108577 PARAMETER Experiment Name: At_42deg_Heat_cDNA_P Parameter: Tissue Value: Aerial
  misc_feature: MA Experiment ID: 108585 Result: Up-regulated in Transcription
  misc_feature: MA Experiment 108585 PARAMETER Experiment Name: At_5mM_NaNP_cDNA_P Parameter: Timepoint (hr) Value: 6
  misc_feature: MA Experiment 108585 PARAMETER Experiment Name: At_5mM_NaNP_cDNA_P Parameter: Tissue Value: Aerial
  misc_feature: MA Experiment 108585 PARAMETER Experiment Name: At_5mM_NaNP_cDNA_P Parameter: Treatment Value: null
  misc_feature: MA Experiment ID: 20000184 Result: Up-regulated in Transcription
  misc_feature: MA Experiment 20000184 PARAMETER Experiment Name: At_Shoots__P Parameter: Age (day) Value: 7
  misc_feature: MA Experiment 20000184 PARAMETER Experiment Name: At_Shoots__P Parameter: Tissue Value: Shoots vs. Whole Plant
  misc_feature: MA Experiment ID: 20000224 Result: Down-regulated in Transcription
acggagctctgattcagcaacttcagctcttgaatttttttcgtttcagactaacggatcgaaacttctcagccaaatcagccgcatctaacctcacgcgccgccgcaatggcaactccaccgacgctacctgtcaccaatcagcaagctgttcaatctcagcctccaatcaacacacctgcttttcgtactttcttctcacgtctctccacctcgatccgtgatggcttgtcacagcgtcgtccatggacggagctcatcgatcgtagttccatggcgagacctgaatctctcaccgatgccttgtcccggataaggaagaatctcgcttacttcaaggttaactacgtcgccatcgtctccctcgtactcgccttttcgcttttctctcatcctctctccctccttgtcctcatcggactcctaggcggttggatgtttctctacctcttccgtccctcagatcagccactggtcgtcttcggtcgcactttctctgatcgagagactctgcttgctcttgtgctgtctacgatcgtcgtcgtgtttatgacgagcgttggatctctcttaacctccgcgcttatgattggtgttgcaatcgtttgcgtacacggtgcgtttgtggttccggatgatctcttcttggacgagcaagagcctgcgaatgctggattactctcattccttggaggttctgctacctcagctgctgcagctgtctcagggagagtctaagagctggatttgattcagatctcgtcaattgtggttggtaactccgtactgattttagtgatttgttgttgttgaaatggaatgtagattcgtaacgaagctctacagatttagaactacgaatttttggttgcagtatctgcttcttcttgttgttttatctctttggtggctcgacacttttatgttcagatgtagaaaactcaaagttgatctttctctatcgtttctcctattgtgggatt

SEQ ID NO: 28604 - protein, 209 aa, Arabidopsis thaliana
  peptide (1)..(209): Ceres Seq. ID no. 12335990
  misc_feature (1)..(198): Homolog of NCBI NO: 40539036 NR Description: putative prenylated rab acceptor protein
  misc_feature (9)..(193): Homolog of NCBI NO: 18405248 NR Description: expressed protein
  misc_feature (1)..(204): Homolog of NCBI NO: 15240698 NR Description: putative protein
  misc_feature (4)..(203): Homolog of NCBI NO: 15241022 NR Description: putative protein; protein id: At5g01640.1
  misc_feature (1)..(209): Homolog of NCBI NO: 15224494 NR Description: unknown protein; protein id: At2g38360.1
  misc_feature (1)..(209): Homolog of NCBI NO: 18072825 NR Description: prenylated Rab receptor 2 [Arabidopsis thaliana]
  misc_feature (1)..(209): Homolog of NCBI NO: 15239101 NR Description: putative protein; protein id: At5g05380.1
  misc_feature (2)..(209): Homolog of NCBI NO: 15226664 NR Description: unknown protein; protein id: At2g40380.1
  misc_feature (1)..(209): Homolog of NCBI NO: 15450978 NR Description: putative protein [Arabidopsis thaliana]
  misc_feature (1)..(209): Homolog of NCBI NO: 15228824 NR Description: putative protein
MATPPTLPVTNQQAVQSQPPINTPAFRTFFSRLSTSIRDGLSQRRPWTELIDRSSMARPESLTDALSRIRKNLAYFKVNYVAIVSLVLAFSLFSHPLSLLVLIGLLGGWMFLYLFRPSDQPLVVFGRTFSDRETLLALVLSTIVVVFMTSVGSLLTSALMIGVAIVCVHGAFVVPDDLFLDEQEPANAGLLSFLGGSATSAAAAVSGRV

SEQ ID NO: 28605 - protein, 154 aa, Arabidopsis thaliana
  peptide (1)..(154): Ceres Seq. ID no. 12335991
  misc_feature (1)..(143): Homolog of NCBI NO: 40539036 NR Description: putative prenylated rab acceptor protein
  misc_feature (1)..(138): Homolog of NCBI NO: 18405248 NR Description: expressed protein
  misc_feature (1)..(149): Homolog of NCBI NO: 15240698 NR Description: putative protein
  misc_feature (1)..(148): Homolog of NCBI NO: 15241022 NR Description: putative protein; protein id: At5g01640.1
  misc_feature (1)..(154): Homolog of NCBI NO: 15224494 NR Description: unknown protein; protein id: At2g38360.1
  misc_feature (1)..(154): Homolog of NCBI NO: 18072825 NR Description: prenylated Rab receptor 2 [Arabidopsis thaliana]
  misc_feature (1)..(154): Homolog of NCBI NO: 15239101 NR Description: putative protein; protein id: At5g05380.1
  misc_feature (1)..(154): Homolog of NCBI NO: 15226664 NR Description: unknown protein; protein id: At2g40380.1
  misc_feature (1)..(154): Homolog of NCBI NO: 15450978 NR Description: putative protein [Arabidopsis thaliana]
  misc_feature (1)..(154): Homolog of NCBI NO: 15228824 NR Description: putative protein
MARPESLTDALSRIRKNLAYFKVNYVAIVSLVLAFSLFSHPLSLLVLIGLLGGWMFLYLFRPSDQPLVVFGRTFSDRETLLALVLSTIVVVFMTSVGSLLTSALMIGVAIVCVHGAFVVPDDLFLDEQEPANAGLLSFLGGSATSAAAAVSGRV

SEQ ID NO: 28606 - DNA, 1601 bp, Arabidopsis thaliana
  misc_feature (1)..(1601): Ceres Seq. ID no. 13491911
  misc_feature: MA Experiment ID: 20000179 Result: Up-regulated in Transcription
  misc_feature: MA Experiment 20000179 PARAMETER Experiment Name: At_Germinating_Seeds_P Parameter: Age (hr) Value: 6 vs. 0
  misc_feature: MA Experiment 20000179 PARAMETER Experiment Name: At_Germinating_Seeds_P Parameter: Tissue Value: Germinating Seeds
  misc_feature: MA Experiment ID: 20000180 Result: Up-regulated in Transcription
  misc_feature: MA Experiment 20000180 PARAMETER Experiment Name: At_Germinating_Seeds_P Parameter: Age (hr) Value: 24 vs. 0
  misc_feature: MA Experiment 20000180 PARAMETER Experiment Name: At_Germinating_Seeds_P Parameter: Tissue Value: Germinating Seeds
  misc_feature: MA Experiment ID: 20000184 Result: Up-regulated in Transcription
  misc_feature: MA Experiment 20000184 PARAMETER Experiment Name: At_Shoots__P Parameter: Age (day) Value: 7
  misc_feature: MA Experiment 20000184 PARAMETER Experiment Name: At_Shoots__P Parameter: Tissue Value: Shoots vs. Whole Plant
  misc_feature: MA Experiment ID: 20000265 Result: Up-regulated in Transcription
  misc_feature: MA Experiment 20000265 PARAMETER Experiment Name: At_Open_Flower_P Parameter: Age (day) Value: 21
  misc_feature: MA Experiment 20000265 PARAMETER Experiment Name: At_Open_Flower_P Parameter: Plant Line Value: WS
  misc_feature: MA Experiment 20000265 PARAMETER Experiment Name: At_Open_Flower_P Parameter: Tissue Value: Closed Flower vs. Whole Plant
  misc_feature: MA Experiment ID: 20000437 Result: Down-regulated in Transcription
  misc_feature: MA Experiment 20000437 PARAMETER Experiment Name: At_Drought_P Parameter: Age (day) Value: 8
  misc_feature: MA Experiment 20000437 PARAMETER Experiment Name: At_Drought_P Parameter: Organism Value: A. thaliana
  misc_feature: MA Experiment 20000437 PARAMETER Experiment Name: At_Drought_P Parameter: Plant Line Value: WS
  misc_feature: MA Experiment 20000437 PARAMETER Experiment Name: At_Drought_P Parameter: Timepoint (hr) Value: 24
  misc_feature: MA Experiment 20000437 PARAMETER Experiment Name: At_Drought_P Parameter: Tissue Value: Whole Plant
  misc_feature: MA Experiment 20000437 PARAMETER Experiment Name: At_Drought_P Parameter: Treatment Value: Drought vs. No Drought
  misc_feature: MA Experiment ID: 20000438 Result: Up-regulated in Transcription
  misc_feature: MA Experiment 20000438 PARAMETER Experiment Name: At_Shoots__P Parameter: Age (day) Value: 14
  misc_feature: MA Experiment 20000438 PARAMETER Experiment Name: At_Shoots__P Parameter: Tissue Value: Shoots vs. Whole Plant
  misc_feature: MA Experiment ID: 20000794 Result: Down-regulated in Transcription
  misc_feature: MA Experiment 20000794 PARAMETER Experiment Name: At_Petals_P Parameter: Age (day) Value: 23-25 days
  misc_feature: MA Experiment 20000794 PARAMETER Experiment Name: At_Petals_P Parameter: Plant Line Value: WS
  misc_feature: MA Experiment 20000794 PARAMETER Experiment Name: At_Petals_P Parameter: Tissue Value: Petals vs. Whole plant
  misc_feature: MA Experiment ID: 20001558 Result: Up-regulated in Transcription
  misc_feature: MA Experiment 20001558 PARAMETER Experiment Name: At_Drought_Soil_Dry_P Parameter: Age (day) Value: 27
  misc_feature: MA Experiment 20001558 PARAMETER Experiment Name: At_Drought_Soil_Dry_P Parameter: Organism Value: A. thaliana
  misc_feature: MA Experiment 20001558 PARAMETER Experiment Name: At_Drought_Soil_Dry_P Parameter: Plant Line Value: WS
  misc_feature: MA Experiment 20001558 PARAMETER Experiment Name: At_Drought_Soil_Dry_P Parameter: Post Timepoint (hr) Value: 6
  misc_feature: MA Experiment 20001558 PARAMETER Experiment Name: At_Drought_Soil_Dry_P Parameter: Post-Treatment Value: Re-Water vs. No Drought
  misc_feature: MA Experiment 20001558 PARAMETER Experiment Name: At_Drought_Soil_Dry_P Parameter: Timepoint (day) Value: 13
  misc_feature: MA Experiment 20001558 PARAMETER Experiment Name: At_Drought_Soil_Dry_P Parameter: Treatment Value: Drought vs. No Drought
  misc_feature: MA Experiment ID: 20001560 Result: Up-regulated in Transcription
  misc_feature: MA Experiment 20001560 PARAMETER Experiment Name: At_Drought_Soil_Dry_P Parameter: Age (day) Value: 28
  misc_feature: MA Experiment 20001560 PARAMETER Experiment Name: At_Drought_Soil_Dry_P Parameter: Organism Value: A. thaliana
  misc_feature: MA Experiment 20001560 PARAMETER Experiment Name: At_Drought_Soil_Dry_P Parameter: Plant Line Value: WS
  misc_feature: MA Experiment 20001560 PARAMETER Experiment Name: At_Drought_Soil_Dry_P Parameter: Post Timepoint (hr) Value: None
  misc_feature: MA Experiment 20001560 PARAMETER Experiment Name: At_Drought_Soil_Dry_P Parameter: Post-Treatment Value: None
  misc_feature: MA Experiment 20001560 PARAMETER Experiment Name: At_Drought_Soil_Dry_P Parameter: Timepoint (day) Value: 14
  misc_feature: MA Experiment 20001560 PARAMETER Experiment Name: At_Drought_Soil_Dry_P Parameter: Treatment Value: Drought vs. No Drought
  misc_feature: MA Experiment ID: 20001757 Result: Up-regulated in Transcription
  misc_feature: MA Experiment 20001757 PARAMETER Experiment Name: At_50mM_NH4NO3_L-to-H_P Parameter: Timepoint (hr) Value: 6
  misc_feature: MA Experiment 20001757 PARAMETER Experiment Name: At_50mM_NH4NO3_L-to-H_P Parameter: Tissue Value: Leaf
  misc_feature: MA Experiment 20001757 PARAMETER Experiment Name: At_50mM_NH4NO3_L-to-H_P Parameter: Treatment Value: 50mM NH4NO3 vs 100mM Mannitol
  misc_feature: MA Experiment ID: 20001911 Result: Down-regulated in Transcription
  misc_feature: MA Experiment 20001911 PARAMETER Experiment Name: At_Drought_Reproduction_P Parameter: Age (day) Value: 40
  misc_feature: MA Experiment 20001911 PARAMETER Experiment Name: At_Drought_Reproduction_P Parameter: Organism Value: A. thaliana
  misc_feature: MA Experiment 20001911 PARAMETER Experiment Name: At_Drought_Reproduction_P Parameter: Plant Line Value: WS
  misc_feature: MA Experiment 20001911 PARAMETER Experiment Name: At_Drought_Reproduction_P Parameter: Timepoint (day) Value: 10
  misc_feature: MA Experiment 20001911 PARAMETER Experiment Name: At_Drought_Reproduction_P Parameter: Tissue Value: Flowers
  misc_feature: MA Experiment 20001911 PARAMETER Experiment Name: At_Drought_Reproduction_P Parameter: Treatment Value: Drought vs. No Drought
  misc_feature: Phenotype: ROSETTE LEAVES Curled-Curled 3
  misc_feature: Phenotype: ROSETTE LEAVES Other
  misc_feature: Phenotype: INFLORESCENCE Height-Short
  misc_feature: Phenotype: ROSETTE LEAVES Disorganized Rosette-Disorganized Rosette
  misc_feature: Phenotype: WHOLE PLANT Size-Small
  misc_feature: Phenotype: ROSETTE LEAVES Disorganized Rosette-Disorganized Rosette
  misc_feature: Phenotype: ROSETTE LEAVES Fused-Leaf to Inflorescence
  misc_feature: Phenotype: INFLORESCENCE Height-Short
  misc_feature: Phenotype: INFLORESCENCE Other
gttttgtaattgagacgaaaacttctgatatcacttaaaaacttcacagaaacaacacctcgatctcatcgaagctcctctctcttacatatcatcacttcacatcaaccaaacctacttctgtctctctctctcgctctctatctctcacgctctcacagtagaagaaaaaattagaaaggttgtgagaatggcggctacagcagcttcaagcttacaaattgctacacgaaggccgagcatgtcttcgcctagcaaaattcttaaagcaggaacctacattgttggtgccaatcctggaaacgcttcatgggataaactttcatgcactcgccaattatcaaaccttggatgtttgagaaaccacagtgctgttccaacttgtaagagacccttttctttttccacaagggcaatgtctgaatccagtgaaaacaaggctccttcagggcttccaattgatttgagagggaaaagagctttcattgctggtatagctgatgataatggctatggttgggccatagcaaaatctcttgctgctgctggagctgaaatattggttgggacttgggttcctgcacttaatatatttgagacaagcttgagacgtggaaaattcgaccagtcacgagtgttgcctgacgggtcattgatggagattaagaaggtttatgctttggatgctgtgtttgacaatcctgaagatgtgcctgaagatgtgaaaacgaataagcgatatgcaggatcgtcaaactggaccgtacaggaagctgctgaatgtgtgaaaaaagattttggaagcattgacattcttgtccattcccttgcaaatggcccagaggttagcaaacctcttctggagacatcaaggaaaggctatctcgctgctatctctgcttcgagttactcctttgtttccttgctgaggcattttctgccaattatgaacccaggaggtgcttcaatatctcttacttacattgcctctgaaagaatcattcctgggtatggtggaggtatgagttctgccaaagctgcactagagagtgacacacgggtgcttgcatatgaagctggaaggaaatcaaacattagggtcaacaccatctctgcgggtcctttgggaagccgagcagcaaaagccattgggttcatagacaccatgattgagtattcctacaataatgggcctattcagaaaacactgaccgcagatgaagttgggaatgcagcagccttcttggcatctccattggcctctgccataaccggtgcaaccatatatgtggacaatggtttgaatgcaatggggcgttgcactggacagcccggtgttcaaagaccttaacagcaagaattagagtcttgatcgacgactggactcgagaaattccgtgttttcgtgagcttgcttgtttctttatgagttagtatgtacggcatatgttccccatcggctgtctttttttttctttctttaagagaataaattatggttctaggttgggtcatttagcaactatatatgtagtgatggattattattcctcttatgattgaaaatttgcaagtgagaaaaactatcatgtttcttgtaa

SEQ ID NO: 28607 - protein, 386 aa, Arabidopsis thaliana
  peptide (1)..(386): Ceres Seq. ID no. 13491912
  misc_feature (279)..(371): Pfam Name: short chain dehydrogenase Pfam Description: short chain dehydrogenase
  misc_feature (1)..(381): Homolog of NCBI NO: 99805 NR Description: enoyl-
  misc_feature (1)..(381): Homolog of NCBI NO: 461461 NR Description: Enoyl-
  misc_feature (1)..(381): Homolog of NCBI NO: 14422259 NR Description: enoyl-[acyl-carrier protein] reductase [Brassica
  misc_feature (1)..(381): Homolog of NCBI NO: 14422261 NR Description: enoyl-[acyl carrier-protein] reductase [Brassica
  misc_feature (1)..(381): Homolog of NCBI NO: 7488486 NR Description: probable enoyl-
  misc_feature (1)..(381): Homolog of NCBI NO: 14422257 NR Description: enoyl-[acyl-carrier protein] reductase [Brassica
  misc_feature (1)..(381): Homolog of NCBI NO: 14422255 NR Description: enoyl-[acyl-carrier protein] reductase [Brassica
  misc_feature (1)..(381): Homolog of NCBI NO: 2204087 NR Description: enoyl-ACP reductase [Arabidopsis thaliana]
  misc_feature (1)..(381): Homolog of NCBI NO: 18396215 NR Description: enoyl-
  misc_feature (1)..(381): Homolog of NCBI NO: 7141083 NR Description: enoyl-ACP reductase [Arabidopsis thaliana]
MAATAASSLQIATRRPSMSSPSKILKAGTYIVGANPGNASWDKLSCTRQLSNLGCLRNHSAVPTCKRPFSFSTRAMSESSENKAPSGLPIDLRGKRAFIAGIADDNGYGWAIAKSLAAAGAEILVGTWVPALNIFETSLRRGKFDQSRVLPDGSLMEIKKVYALDAVFDNPEDVPEDVKTNKRYAGSSNWTVQEAAECVKKDFGSIDILVHSLANGPEVSKPLLETSRKGYLAAISASSYSFVSLLRHFLPIMNPGGASISLTYIASERIIPGYGGGMSSAKAALESDTRVLAYEAGRKSNIRVNTISAGPLGSRAAKAIGFIDTMIEYSYNNGPIQKTLTADEVGNAAAFLASPLASAITGATIYVDNGLNAMGRCTGQPGVQRP

SEQ ID NO: 28608 - protein, 369 aa, Arabidopsis thaliana
  peptide (1)..(369): Ceres Seq. ID no. 13491913
  misc_feature (262)..(354): Pfam Name: short chain dehydrogenase Pfam Description: short chain dehydrogenase
  misc_feature (1)..(364): Homolog of NCBI NO: 99805 NR Description: enoyl-
  misc_feature (1)..(364): Homolog of NCBI NO: 461461 NR Description: Enoyl-
  misc_feature (1)..(364): Homolog of NCBI NO: 14422259 NR Description: enoyl-[acyl-carrier protein] reductase [Brassica
  misc_feature (1)..(364): Homolog of NCBI NO: 14422261 NR Description: enoyl-[acyl carrier-protein] reductase [Brassica
  misc_feature (1)..(364): Homolog of NCBI NO: 7488486 NR Description: probable enoyl-
  misc_feature (1)..(364): Homolog of NCBI NO: 14422257 NR Description: enoyl-[acyl-carrier protein] reductase [Brassica
  misc_feature (1)..(364): Homolog of NCBI NO: 14422255 NR Description: enoyl-[acyl-carrier protein] reductase [Brassica
  misc_feature (1)..(364): Homolog of NCBI NO: 2204087 NR Description: enoyl-ACP reductase [Arabidopsis thaliana]
  misc_feature (1)..(364): Homolog of NCBI NO: 18396215 NR Description: enoyl-
  misc_feature (1)..(364): Homolog of NCBI NO: 7141083 NR Description: enoyl-ACP reductase [Arabidopsis thaliana]
MSSPSKILKAGTYIVGANPGNASWDKLSCTRQLSNLGCLRNHSAVPTCKRPFSFSTRAMSESSENKAPSGLPIDLRGKRAFIAGIADDNGYGWAIAKSLAAAGAEILVGTWVPALNIFETSLRRGKFDQSRVLPDGSLMEIKKVYALDAVFDNPEDVPEDVKTNKRYAGSSNWTVQEAAECVKKDFGSIDILVHSLANGPEVSKPLLETSRKGYLAAISASSYSFVSLLRHFLPIMNPGGASISLTYIASERIIPGYGGGMSSAKAALESDTRVLAYEAGRKSNIRVNTISAGPLGSRAAKAIGFIDTMIEYSYNNGPIQKTLTADEVGNAAAFLASPLASAITGATIYVDNGLNAMGRCTGQPGVQRP

SEQ ID NO: 28609 - protein, 311 aa, Arabidopsis thaliana
  peptide (1)..(311): Ceres Seq. ID no. 13491914
  misc_feature (204)..(296): Pfam Name: short chain dehydrogenase Pfam Description: short chain dehydrogenase
  misc_feature (1)..(306): Homolog of NCBI NO: 99805 NR Description: enoyl-
  misc_feature (1)..(306): Homolog of NCBI NO: 461461 NR Description: Enoyl-
  misc_feature (1)..(306): Homolog of NCBI NO: 14422259 NR Description: enoyl-[acyl-carrier protein] reductase [Brassica
  misc_feature (1)..(306): Homolog of NCBI NO: 14422261 NR Description: enoyl-[acyl carrier-protein] reductase [Brassica
  misc_feature (1)..(306): Homolog of NCBI NO: 7488486 NR Description: probable enoyl-
  misc_feature (1)..(306): Homolog of NCBI NO: 14422257 NR Description: enoyl-[acyl-carrier protein] reductase [Brassica
  misc_feature (1)..(306): Homolog of NCBI NO: 14422255 NR Description: enoyl-[acyl-carrier protein] reductase [Brassica
  misc_feature (1)..(306): Homolog of NCBI NO: 2204087 NR Description: enoyl-ACP reductase [Arabidopsis thaliana]
  misc_feature (1)..(306): Homolog of NCBI NO: 18396215 NR Description: enoyl-
  misc_feature (1)..(306): Homolog of NCBI NO: 7141083 NR Description: enoyl-ACP reductase [Arabidopsis thaliana]
MSESSENKAPSGLPIDLRGKRAFIAGIADDNGYGWAIAKSLAAAGAEILVGTWVPALNIFETSLRRGKFDQSRVLPDGSLMEIKKVYALDAVFDNPEDVPEDVKTNKRYAGSSNWTVQEAAECVKKDFGSIDILVHSLANGPEVSKPLLETSRKGYLAAISASSYSFVSLLRHFLPIMNPGGASISLTYIASERIIPGYGGGMSSAKAALESDTRVLAYEAGRKSNIRVNTISAGPLGSRAAKAIGFIDTMIEYSYNNGPIQKTLTADEVGNAAAFLASPLASAITGATIYVDNGLNAMGRCTGQPGVQRP

SEQ ID NO: 28610 - DNA, 1691 bp, Arabidopsis thaliana
  misc_feature (1)..(1691): Ceres Seq. ID no. 12325280
  misc_feature: MA Experiment ID: 20000179 Result: Down-regulated in Transcription
  misc_feature: MA Experiment 20000179 PARAMETER Experiment Name: At_Germinating_Seeds_P Parameter: Age (hr) Value: 6 vs. 0
  misc_feature: MA Experiment 20000179 PARAMETER Experiment Name: At_Germinating_Seeds_P Parameter: Tissue Value: Germinating Seeds
  misc_feature: MA Experiment ID: 20000180 Result: Down-regulated in Transcription
  misc_feature: MA Experiment 20000180 PARAMETER Experiment Name: At_Germinating_Seeds_P Parameter: Age (hr) Value: 24 vs. 0
  misc_feature: MA Experiment 20000180 PARAMETER Experiment Name: At_Germinating_Seeds_P Parameter: Tissue Value: Germinating Seeds
  misc_feature: MA Experiment ID: 20000184 Result: Up-regulated in Transcription
  misc_feature: MA Experiment 20000184 PARAMETER Experiment Name: At_Shoots__P Parameter: Age (day) Value: 7
  misc_feature: MA Experiment 20000184 PARAMETER Experiment Name: At_Shoots__P Parameter: Tissue Value: Shoots vs. Whole Plant
  misc_feature: MA Experiment ID: 20000436 Result: Up-regulated in Transcription
  misc_feature: MA Experiment 20000436 PARAMETER Experiment Name: At_Drought_P Parameter: Age (day) Value: 7
  misc_feature: MA Experiment 20000436 PARAMETER Experiment Name: At_Drought_P Parameter: Organism Value: A. thaliana
  misc_feature: MA Experiment 20000436 PARAMETER Experiment Name: At_Drought_P Parameter: Plant Line Value: WS
  misc_feature: MA Experiment 20000436 PARAMETER Experiment Name: At_Drought_P Parameter: Timepoint (hr) Value: 12
  misc_feature: MA Experiment 20000436 PARAMETER Experiment Name: At_Drought_P Parameter: Tissue Value: Whole Plant
  misc_feature: MA Experiment 20000436 PARAMETER Experiment Name: At_Drought_P Parameter: Treatment Value: Drought vs. No Drought
  misc_feature: MA Experiment ID: 20000437 Result: Up-regulated in Transcription
  misc_feature: MA Experiment 20000437 PARAMETER Experiment Name: At_Drought_P Parameter: Age (day) Value: 8
  misc_feature: MA Experiment 20000437 PARAMETER Experiment Name: At_Drought_P Parameter: Organism Value: A. thaliana
  misc_feature: MA Experiment 20000437 PARAMETER Experiment Name: At_Drought_P Parameter: Plant Line Value: WS
  misc_feature: MA Experiment 20000437 PARAMETER Experiment Name: At_Drought_P Parameter: Timepoint (hr) Value: 24
  misc_feature: MA Experiment 20000437 PARAMETER Experiment Name: At_Drought_P Parameter: Tissue Value: Whole Plant
  misc_feature: MA Experiment 20000437 PARAMETER Experiment Name: At_Drought_P Parameter: Treatment Value: Drought vs. No Drought
  misc_feature: MA Experiment ID: 20000527 Result: Up-regulated in Transcription
  misc_feature: MA Experiment 20000527 PARAMETER Experiment Name: At_10percent_PEG_P Parameter: Age (day) Value: 20
  misc_feature: MA Experiment 20000527 PARAMETER Experiment Name: At_10percent_PEG_P Parameter: Organism Value: A. thaliana
  misc_feature: MA Experiment 20000527 PARAMETER Experiment Name: At_10percent_PEG_P Parameter: Plant Line Value: WS
  misc_feature: MA Experiment 20000527 PARAMETER Experiment Name: At_10percent_PEG_P Parameter: Timepoint (day) Value: 20
  misc_feature: MA Experiment 20000527 PARAMETER Experiment Name: At_10percent_PEG_P Parameter: Tissue Value: Whole Plant
  misc_feature: MA Experiment 20000527 PARAMETER Experiment Name: At_10percent_PEG_P Parameter: Treatment Value: 10percent PEG vs. No Treatment
  misc_feature: MA Experiment ID: 20001247 Result: Up-regulated in Transcription
  misc_feature: MA Experiment 20001247 PARAMETER Experiment Name: At_Far-red-induction_P Parameter: Age (day) Value: 7
  misc_feature: MA Experiment 20001247 PARAMETER Experiment Name: At_Far-red-induction_P Parameter: Light Value: Far-red vs. White
  misc_feature: MA Experiment 20001247 PARAMETER Experiment Name: At_Far-red-induction_P Parameter: Organism Value: A. thaliana
  misc_feature: MA Experiment 20001247 PARAMETER Experiment Name: At_Far-red-induction_P Parameter: Plant Line Value: Columbia
  misc_feature: MA Experiment 20001247 PARAMETER Experiment Name: At_Far-red-induction_P Parameter: Timepoint (hr) Value: 1
  misc_feature: MA Experiment 20001247 PARAMETER Experiment Name: At_Far-red-induction_P Parameter: Tissue Value: Whole Plant
  misc_feature: MA Experiment ID: 20001450 Result: Up-regulated in Transcription
  misc_feature: MA Experiment 20001450 PARAMETER Experiment Name: At_Far-red-induction_P Parameter: Age (day) Value: 7
  misc_feature: MA Experiment 20001450 PARAMETER Experiment Name: At_Far-red-induction_P Parameter: Light Value: Far-red vs. White
  misc_feature: MA Experiment 20001450 PARAMETER Experiment Name: At_Far-red-induction_P Parameter: Organism Value: A. thaliana
  misc_feature: MA Experiment 20001450 PARAMETER Experiment Name: At_Far-red-induction_P Parameter: Plant Line Value: Columbia
  misc_feature: MA Experiment 20001450 PARAMETER Experiment Name: At_Far-red-induction_P Parameter: Timepoint (hr) Value: 8
  misc_feature: MA Experiment 20001450 PARAMETER Experiment Name: At_Far-red-induction_P Parameter: Tissue Value: Whole Plant
  misc_feature: MA Experiment ID: 20001905 Result: Up-regulated in Transcription
  misc_feature: MA Experiment 20001905 PARAMETER Experiment Name: At_Drought_Reproduction_P Parameter: Age (day) Value: 40
  misc_feature: MA Experiment 20001905 PARAMETER Experiment Name: At_Drought_Reproduction_P Parameter: Organism Value: A. thaliana
  misc_feature: MA Experiment 20001905 PARAMETER Experiment Name: At_Drought_Reproduction_P Parameter: Plant Line Value: WS
  misc_feature: MA Experiment 20001905 PARAMETER Experiment Name: At_Drought_Reproduction_P Parameter: Timepoint (day) Value: 10
  misc_feature: MA Experiment 20001905 PARAMETER Experiment Name: At_Drought_Reproduction_P Parameter: Tissue Value: Rosettes
  misc_feature: MA Experiment 20001905 PARAMETER Experiment Name: At_Drought_Reproduction_P Parameter: Treatment Value: Drought vs. No Drought
agagagagagagaggctctggaaatcttgtgatccataaattgtctctcttcttttcctctgttctcatatacaaggaaaagggcttcctctgttctgttcctaataaatatctgaaatcaaaaacagagagagtcttttctttttttctttcactctatctctctccacacatgttacttacaacttaatagtttctctatatctccttgagatctccatccagctgttgctttttttactaaacaaaactcctctttgtgtgagtgaatgaatggaagtttccgactctctcttcttttgttttttcaacatacttcattcattcattttagcataacaatcggtggttggggatgatatgagatgaggcccgatgttatcccttttcttcaactttttgacctcttgtctctggccctcttcttccaccacttcccacacttattctgattccaaaggcaaacaagacggccttctctggtacaaagactctgctcaccacctttttggtgatttctccatggccgttgtccaggccaacaacctcctcgaggatcagagccaggtcgaatccggtcctttgaccaccctctcttcttctggtccctatggaacctttgttggcgtctatgacggccacggaggccctgagacctcccgttttgtcaacgatcatctctttcaccatctcaagagattcgcagcggagcaggattccatgtctgtggatgtgataagaaaggcctatgaggcaaccgaagaagggtttctaggggtggtggccaagcagtgggcagtgaagccacatatagcagcggttggctcttgttgcctgatcggtgtggtctgcgatgggaagctttacgtagctaacgttggggactcccgtgcggttttgggaaaggtcatcaaggccacaggtgaggttaatgcgcttcagctctcagctgagcataacgtgagcatagagtctgtgaggcaggaaatgcactccttacaccctgatgactcccatattgtcgtcttaaaacacaatgtctggcgtgttaagggcattattcaggtatcacgatccataggagacgtgtatcttaagaaatcggagttcaacaaggaacctttgtacacaaagtaccgattgcgggagccaatgaaaagacctatcttgagttgggaaccgtcgataaccgtgcatgatctccaaccagacgatcagtttctgatatttgcatcagacggactttgggagcagcttagcaaccaagaggctgttgaaatcgttcagaaccacccaagaaacgggatagcgaggagactggtgaaagctgcgctgcaggaggcagcaaagaaaagagagatgagatattctgatctcaacaagattgagagaggagtcaggaggcatttccatgacgacatcactgtggtcgtcctcttcctggacaccaatctgctcagcagagcctcctctcttaaaaccccttctgtttctatccgtggtggtggtatcactttacctaagaaactttaaaaccaggctccatccatcttctagttatatttatccaaccaaagatatgtgttttttttttctttctttatgtttttttgtctttttgggttcactcttcctggtataagaaatgtataatttaaaactgaagctattgacatgttggatctcatgcc

SEQ ID NO: 28611 - protein, 385 aa, Arabidopsis thaliana
  peptide (1)..(385): Ceres Seq. ID no. 12325281
  misc_feature (45)..(328): Pfam Name: Protein phosphatase 2C Pfam Description: Protein phosphatase 2C
  misc_feature (8)..(382): Homolog of NCBI NO: 13357263 NR Description: putative protein phosphatase 2C
  misc_feature (1)..(381): Homolog of NCBI NO: 18855039 NR Description: putative protein phosphatase [Oryza sativa]
  misc_feature (7)..(382): Homolog of NCBI NO: 7485891 NR Description: hypothetical protein F20M13.80 - Arabidopsis
  misc_feature (1)..(382): Homolog of NCBI NO: 17064756 NR Description: putative protein phosphatase-2c [Arabidopsis
  misc_feature (1)..(382): Homolog of NCBI NO: 22329238 NR Description: putative protein phosphatase-2c
  misc_feature (1)..(382): Homolog of NCBI NO: 7768153 NR Description: protein phosphatase 2C (PP2C) [Fagus sylvatica]
  misc_feature (1)..(384): Homolog of NCBI NO: 11282004 NR Description: protein phosphatase 2C homolog [imported] -
  misc_feature (1)..(385): Homolog of NCBI NO: 11282001 NR Description: protein phosphatase 2C-like protein - Arabidopsis
  misc_feature (1)..(385): Homolog of NCBI NO: 20340237 NR Description: protein phosphatase 2c-like protein
  misc_feature (1)..(385): Homolog of NCBI NO: 15239244 NR Description: protein phosphatase 2C-like protein
MLSLFFNFLTSCLWPSSSTTSHTYSDSKGKQDGLLWYKDSAHHLFGDFSMAVVQANNLLEDQSQVESGPLTTLSSSGPYGTFVGVYDGHGGPETSRFVNDHLFHHLKRFAAEQDSMSVDVIRKAYEATEEGFLGVVAKQWAVKPHIAAVGSCCLIGVVCDGKLYVANVGDSRAVLGKVIKATGEVNALQLSAEHNVSIESVRQEMHSLHPDDSHIVVLKHNVWRVKGIIQVSRSIGDVYLKKSEFNKEPLYTKYRLREPMKRPILSWEPSITVHDLQPDDQFLIFASDGLWEQLSNQEAVEIVQNHPRNGIARRLVKAALQEAAKKREMRYSDLNKIERGVRRHFHDDITVVVLFLDTNLLSRASSLKTPSVSIRGGGITLPKKL

SEQ ID NO: 28612 - protein, 336 aa, Arabidopsis thaliana
  peptide (1)..(336): Ceres Seq. ID no. 12325282
  misc_feature (1)..(279): Pfam Name: Protein phosphatase 2C Pfam Description: Protein phosphatase 2C
  misc_feature (1)..(333): Homolog of NCBI NO: 13357263 NR Description: putative protein phosphatase 2C
  misc_feature (1)..(332): Homolog of NCBI NO: 18855039 NR Description: putative protein phosphatase [Oryza sativa]
  misc_feature (1)..(333): Homolog of NCBI NO: 7485891 NR Description: hypothetical protein F20M13.80 - Arabidopsis
  misc_feature (1)..(333): Homolog of NCBI NO: 17064756 NR Description: putative protein phosphatase-2c [Arabidopsis
  misc_feature (1)..(333): Homolog of NCBI NO: 22329238 NR Description: putative protein phosphatase-2c
  misc_feature (1)..(333): Homolog of NCBI NO: 7768153 NR Description: protein phosphatase 2C (PP2C) [Fagus sylvatica]
  misc_feature (1)..(335): Homolog of NCBI NO: 11282004 NR Description: protein phosphatase 2C homolog [imported] -
  misc_feature (1)..(336): Homolog of NCBI NO: 11282001 NR Description: protein phosphatase 2C-like protein - Arabidopsis
  misc_feature (1)..(336): Homolog of NCBI NO: 20340237 NR Description: protein phosphatase 2c-like protein
  misc_feature (1)..(336): Homolog of NCBI NO: 15239244 NR Description: protein phosphatase 2C-like protein
MAVVQANNLLEDQSQVESGPLTTLSSSGPYGTFVGVYDGHGGPETSRFVNDHLFHHLKRFAAEQDSMSVDVIRKAYEATEEGFLGVVAKQWAVKPHIAAVGSCCLIGVVCDGKLYVANVGDSRAVLGKVIKATGEVNALQLSAEHNVSIESVRQEMHSLHPDDSHIVVLKHNVWRVKGIIQVSRSIGDVYLKKSEFNKEPLYTKYRLREPMKRPILSWEPSITVHDLQPDDQFLIFASDGLWEQLSNQEAVEIVQNHPRNGIARRLVKAALQEAAKKREMRYSDLNKIERGVRRHFHDDITVVVLFLDTNLLSRASSLKTPSVSIRGGGITLPKKL

SEQ ID NO: 28613 - protein, 270 aa, Arabidopsis thaliana
  peptide (1)..(270): Ceres Seq. ID no. 12325283
  misc_feature (1)..(213): Pfam Name: Protein phosphatase 2C Pfam Description: Protein phosphatase 2C
  misc_feature (1)..(267): Homolog of NCBI NO: 13357263 NR Description: putative protein phosphatase 2C
  misc_feature (1)..(266): Homolog of NCBI NO: 18855039 NR Description: putative protein phosphatase [Oryza sativa]
  misc_feature (1)..(267): Homolog of NCBI NO: 7485891 NR Description: hypothetical protein F20M13.80 - Arabidopsis
  misc_feature (1)..(267): Homolog of NCBI NO: 17064756 NR Description: putative protein phosphatase-2c [Arabidopsis
  misc_feature (1)..(267): Homolog of NCBI NO: 22329238 NR Description: putative protein phosphatase-2c
  misc_feature (1)..(267): Homolog of NCBI NO: 7768153 NR Description: protein phosphatase 2C (PP2C) [Fagus sylvatica]
  misc_feature (1)..(269): Homolog of NCBI NO: 11282004 NR Description: protein phosphatase 2C homolog [imported] -
  misc_feature (1)..(270): Homolog of NCBI NO: 11282001 NR Description: protein phosphatase 2C-like protein - Arabidopsis
  misc_feature (1)..(270): Homolog of NCBI NO: 20340237 NR Description: protein phosphatase 2c-like protein
  misc_feature (1)..(270): Homolog of NCBI NO: 15239244 NR Description: protein phosphatase 2C-like protein
MSVDVIRKAYEATEEGFLGVVAKQWAVKPHIAAVGSCCLIGVVCDGKLYVANVGDSRAVLGKVIKATGEVNALQLSAEHNVSIESVRQEMHSLHPDDSHIVVLKHNVWRVKGIIQVSRSIGDVYLKKSEFNKEPLYTKYRLREPMKRPILSWEPSITVHDLQPDDQFLIFASDGLWEQLSNQEAVEIVQNHPRNGIARRLVKAALQEAAKKREMRYSDLNKIERGVRRHFHDDITVVVLFLDTNLLSRASSLKTPSVSIRGGGITLPKKL

SEQ ID NO: 28614 - DNA, 1416 bp, Arabidopsis thaliana
  misc_feature (1)..(1416): Ceres Seq. ID no. 13487514
  misc_feature: MA Experiment ID: 108461 Result: Up-regulated in Transcription
  misc_feature: MA Experiment 108461 PARAMETER Experiment Name: At_Germinating_Seeds_cDNA_P Parameter: Age (day) Value: 1 vs. 0
  misc_feature: MA Experiment 108461 PARAMETER Experiment Name: At_Germinating_Seeds_cDNA_P Parameter: Tissue Value: Germinating Seeds
  misc_feature: MA Experiment ID: 108462 Result: Up-regulated in Transcription
  misc_feature: MA Experiment 108462 PARAMETER Experiment Name: At_Germinating_Seeds_cDNA_P Parameter: Age (day) Value: 2 vs. 0
  misc_feature: MA Experiment 108462 PARAMETER Experiment Name: At_Germinating_Seeds_cDNA_P Parameter: Tissue Value: Germinating Seeds
  misc_feature: MA Experiment ID: 108577 Result: Down-regulated in Transcription
  misc_feature: MA Experiment 108577 PARAMETER Experiment Name: At_42deg_Heat_cDNA_P Parameter: Temperature (deg C) Value: 42 vs. 22
  misc_feature: MA Experiment 108577 PARAMETER Experiment Name: At_42deg_Heat_cDNA_P Parameter: Timepoint (hr) Value: 6
  misc_feature: MA Experiment 108577 PARAMETER Experiment Name: At_42deg_Heat_cDNA_P Parameter: Tissue Value: Aerial
  misc_feature: MA Experiment ID: 108585 Result: Up-regulated in Transcription
  misc_feature: MA Experiment 108585 PARAMETER Experiment Name: At_5mM_NaNP_cDNA_P Parameter: Timepoint (hr) Value: 6
  misc_feature: MA Experiment 108585 PARAMETER Experiment Name: At_5mM_NaNP_cDNA_P Parameter: Tissue Value: Aerial
  misc_feature: MA Experiment 108585 PARAMETER Experiment Name: At_5mM_NaNP_cDNA_P Parameter: Treatment Value: null
  misc_feature: MA Experiment ID: 20000087 Result: Up-regulated in Transcription
  misc_feature: MA Experiment 20000087 PARAMETER Experiment Name: At_100uM_ABA_Mutants_cDNA_P Parameter: Plant Line Value: WS
  misc_feature: MA Experiment 20000087 PARAMETER Experiment Name: At_100uM_ABA_Mutants_cDNA_P Parameter: Timepoint (hr) Value: 6
  misc_feature: MA Experiment 20000087 PARAMETER Experiment Name: At_100uM_ABA_Mutants_cDNA_P Parameter: Tissue Value: Aerial
  misc_feature: MA Experiment 20000087 PARAMETER Experiment Name: At_100uM_ABA_Mutants_cDNA_P Parameter: Treatment Value: 100uM ABA vs. No Treatment
  misc_feature: MA Experiment ID: 20000093 Result: Down-regulated in Transcription
  misc_feature: MA Experiment 20000093 PARAMETER Experiment Name: At_42deg_Heat_cDNA_P Parameter: Temperature (deg C) Value: 42 vs. 22
  misc_feature: MA Experiment 20000093 PARAMETER Experiment Name: At_42deg_Heat_cDNA_P Parameter: Timepoint (hr) Value: 0.5
  misc_feature: MA Experiment 20000093 PARAMETER Experiment Name: At_42deg_Heat_cDNA_P Parameter: Tissue Value: Aerial
  misc_feature: MA Experiment ID: 20000111 Result: Down-regulated in Transcription
  misc_feature: MA Experiment 20000111 PARAMETER Experiment Name: At_42deg_Heat_cDNA_P Parameter: Temperature (deg C) Value: 42 vs. 22
  misc_feature: MA Experiment 20000111 PARAMETER Experiment Name: At_42deg_Heat_cDNA_P Parameter: Timepoint (hr) Value: 6
  misc_feature: MA Experiment 20000111 PARAMETER Experiment Name: At_42deg_Heat_cDNA_P Parameter: Tissue Value: Aerial
  misc_feature: MA Experiment ID: 20000112 Result: Down-regulated in Transcription
  misc_feature: MA Experiment 20000112 PARAMETER Experiment Name: At_42deg_Heat_cDNA_P Parameter: Temperature (deg C) Value: 42 vs. 22
  misc_feature: MA Experiment 20000112 PARAMETER Experiment Name: At_42deg_Heat_cDNA_P Parameter: Timepoint (hr) Value: 2
  misc_feature: MA Experiment 20000112 PARAMETER Experiment Name: At_42deg_Heat_cDNA_P Parameter: Tissue Value: Aerial
  misc_feature: MA Experiment ID: 20000113 Result: Down-regulated in Transcription
  misc_feature: MA Experiment 20000113 PARAMETER Experiment Name: At_42deg_Heat_cDNA_P Parameter: Temperature (deg C) Value: 42 vs. 22
  misc_feature: MA Experiment 20000113 PARAMETER Experiment Name: At_42deg_Heat_cDNA_P Parameter: Timepoint (hr) Value: 8
  misc_feature: MA Experiment 20000113 PARAMETER Experiment Name: At_42deg_Heat_cDNA_P Parameter: Tissue Value: Aerial
  misc_feature: MA Experiment ID: 20000144 Result: Down-regulated in Transcription
  misc_feature: MA Experiment 20000144 PARAMETER Experiment Name: At_42deg_Heat_cDNA_P Parameter: Temperature (deg C) Value: 42 vs. 22
  misc_feature: MA Experiment 20000144 PARAMETER Experiment Name: At_42deg_Heat_cDNA_P Parameter: Timepoint (hr) Value: 1
  misc_feature: MA Experiment 20000144 PARAMETER Experiment Name: At_42deg_Heat_cDNA_P Parameter: Tissue Value: Aerial
  misc_feature: MA Experiment ID: 20000171 Result: Down-regulated in Transcription
  misc_feature: MA Experiment 20000171 PARAMETER Experiment Name: At_42deg_Heat_P Parameter: Age (day) Value: 14
  misc_feature: MA Experiment 20000171 PARAMETER Experiment Name: At_42deg_Heat_P Parameter: Organism Value: A. thaliana
  misc_feature: MA Experiment 20000171 PARAMETER Experiment Name: At_42deg_Heat_P Parameter: Plant Line Value: WS
  misc_feature: MA Experiment 20000171 PARAMETER Experiment Name: At_42deg_Heat_P Parameter: Temperature (deg C) Value: 42 vs. 22
  misc_feature: MA Experiment 20000171 PARAMETER Experiment Name: At_42deg_Heat_P Parameter: Timepoint (hr) Value: 1
  misc_feature: MA Experiment 20000171 PARAMETER Experiment Name: At_42deg_Heat_P Parameter: Tissue Value: Aerial
  misc_feature: MA Experiment ID: 20000173 Result: Down-regulated in Transcription
  misc_feature: MA Experiment 20000173 PARAMETER Experiment Name: At_42deg_Heat_P Parameter: Age (day) Value: 14
  misc_feature: MA Experiment 20000173 PARAMETER Experiment Name: At_42deg_Heat_P Parameter: Organism Value: A. thaliana
  misc_feature: MA Experiment 20000173 PARAMETER Experiment Name: At_42deg_Heat_P Parameter: Plant Line Value: WS
  misc_feature: MA Experiment 20000173 PARAMETER Experiment Name: At_42deg_Heat_P Parameter: Temperature (deg C) Value: 42 vs. 22
  misc_feature: MA Experiment 20000173 PARAMETER Experiment Name: At_42deg_Heat_P Parameter: Timepoint (hr) Value: 6
  misc_feature: MA Experiment 20000173 PARAMETER Experiment Name: At_42deg_Heat_P Parameter: Tissue Value: Aerial
  misc_feature: MA Experiment ID: 20000179 Result: Up-regulated in Transcription
  misc_feature: MA Experiment 20000179 PARAMETER Experiment Name: At_Germinating_Seeds_P Parameter: Age (hr) Value: 6 vs. 0
  misc_feature: MA Experiment 20000179 PARAMETER Experiment Name: At_Germinating_Seeds_P Parameter: Tissue Value: Germinating Seeds
  misc_feature: MA Experiment ID: 20000180 Result: Up-regulated in Transcription
  misc_feature: MA Experiment 20000180 PARAMETER Experiment Name: At_Germinating_Seeds_P Parameter: Age (hr) Value: 24 vs. 0
  misc_feature: MA Experiment 20000180 PARAMETER Experiment Name: At_Germinating_Seeds_P Parameter: Tissue Value: Germinating Seeds
  misc_feature: MA Experiment ID: 20001557 Result: Up-regulated in Transcription
  misc_feature: MA Experiment 20001557 PARAMETER Experiment Name: At_Drought_Soil_Dry_P Parameter: Age (day) Value: 27
  misc_feature: MA Experiment 20001557 PARAMETER Experiment Name: At_Drought_Soil_Dry_P Parameter: Organism Value: A. thaliana
  misc_feature: MA Experiment 20001557 PARAMETER Experiment Name: At_Drought_Soil_Dry_P Parameter: Plant Line Value: WS
  misc_feature: MA Experiment 20001557 PARAMETER Experiment Name: At_Drought_Soil_Dry_P Parameter: Post Timepoint (hr) Value: 3
  misc_feature: MA Experiment 20001557 PARAMETER Experiment Name: At_Drought_Soil_Dry_P Parameter: Post-Treatment Value: Re-Water vs. No Drought
  misc_feature: MA Experiment 20001557 PARAMETER Experiment Name: At_Drought_Soil_Dry_P Parameter: Timepoint (day) Value: 13
  misc_feature: MA Experiment 20001557 PARAMETER Experiment Name: At_Drought_Soil_Dry_P Parameter: Treatment Value: Drought vs. No Drought
aattcaacacggattttcaacacagagctgacgttagcatttgtctctgaaatcccagatccgaaaacccaacaatggcgtcagagaacaacggatccagatccgattccgaatccatcaccgctcccaaagctgattccaccgtcgttgaaccgaggaagatagctctgatcaccggaatcaccggccaggacggatcatacctgacggagttccttctcggaaaaggctacgaatttcatggtctgatccgtcgatcatcgaatttcaacacccagcgaatcaaccatatctacatcgatccacacaatgtcaacaaagctctgatgaaactccactacgccgatctcaccgacgcttcctctctccgtcgttggatcgatgtgatcaagcctgacgaagtttataacctagctgctcaatctcacgtcgctgtctccttcgagatccctgattacacagccgatgtagtcgcaaccggtgctctccgtctccttgaagccgtcagatctcacaccatcgacagtggccgtaccgtcaagtattaccaagccggatcttcggagatgtttggatcaactcctcctccacaatcggagacgacgccgtttcaccccagatctccttacgcagcttccaaatgcgctgctcattggtacacagtgaattacagagaggcgtacggtctcttcgcttgtaacggaatcttgttcaatcacgagtcacctcgccgtggtgagaatttcgtgacgaggaagatcacaagagcattgggaaggatcaaggttggtttgcagacgaagctattccttgggaatttgcaagcgtcaagagattggggatttgcaggagattatgtggaagcaatgtggttgatgttgcagcaagagaagccagatgattacgttgtggcaacagaggaaggacacacagtggaagagtttcttgatgtgtcatttgggtatttgggactcaattggaaagattatgttgagattgaccagaggtactttaggcctgctgaagtagataaccttcaaggagatgcaagcaaggcaaaggaagtgttggggtggaaaccacaagtagggtttgagaagcttgtgaagatgatggttgatgaagatcttgagcttgctaagagggagaaagtgcttgttgatgctggatacatggatgctaagcagcaaccttgatttgatcaattatacaaagatggagtttcttacatttatctgcttttatagagttttaaatttcgtttttttttctttctctttttgttgctttggtggttgtttgttgtctttttatgttttagtttctttgttgctttttaagttatctaaattgtttccctccaatgagttgaggatgaaagcgcagtgaattttgaatgaaggagcaaaaagaatc

SEQ ID NO: 28615 - protein, 373 aa, Arabidopsis thaliana
  peptide (1)..(373): Ceres Seq. ID no. 13487515
  misc_feature (31)..(355): Pfam Name: NAD dependent epimerase/dehydratase family Pfam Description: NAD dependent epimerase/dehydratase family
  misc_feature (31)..(355): Pfam Name: NAD dependent epimerase/dehydratase family Pfam Description: NAD dependent epimerase/dehydratase family
  misc_feature (28)..(353): Homolog of NCBI NO: 23128163 NR Description: hypothetical protein [Nostoc punctiforme]
  misc_feature (29)..(352): Homolog of NCBI NO: 16329177 NR Description: GDP-D-mannose dehydratase [Synechocystis sp. PCC
  misc_feature (29)..(353): Homolog of NCBI NO: 4097914 NR Description: putative GDP-D-mannose dehydratase [Anabaena sp.
  misc_feature (28)..(352): Homolog of NCBI NO: 22298176 NR Description: GDP-mannose 4,6-dehydratase [Thermosynechococcus
  misc_feature (7)..(373): Homolog of NCBI NO: 7939611 NR Description: root cap-specific protein [Zea mays]
  misc_feature (28)..(353): Homolog of NCBI NO: 23128163 NR Description: hypothetical protein [Nostoc punctiforme]
  misc_feature (29)..(353): Homolog of NCBI NO: 4097914 NR Description: putative GDP-D-mannose dehydratase [Anabaena sp.
  misc_feature (7)..(373): Homolog of NCBI NO: 7939611 NR Description: root cap-specific protein [Zea mays]
  misc_feature (1)..(373): Homolog of NCBI NO: 21536808 NR Description: GDP-D-mannose-4,6-dehydratase MUR1 [Arabidopsis
  misc_feature (1)..(373): Homolog of NCBI NO: 1764100 NR Description: GDP-D-mannose-4,6-dehydratase [Arabidopsis
  misc_feature (1)..(373): Homolog of NCBI NO: 28373938 NR Description: Chain A, Crystal Structure Of The Gdp-Mannose
  misc_feature (1)..(373): Homolog of NCBI NO: 15230418 NR Description: GDP-D-mannose-4,6-dehydratase (MUR1) [Arabidopsis
  misc_feature (21)..(373): Homolog of NCBI NO: 15239334 NR Description: GDP-D-mannose 4,6-dehydratase, putative
  misc_feature (28)..(352): Homolog of NCBI NO: 22298176 NR Description: GDP-mannose 4,6-dehydratase [Thermosynechococcus
  misc_feature (29)..(352): Homolog of NCBI NO: 16329177 NR Description: GDP-D-mannose dehydratase [Synechocystis sp. PCC
  misc_feature (21)..(373): Homolog of NCBI NO: 15239334 NR Description: GDP-D-mannose 4,6-dehydratase, putative
  misc_feature (1)..(373): Homolog of NCBI NO: 15230418 NR Description: GDP-D-mannose-4,6-dehydratase (MUR1) [Arabidopsis
  misc_feature (1)..(373): Homolog of NCBI NO: 28373938 NR Description: Chain A, Crystal Structure Of The Gdp-Mannose
  misc_feature (1)..(373): Homolog of NCBI NO: 1764100 NR Description: GDP-D-mannose-4,6-dehydratase [Arabidopsis
  misc_feature (1)..(373): Homolog of NCBI NO: 21536808 NR Description: GDP-D-mannose-4,6-dehydratase MUR1 [Arabidopsis
MASENNGSRSDSESITAPKADSTVVEPRKIALITGITGQDGSYLTEFLLGKGYEFHGLIRRSSNFNTQRINHIYIDPHNVNKALMKLHYADLTDASSLRRWIDVIKPDEVYNLAAQSHVAVSFEIPDYTADVVATGALRLLEAVRSHTIDSGRTVKYYQAGSSEMFGSTPPPQSETTPFHPRSPYAASKCAAHWYTVNYREAYGLFACNGILFNHESPRRGENFVTRKITRALGRIKVGLQTKLFLGNLQASRDWGFAGDYVEAMWLMLQQEKPDDYVVATEEGHTVEEFLDVSFGYLGLNWKDYVEIDQRYFRPAEVDNLQGDASKAKEVLGWKPQVGFEKLVKMMVDEDLELAKREKVLVDAGYMDAKQQP

SEQ ID NO: 28616 - protein, 289 aa, Arabidopsis thaliana
  peptide (1)..(289): Ceres Seq. ID no. 13487516
  misc_feature (1)..(271): Pfam Name: NAD dependent epimerase/dehydratase family Pfam Description: NAD dependent epimerase/dehydratase family
  misc_feature (1)..(271): Pfam Name: NAD dependent epimerase/dehydratase family Pfam Description: NAD dependent epimerase/dehydratase family
  misc_feature (1)..(269): Homolog of NCBI NO: 23128163 NR Description: hypothetical protein [Nostoc punctiforme]
  misc_feature (1)..(268): Homolog of NCBI NO: 16329177 NR Description: GDP-D-mannose dehydratase [Synechocystis sp. PCC
  misc_feature (1)..(269): Homolog of NCBI NO: 4097914 NR Description: putative GDP-D-mannose dehydratase [Anabaena sp.
  misc_feature (1)..(268): Homolog of NCBI NO: 22298176 NR Description: GDP-mannose 4,6-dehydratase [Thermosynechococcus
  misc_feature (1)..(289): Homolog of NCBI NO: 7939611 NR Description: root cap-specific protein [Zea mays]
  misc_feature (1)..(269): Homolog of NCBI NO: 23128163 NR Description: hypothetical protein [Nostoc punctiforme]
  misc_feature (1)..(269): Homolog of NCBI NO: 4097914 NR Description: putative GDP-D-mannose dehydratase [Anabaena sp.
  misc_feature (1)..(289): Homolog of NCBI NO: 7939611 NR Description: root cap-specific protein [Zea mays]
  misc_feature (1)..(289): Homolog of NCBI NO: 21536808 NR Description: GDP-D-mannose-4,6-dehydratase MUR1 [Arabidopsis
  misc_feature (1)..(289): Homolog of NCBI NO: 1764100 NR Description: GDP-D-mannose-4,6-dehydratase [Arabidopsis
  misc_feature (1)..(289): Homolog of NCBI NO: 28373938 NR Description: Chain A, Crystal Structure Of The Gdp-Mannose
  misc_feature (1)..(289): Homolog of NCBI NO: 15230418 NR Description: GDP-D-mannose-4,6-dehydratase (MUR1) [Arabidopsis
  misc_feature (1)..(289): Homolog of NCBI NO: 15239334 NR Description: GDP-D-mannose 4,6-dehydratase, putative
  misc_feature (1)..(268): Homolog of NCBI NO: 22298176 NR Description: GDP-mannose 4,6-dehydratase [Thermosynechococcus
  misc_feature (1)..(268): Homolog of NCBI NO: 16329177 NR Description: GDP-D-mannose dehydratase [Synechocystis sp. PCC
  misc_feature (1)..(289): Homolog of NCBI NO: 15239334 NR Description: GDP-D-mannose 4,6-dehydratase, putative
  misc_feature (1)..(289): Homolog of NCBI NO: 15230418 NR Description: GDP-D-mannose-4,6-dehydratase (MUR1) [Arabidopsis
  misc_feature (1)..(289): Homolog of NCBI NO: 28373938 NR Description: Chain A, Crystal Structure Of The Gdp-Mannose
  misc_feature (1)..(289): Homolog of NCBI NO: 1764100 NR Description: GDP-D-mannose-4,6-dehydratase [Arabidopsis
  misc_feature (1)..(289): Homolog of NCBI NO: 21536808 NR Description: GDP-D-mannose-4,6-dehydratase MUR1 [Arabidopsis
MKLHYADLTDASSLRRWIDVIKPDEVYNLAAQSHVAVSFEIPDYTADVVATGALRLLEAVRSHTIDSGRTVKYYQAGSSEMFGSTPPPQSETTPFHPRSPYAASKCAAHWYTVNYREAYGLFACNGILFNHESPRRGENFVTRKITRALGRIKVGLQTKLFLGNLQASRDWGFAGDYVEAMWLMLQQEKPDDYVVATEEGHTVEEFLDVSFGYLGLNWKDYVEIDQRYFRPAEVDNLQGDASKAKEVLGWKPQVGFEKLVKMMVDEDLELAKREKVLVDAGYMDAKQQP

SEQ ID NO: 28617 - protein, 209 aa, Arabidopsis thaliana
  peptide (1)..(209): Ceres Seq. ID no. 13487517
  misc_feature (1)..(191): Pfam Name: NAD dependent epimerase/dehydratase family Pfam Description: NAD dependent epimerase/dehydratase family
  misc_feature (1)..(191): Pfam Name: NAD dependent epimerase/dehydratase family Pfam Description: NAD dependent epimerase/dehydratase family
  misc_feature (1)..(189): Homolog of NCBI NO: 23128163 NR Description: hypothetical protein [Nostoc punctiforme]
  misc_feature (1)..(188): Homolog of NCBI NO: 16329177 NR Description: GDP-D-mannose dehydratase [Synechocystis sp. PCC
  misc_feature (1)..(189): Homolog of NCBI NO: 4097914 NR Description: putative GDP-D-mannose dehydratase [Anabaena sp.
  misc_feature (1)..(188): Homolog of NCBI NO: 22298176 NR Description: GDP-mannose 4,6-dehydratase [Thermosynechococcus
  misc_feature (1)..(209): Homolog of NCBI NO: 7939611 NR Description: root cap-specific protein [Zea mays]
  misc_feature (1)..(189): Homolog of NCBI NO: 23128163 NR Description: hypothetical protein [Nostoc punctiforme]
  misc_feature (1)..(189): Homolog of NCBI NO: 4097914 NR Description: putative GDP-D-mannose dehydratase [Anabaena sp.
  misc_feature (1)..(209): Homolog of NCBI NO: 7939611 NR Description: root cap-specific protein [Zea mays]
  misc_feature (1)..(209): Homolog of NCBI NO: 21536808 NR Description: GDP-D-mannose-4,6-dehydratase MUR1 [Arabidopsis
  misc_feature (1)..(209): Homolog of NCBI NO: 1764100 NR Description: GDP-D-mannose-4,6-dehydratase [Arabidopsis
  misc_feature (1)..(209): Homolog of NCBI NO: 28373938 NR Description: Chain A, Crystal Structure Of The Gdp-Mannose
  misc_feature (1)..(209): Homolog of NCBI NO: 15230418 NR Description: GDP-D-mannose-4,6-dehydratase (MUR1) [Arabidopsis
  misc_feature (1)..(209): Homolog of NCBI NO: 15239334 NR Description: GDP-D-mannose 4,6-dehydratase, putative
  misc_feature (1)..(188): Homolog of NCBI NO: 22298176 NR Description: GDP-mannose 4,6-dehydratase [Thermosynechococcus
  misc_feature (1)..(188): Homolog of NCBI NO: 16329177 NR Description: GDP-D-mannose dehydratase [Synechocystis sp. PCC
  misc_feature (1)..(209): Homolog of NCBI NO: 15239334 NR Description: GDP-D-mannose 4,6-dehydratase, putative
  misc_feature (1)..(209): Homolog of NCBI NO: 15230418 NR Description: GDP-D-mannose-4,6-dehydratase (MUR1) [Arabidopsis
  misc_feature (1)..(209): Homolog of NCBI NO: 28373938 NR Description: Chain A, Crystal Structure Of The Gdp-Mannose
  misc_feature (1)..(209): Homolog of NCBI NO: 1764100 NR Description: GDP-D-mannose-4,6-dehydratase [Arabidopsis
  misc_feature (1)..(209): Homolog of NCBI NO: 21536808 NR Description: GDP-D-mannose-4,6-dehydratase MUR1 [Arabidopsis
MFGSTPPPQSETTPFHPRSPYAASKCAAHWYTVNYREAYGLFACNGILFNHESPRRGENFVTRKITRALGRIKVGLQTKLFLGNLQASRDWGFAGDYVEAMWLMLQQEKPDDYVVATEEGHTVEEFLDVSFGYLGLNWKDYVEIDQRYFRPAEVDNLQGDASKAKEVLGWKPQVGFEKLVKMMVDEDLELAKREKVLVDAGYMDAKQQP

SEQ ID NO: 28618 - DNA, 1257 bp, Arabidopsis thaliana
  misc_feature (1)..(1257): Ceres Seq. ID no. 12334073
  misc_feature: MA Experiment ID: 20000169 Result: Up-regulated in Transcription
  misc_feature: MA Experiment 20000169 PARAMETER Experiment Name: At_100uM_ABA_P Parameter: Age (day) Value: 14
  misc_feature: MA Experiment 20000169 PARAMETER Experiment Name: At_100uM_ABA_P Parameter: Organism Value: A. thaliana
  misc_feature: MA Experiment 20000169 PARAMETER Experiment Name: At_100uM_ABA_P Parameter: Plant Line Value: WS
  misc_feature: MA Experiment 20000169 PARAMETER Experiment Name: At_100uM_ABA_P Parameter: Timepoint (hr) Value: 6
  misc_feature: MA Experiment 20000169 PARAMETER Experiment Name: At_100uM_ABA_P Parameter: Tissue Value: Aerial
  misc_feature: MA Experiment 20000169 PARAMETER Experiment Name: At_100uM_ABA_P Parameter: Treatment Value: 100uM ABA vs. No Treatment
  misc_feature: MA Experiment ID: 20000171 Result: Up-regulated in Transcription
  misc_feature: MA Experiment 20000171 PARAMETER Experiment Name: At_42deg_Heat_P Parameter: Age (day) Value: 14
  misc_feature: MA Experiment 20000171 PARAMETER Experiment Name: At_42deg_Heat_P Parameter: Organism Value: A. thaliana
  misc_feature: MA Experiment 20000171 PARAMETER Experiment Name: At_42deg_Heat_P Parameter: Plant Line Value: WS
  misc_feature: MA Experiment 20000171 PARAMETER Experiment Name: At_42deg_Heat_P Parameter: Temperature (deg C) Value: 42 vs. 22
  misc_feature: MA Experiment 20000171 PARAMETER Experiment Name: At_42deg_Heat_P Parameter: Timepoint (hr) Value: 1
  misc_feature: MA Experiment 20000171 PARAMETER Experiment Name: At_42deg_Heat_P Parameter: Tissue Value: Aerial
  misc_feature: MA Experiment ID: 20000173 Result: Up-regulated in Transcription
  misc_feature: MA Experiment 20000173 PARAMETER Experiment Name: At_42deg_Heat_P Parameter: Age (day) Value: 14
  misc_feature: MA Experiment 20000173 PARAMETER Experiment Name: At_42deg_Heat_P Parameter: Organism Value: A. thaliana
  misc_feature: MA Experiment 20000173 PARAMETER Experiment Name: At_42deg_Heat_P Parameter: Plant Line Value: WS
  misc_feature: MA Experiment 20000173 PARAMETER Experiment Name: At_42deg_Heat_P Parameter: Temperature (deg C) Value: 42 vs. 22
  misc_feature: MA Experiment 20000173 PARAMETER Experiment Name: At_42deg_Heat_P Parameter: Timepoint (hr) Value: 6
  misc_feature: MA Experiment 20000173 PARAMETER Experiment Name: At_42deg_Heat_P Parameter: Tissue Value: Aerial
  misc_feature: MA Experiment ID: 20000182 Result: Up-regulated in Transcription
  misc_feature: MA Experiment 20000182 PARAMETER Experiment Name: At_2mM_SA_P Parameter: Age (day) Value: 14
  misc_feature: MA Experiment 20000182 PARAMETER Experiment Name: At_2mM_SA_P Parameter: Organism Value: A. thaliana
  misc_feature: MA Experiment 20000182 PARAMETER Experiment Name: At_2mM_SA_P Parameter: Plant Line Value: WS
  misc_feature: MA Experiment 20000182 PARAMETER Experiment Name: At_2mM_SA_P Parameter: Timepoint (hr) Value: 6
  misc_feature: MA Experiment 20000182 PARAMETER Experiment Name: At_2mM_SA_P Parameter: Tissue Value: Aerial
  misc_feature: MA Experiment 20000182 PARAMETER Experiment Name: At_2mM_SA_P Parameter: Treatment Value: 2mM SA vs. No Treatment
  misc_feature: MA Experiment ID: 20000185 Result: Up-regulated in Transcription
  misc_feature: MA Experiment 20000185 PARAMETER Experiment Name: At_Roots__P Parameter: Age (day) Value: 7 vs. 21
  misc_feature: MA Experiment 20000185 PARAMETER Experiment Name: At_Roots__P Parameter: Organism Value: A. thaliana
  misc_feature: MA Experiment 20000185 PARAMETER Experiment Name: At_Roots__P Parameter: Tissue Value: Roots vs. Whole Plant
  misc_feature: MA Experiment ID: 20000265 Result: Down-regulated in Transcription
  misc_feature: MA Experiment 20000265 PARAMETER Experiment Name: At_Open_Flower_P Parameter: Age (day) Value: 21
  misc_feature: MA Experiment 20000265 PARAMETER Experiment Name: At_Open_Flower_P Parameter: Plant Line Value: WS
  misc_feature: MA Experiment 20000265 PARAMETER Experiment Name: At_Open_Flower_P Parameter: Tissue Value: Closed Flower vs. Whole Plant
  misc_feature: MA Experiment ID: 20000267 Result: Up-regulated in Transcription
  misc_feature: MA Experiment 20000267 PARAMETER Experiment Name: At_Drought_P Parameter: Age (day) Value: 7
  misc_feature: MA Experiment 20000267 PARAMETER Experiment Name: At_Drought_P Parameter: Organism Value: A. thaliana
  misc_feature: MA Experiment 20000267 PARAMETER Experiment Name: At_Drought_P Parameter: Plant Line Value: WS
  misc_feature: MA Experiment 20000267 PARAMETER Experiment Name: At_Drought_P Parameter: Timepoint (hr) Value: 6
  misc_feature: MA Experiment 20000267 PARAMETER Experiment Name: At_Drought_P Parameter: Tissue Value: Whole Plant
  misc_feature: MA Experiment 20000267 PARAMETER Experiment Name: At_Drought_P Parameter: Treatment Value: Drought vs. No Drought
  misc_feature: MA Experiment ID: 20000268 Result: Up-regulated in Transcription
  misc_feature: MA Experiment 20000268 PARAMETER Experiment Name: At_100mM_NaCl__P Parameter: Age (day) Value: 14
  misc_feature: MA Experiment 20000268 PARAMETER Experiment Name: At_100mM_NaCl__P Parameter: Organism Value: A. thaliana
  misc_feature: MA Experiment 20000268 PARAMETER Experiment Name: At_100mM_NaCl__P Parameter: Plant Line Value: WS
  misc_feature: MA Experiment 20000268 PARAMETER Experiment Name: At_100mM_NaCl__P Parameter: Timepoint (hr) Value: 6
  misc_feature: MA Experiment 20000268 PARAMETER Experiment Name: At_100mM_NaCl__P Parameter: Tissue Value: Whole Plant
  misc_feature: MA Experiment 20000268 PARAMETER Experiment Name: At_100mM_NaCl__P Parameter: Treatment Value: 100mM NaCl vs. No Treatment
  misc_feature: MA Experiment ID: 20000436 Result: Up-regulated in Transcription
  misc_feature: MA Experiment 20000436 PARAMETER Experiment Name: At_Drought_P Parameter: Age (day) Value: 7
  misc_feature: MA Experiment 20000436 PARAMETER Experiment Name: At_Drought_P Parameter: Organism Value: A. thaliana
  misc_feature: MA Experiment 20000436 PARAMETER Experiment Name: At_Drought_P Parameter: Plant Line Value: WS
  misc_feature: MA Experiment 20000436 PARAMETER Experiment Name: At_Drought_P Parameter: Timepoint (hr) Value: 12
  misc_feature: MA Experiment 20000436 PARAMETER Experiment Name: At_Drought_P Parameter: Tissue Value: Whole Plant
  misc_feature: MA Experiment 20000436 PARAMETER Experiment Name: At_Drought_P Parameter: Treatment Value: Drought vs. No Drought
  misc_feature: MA Experiment ID: 20000437 Result: Up-regulated in Transcription
  misc_feature: MA Experiment 20000437 PARAMETER Experiment Name: At_Drought_P Parameter: Age (day) Value: 8
  misc_feature: MA Experiment 20000437 PARAMETER Experiment Name: At_Drought_P Parameter: Organism Value: A. thaliana
  misc_feature: MA Experiment 20000437 PARAMETER Experiment Name: At_Drought_P Parameter: Plant Line Value: WS
  misc_feature: MA Experiment 20000437 PARAMETER Experiment Name: At_Drought_P Parameter: Timepoint (hr) Value: 24
  misc_feature: MA Experiment 20000437 PARAMETER Experiment Name: At_Drought_P Parameter: Tissue Value: Whole Plant
  misc_feature: MA Experiment 20000437 PARAMETER Experiment Name: At_Drought_P Parameter: Treatment Value: Drought vs. No Drought
  misc_feature: MA Experiment ID: 20000439 Result: Up-regulated in Transcription
  misc_feature: MA Experiment 20000439 PARAMETER Experiment Name: At_Roots__P Parameter: Age (day) Value: 14 vs. 21
  misc_feature: MA Experiment 20000439 PARAMETER Experiment Name: At_Roots__P Parameter: Organism Value: A. thaliana
  misc_feature: MA Experiment 20000439 PARAMETER Experiment Name: At_Roots__P Parameter: Tissue Value: Roots vs. Whole Plant
  misc_feature: MA Experiment ID: 20000453 Result: Up-regulated in Transcription
  misc_feature: MA Experiment 20000453 PARAMETER Experiment Name: At_100uM_ABA_P Parameter: Age (day) Value: 15
  misc_feature: MA Experiment 20000453 PARAMETER Experiment Name: At_100uM_ABA_P Parameter: Organism Value: A. thaliana
  misc_feature: MA Experiment 20000453 PARAMETER Experiment Name: At_100uM_ABA_P Parameter: Plant Line Value: WS
  misc_feature: MA Experiment 20000453 PARAMETER Experiment Name: At_100uM_ABA_P Parameter: Timepoint (hr) Value: 24
  misc_feature: MA Experiment 20000453 PARAMETER Experiment Name: At_100uM_ABA_P Parameter: Tissue Value: Aerial
  misc_feature: MA Experiment 20000453 PARAMETER Experiment Name: At_100uM_ABA_P Parameter: Treatment Value: 100uM ABA vs. No Treatment
  misc_feature: MA Experiment ID: 20001248 Result: Down-regulated in Transcription
  misc_feature: MA Experiment 20001248 PARAMETER Experiment Name: At_Far-red-induction_P Parameter: Age (day) Value: 7
  misc_feature: MA Experiment 20001248 PARAMETER Experiment Name: At_Far-red-induction_P Parameter: Light Value: Far-red vs. White
  misc_feature: MA Experiment 20001248 PARAMETER Experiment Name: At_Far-red-induction_P Parameter: Organism Value: A. thaliana
  misc_feature: MA Experiment 20001248 PARAMETER Experiment Name: At_Far-red-induction_P Parameter: Plant Line Value: Columbia
  misc_feature: MA Experiment 20001248 PARAMETER Experiment Name: At_Far-red-induction_P Parameter: Timepoint (hr) Value: 4
  misc_feature: MA Experiment 20001248 PARAMETER Experiment Name: At_Far-red-induction_P Parameter: Tissue Value: Whole Plant
  misc_feature: MA Experiment ID: 20001905 Result: Up-regulated in Transcription
  misc_feature: MA Experiment 20001905 PARAMETER Experiment Name: At_Drought_Reproduction_P Parameter: Age (day) Value: 40
  misc_feature: MA Experiment 20001905 PARAMETER Experiment Name: At_Drought_Reproduction_P Parameter: Organism Value: A. thaliana
  misc_feature: MA Experiment 20001905 PARAMETER Experiment Name: At_Drought_Reproduction_P Parameter: Plant Line Value: WS
  misc_feature: MA Experiment 20001905 PARAMETER Experiment Name: At_Drought_Reproduction_P Parameter: Timepoint (day) Value: 10
  misc_feature: MA Experiment 20001905 PARAMETER Experiment Name: At_Drought_Reproduction_P Parameter: Tissue Value: Rosettes
  misc_feature: MA Experiment 20001905 PARAMETER Experiment Name: At_Drought_Reproduction_P Parameter: Treatment Value: Drought vs. No Drought
  misc_feature: MA Experiment ID: 20001906 Result: Up-regulated in Transcription
  misc_feature: MA Experiment 20001906 PARAMETER Experiment Name: At_Drought_Reproduction_P Parameter: Age (day) Value: 35
  misc_feature: MA Experiment 20001906 PARAMETER Experiment Name: At_Drought_Reproduction_P Parameter: Organism Value: A. thaliana
  misc_feature: MA Experiment 20001906 PARAMETER Experiment Name: At_Drought_Reproduction_P Parameter: Plant Line Value: WS
  misc_feature: MA Experiment 20001906 PARAMETER Experiment Name: At_Drought_Reproduction_P Parameter: Timepoint (day) Value: 5
  misc_feature: MA Experiment 20001906 PARAMETER Experiment Name: At_Drought_Reproduction_P Parameter: Tissue Value: Siliques
  misc_feature: MA Experiment 20001906 PARAMETER Experiment Name: At_Drought_Reproduction_P Parameter: Treatment Value: Drought vs. No Drought
  misc_feature: MA Experiment ID: 20001908 Result: Up-regulated in Transcription
  misc_feature: MA Experiment 20001908 PARAMETER Experiment Name: At_Drought_Reproduction_P Parameter: Age (day) Value: 40
  misc_feature: MA Experiment 20001908 PARAMETER Experiment Name: At_Drought_Reproduction_P Parameter: Organism Value: A. thaliana
  misc_feature: MA Experiment 20001908 PARAMETER Experiment Name: At_Drought_Reproduction_P Parameter: Plant Line Value: WS
  misc_feature: MA Experiment 20001908 PARAMETER Experiment Name: At_Drought_Reproduction_P Parameter: Timepoint (day) Value: 10
  misc_feature: MA Experiment 20001908 PARAMETER Experiment Name: At_Drought_Reproduction_P Parameter: Tissue Value: Siliques
  misc_feature: MA Experiment 20001908 PARAMETER Experiment Name: At_Drought_Reproduction_P Parameter: Treatment Value: Drought vs. No Drought
  misc_feature: MA Experiment ID: 20001911 Result: Up-regulated in Transcription
  misc_feature: MA Experiment 20001911 PARAMETER Experiment Name: At_Drought_Reproduction_P Parameter: Age (day) Value: 40
  misc_feature: MA Experiment 20001911 PARAMETER Experiment Name: At_Drought_Reproduction_P Parameter: Organism Value: A. thaliana
  misc_feature: MA Experiment 20001911 PARAMETER Experiment Name: At_Drought_Reproduction_P Parameter: Plant Line Value: WS
  misc_feature: MA Experiment 20001911 PARAMETER Experiment Name: At_Drought_Reproduction_P Parameter: Timepoint (day) Value: 10
  misc_feature: MA Experiment 20001911 PARAMETER Experiment Name: At_Drought_Reproduction_P Parameter: Tissue Value: Flowers
  misc_feature: MA Experiment 20001911 PARAMETER Experiment Name: At_Drought_Reproduction_P Parameter: Treatment Value: Drought vs. No Drought
aaggaagaagaaaaatcgagaaccatcttctcagccgattttagtaaccatcttcttgtttgctccgaacaatcaagagatcgaaaatggctgatgttcacaaaggaaaggtttgtgtaaccggtgccggagggtttttgggttcgtgggtcgtcgatcttcttctctctaaggattacttcgtccatggcactgtcagagaccctgataatgaaaagtatgctcatttgaagaagctcgagaaagctggtgacaaactcaagctcttcaaggctgatttgttggactacggctctcttcaatctgctattgcaggttgcagcggagtcttccatgtcgcttgcccggttccaccagcttcagtccctaatcctgaggtagaattgatcgcacctgctgtggatggcacgctgaatgtgcttaaggcatgcattgaagcgaatgttaagcgtgttgtgtatgtttcctctgtagctgcggctttcatgaaccctatgtggtcaaagaatcaagtattagatgaggcatgttggtctgaccaggaatactgcaagaaaactgagaattggtattgtctggcaaagacacgagcagagagtgaagcttttgaatttgcaaaacgaaccggacttcatctcgtcagtgtttgccctacccttgttttgggacctatactgcagcagaacacagtaaatgctagtagcctggttcttcttaagcttcttaaagagggttttgaaacacgtgataaccaagaacgtcatttggtagatgtgcgtgatgtagctcaagctttactcttggtttatgagaaagcagaagctgaaggaagatacatatgtacatcccacacggttaaagaagagattgtggttgagaagctgaagagtttttatccacattacaactacccaaagaaatacattgatgcggaagatagagtgaaggtgagttcagagaaattgcagaagttgggttggacttaccggccgttggaggaaacacttgtggattctgttgagagctaccggaaagctaagcttgtggactgaaaacttggaaagaagagcaaaatagtgttttagcttcatatgttatagttatagtgttccattctgcacacacacacacactctctcatcgtttactcaataataagagttgtgcattcaccatggatttctgagtttttgttattttctttttagatatcattacttttattaccaatctacaattttctttccataatatttt

SEQ ID NO: 28619 - protein, 321 aa, Arabidopsis thaliana
  peptide (1)..(321): Ceres Seq. ID no. 12334074
  misc_feature (8)..(251): Pfam Name: 3-beta hydroxysteroid dehydrogenase/isomerase family Pfam Description: 3-beta hydroxysteroid dehydrogenase/isomerase
  misc_feature (9)..(316): Homolog of NCBI NO: 7431407 NR Description: cinnamoyl-CoA reductase (EC 1.2.1.44) CCR - cider
  misc_feature (6)..(316): Homolog of NCBI NO: 7239228 NR Description: cinnamoyl CoA reductase; CCR [Populus tremuloides]
  misc_feature (9)..(316): Homolog of NCBI NO: 40233135 NR Description: cinnamoyl CoA reductase [Populus tomentosa]
  misc_feature (9)..(316): Homolog of NCBI NO: 9998901 NR Description: cinnamoyl-CoA reductase [Populus balsamifera
  misc_feature (9)..(316): Homolog of NCBI NO: 17978649 NR Description: cinnamoyl-CoA reductase [Pinus taeda]
  misc_feature (6)..(223): Homolog of NCBI NO: 25140436 NR Description: cinnamoyl CoA reductase 2 [Solanum tuberosum]
  misc_feature (6)..(317): Homolog of NCBI NO: 6554472 NR Description: putative cinnamoyl-CoA reductase; 14056-15506
  misc_feature (6)..(317): Homolog of NCBI NO: 15223068 NR Description: putative cinnamoyl-CoA reductase; protein id:
  misc_feature (1)..(321): Homolog of NCBI NO: 15226135 NR Description: putative cinnamoyl-CoA reductase
  misc_feature (1)..(321): Homolog of NCBI NO: 15226134 NR Description: putative cinnamoyl-CoA reductase
MADVHKGKVCVTGAGGFLGSWVVDLLLSKDYFVHGTVRDPDNEKYAHLKKLEKAGDKLKLFKADLLDYGSLQSAIAGCSGVFHVACPVPPASVPNPEVELIAPAVDGTLNVLKACIEANVKRVVYVSSVAAAFMNPMWSKNQVLDEACWSDQEYCKKTENWYCLAKTRAESEAFEFAKRTGLHLVSVCPTLVLGPILQQNTVNASSLVLLKLLKEGFETRDNQERHLVDVRDVAQALLLVYEKAEAEGRYICTSHTVKEEIVVEKLKSFYPHYNYPKKYIDAEDRVKVSSEKLQKLGWTYRPLEETLVDSVESYRKAKLVD

SEQ ID NO: 28620 - protein, 188 aa, Arabidopsis thaliana
  peptide (1)..(188): Ceres Seq. ID no. 12334075
  misc_feature (1)..(118): Pfam Name: 3-beta hydroxysteroid dehydrogenase/isomerase family Pfam Description: 3-beta hydroxysteroid dehydrogenase/isomerase
  misc_feature (1)..(183): Homolog of NCBI NO: 7431407 NR Description: cinnamoyl-CoA reductase (EC 1.2.1.44) CCR - cider
  misc_feature (1)..(183): Homolog of NCBI NO: 7239228 NR Description: cinnamoyl CoA reductase; CCR [Populus tremuloides]
  misc_feature (1)..(183): Homolog of NCBI NO: 40233135 NR Description: cinnamoyl CoA reductase [Populus tomentosa]
  misc_feature (1)..(183): Homolog of NCBI NO: 9998901 NR Description: cinnamoyl-CoA reductase [Populus balsamifera
  misc_feature (1)..(183): Homolog of NCBI NO: 17978649 NR Description: cinnamoyl-CoA reductase [Pinus taeda]
  misc_feature (1)..(90): Homolog of NCBI NO: 25140436 NR Description: cinnamoyl CoA reductase 2 [Solanum tuberosum]
  misc_feature (1)..(184): Homolog of NCBI NO: 6554472 NR Description: putative cinnamoyl-CoA reductase; 14056-15506
  misc_feature (1)..(184): Homolog of NCBI NO: 15223068 NR Description: putative cinnamoyl-CoA reductase; protein id:
  misc_feature (1)..(188): Homolog of NCBI NO: 15226135 NR Description: putative cinnamoyl-CoA reductase
  misc_feature (1)..(188): Homolog of NCBI NO: 15226134 NR Description: putative cinnamoyl-CoA reductase
MNPMWSKNQVLDEACWSDQEYCKKTENWYCLAKTRAESEAFEFAKRTGLHLVSVCPTLVLGPILQQNTVNASSLVLLKLLKEGFETRDNQERHLVDVRDVAQALLLVYEKAEAEGRYICTSHTVKEEIVVEKLKSFYPHYNYPKKYIDAEDRVKVSSEKLQKLGWTYRPLEETLVDSVESYRKAKLVD

SEQ ID NO: 28621 - protein, 185 aa, Arabidopsis thaliana
  peptide (1)..(185): Ceres Seq. ID no. 12334076
  misc_feature (1)..(115): Pfam Name: 3-beta hydroxysteroid dehydrogenase/isomerase family Pfam Description: 3-beta hydroxysteroid dehydrogenase/isomerase
  misc_feature (1)..(180): Homolog of NCBI NO: 7431407 NR Description: cinnamoyl-CoA reductase (EC 1.2.1.44) CCR - cider
  misc_feature (1)..(180): Homolog of NCBI NO: 7239228 NR Description: cinnamoyl CoA reductase; CCR [Populus tremuloides]
  misc_feature (1)..(180): Homolog of NCBI NO: 40233135 NR Description: cinnamoyl CoA reductase [Populus tomentosa]
  misc_feature (1)..(180): Homolog of NCBI NO: 9998901 NR Description: cinnamoyl-CoA reductase [Populus balsamifera
  misc_feature (1)..(180): Homolog of NCBI NO: 17978649 NR Description: cinnamoyl-CoA reductase [Pinus taeda]
  misc_feature (1)..(87): Homolog of NCBI NO: 25140436 NR Description: cinnamoyl CoA reductase 2 [Solanum tuberosum]
  misc_feature (1)..(181): Homolog of NCBI NO: 6554472 NR Description: putative cinnamoyl-CoA reductase; 14056-15506
  misc_feature (1)..(181): Homolog of NCBI NO: 15223068 NR Description: putative cinnamoyl-CoA reductase; protein id:
  misc_feature (1)..(185): Homolog of NCBI NO: 15226135 NR Description: putative cinnamoyl-CoA reductase
  misc_feature (1)..(185): Homolog of NCBI NO: 15226134 NR Description: putative cinnamoyl-CoA reductase
MWSKNQVLDEACWSDQEYCKKTENWYCLAKTRAESEAFEFAKRTGLHLVSVCPTLVLGPILQQNTVNASSLVLLKLLKEGFETRDNQERHLVDVRDVAQALLLVYEKAEAEGRYICTSHTVKEEIVVEKLKSFYPHYNYPKKYIDAEDRVKVSSEKLQKLGWTYRPLEETLVDSVESYRKAKLVD

SEQ ID NO: 28622 - DNA, 1254 bp, Arabidopsis thaliana
  misc_feature (1)..(1254): Ceres Seq. ID no. 12338154
  misc_feature: MA Experiment ID: 20000166 Result: Down-regulated in Transcription
  misc_feature: MA Experiment 20000166 PARAMETER Experiment Name: At_100uM_ABA_P Parameter: Age (day) Value: 14
  misc_feature: MA Experiment 20000166 PARAMETER Experiment Name: At_100uM_ABA_P Parameter: Organism Value: A. thaliana
  misc_feature: MA Experiment 20000166 PARAMETER Experiment Name: At_100uM_ABA_P Parameter: Plant Line Value: WS
  misc_feature: MA Experiment 20000166 PARAMETER Experiment Name: At_100uM_ABA_P Parameter: Timepoint (hr) Value: 1
  misc_feature: MA Experiment 20000166 PARAMETER Experiment Name: At_100uM_ABA_P Parameter: Tissue Value: Aerial
  misc_feature: MA Experiment 20000166 PARAMETER Experiment Name: At_100uM_ABA_P Parameter: Treatment Value: 100uM ABA vs. No Treatment
  misc_feature: MA Experiment ID: 20000171 Result: Down-regulated in Transcription
  misc_feature: MA Experiment 20000171 PARAMETER Experiment Name: At_42deg_Heat_P Parameter: Age (day) Value: 14
  misc_feature: MA Experiment 20000171 PARAMETER Experiment Name: At_42deg_Heat_P Parameter: Organism Value: A. thaliana
  misc_feature: MA Experiment 20000171 PARAMETER Experiment Name: At_42deg_Heat_P Parameter: Plant Line Value: WS
  misc_feature: MA Experiment 20000171 PARAMETER Experiment Name: At_42deg_Heat_P Parameter: Temperature (deg C) Value: 42 vs. 22
  misc_feature: MA Experiment 20000171 PARAMETER Experiment Name: At_42deg_Heat_P Parameter: Timepoint (hr) Value: 1
  misc_feature: MA Experiment 20000171 PARAMETER Experiment Name: At_42deg_Heat_P Parameter: Tissue Value: Aerial
  misc_feature: MA Experiment ID: 20000173 Result: Down-regulated in Transcription
  misc_feature: MA Experiment 20000173 PARAMETER Experiment Name: At_42deg_Heat_P Parameter: Age (day) Value: 14
  misc_feature: MA Experiment 20000173 PARAMETER Experiment Name: At_42deg_Heat_P Parameter: Organism Value: A. thaliana
  misc_feature: MA Experiment 20000173 PARAMETER Experiment Name: At_42deg_Heat_P Parameter: Plant Line Value: WS
  misc_feature: MA Experiment 20000173 PARAMETER Experiment Name: At_42deg_Heat_P Parameter: Temperature (deg C) Value: 42 vs. 22
  misc_feature: MA Experiment 20000173 PARAMETER Experiment Name: At_42deg_Heat_P Parameter: Timepoint (hr) Value: 6
  misc_feature: MA Experiment 20000173 PARAMETER Experiment Name: At_42deg_Heat_P Parameter: Tissue Value: Aerial
  misc_feature: MA Experiment ID: 20000184 Result: Down-regulated in Transcription
  misc_feature: MA Experiment 20000184 PARAMETER Experiment Name: At_Shoots__P Parameter: Age (day) Value: 7
  misc_feature: MA Experiment 20000184 PARAMETER Experiment Name: At_Shoots__P Parameter: Tissue Value: Shoots vs. Whole Plant
  misc_feature: MA Experiment ID: 20000185 Result: Down-regulated in Transcription
  misc_feature: MA Experiment 20000185 PARAMETER Experiment Name: At_Roots__P Parameter: Age (day) Value: 7 vs. 21
  misc_feature: MA Experiment 20000185 PARAMETER Experiment Name: At_Roots__P Parameter: Organism Value: A. thaliana
  misc_feature: MA Experiment 20000185 PARAMETER Experiment Name: At_Roots__P Parameter: Tissue Value: Roots vs. Whole Plant
  misc_feature: MA Experiment ID: 20000213 Result: Down-regulated in Transcription
  misc_feature: MA Experiment 20000213 PARAMETER Experiment Name: At_4deg_Cold_P Parameter: Timepoint (hr) Value: 2
  misc_feature: MA Experiment ID: 20000214 Result: Down-regulated in Transcription
  misc_feature: MA Experiment 20000214 PARAMETER Experiment Name: At_4deg_Cold_P Parameter: Timepoint (hr) Value: 6
  misc_feature: MA Experiment ID: 20000234 Result: Down-regulated in Transcription
  misc_feature: MA Experiment 20000234 PARAMETER Experiment Name: At_Siliques_P Parameter: Age (day) Value: 21
  misc_feature: MA Experiment 20000234 PARAMETER Experiment Name: At_Siliques_P Parameter: Organism Value: A. thaliana
  misc_feature: MA Experiment 20000234 PARAMETER Experiment Name: At_Siliques_P Parameter: Plant Line Value: WS
  misc_feature: MA Experiment 20000234 PARAMETER Experiment Name: At_Siliques_P Parameter: Tissue Value: Less Than 5mm Siliques vs. Whole Plant
  misc_feature: MA Experiment ID: 20000265 Result: Down-regulated in Transcription
  misc_feature: MA Experiment 20000265 PARAMETER Experiment Name: At_Open_Flower_P Parameter: Age (day) Value: 21
  misc_feature: MA Experiment 20000265 PARAMETER Experiment Name: At_Open_Flower_P Parameter: Plant Line Value: WS
  misc_feature: MA Experiment 20000265 PARAMETER Experiment Name: At_Open_Flower_P Parameter: Tissue Value: Closed Flower vs. Whole Plant
  misc_feature: MA Experiment ID: 20000286 Result: Down-regulated in Transcription
  misc_feature: MA Experiment 20000286 PARAMETER Experiment Name: At_Open_Flower_P Parameter: Age (day) Value: 21
  misc_feature: MA Experiment 20000286 PARAMETER Experiment Name: At_Open_Flower_P Parameter: Plant Line Value: WS
  misc_feature: MA Experiment 20000286 PARAMETER Experiment Name: At_Open_Flower_P Parameter: Tissue Value: Half Open vs. Whole Plant
  misc_feature: MA Experiment ID: 20000438 Result: Down-regulated in Transcription
  misc_feature: MA Experiment 20000438 PARAMETER Experiment Name: At_Shoots__P Parameter: Age (day) Value: 14
  misc_feature: MA Experiment 20000438 PARAMETER Experiment Name: At_Shoots__P Parameter: Tissue Value: Shoots vs. Whole Plant
  misc_feature: MA Experiment ID: 20000439 Result: Down-regulated in Transcription
  misc_feature: MA Experiment 20000439 PARAMETER Experiment Name: At_Roots__P Parameter: Age (day) Value: 14 vs. 21
  misc_feature: MA Experiment 20000439 PARAMETER Experiment Name: At_Roots__P Parameter: Organism Value: A. thaliana
  misc_feature: MA Experiment 20000439 PARAMETER Experiment Name: At_Roots__P Parameter: Tissue Value: Roots vs. Whole Plant
  misc_feature: MA Experiment ID: 20000495 Result: Down-regulated in Transcription
  misc_feature: MA Experiment 20000495 PARAMETER Experiment Name: At_Guard_Cells_P Parameter: Harvest Date Value: 8/2/2002
  misc_feature: MA Experiment 20000495 PARAMETER Experiment Name: At_Guard_Cells_P Parameter: Organism Value: A. thaliana
  misc_feature: MA Experiment 20000495 PARAMETER Experiment Name: At_Guard_Cells_P Parameter: Tissue Value: Guard Cells vs. Leaves
  misc_feature: MA Experiment ID: 20000573 Result: Up-regulated in Transcription
  misc_feature: MA Experiment 20000573 PARAMETER Experiment Name: At_100uM_ABA_Mutants__P Parameter: Organism Value: A. thaliana
  misc_feature: MA Experiment 20000573 PARAMETER Experiment Name: At_100uM_ABA_Mutants__P Parameter: Plant Line Value: CS22 vs. Ler wt
  misc_feature: MA Experiment 20000573 PARAMETER Experiment Name: At_100uM_ABA_Mutants__P Parameter: Timepoint (hr) Value: N/A
  misc_feature: MA Experiment 20000573 PARAMETER Experiment Name: At_100uM_ABA_Mutants__P Parameter: Tissue Value: Whole Plant
  misc_feature: MA Experiment 20000573 PARAMETER Experiment Name: At_100uM_ABA_Mutants__P Parameter: Treatment Value: None
  misc_feature: MA Experiment ID: 20000794 Result: Up-regulated in Transcription
  misc_feature: MA Experiment 20000794 PARAMETER Experiment Name: At_Petals_P Parameter: Age (day) Value: 23-25 days
  misc_feature: MA Experiment 20000794 PARAMETER Experiment Name: At_Petals_P Parameter: Plant Line Value: WS
  misc_feature: MA Experiment 20000794 PARAMETER Experiment Name: At_Petals_P Parameter: Tissue Value: Petals vs. Whole plant
  misc_feature: MA Experiment ID: 20001560 Result: Down-regulated in Transcription
  misc_feature: MA Experiment 20001560 PARAMETER Experiment Name: At_Drought_Soil_Dry_P Parameter: Age (day) Value: 28
  misc_feature: MA Experiment 20001560 PARAMETER Experiment Name: At_Drought_Soil_Dry_P Parameter: Organism Value: A. thaliana
  misc_feature: MA Experiment 20001560 PARAMETER Experiment Name: At_Drought_Soil_Dry_P Parameter: Plant Line Value: WS
  misc_feature: MA Experiment 20001560 PARAMETER Experiment Name: At_Drought_Soil_Dry_P Parameter: Post Timepoint (hr) Value: None
  misc_feature: MA Experiment 20001560 PARAMETER Experiment Name: At_Drought_Soil_Dry_P Parameter: Post-Treatment Value: None
  misc_feature: MA Experiment 20001560 PARAMETER Experiment Name: At_Drought_Soil_Dry_P Parameter: Timepoint (day) Value: 14
  misc_feature: MA Experiment 20001560 PARAMETER Experiment Name: At_Drought_Soil_Dry_P Parameter: Treatment Value: Drought vs. No Drought
gcgttagtcggatgcatactcgattaggttcatcgaagaaaatggtggagaaccttgctttctcagctattcttagcaataagaaacaatataatcctgatttttacaattggaatagagtgaaagttagatactgtgacggggcatcattcacaggagatgtagaagcagtgaaccctgctactaatcttcacttcagaggtgctcgagtttggttagccgttatgcaagagctgctagctaaaggcatgataaacgccgagaatgctgttttgtctggctgttctgctggcgggttagcttcgctgatgcattgtgatagtttccgtgctctattaccgatgggaaccaaagtaaaatgtctttcagatgctgggttttttctcaacacaagagacgtctcaggagttcaatacattaaaacatacttcgaagatgttgttactcttcatggatcagcaaagaacttgccgaggtcatgcacatcaagattaactcctgcaatgtgtttctttccgcaatatgtggctcgccagattagaactcctctgttcattcttaatgccgcttatgactcttggcagataaagaacattttggctccgcgagcagctgatccttacggaaaatggcaaagttgtcaactagacatcaagaattgccatccaagtcagatcaaagttatgcaagatttcaggttagagttcttgagtgcagtgataggtttagggagatcttcatcaagagggatgttcatagattcttgctacactcactgccaaaccgagacacaaacttcatggttctggcaagattctccaattctaaaccgaacgacaatagcaaaagctgttggagattgggtttatgacagaacattgtttcagaagatagattgtccttacccttgtaaccctacttgccaccacagggttttcactcctctagatgctcctccaatttaagtgattctaccatatacagtatagatttattattattttgaaaagaaaatttgcttataaatgattcatttgttagatacatatagtgaaatattcctagggtttagctatagaagatgaaaaagaaaaagagtgtgattaattcttgagtgttgagaataagcaataggagtaattttcttcagcacttgtcttgtgtgctgtttaaattgctctgtttctcttctattctgatgtaaaatgcaaattgttacctttatcctatcaaataaagtataattcttttccc

SEQ ID NO: 28623 - protein, 320 aa, Arabidopsis thaliana
  peptide (1)..(320): Ceres Seq. ID no. 12338155
  misc_feature (1)..(297): Pfam Name: Pectinacetylesterase Pfam Description: Pectinacetylesterase
  misc_feature (1)..(312): Homolog of NCBI NO: 28392968 NR Description: putative pectinacetylesterase [Arabidopsis
  misc_feature (1)..(312): Homolog of NCBI NO: 18397406 NR Description: pectinacetylesterase, putative
  misc_feature (1)..(307): Homolog of NCBI NO: 15242357 NR Description: pectinacetylesterase, putative
  misc_feature (1)..(307): Homolog of NCBI NO: 21593445 NR Description: pectin acetylesterase [Arabidopsis thaliana]
  misc_feature (3)..(307): Homolog of NCBI NO: 18415308 NR Description: pectinacetylesterase, putative
  misc_feature (9)..(310): Homolog of NCBI NO: 38344147 NR Description: OSJNBa0041A02.14 [Oryza sativa (japonica
  misc_feature (279)..(320): Homolog of NCBI NO: 7487998 NR Description: pectin acetylesterase homolog T5K18.200 -
  misc_feature (1)..(168): Homolog of NCBI NO: 7487998 NR Description: pectin acetylesterase homolog T5K18.200 -
  misc_feature (1)..(320): Homolog of NCBI NO: 7488883 NR Description: pectin acetylesterase (EC 3.1.1.-) precursor -
  misc_feature (1)..(320): Homolog of NCBI NO: 22328797 NR Description: pectinacetylesterase family; protein id:
VSRMHTRLGSSKKMVENLAFSAILSNKKQYNPDFYNWNRVKVRYCDGASFTGDVEAVNPATNLHFRGARVWLAVMQELLAKGMINAENAVLSGCSAGGLASLMHCDSFRALLPMGTKVKCLSDAGFFLNTRDVSGVQYIKTYFEDVVTLHGSAKNLPRSCTSRLTPAMCFFPQYVARQIRTPLFILNAAYDSWQIKNILAPRAADPYGKWQSCQLDIKNCHPSQIKVMQDFRLEFLSAVIGLGRSSSRGMFIDSCYTHCQTETQTSWFWQDSPILNRTTIAKAVGDWVYDRTLFQKIDCPYPCNPTCHHRVFTPLDAPPI

SEQ ID NO: 28624 - protein, 317 aa, Arabidopsis thaliana
  peptide (1)..(317): Ceres Seq. ID no. 12338156
  misc_feature (1)..(294): Pfam Name: Pectinacetylesterase Pfam Description: Pectinacetylesterase
  misc_feature (1)..(309): Homolog of NCBI NO: 28392968 NR Description: putative pectinacetylesterase [Arabidopsis
  misc_feature (1)..(309): Homolog of NCBI NO: 18397406 NR Description: pectinacetylesterase, putative
  misc_feature (1)..(304): Homolog of NCBI NO: 15242357 NR Description: pectinacetylesterase, putative
  misc_feature (1)..(304): Homolog of NCBI NO: 21593445 NR Description: pectin acetylesterase [Arabidopsis thaliana]
  misc_feature (1)..(304): Homolog of NCBI NO: 18415308 NR Description: pectinacetylesterase, putative
  misc_feature (6)..(307): Homolog of NCBI NO: 38344147 NR Description: OSJNBa0041A02.14 [Oryza sativa (japonica
  misc_feature (276)..(317): Homolog of NCBI NO: 7487998 NR Description: pectin acetylesterase homolog T5K18.200 -
  misc_feature (1)..(165): Homolog of NCBI NO: 7487998 NR Description: pectin acetylesterase homolog T5K18.200 -
  misc_feature (1)..(317): Homolog of NCBI NO: 7488883 NR Description: pectin acetylesterase (EC 3.1.1.-) precursor -
  misc_feature (1)..(317): Homolog of NCBI NO: 22328797 NR Description: pectinacetylesterase family; protein id:
MHTRLGSSKKMVENLAFSAILSNKKQYNPDFYNWNRVKVRYCDGASFTGDVEAVNPATNLHFRGARVWLAVMQELLAKGMINAENAVLSGCSAGGLASLMHCDSFRALLPMGTKVKCLSDAGFFLNTRDVSGVQYIKTYFEDVVTLHGSAKNLPRSCTSRLTPAMCFFPQYVARQIRTPLFILNAAYDSWQIKNILAPRAADPYGKWQSCQLDIKNCHPSQIKVMQDFRLEFLSAVIGLGRSSSRGMFIDSCYTHCQTETQTSWFWQDSPILNRTTIAKAVGDWVYDRTLFQKIDCPYPCNPTCHHRVFTPLDAPPI

SEQ ID NO: 28625 - protein, 307 aa, Arabidopsis thaliana
  peptide (1)..(307): Ceres Seq. ID no. 12338157
  misc_feature (1)..(284): Pfam Name: Pectinacetylesterase Pfam Description: Pectinacetylesterase
  misc_feature (1)..(299): Homolog of NCBI NO: 28392968 NR Description: putative pectinacetylesterase [Arabidopsis
  misc_feature (1)..(299): Homolog of NCBI NO: 18397406 NR Description: pectinacetylesterase, putative
  misc_feature (1)..(294): Homolog of NCBI NO: 15242357 NR Description: pectinacetylesterase, putative
  misc_feature (1)..(294): Homolog of NCBI NO: 21593445 NR Description: pectin acetylesterase [Arabidopsis thaliana]
  misc_feature (1)..(294): Homolog of NCBI NO: 18415308 NR Description: pectinacetylesterase, putative
  misc_feature (1)..(297): Homolog of NCBI NO: 38344147 NR Description: OSJNBa0041A02.14 [Oryza sativa (japonica
  misc_feature (266)..(307): Homolog of NCBI NO: 7487998 NR Description: pectin acetylesterase homolog T5K18.200 -
  misc_feature (1)..(155): Homolog of NCBI NO: 7487998 NR Description: pectin acetylesterase homolog T5K18.200 -
  misc_feature (1)..(307): Homolog of NCBI NO: 7488883 NR Description: pectin acetylesterase (EC 3.1.1.-) precursor -
  misc_feature (1)..(307): Homolog of NCBI NO: 22328797 NR Description: pectinacetylesterase family; protein id:
MVENLAFSAILSNKKQYNPDFYNWNRVKVRYCDGASFTGDVEAVNPATNLHFRGARVWLAVMQELLAKGMINAENAVLSGCSAGGLASLMHCDSFRALLPMGTKVKCLSDAGFFLNTRDVSGVQYIKTYFEDVVTLHGSAKNLPRSCTSRLTPAMCFFPQYVARQIRTPLFILNAAYDSWQIKNILAPRAADPYGKWQSCQLDIKNCHPSQIKVMQDFRLEFLSAVIGLGRSSSRGMFIDSCYTHCQTETQTSWFWQDSPILNRTTIAKAVGDWVYDRTLFQKIDCPYPCNPTCHHRVFTPLDAPPI

SEQ ID NO: 28626 - DNA, 1332 bp, Arabidopsis thaliana
  misc_feature (1)..(1332): Ceres Seq. ID no. 12334081
  misc_feature: MA Experiment ID: 20000113 Result: Up-regulated in Transcription
  misc_feature: MA Experiment 20000113 PARAMETER Experiment Name: At_42deg_Heat_cDNA_P Parameter: Temperature (deg C) Value: 42 vs. 22
  misc_feature: MA Experiment 20000113 PARAMETER Experiment Name: At_42deg_Heat_cDNA_P Parameter: Timepoint (hr) Value: 8
  misc_feature: MA Experiment 20000113 PARAMETER Experiment Name: At_42deg_Heat_cDNA_P Parameter: Tissue Value: Aerial
aaagtcgaagcccttgttagggcttctatacatcaccggcgatattggtttacgcgtcggagagatggttggtgagtgttattgatgacacgagatttcaattctcggcggtgtaacgtgaagtcttaacaatttcattgtccaatggtggaatttacagagagagaggaccgagtttctttggaactcagcgaagaaattatacagagcatggaacctggcgccgttttcagagactataattgcaggatcagctcaattgactttcacaaaacttcgacttgtatggtgacagctagcgacgatgactcaattcgtctctatgatgttgccagcgccacatgtctgaagacaattaatagcaaaaagtatggtgttgatcttgtttgcttcacttctcatcctactactgtcatctactcttccagaaacggatgggacgactctctgaggcttctctctttgcacgataataagtacttgcgctacttcaaaggacatcatgacagagttgtttcgcttagcttgtgttctggtggggaatgcttcatctccggttcccttgatcgtactgttttgctttgggatcaaagggtcgagaaatgccagggtctcttacgagtccaaggaaggcctgctgcagcatatgatgatcaagggttaatttttgcaattgcctttggtggctacataagaatgtttgatgcccgtatgtacgaaaagggtccttttgaaatattttccgttggtggtgatctttctgaggcaaacgttgtgaaatttagtaatgatggaaggctcatgctgcttacaaccatggatggttttattcatgtgcttgactcgtttcgtggaactcttctgtccacatttagtgtgaaaccagtagctggagaatctacattggatgcagcctttagtcctgaagggatgtttgttgtttcaggttcaggtgatggtagtacccatgcatggggtgtaaggagcggaaaacaggtacatagttggatgggtttagggagtgagcccccagtcattaaatggggtccaggaagtcccatgtttgtgacaggctcttccgaacttgcttttgttatacccgacttatcgaaattgccagcttatgccattcggaaataggacgactatcacgtctgtgccatgtaaatgaggcctcatttggccttttggtttcagactttgttgtgggttatgccggtaacttatcccttgcactctgattaatatatatttgggtcttgtaacatgaagataaaccccaagtctttctaatgttgtaattcgtgtaatttacaagtttgactgtttctg

SEQ ID NO: 28627 - protein, 331 aa, Arabidopsis thaliana
  peptide (1)..(331): Ceres Seq. ID no. 12334082
  misc_feature (12)..(265): Homolog of NCBI NO: 19112522 NR Description: trp-ast repeats containing protein
  misc_feature (48)..(321): Homolog of NCBI NO: 34877546 NR Description: similar to CG17293-PA [Rattus norvegicus]
  misc_feature (11)..(319): Homolog of NCBI NO: 19920938 NR Description: CG17293-PA [Drosophila melanogaster]
  misc_feature (20)..(321): Homolog of NCBI NO: 21618713 NR Description: RIKEN cDNA 9430077D24 gene [Mus musculus]
  misc_feature (13)..(321): Homolog of NCBI NO: 28277563 NR Description: Similar to RIKEN cDNA 9430077D24 gene [Danio
  misc_feature (14)..(328): Homolog of NCBI NO: 15241434 NR Description: putative protein
  misc_feature (11)..(331): Homolog of NCBI NO: 28564824 NR Description: OSJNBb0005G07.13 [Oryza sativa (japonica
  misc_feature (6)..(331): Homolog of NCBI NO: 30698206 NR Description: transducin / WD-40 repeat protein family
  misc_feature (1)..(331): Homolog of NCBI NO: 21536827 NR Description: WD repeat protein-like [Arabidopsis thaliana]
  misc_feature (1)..(331): Homolog of NCBI NO: 18425050 NR Description: WD repeat protein-like
MVEFTEREDRVSLELSEEIIQSMEPGAVFRDYNCRISSIDFHKTSTCMVTASDDDSIRLYDVASATCLKTINSKKYGVDLVCFTSHPTTVIYSSRNGWDDSLRLLSLHDNKYLRYFKGHHDRVVSLSLCSGGECFISGSLDRTVLLWDQRVEKCQGLLRVQGRPAAAYDDQGLIFAIAFGGYIRMFDARMYEKGPFEIFSVGGDLSEANVVKFSNDGRLMLLTTMDGFIHVLDSFRGTLLSTFSVKPVAGESTLDAAFSPEGMFVVSGSGDGSTHAWGVRSGKQVHSWMGLGSEPPVIKWGPGSPMFVTGSSELAFVIPDLSKLPAYAIRK

SEQ ID NO: 28628 - protein, 309 aa, Arabidopsis thaliana
  peptide (1)..(309): Ceres Seq. ID no. 12334083
  misc_feature (1)..(243): Homolog of NCBI NO: 19112522 NR Description: trp-ast repeats containing protein
  misc_feature (26)..(299): Homolog of NCBI NO: 34877546 NR Description: similar to CG17293-PA [Rattus norvegicus]
  misc_feature (1)..(297): Homolog of NCBI NO: 19920938 NR Description: CG17293-PA [Drosophila melanogaster]
  misc_feature (1)..(299): Homolog of NCBI NO: 21618713 NR Description: RIKEN cDNA 9430077D24 gene [Mus musculus]
  misc_feature (1)..(299): Homolog of NCBI NO: 28277563 NR Description: Similar to RIKEN cDNA 9430077D24 gene [Danio
  misc_feature (1)..(306): Homolog of NCBI NO: 15241434 NR Description: putative protein
  misc_feature (1)..(309): Homolog of NCBI NO: 28564824 NR Description: OSJNBb0005G07.13 [Oryza sativa (japonica
  misc_feature (1)..(309): Homolog of NCBI NO: 30698206 NR Description: transducin / WD-40 repeat protein family
  misc_feature (1)..(309): Homolog of NCBI NO: 21536827 NR Description: WD repeat protein-like [Arabidopsis thaliana]
  misc_feature (1)..(309): Homolog of NCBI NO: 18425050 NR Description: WD repeat protein-like
MEPGAVFRDYNCRISSIDFHKTSTCMVTASDDDSIRLYDVASATCLKTINSKKYGVDLVCFTSHPTTVIYSSRNGWDDSLRLLSLHDNKYLRYFKGHHDRVVSLSLCSGGECFISGSLDRTVLLWDQRVEKCQGLLRVQGRPAAAYDDQGLIFAIAFGGYIRMFDARMYEKGPFEIFSVGGDLSEANVVKFSNDGRLMLLTTMDGFIHVLDSFRGTLLSTFSVKPVAGESTLDAAFSPEGMFVVSGSGDGSTHAWGVRSGKQVHSWMGLGSEPPVIKWGPGSPMFVTGSSELAFVIPDLSKLPAYAIRK

SEQ ID NO: 28629 - protein, 284 aa, Arabidopsis thaliana
  peptide (1)..(284): Ceres Seq. ID no. 12334084
  misc_feature (1)..(218): Homolog of NCBI NO: 19112522 NR Description: trp-ast repeats containing protein
  misc_feature (1)..(274): Homolog of NCBI NO: 34877546 NR Description: similar to CG17293-PA [Rattus norvegicus]
  misc_feature (1)..(272): Homolog of NCBI NO: 19920938 NR Description: CG17293-PA [Drosophila melanogaster]
  misc_feature (1)..(274): Homolog of NCBI NO: 21618713 NR Description: RIKEN cDNA 9430077D24 gene [Mus musculus]
  misc_feature (1)..(274): Homolog of NCBI NO: 28277563 NR Description: Similar to RIKEN cDNA 9430077D24 gene [Danio
  misc_feature (1)..(281): Homolog of NCBI NO: 15241434 NR Description: putative protein
  misc_feature (1)..(284): Homolog of NCBI NO: 28564824 NR Description: OSJNBb0005G07.13 [Oryza sativa (japonica
  misc_feature (1)..(284): Homolog of NCBI NO: 30698206 NR Description: transducin / WD-40 repeat protein family
  misc_feature (1)..(284): Homolog of NCBI NO: 21536827 NR Description: WD repeat protein-like [Arabidopsis thaliana]
  misc_feature (1)..(284): Homolog of NCBI NO: 18425050 NR Description: WD repeat protein-like
MVTASDDDSIRLYDVASATCLKTINSKKYGVDLVCFTSHPTTVIYSSRNGWDDSLRLLSLHDNKYLRYFKGHHDRVVSLSLCSGGECFISGSLDRTVLLWDQRVEKCQGLLRVQGRPAAAYDDQGLIFAIAFGGYIRMFDARMYEKGPFEIFSVGGDLSEANVVKFSNDGRLMLLTTMDGFIHVLDSFRGTLLSTFSVKPVAGESTLDAAFSPEGMFVVSGSGDGSTHAWGVRSGKQVHSWMGLGSEPPVIKWGPGSPMFVTGSSELAFVIPDLSKLPAYAIRK

SEQ ID NO: 28630 - DNA, 1740 bp, Arabidopsis thaliana
  misc_feature (1)..(1740): Ceres Seq. ID no. 13487482
  misc_feature: MA Experiment ID: 20000171 Result: Down-regulated in Transcription
  misc_feature: MA Experiment 20000171 PARAMETER Experiment Name: At_42deg_Heat_P Parameter: Age (day) Value: 14
  misc_feature: MA Experiment 20000171 PARAMETER Experiment Name: At_42deg_Heat_P Parameter: Organism Value: A. thaliana
  misc_feature: MA Experiment 20000171 PARAMETER Experiment Name: At_42deg_Heat_P Parameter: Plant Line Value: WS
  misc_feature: MA Experiment 20000171 PARAMETER Experiment Name: At_42deg_Heat_P Parameter: Temperature (deg C) Value: 42 vs. 22
  misc_feature: MA Experiment 20000171 PARAMETER Experiment Name: At_42deg_Heat_P Parameter: Timepoint (hr) Value: 1
  misc_feature: MA Experiment 20000171 PARAMETER Experiment Name: At_42deg_Heat_P Parameter: Tissue Value: Aerial
  misc_feature: MA Experiment ID: 20000173 Result: Down-regulated in Transcription
  misc_feature: MA Experiment 20000173 PARAMETER Experiment Name: At_42deg_Heat_P Parameter: Age (day) Value: 14
  misc_feature: MA Experiment 20000173 PARAMETER Experiment Name: At_42deg_Heat_P Parameter: Organism Value: A. thaliana
  misc_feature: MA Experiment 20000173 PARAMETER Experiment Name: At_42deg_Heat_P Parameter: Plant Line Value: WS
  misc_feature: MA Experiment 20000173 PARAMETER Experiment Name: At_42deg_Heat_P Parameter: Temperature (deg C) Value: 42 vs. 22
  misc_feature: MA Experiment 20000173 PARAMETER Experiment Name: At_42deg_Heat_P Parameter: Timepoint (hr) Value: 6
  misc_feature: MA Experiment 20000173 PARAMETER Experiment Name: At_42deg_Heat_P Parameter: Tissue Value: Aerial
  misc_feature: MA Experiment ID: 20000213 Result: Down-regulated in Transcription
  misc_feature: MA Experiment 20000213 PARAMETER Experiment Name: At_4deg_Cold_P Parameter: Timepoint (hr) Value: 2
  misc_feature: MA Experiment ID: 20000214 Result: Down-regulated in Transcription
  misc_feature: MA Experiment 20000214 PARAMETER Experiment Name: At_4deg_Cold_P Parameter: Timepoint (hr) Value: 6
  misc_feature: MA Experiment ID: 20000227 Result: Up-regulated in Transcription
  misc_feature: MA Experiment 20000227 PARAMETER Experiment Name: At_Root-Tips-vs-Tops_P Parameter: Tissue Value: Root Tips vs. Root Tops
  misc_feature: MA Experiment ID: 20000264 Result: Up-regulated in Transcription
  misc_feature: MA Experiment 20000264 PARAMETER Experiment Name: At_Open_Flower_P Parameter: Age (day) Value: 21
  misc_feature: MA Experiment 20000264 PARAMETER Experiment Name: At_Open_Flower_P Parameter: Plant Line Value: WS
  misc_feature: MA Experiment 20000264 PARAMETER Experiment Name: At_Open_Flower_P Parameter: Tissue Value: Open Flower vs. Whole Plant
  misc_feature: MA Experiment ID: 20000286 Result: Up-regulated in Transcription
  misc_feature: MA Experiment 20000286 PARAMETER Experiment Name: At_Open_Flower_P Parameter: Age (day) Value: 21
  misc_feature: MA Experiment 20000286 PARAMETER Experiment Name: At_Open_Flower_P Parameter: Plant Line Value: WS
  misc_feature: MA Experiment 20000286 PARAMETER Experiment Name: At_Open_Flower_P Parameter: Tissue Value: Half Open vs. Whole Plant
  misc_feature: MA Experiment ID: 20000496 Result: Up-regulated in Transcription
  misc_feature: MA Experiment 20000496 PARAMETER Experiment Name: At_Guard_Cells_P Parameter: Harvest Date Value: 7/19/2002
  misc_feature: MA Experiment 20000496 PARAMETER Experiment Name: At_Guard_Cells_P Parameter: Organism Value: Canola
  misc_feature: MA Experiment 20000496 PARAMETER Experiment Name: At_Guard_Cells_P Parameter: Tissue Value: Guard Cells vs. Leaves
  misc_feature: MA Experiment ID: 20000794 Result: Up-regulated in Transcription
  misc_feature: MA Experiment 20000794 PARAMETER Experiment Name: At_Petals_P Parameter: Age (day) Value: 23-25 days
  misc_feature: MA Experiment 20000794 PARAMETER Experiment Name: At_Petals_P Parameter: Plant Line Value: WS
  misc_feature: MA Experiment 20000794 PARAMETER Experiment Name: At_Petals_P Parameter: Tissue Value: Petals vs. Whole plant
  misc_feature: MA Experiment ID: 20001554 Result: Down-regulated in Transcription
  misc_feature: MA Experiment 20001554 PARAMETER Experiment Name: At_Drought_Soil_Dry_P Parameter: Age (day) Value: 21
  misc_feature: MA Experiment 20001554 PARAMETER Experiment Name: At_Drought_Soil_Dry_P Parameter: Organism Value: A. thaliana
  misc_feature: MA Experiment 20001554 PARAMETER Experiment Name: At_Drought_Soil_Dry_P Parameter: Plant Line Value: WS
  misc_feature: MA Experiment 20001554 PARAMETER Experiment Name: At_Drought_Soil_Dry_P Parameter: Post Timepoint (hr) Value: None
  misc_feature: MA Experiment 20001554 PARAMETER Experiment Name: At_Drought_Soil_Dry_P Parameter: Post-Treatment Value: None
  misc_feature: MA Experiment 20001554 PARAMETER Experiment Name: At_Drought_Soil_Dry_P Parameter: Timepoint (day) Value: 7
  misc_feature: MA Experiment 20001554 PARAMETER Experiment Name: At_Drought_Soil_Dry_P Parameter: Treatment Value: Drought vs. No Drought
  misc_feature: MA Experiment ID: 20001555 Result: Down-regulated in Transcription
  misc_feature: MA Experiment 20001555 PARAMETER Experiment Name: At_Drought_Soil_Dry_P Parameter: Age (day) Value: 24
  misc_feature: MA Experiment 20001555 PARAMETER Experiment Name: At_Drought_Soil_Dry_P Parameter: Organism Value: A. thaliana
  misc_feature: MA Experiment 20001555 PARAMETER Experiment Name: At_Drought_Soil_Dry_P Parameter: Plant Line Value: WS
  misc_feature: MA Experiment 20001555 PARAMETER Experiment Name: At_Drought_Soil_Dry_P Parameter: Post Timepoint (hr) Value: None
  misc_feature: MA Experiment 20001555 PARAMETER Experiment Name: At_Drought_Soil_Dry_P Parameter: Post-Treatment Value: None
  misc_feature: MA Experiment 20001555 PARAMETER Experiment Name: At_Drought_Soil_Dry_P Parameter: Timepoint (day) Value: 10
  misc_feature: MA Experiment 20001555 PARAMETER Experiment Name: At_Drought_Soil_Dry_P Parameter: Treatment Value: Drought vs. No Drought
  misc_feature: MA Experiment ID: 20001556 Result: Down-regulated in Transcription
  misc_feature: MA Experiment 20001556 PARAMETER Experiment Name: At_Drought_Soil_Dry_P Parameter: Age (day) Value: 26
  misc_feature: MA Experiment 20001556 PARAMETER Experiment Name: At_Drought_Soil_Dry_P Parameter: Organism Value: A. thaliana
  misc_feature: MA Experiment 20001556 PARAMETER Experiment Name: At_Drought_Soil_Dry_P Parameter: Plant Line Value: WS
  misc_feature: MA Experiment 20001556 PARAMETER Experiment Name: At_Drought_Soil_Dry_P Parameter: Post Timepoint (hr) Value: None
  misc_feature: MA Experiment 20001556 PARAMETER Experiment Name: At_Drought_Soil_Dry_P Parameter: Post-Treatment Value: None
  misc_feature: MA Experiment 20001556 PARAMETER Experiment Name: At_Drought_Soil_Dry_P Parameter: Timepoint (day) Value: 12
  misc_feature: MA Experiment 20001556 PARAMETER Experiment Name: At_Drought_Soil_Dry_P Parameter: Treatment Value: Drought vs. No Drought
  misc_feature: MA Experiment ID: 20001557 Result: Down-regulated in Transcription
  misc_feature: MA Experiment 20001557 PARAMETER Experiment Name: At_Drought_Soil_Dry_P Parameter: Age (day) Value: 27
  misc_feature: MA Experiment 20001557 PARAMETER Experiment Name: At_Drought_Soil_Dry_P Parameter: Organism Value: A. thaliana
  misc_feature: MA Experiment 20001557 PARAMETER Experiment Name: At_Drought_Soil_Dry_P Parameter: Plant Line Value: WS
  misc_feature: MA Experiment 20001557 PARAMETER Experiment Name: At_Drought_Soil_Dry_P Parameter: Post Timepoint (hr) Value: 3
  misc_feature: MA Experiment 20001557 PARAMETER Experiment Name: At_Drought_Soil_Dry_P Parameter: Post-Treatment Value: Re-Water vs. No Drought
  misc_feature: MA Experiment 20001557 PARAMETER Experiment Name: At_Drought_Soil_Dry_P Parameter: Timepoint (day) Value: 13
  misc_feature: MA Experiment 20001557 PARAMETER Experiment Name: At_Drought_Soil_Dry_P Parameter: Treatment Value: Drought vs. No Drought
  misc_feature: MA Experiment ID: 20001911 Result: Down-regulated in Transcription
  misc_feature: MA Experiment 20001911 PARAMETER Experiment Name: At_Drought_Reproduction_P Parameter: Age (day) Value: 40
  misc_feature: MA Experiment 20001911 PARAMETER Experiment Name: At_Drought_Reproduction_P Parameter: Organism Value: A. thaliana
  misc_feature: MA Experiment 20001911 PARAMETER Experiment Name: At_Drought_Reproduction_P Parameter: Plant Line Value: WS
  misc_feature: MA Experiment 20001911 PARAMETER Experiment Name: At_Drought_Reproduction_P Parameter: Timepoint (day) Value: 10
  misc_feature: MA Experiment 20001911 PARAMETER Experiment Name: At_Drought_Reproduction_P Parameter: Tissue Value: Flowers
  misc_feature: MA Experiment 20001911 PARAMETER Experiment Name: At_Drought_Reproduction_P Parameter: Treatment Value: Drought vs. No Drought
aaccaaagactcttaaccatctcttctctctctctttgaaaacatagcacacacaaaaaaaagacagagcaaaaaaacacacaaagatgggcataatgatgatgattttgggtcttcttgtgatcattgtttgtttatgtactgctcttctccgatggaaccagatgcgatattctaagaaaggtcttcctcctggaaccatgggctggccaatatttggtgaaacgactgagtttcttaaacaaggaccagatttcatgaaaaaccaaagactaagatatgggagtttcttcaagtctcacattcttggttgcccaacaatagtctcaatggacgcagagttaaacagatacattctaatgaatgaatcgaaaggacttgttgccggttacccgcaatctatgcttgatattctagggacatgcaacatagctgcggttcatggcccgagccaccggctaatgagaggctcgttgctttctttaataagcccaaccatgatgaaagaccatctcttgcctaagattgatgatttcatgagaaactatctttgtggttgggatgatcttgagacagttgatatccaagaaaagaccaaacatatggcatttttatcatcgttgttacaaatagctgagactttgaaaaaaccagaggttgaagaatatagaacagagtttttcaagcttgttgtgggaactctatcggtcccgatcgatatcccgggaacgaattaccgcagtggagtccaagcaagaaacaacatcgataggttattgacagaactgatgcaagaaagaaaagagtctggagaaactttcacagacatgttgggttacttgatgaagaaggaagataaccgatacttgttaaccgataaagagataagagatcaagtggtaacgatcttgtattccggttatgagactgtctctacaacctccatgatggctcttaagtatctccatgatcatccaaaagctcttgaagaactcagaagagaacatttggctataagggagagaaaacgacctgacgaaccgctcactctcgacgatattaaatcgatgaaattcactcgagctgtgatctttgagacatcaagattggcaacgattgttaatggtgtccttaggaaaactactcacgacttagaactcaacggttatttaatcccaaaaggttggagaatttacgtatacacaagagagattaactatgatacatctctttatgaagatccaatgatctttaacccatggagatggatggaaaagagcttagaatcaaagagctatttcttactctttggaggtggagttaggctttgccctggaaaggaactaggaatctcggaagtctcaagcttccttcactactttgttacaaaatatagatgggaagagaatggagaagacaaattaatggtctttccaagagtttctgcaccaaaaggataccatcttaagtgttcaccttactgactagttttgtcctaatattgaaaaatgtgtaaataaatctattaagggtcattttgtagggctaattaacctattttatctattaaatctctcaagatcatagaggagatggataatgtacagagagaaagagagaagaagaaaatggaatatagaaaaaaataaaatatttgaaatgttgagcttagtctcttatcttgtaaatttgtaacccataaatttttacatttcataattacgttctgtgttttttttt

SEQ ID NO: 28631 - protein, 465 aa, Arabidopsis thaliana
  peptide (1)..(465): Ceres Seq. ID no. 13487483
  misc_feature (212)..(462): Pfam Name: Cytochrome P450 Pfam Description: Cytochrome P450
  misc_feature (1)..(464): Homolog of NCBI NO: 20520627 NR Description: putative cytochrome P450 [Oryza sativa (japonica
  misc_feature (5)..(458): Homolog of NCBI NO: 15239203 NR Description: cytochrome p450 90A1 [Arabidopsis thaliana]
  misc_feature (4)..(458): Homolog of NCBI NO: 9587211 NR Description: cytochrome P450 [Vigna radiata]
  misc_feature (3)..(465): Homolog of NCBI NO: 27127269 NR Description: cytochrome P450 [Oryza sativa (japonica
  misc_feature (1)..(465): Homolog of NCBI NO: 5921933 NR Description: Cytochrome P450 85 (Dwarf protein)
  misc_feature (1)..(406): Homolog of NCBI NO: 30693331 NR Description: cytochrome p450, putative [Arabidopsis thaliana]
  misc_feature (1)..(465): Homolog of NCBI NO: 30693327 NR Description: cytochrome p450, putative [Arabidopsis thaliana]
  misc_feature (4)..(465): Homolog of NCBI NO: 21536828 NR Description: cytochrome P450 homolog, putative [Arabidopsis
  misc_feature (1)..(465): Homolog of NCBI NO: 9294419 NR Description: cytochrome P450 [Arabidopsis thaliana]
  misc_feature (1)..(465): Homolog of NCBI NO: 18406372 NR Description: cytochrome p450, putative [Arabidopsis thaliana]
MGIMMMILGLLVIIVCLCTALLRWNQMRYSKKGLPPGTMGWPIFGETTEFLKQGPDFMKNQRLRYGSFFKSHILGCPTIVSMDAELNRYILMNESKGLVAGYPQSMLDILGTCNIAAVHGPSHRLMRGSLLSLISPTMMKDHLLPKIDDFMRNYLCGWDDLETVDIQEKTKHMAFLSSLLQIAETLKKPEVEEYRTEFFKLVVGTLSVPIDIPGTNYRSGVQARNNIDRLLTELMQERKESGETFTDMLGYLMKKEDNRYLLTDKEIRDQVVTILYSGYETVSTTSMMALKYLHDHPKALEELRREHLAIRERKRPDEPLTLDDIKSMKFTRAVIFETSRLATIVNGVLRKTTHDLELNGYLIPKGWRIYVYTREINYDTSLYEDPMIFNPWRWMEKSLESKSYFLLFGGGVRLCPGKELGISEVSSFLHYFVTKYRWEENGEDKLMVFPRVSAPKGYHLKCSPY

SEQ ID NO: 28632 - protein, 462 aa, Arabidopsis thaliana
  peptide (1)..(462): Ceres Seq. ID no. 13487484
  misc_feature (209)..(459): Pfam Name: Cytochrome P450 Pfam Description: Cytochrome P450
  misc_feature (1)..(461): Homolog of NCBI NO: 20520627 NR Description: putative cytochrome P450 [Oryza sativa (japonica
  misc_feature (2)..(455): Homolog of NCBI NO: 15239203 NR Description: cytochrome p450 90A1 [Arabidopsis thaliana]
  misc_feature (1)..(455): Homolog of NCBI NO: 9587211 NR Description: cytochrome P450 [Vigna radiata]
  misc_feature (1)..(462): Homolog of NCBI NO: 27127269 NR Description: cytochrome P450 [Oryza sativa (japonica
  misc_feature (1)..(462): Homolog of NCBI NO: 5921933 NR Description: Cytochrome P450 85 (Dwarf protein)
  misc_feature (1)..(403): Homolog of NCBI NO: 30693331 NR Description: cytochrome p450, putative [Arabidopsis thaliana]
  misc_feature (1)..(462): Homolog of NCBI NO: 30693327 NR Description: cytochrome p450, putative [Arabidopsis thaliana]
  misc_feature (1)..(462): Homolog of NCBI NO: 21536828 NR Description: cytochrome P450 homolog, putative [Arabidopsis
  misc_feature (1)..(462): Homolog of NCBI NO: 9294419 NR Description: cytochrome P450 [Arabidopsis thaliana]
  misc_feature (1)..(462): Homolog of NCBI NO: 18406372 NR Description: cytochrome p450, putative [Arabidopsis thaliana]
MMMILGLLVIIVCLCTALLRWNQMRYSKKGLPPGTMGWPIFGETTEFLKQGPDFMKNQRLRYGSFFKSHILGCPTIVSMDAELNRYILMNESKGLVAGYPQSMLDILGTCNIAAVHGPSHRLMRGSLLSLISPTMMKDHLLPKIDDFMRNYLCGWDDLETVDIQEKTKHMAFLSSLLQIAETLKKPEVEEYRTEFFKLVVGTLSVPIDIPGTNYRSGVQARNNIDRLLTELMQERKESGETFTDMLGYLMKKEDNRYLLTDKEIRDQVVTILYSGYETVSTTSMMALKYLHDHPKALEELRREHLAIRERKRPDEPLTLDDIKSMKFTRAVIFETSRLATIVNGVLRKTTHDLELNGYLIPKGWRIYVYTREINYDTSLYEDPMIFNPWRWMEKSLESKSYFLLFGGGVRLCPGKELGISEVSSFLHYFVTKYRWEENGEDKLMVFPRVSAPKGYHLKCSPY

SEQ ID NO: 28633 - protein, 461 aa, Arabidopsis thaliana
  peptide (1)..(461): Ceres Seq. ID no. 13487485
  misc_feature (208)..(458): Pfam Name: Cytochrome P450 Pfam Description: Cytochrome P450
  misc_feature (1)..(460): Homolog of NCBI NO: 20520627 NR Description: putative cytochrome P450 [Oryza sativa (japonica
  misc_feature (1)..(454): Homolog of NCBI NO: 15239203 NR Description: cytochrome p450 90A1 [Arabidopsis thaliana]
  misc_feature (1)..(454): Homolog of NCBI NO: 9587211 NR Description: cytochrome P450 [Vigna radiata]
  misc_feature (1)..(461): Homolog of NCBI NO: 27127269 NR Description: cytochrome P450 [Oryza sativa (japonica
  misc_feature (1)..(461): Homolog of NCBI NO: 5921933 NR Description: Cytochrome P450 85 (Dwarf protein)
  misc_feature (1)..(402): Homolog of NCBI NO: 30693331 NR Description: cytochrome p450, putative [Arabidopsis thaliana]
  misc_feature (1)..(461): Homolog of NCBI NO: 30693327 NR Description: cytochrome p450, putative [Arabidopsis thaliana]
  misc_feature (1)..(461): Homolog of NCBI NO: 21536828 NR Description: cytochrome P450 homolog, putative [Arabidopsis
  misc_feature (1)..(461): Homolog of NCBI NO: 9294419 NR Description: cytochrome P450 [Arabidopsis thaliana]
  misc_feature (1)..(461): Homolog of NCBI NO: 18406372 NR Description: cytochrome p450, putative [Arabidopsis thaliana]
MMILGLLVIIVCLCTALLRWNQMRYSKKGLPPGTMGWPIFGETTEFLKQGPDFMKNQRLRYGSFFKSHILGCPTIVSMDAELNRYILMNESKGLVAGYPQSMLDILGTCNIAAVHGPSHRLMRGSLLSLISPTMMKDHLLPKIDDFMRNYLCGWDDLETVDIQEKTKHMAFLSSLLQIAETLKKPEVEEYRTEFFKLVVGTLSVPIDIPGTNYRSGVQARNNIDRLLTELMQERKESGETFTDMLGYLMKKEDNRYLLTDKEIRDQVVTILYSGYETVSTTSMMALKYLHDHPKALEELRREHLAIRERKRPDEPLTLDDIKSMKFTRAVIFETSRLATIVNGVLRKTTHDLELNGYLIPKGWRIYVYTREINYDTSLYEDPMIFNPWRWMEKSLESKSYFLLFGGGVRLCPGKELGISEVSSFLHYFVTKYRWEENGEDKLMVFPRVSAPKGYHLKCSPY

SEQ ID NO: 28634 - DNA, 1450 bp, Arabidopsis thaliana; identical to SEQ ID NO: 24649
  misc_feature (1)..(1450): Ceres Seq. ID no. 12682693
  misc_feature: MA Experiment ID: 20000307 Result: Down-regulated in Transcription
  misc_feature: MA Experiment 20000307 PARAMETER Experiment Name: At_Germinating_Seeds_Sub_P Parameter: Age (hr) Value: 24 vs. 0
  misc_feature: MA Experiment 20000307 PARAMETER Experiment Name: At_Germinating_Seeds_Sub_P Parameter: Organism Value: A. thaliana
  misc_feature: MA Experiment 20000307 PARAMETER Experiment Name: At_Germinating_Seeds_Sub_P Parameter: Plant Line Value: WS
  misc_feature: MA Experiment 20000307 PARAMETER Experiment Name: At_Germinating_Seeds_Sub_P Parameter: Tissue Value: Germinating Seeds

SEQ ID NO: 28635 - protein, 278 aa, Arabidopsis thaliana; identical to SEQ ID NO: 23413
  peptide (1)..(278): Ceres Seq. ID no. 12682694
  misc_feature (31)..(98): Pfam Name: RNA recognition motif. (a.k.a. RRM, RBD, or RNP domain) Pfam Description: RNA recognition motif. (a.k.a. RRM, RBD, or RNP
  misc_feature (31)..(98): Pfam Name: RNA recognition motif. (a.k.a. RRM, RBD, or RNP domain) Pfam Description: RNA recognition motif. (a.k.a. RRM, RBD, or RNP
  misc_feature (30)..(247): Homolog of NCBI NO: 18414951 NR Description: RRM-containing protein
  misc_feature (28)..(263): Homolog of NCBI NO: 38344181 NR Description: OSJNBa0053K19.20 [Oryza sativa (japonica
  misc_feature (26)..(266): Homolog of NCBI NO: 38347069 NR Description: OSJNBa0006A01.10 [Oryza sativa (japonica
  misc_feature (28)..(260): Homolog of NCBI NO: 18071362 NR Description: putative splicing regulatory protein
  misc_feature (60)..(278): Homolog of NCBI NO: 25404689 NR Description: unknown protein, 64612-65506 [imported] -
  misc_feature (30)..(247): Homolog of NCBI NO: 18414951 NR Description: RRM-containing protein
  misc_feature (26)..(266): Homolog of NCBI NO: 38347069 NR Description: OSJNBa0006A01.10 [Oryza sativa (japonica
  misc_feature (60)..(278): Homolog of NCBI NO: 25404689 NR Description: unknown protein, 64612-65506 [imported] -
  misc_feature (1)..(278): Homolog of NCBI NO: 18408904 NR Description: RRM-containing protein
  misc_feature (1)..(278): Homolog of NCBI NO: 30697598 NR Description: RNA recognition motif (RRM)-containing protein
  misc_feature (1)..(278): Homolog of NCBI NO: 30697595 NR Description: RNA recognition motif (RRM)-containing protein
  misc_feature (1)..(248): Homolog of NCBI NO: 26450623 NR Description: unknown protein [Arabidopsis thaliana]
  misc_feature (60)..(278): Homolog of NCBI NO: 30697600 NR Description: RNA recognition motif (RRM)-containing protein
  misc_feature (28)..(260): Homolog of NCBI NO: 18071362 NR Description: putative splicing regulatory protein
  misc_feature (28)..(263): Homolog of NCBI NO: 38344181 NR Description: OSJNBa0053K19.20 [Oryza sativa (japonica
  misc_feature (60)..(278): Homolog of NCBI NO: 30697600 NR Description: RNA recognition motif (RRM)-containing protein
  misc_feature (1)..(248): Homolog of NCBI NO: 26450623 NR Description: unknown protein [Arabidopsis thaliana]
  misc_feature (1)..(278): Homolog of NCBI NO: 30697595 NR Description: RNA recognition motif (RRM)-containing protein
  misc_feature (1)..(278): Homolog of NCBI NO: 30697598 NR Description: RNA recognition motif (RRM)-containing protein
  misc_feature (1)..(278): Homolog of NCBI NO: 18408904 NR Description: RRM-containing protein

SEQ ID NO: 28636 - protein, 260 aa, Arabidopsis thaliana; identical to SEQ ID NO: 23414
  peptide (1)..(260): Ceres Seq. ID no. 12682695
  misc_feature (13)..(80): Pfam Name: RNA recognition motif. (a.k.a. RRM, RBD, or RNP domain) Pfam Description: RNA recognition motif. (a.k.a. RRM, RBD, or RNP
  misc_feature (13)..(80): Pfam Name: RNA recognition motif. (a.k.a. RRM, RBD, or RNP domain) Pfam Description: RNA recognition motif. (a.k.a. RRM, RBD, or RNP
  misc_feature (12)..(229): Homolog of NCBI NO: 18414951 NR Description: RRM-containing protein
  misc_feature (10)..(245): Homolog of NCBI NO: 38344181 NR Description: OSJNBa0053K19.20 [Oryza sativa (japonica
  misc_feature (8)..(248): Homolog of NCBI NO: 38347069 NR Description: OSJNBa0006A01.10 [Oryza sativa (japonica
  misc_feature (10)..(242): Homolog of NCBI NO: 18071362 NR Description: putative splicing regulatory protein
  misc_feature (42)..(260): Homolog of NCBI NO: 25404689 NR Description: unknown protein, 64612-65506 [imported] -
  misc_feature (12)..(229): Homolog of NCBI NO: 18414951 NR Description: RRM-containing protein
  misc_feature (8)..(248): Homolog of NCBI NO: 38347069 NR Description: OSJNBa0006A01.10 [Oryza sativa (japonica
  misc_feature (42)..(260): Homolog of NCBI NO: 25404689 NR Description: unknown protein, 64612-65506 [imported] -
  misc_feature (1)..(260): Homolog of NCBI NO: 18408904 NR Description: RRM-containing protein
  misc_feature (1)..(260): Homolog of NCBI NO: 30697598 NR Description: RNA recognition motif (RRM)-containing protein
  misc_feature (1)..(260): Homolog of NCBI NO: 30697595 NR Description: RNA recognition motif (RRM)-containing protein
  misc_feature (1)..(230): Homolog of NCBI NO: 26450623 NR Description: unknown protein [Arabidopsis thaliana]
  misc_feature (42)..(260): Homolog of NCBI NO: 30697600 NR Description: RNA recognition motif (RRM)-containing protein
  misc_feature (10)..(242): Homolog of NCBI NO: 18071362 NR Description: putative splicing regulatory protein
  misc_feature (10)..(245): Homolog of NCBI NO: 38344181 NR Description: OSJNBa0053K19.20 [Oryza sativa (japonica
  misc_feature (42)..(260): Homolog of NCBI NO: 30697600 NR Description: RNA recognition motif (RRM)-containing protein
  misc_feature (1)..(230): Homolog of NCBI NO: 26450623 NR Description: unknown protein [Arabidopsis thaliana]
  misc_feature (1)..(260): Homolog of NCBI NO: 30697595 NR Description: RNA recognition motif (RRM)-containing protein
  misc_feature (1)..(260): Homolog of NCBI NO: 30697598 NR Description: RNA recognition motif (RRM)-containing protein
  misc_feature (1)..(260): Homolog of NCBI NO: 18408904 NR Description: RRM-containing protein

SEQ ID NO: 28637 - protein, 219 aa, Arabidopsis thaliana; identical to SEQ ID NO: 23415
  peptide (1)..(219): Ceres Seq. ID no. 12682696
  misc_feature (1)..(188): Homolog of NCBI NO: 18414951 NR Description: RRM-containing protein
  misc_feature (1)..(204): Homolog of NCBI NO: 38344181 NR Description: OSJNBa0053K19.20 [Oryza sativa (japonica
  misc_feature (1)..(207): Homolog of NCBI NO: 38347069 NR Description: OSJNBa0006A01.10 [Oryza sativa (japonica
  misc_feature (1)..(201): Homolog of NCBI NO: 18071362 NR Description: putative splicing regulatory protein
  misc_feature (1)..(219): Homolog of NCBI NO: 25404689 NR Description: unknown protein, 64612-65506 [imported] -
  misc_feature (1)..(219): Homolog of NCBI NO: 30697600 NR Description: RNA recognition motif (RRM)-containing protein
  misc_feature (1)..(189): Homolog of NCBI NO: 26450623 NR Description: unknown protein [Arabidopsis thaliana]
  misc_feature (1)..(219): Homolog of NCBI NO: 30697595 NR Description: RNA recognition motif (RRM)-containing protein
  misc_feature (1)..(219): Homolog of NCBI NO: 30697598 NR Description: RNA recognition motif (RRM)-containing protein
  misc_feature (1)..(219): Homolog of NCBI NO: 18408904 NR Description: RRM-containing protein
  misc_feature (1)..(188): Homolog of NCBI NO: 18414951 NR Description: RRM-containing protein
  misc_feature (1)..(204): Homolog of NCBI NO: 38344181 NR Description: OSJNBa0053K19.20 [Oryza sativa (japonica
  misc_feature (1)..(207): Homolog of NCBI NO: 38347069 NR Description: OSJNBa0006A01.10 [Oryza sativa (japonica
  misc_feature (1)..(201): Homolog of NCBI NO: 18071362 NR Description: putative splicing regulatory protein
  misc_feature (1)..(219): Homolog of NCBI NO: 25404689 NR Description: unknown protein, 64612-65506 [imported] -
  misc_feature (1)..(219): Homolog of NCBI NO: 30697600 NR Description: RNA recognition motif (RRM)-containing protein
  misc_feature (1)..(189): Homolog of NCBI NO: 26450623 NR Description: unknown protein [Arabidopsis thaliana]
  misc_feature (1)..(219): Homolog of NCBI NO: 30697595 NR Description: RNA recognition motif (RRM)-containing protein
  misc_feature (1)..(219): Homolog of NCBI NO: 30697598 NR Description: RNA recognition motif (RRM)-containing protein
  misc_feature (1)..(219): Homolog of NCBI NO: 18408904 NR Description: RRM-containing protein

SEQ ID NO: 28638 - DNA, 1063 bp, Arabidopsis thaliana
  misc_feature (1)..(1063): Ceres Seq. ID no. 13486755
  misc_feature: MA Experiment ID: 20000093 Result: Up-regulated in Transcription
  misc_feature: MA Experiment 20000093 PARAMETER Experiment Name: At_42deg_Heat_cDNA_P Parameter: Temperature (deg C) Value: 42 vs. 22
  misc_feature: MA Experiment 20000093 PARAMETER Experiment Name: At_42deg_Heat_cDNA_P Parameter: Timepoint (hr) Value: 0.5
  misc_feature: MA Experiment 20000093 PARAMETER Experiment Name: At_42deg_Heat_cDNA_P Parameter: Tissue Value: Aerial
  misc_feature: MA Experiment ID: 20000111 Result: Up-regulated in Transcription
  misc_feature: MA Experiment 20000111 PARAMETER Experiment Name: At_42deg_Heat_cDNA_P Parameter: Temperature (deg C) Value: 42 vs. 22
  misc_feature: MA Experiment 20000111 PARAMETER Experiment Name: At_42deg_Heat_cDNA_P Parameter: Timepoint (hr) Value: 6
  misc_feature: MA Experiment 20000111 PARAMETER Experiment Name: At_42deg_Heat_cDNA_P Parameter: Tissue Value: Aerial
  misc_feature: MA Experiment ID: 20000171 Result: Up-regulated in Transcription
  misc_feature: MA Experiment 20000171 PARAMETER Experiment Name: At_42deg_Heat_P Parameter: Age (day) Value: 14
  misc_feature: MA Experiment 20000171 PARAMETER Experiment Name: At_42deg_Heat_P Parameter: Organism Value: A. thaliana
  misc_feature: MA Experiment 20000171 PARAMETER Experiment Name: At_42deg_Heat_P Parameter: Plant Line Value: WS
  misc_feature: MA Experiment 20000171 PARAMETER Experiment Name: At_42deg_Heat_P Parameter: Temperature (deg C) Value: 42 vs. 22
  misc_feature: MA Experiment 20000171 PARAMETER Experiment Name: At_42deg_Heat_P Parameter: Timepoint (hr) Value: 1
  misc_feature: MA Experiment 20000171 PARAMETER Experiment Name: At_42deg_Heat_P Parameter: Tissue Value: Aerial
  misc_feature: MA Experiment ID: 20000234 Result: Up-regulated in Transcription
  misc_feature: MA Experiment 20000234 PARAMETER Experiment Name: At_Siliques_P Parameter: Age (day) Value: 21
  misc_feature: MA Experiment 20000234 PARAMETER Experiment Name: At_Siliques_P Parameter: Organism Value: A. thaliana
  misc_feature: MA Experiment 20000234 PARAMETER Experiment Name: At_Siliques_P Parameter: Plant Line Value: WS
  misc_feature: MA Experiment 20000234 PARAMETER Experiment Name: At_Siliques_P Parameter: Tissue Value: Less Than 5mm Siliques vs. Whole Plant
  misc_feature: MA Experiment ID: 20000235 Result: Up-regulated in Transcription
  misc_feature: MA Experiment 20000235 PARAMETER Experiment Name: At_Siliques_P Parameter: Age (day) Value: 21
  misc_feature: MA Experiment 20000235 PARAMETER Experiment Name: At_Siliques_P Parameter: Organism Value: A. thaliana
  misc_feature: MA Experiment 20000235 PARAMETER Experiment Name: At_Siliques_P Parameter: Plant Line Value: WS
  misc_feature: MA Experiment 20000235 PARAMETER Experiment Name: At_Siliques_P Parameter: Tissue Value: 5-10mm Siliques vs. Whole Plant
  misc_feature: MA Experiment ID: 20000264 Result: Up-regulated in Transcription
  misc_feature: MA Experiment 20000264 PARAMETER Experiment Name: At_Open_Flower_P Parameter: Age (day) Value: 21
  misc_feature: MA Experiment 20000264 PARAMETER Experiment Name: At_Open_Flower_P Parameter: Plant Line Value: WS
  misc_feature: MA Experiment 20000264 PARAMETER Experiment Name: At_Open_Flower_P Parameter: Tissue Value: Open Flower vs. Whole Plant
  misc_feature: MA Experiment ID: 20000286 Result: Up-regulated in Transcription
  misc_feature: MA Experiment 20000286 PARAMETER Experiment Name: At_Open_Flower_P Parameter: Age (day) Value: 21
  misc_feature: MA Experiment 20000286 PARAMETER Experiment Name: At_Open_Flower_P Parameter: Plant Line Value: WS
  misc_feature: MA Experiment 20000286 PARAMETER Experiment Name: At_Open_Flower_P Parameter: Tissue Value: Half Open vs. Whole Plant
  misc_feature: MA Experiment ID: 20001457 Result: Up-regulated in Transcription
  misc_feature: MA Experiment 20001457 PARAMETER Experiment Name: At_50mM_NH4NO3_L-to-H_P Parameter: Age (day) Value: Undefined
  misc_feature: MA Experiment 20001457 PARAMETER Experiment Name: At_50mM_NH4NO3_L-to-H_P Parameter: Organism Value: Undefined
  misc_feature: MA Experiment 20001457 PARAMETER Experiment Name: At_50mM_NH4NO3_L-to-H_P Parameter: Plant Line Value: Undefined
  misc_feature: MA Experiment 20001457 PARAMETER Experiment Name: At_50mM_NH4NO3_L-to-H_P Parameter: Timepoint (hr) Value: 0.5
  misc_feature: MA Experiment 20001457 PARAMETER Experiment Name: At_50mM_NH4NO3_L-to-H_P Parameter: Tissue Value: Siliques
  misc_feature: MA Experiment 20001457 PARAMETER Experiment Name: At_50mM_NH4NO3_L-to-H_P Parameter: Treatment Value: 50mM NH4NO3 vs. 100mM Manitol
  misc_feature: MA Experiment ID: 20001906 Result: Down-regulated in Transcription
  misc_feature: MA Experiment 20001906 PARAMETER Experiment Name: At_Drought_Reproduction_P Parameter: Age (day) Value: 35
  misc_feature: MA Experiment 20001906 PARAMETER Experiment Name: At_Drought_Reproduction_P Parameter: Organism Value: A. thaliana
  misc_feature: MA Experiment 20001906 PARAMETER Experiment Name: At_Drought_Reproduction_P Parameter: Plant Line Value: WS
  misc_feature: MA Experiment 20001906 PARAMETER Experiment Name: At_Drought_Reproduction_P Parameter: Timepoint (day) Value: 5
  misc_feature: MA Experiment 20001906 PARAMETER Experiment Name: At_Drought_Reproduction_P Parameter: Tissue Value: Siliques
  misc_feature: MA Experiment 20001906 PARAMETER Experiment Name: At_Drought_Reproduction_P Parameter: Treatment Value: Drought vs. No Drought
aaatcacttgctagtactcttcacactctctacaatgttgtctatgctctggttccttctatctcttctctctcttcttctacttccttgtctccgaccttgctttcctgctaaaggatctctgaaaaacaaaaagaagattgacaagggaacttatgtggtcggagaggaggagacacctaaagagcttcagagagagctgatgccgagacacgtggcagtgataatggacggaaaccggagatgggctaaacagaccggattgttgacgtcacaaggctacgaggctggagctaaacggcttctcgagttcgctgacctctgcttcaaactagggataaatactgtctcagcttttgctttctccactgagaattggggaagacacaagattgaagtcaaatgcttgatgtatttgttccaacgttacctcaagtcaaagatccaatttttccagagcaaggaaatccgagtttctgttatcgggaatcttgcgaagatccctgagtctctcctccgaacagttcacgagttagaggaagctacaaagagttacaagaagaagcatctcatcttggccatagattacagcgggagattcgacatcttgggtgcttgcaagaacattgtgaagaaatcagaacaaggtttgatccgagaggaagacgtggacgagacgttgttcgagagagagcttcagactcggtgtaccgagttcccaagtcctgatctcttgattaggactagtggggaacagaggattagtaacttcttcttgtggcagctcgcttataccgagtttttcttttcgcctgtactttggcctgatttcgataagcagaagtttatagaggccctggtttcgtatcagcgcagggatagacgatttggctcccggctttgatccacatttgatcctatggtctgtcatgtttcctctgttttgttctgtttctctctgtgtctttatgttcatctgacttttgcagaaataattatactgtctagtctctcgtagatcaatgtggtatttccaatgaagtaacatattttatgtgttgcg

SEQ ID NO: 28639 - protein, 300 aa, Arabidopsis thaliana
  peptide (1)..(300): Ceres Seq. ID no. 13486756
  misc_feature (75)..(298): Pfam Name: Putative undecaprenyl diphosphate synthase Pfam Description: Putative undecaprenyl diphosphate synthase
  misc_feature (46)..(299): Homolog of NCBI NO: 15237748 NR Description: dehydrodolichyl diphosphate synthase
  misc_feature (65)..(300): Homolog of NCBI NO: 18424148 NR Description: dehydrodolichyl diphosphate synthase
  misc_feature (12)..(300): Homolog of NCBI NO: 8843800 NR Description: cis-prenyltransferase homolog-like
  misc_feature (18)..(300): Homolog of NCBI NO: 7447521 NR Description: hypothetical protein At2g23410 [imported] -
  misc_feature (12)..(300): Homolog of NCBI NO: 18400264 NR Description: dehydrodolichyl diphosphate synthase
  misc_feature (76)..(300): Homolog of NCBI NO: 8843798 NR Description: undecaprenyl pyrophosphate synthetase-like
  misc_feature (68)..(300): Homolog of NCBI NO: 8843799 NR Description: undecaprenyl pyrophosphate synthetase-like
  misc_feature (3)..(300): Homolog of NCBI NO: 18424144 NR Description: dehydrodolichyl diphosphate synthase
  misc_feature (12)..(300): Homolog of NCBI NO: 21618322 NR Description: undecaprenyl pyrophosphate synthetase-like
  misc_feature (12)..(300): Homolog of NCBI NO: 18424146 NR Description: dehydrodolichyl diphosphate synthase
NHLLVLFTLSTMLSMLWFLLSLLSLLLLPCLRPCFPAKGSLKNKKKIDKGTYVVGEEETPKELQRELMPRHVAVIMDGNRRWAKQTGLLTSQGYEAGAKRLLEFADLCFKLGINTVSAFAFSTENWGRHKIEVKCLMYLFQRYLKSKIQFFQSKEIRVSVIGNLAKIPESLLRTVHELEEATKSYKKKHLILAIDYSGRFDILGACKNIVKKSEQGLIREEDVDETLFERELQTRCTEFPSPDLLIRTSGEQRISNFFLWQLAYTEFFFSPVLWPDFDKQKFIEALVSYQRRDRRFGSRL

SEQ ID NO: 28640 - protein, 289 aa, Arabidopsis thaliana
  peptide (1)..(289): Ceres Seq. ID no. 13486757
  misc_feature (64)..(287): Pfam Name: Putative undecaprenyl diphosphate synthase Pfam Description: Putative undecaprenyl diphosphate synthase
  misc_feature (35)..(288): Homolog of NCBI NO: 15237748 NR Description: dehydrodolichyl diphosphate synthase
  misc_feature (54)..(289): Homolog of NCBI NO: 18424148 NR Description: dehydrodolichyl diphosphate synthase
  misc_feature (1)..(289): Homolog of NCBI NO: 8843800 NR Description: cis-prenyltransferase homolog-like
  misc_feature (7)..(289): Homolog of NCBI NO: 7447521 NR Description: hypothetical protein At2g23410 [imported] -
  misc_feature (1)..(289): Homolog of NCBI NO: 18400264 NR Description: dehydrodolichyl diphosphate synthase
  misc_feature (65)..(289): Homolog of NCBI NO: 8843798 NR Description: undecaprenyl pyrophosphate synthetase-like
  misc_feature (57)..(289): Homolog of NCBI NO: 8843799 NR Description: undecaprenyl pyrophosphate synthetase-like
  misc_feature (1)..(289): Homolog of NCBI NO: 18424144 NR Description: dehydrodolichyl diphosphate synthase
  misc_feature (1)..(289): Homolog of NCBI NO: 21618322 NR Description: undecaprenyl pyrophosphate synthetase-like
  misc_feature (1)..(289): Homolog of NCBI NO: 18424146 NR Description: dehydrodolichyl diphosphate synthase
MLSMLWFLLSLLSLLLLPCLRPCFPAKGSLKNKKKIDKGTYVVGEEETPKELQRELMPRHVAVIMDGNRRWAKQTGLLTSQGYEAGAKRLLEFADLCFKLGINTVSAFAFSTENWGRHKIEVKCLMYLFQRYLKSKIQFFQSKEIRVSVIGNLAKIPESLLRTVHELEEATKSYKKKHLILAIDYSGRFDILGACKNIVKKSEQGLIREEDVDETLFERELQTRCTEFPSPDLLIRTSGEQRISNFFLWQLAYTEFFFSPVLWPDFDKQKFIEALVSYQRRDRRFGSRL

SEQ ID NO: 28641 - protein, 286 aa, Arabidopsis thaliana
  peptide (1)..(286): Ceres Seq. ID no. 13486758
  misc_feature (61)..(284): Pfam Name: Putative undecaprenyl diphosphate synthase Pfam Description: Putative undecaprenyl diphosphate synthase
  misc_feature (32)..(285): Homolog of NCBI NO: 15237748 NR Description: dehydrodolichyl diphosphate synthase
  misc_feature (51)..(286): Homolog of NCBI NO: 18424148 NR Description: dehydrodolichyl diphosphate synthase
  misc_feature (1)..(286): Homolog of NCBI NO: 8843800 NR Description: cis-prenyltransferase homolog-like
  misc_feature (4)..(286): Homolog of NCBI NO: 7447521 NR Description: hypothetical protein At2g23410 [imported] -
  misc_feature (1)..(286): Homolog of NCBI NO: 18400264 NR Description: dehydrodolichyl diphosphate synthase
  misc_feature (62)..(286): Homolog of NCBI NO: 8843798 NR Description: undecaprenyl pyrophosphate synthetase-like
  misc_feature (54)..(286): Homolog of NCBI NO: 8843799 NR Description: undecaprenyl pyrophosphate synthetase-like
  misc_feature (1)..(286): Homolog of NCBI NO: 18424144 NR Description: dehydrodolichyl diphosphate synthase
  misc_feature (1)..(286): Homolog of NCBI NO: 21618322 NR Description: undecaprenyl pyrophosphate synthetase-like
  misc_feature (1)..(286): Homolog of NCBI NO: 18424146 NR Description: dehydrodolichyl diphosphate synthase
MLWFLLSLLSLLLLPCLRPCFPAKGSLKNKKKIDKGTYVVGEEETPKELQRELMPRHVAVIMDGNRRWAKQTGLLTSQGYEAGAKRLLEFADLCFKLGINTVSAFAFSTENWGRHKIEVKCLMYLFQRYLKSKIQFFQSKEIRVSVIGNLAKIPESLLRTVHELEEATKSYKKKHLILAIDYSGRFDILGACKNIVKKSEQGLIREEDVDETLFERELQTRCTEFPSPDLLIRTSGEQRISNFFLWQLAYTEFFFSPVLWPDFDKQKFIEALVSYQRRDRRFGSRL

SEQ ID NO: 28642 - DNA, 1521 bp, Arabidopsis thaliana
  misc_feature (1)..(1521): Ceres Seq. ID no. 13580594
  misc_feature: MA Experiment ID: 108433 Result: Up-regulated in Transcription
  misc_feature: MA Experiment 108433 PARAMETER Experiment Name: At_rhl_Mutant2_cDNA_P Parameter: Age (day) Value: 7
  misc_feature: MA Experiment 108433 PARAMETER Experiment Name: At_rhl_Mutant2_cDNA_P Parameter: Organism Value: A. thaliana
  misc_feature: MA Experiment 108433 PARAMETER Experiment Name: At_rhl_Mutant2_cDNA_P Parameter: Plant Line Value: rhl Mutant vs. wt landsburg
  misc_feature: MA Experiment 108433 PARAMETER Experiment Name: At_rhl_Mutant2_cDNA_P Parameter: Tissue Value: Roots
  misc_feature: MA Experiment ID: 108461 Result: Down-regulated in Transcription
  misc_feature: MA Experiment 108461 PARAMETER Experiment Name: At_Germinating_Seeds_cDNA_P Parameter: Age (day) Value: 1 vs. 0
  misc_feature: MA Experiment 108461 PARAMETER Experiment Name: At_Germinating_Seeds_cDNA_P Parameter: Tissue Value: Germinating Seeds
  misc_feature: MA Experiment ID: 108462 Result: Down-regulated in Transcription
  misc_feature: MA Experiment 108462 PARAMETER Experiment Name: At_Germinating_Seeds_cDNA_P Parameter: Age (day) Value: 2 vs. 0
  misc_feature: MA Experiment 108462 PARAMETER Experiment Name: At_Germinating_Seeds_cDNA_P Parameter: Tissue Value: Germinating Seeds
  misc_feature: MA Experiment ID: 108463 Result: Down-regulated in Transcription
  misc_feature: MA Experiment 108463 PARAMETER Experiment Name: At_Germinating_Seeds_cDNA_P Parameter: Age (day) Value: 3 vs. 0
  misc_feature: MA Experiment 108463 PARAMETER Experiment Name: At_Germinating_Seeds_cDNA_P Parameter: Tissue Value: Germinating Seeds
  misc_feature: MA Experiment ID: 108464 Result: Down-regulated in Transcription
  misc_feature: MA Experiment 108464 PARAMETER Experiment Name: At_Germinating_Seeds_cDNA_P Parameter: Age (day) Value: 4 vs. 0
  misc_feature: MA Experiment 108464 PARAMETER Experiment Name: At_Germinating_Seeds_cDNA_P Parameter: Tissue Value: Germinating Seeds
  misc_feature: MA Experiment ID: 108573 Result: Up-regulated in Transcription
  misc_feature: MA Experiment 108573 PARAMETER Experiment Name: At_Drought_cDNA_P Parameter: Timepoint (hr) Value: 6
  misc_feature: MA Experiment 108573 PARAMETER Experiment Name: At_Drought_cDNA_P Parameter: Tissue Value: Aerial
  misc_feature: MA Experiment 108573 PARAMETER Experiment Name: At_Drought_cDNA_P Parameter: Treatment Value: Drought vs. No Drought
  misc_feature: MA Experiment ID: 20000180 Result: Down-regulated in Transcription
  misc_feature: MA Experiment 20000180 PARAMETER Experiment Name: At_Germinating_Seeds_P Parameter: Age (hr) Value: 24 vs. 0
  misc_feature: MA Experiment 20000180 PARAMETER Experiment Name: At_Germinating_Seeds_P Parameter: Tissue Value: Germinating Seeds
  misc_feature: MA Experiment ID: 20000185 Result: Up-regulated in Transcription
  misc_feature: MA Experiment 20000185 PARAMETER Experiment Name: At_Roots__P Parameter: Age (day) Value: 7 vs. 21
  misc_feature: MA Experiment 20000185 PARAMETER Experiment Name: At_Roots__P Parameter: Organism Value: A. thaliana
  misc_feature: MA Experiment 20000185 PARAMETER Experiment Name: At_Roots__P Parameter: Tissue Value: Roots vs. Whole Plant
  misc_feature: MA Experiment ID: 20000235 Result: Up-regulated in Transcription
  misc_feature: MA Experiment 20000235 PARAMETER Experiment Name: At_Siliques_P Parameter: Age (day) Value: 21
  misc_feature: MA Experiment 20000235 PARAMETER Experiment Name: At_Siliques_P Parameter: Organism Value: A. thaliana
  misc_feature: MA Experiment 20000235 PARAMETER Experiment Name: At_Siliques_P Parameter: Plant Line Value: WS
  misc_feature: MA Experiment 20000235 PARAMETER Experiment Name: At_Siliques_P Parameter: Tissue Value: 5-10mm Siliques vs. Whole Plant
  misc_feature: MA Experiment ID: 20000439 Result: Up-regulated in Transcription
  misc_feature: MA Experiment 20000439 PARAMETER Experiment Name: At_Roots__P Parameter: Age (day) Value: 14 vs. 21
  misc_feature: MA Experiment 20000439 PARAMETER Experiment Name: At_Roots__P Parameter: Organism Value: A. thaliana
  misc_feature: MA Experiment 20000439 PARAMETER Experiment Name: At_Roots__P Parameter: Tissue Value: Roots vs. Whole Plant
  misc_feature: MA Experiment ID: 20000574 Result: Up-regulated in Transcription
  misc_feature: MA Experiment 20000574 PARAMETER Experiment Name: At_100uM_ABA_Mutants__P Parameter: Organism Value: A. thaliana
  misc_feature: MA Experiment 20000574 PARAMETER Experiment Name: At_100uM_ABA_Mutants__P Parameter: Plant Line Value: CS23 vs. Ler wt
  misc_feature: MA Experiment 20000574 PARAMETER Experiment Name: At_100uM_ABA_Mutants__P Parameter: Timepoint (hr) Value: N/A
  misc_feature: MA Experiment 20000574 PARAMETER Experiment Name: At_100uM_ABA_Mutants__P Parameter: Tissue Value: Whole Plant
  misc_feature: MA Experiment 20000574 PARAMETER Experiment Name: At_100uM_ABA_Mutants__P Parameter: Treatment Value: None
gtgaacaagattaaaaagacgacttctcttttaacttattcctcctctgcttcttcaagatccattgtctgcaatttcaatcccttgtctcgtcatggattccgtcttctctaacgttgctcgtgctcccgaagatcctattctcggtgtaactgttgcttacaacaatgatcctagtcctgttaagatcaatttgggtgtcggtgcctaccgaactgaggaagggaagcctcttgttcttgatgtggtgcgtaaggcagagcaacagctagtgaacgatccgtctcgggtcaaggaatacattcccattgttggtatttccgattttaacaagttaagcgccaagctcatcttaggtgctgacagtcctgcgattacagaaagtagagttactacagtccagtgcttgtctggtactggttcgttgagagttggggctgagtttctcaaaacacactaccaccaaagtgtcatttacattccaaaaccaacttgggggaaccatcccaaagttttcaacttggcaggcttgtctgtggagtatttccgctactatgatcctgcaacccgtggtcttgacttcaaaggcttgctcgaggatcttggcgctgcaccatctggagctattgtcttacttcatgcatgtgcacacaatcccactggagttgacccaacctctgaacagtgggaacagattcgacagctgatgagatctaaaagcttattacccttttttgatagtgcatatcagggttttgctagtggtagccttgacacagatgcacaatctgtccgtacatttgttgctgatggcggtgaatgcttgatagctcaaagttacgccaaaaatatgggactttatggggagcgtgttggtgcccttagcattgtctgcaagtcagcagatgtggctagtaaggttgagagccaggtgaagcttgttgtgcggcccatgtattcgagcccccctattcatggagcatcaattgttgccaccattctaaaaagcagtgatatgtacaacaactggaccatcgagctgaaagaaatggctgaccgtataaagagcatgcgccaacagttatttgaagctatacaagctagaggtacacctggtgactggagtcatattatcaaacagattgggatgtttacatttactggattgaacaaggagcaagttgaattcatgaccaaagagttccacatttacatgacctctgatgggagaataagcatggcaggtctaagttcgaagacagtgcctcaccttgccgatgctatgcatgctgcagtgacccgcctcggctaaactagcgaccatacatttttttgctgtttctacaaataaaatgggacaaaaaaaaagaacaccgtttttgttggcttatatactatggtttttttctgatggtaccatatgtttcctcatgtcttttgactaaagatggttgaaccaaaaccaaagtgaggattgtgacattgagatctaccgtttctaaggaaaatattggttacttt

SEQ ID NO: 28643 - protein, 405 aa, Arabidopsis thaliana
  peptide (1)..(405): Ceres Seq. ID no. 15222734
  misc_feature (84)..(401): Pfam Name: Aminotransferase class I and II Pfam Description: Aminotransferase class I and II
  misc_feature (84)..(401): Pfam Name: Aminotransferase class I and II Pfam Description: Aminotransferase class I and II
  misc_feature (1)..(405): Homolog of NCBI NO: 693690 NR Description: aspartate aminotransferase
  misc_feature (1)..(405): Homolog of NCBI NO: 693690 NR Description: aspartate aminotransferase
  misc_feature (1)..(405): Homolog of NCBI NO: 15239772 NR Description: aspartate aminotransferase, cytoplasmic isozyme 1
  misc_feature (1)..(405): Homolog of NCBI NO: 15239772 NR Description: aspartate aminotransferase, cytoplasmic isozyme 1
MDSVFSNVARAPEDPILGVTVAYNNDPSPVKINLGVGAYRTEEGKPLVLDVVRKAEQQLVNDPSRVKEYIPIVGISDFNKLSAKLILGADSPAITESRVTTVQCLSGTGSLRVGAEFLKTHYHQSVIYIPKPTWGNHPKVFNLAGLSVEYFRYYDPATRGLDFKGLLEDLGAAPSGAIVLLHACAHNPTGVDPTSEQWEQIRQLMRSKSLLPFFDSAYQGFASGSLDTDAQSVRTFVADGGECLIAQSYAKNMGLYGERVGALSIVCKSADVASKVESQVKLVVRPMYSSPPIHGASIVATILKSSDMYNNWTIELKEMADRIKSMRQQLFEAIQARGTPGDWSHIIKQIGMFTFTGLNKEQVEFMTKEFHIYMTSDGRISMAGLSSKTVPHLADAMHAAVTRLG

SEQ ID NO: 28644 - DNA, 1803 bp, Arabidopsis thaliana
  misc_feature (1)..(1803): Ceres Seq. ID no. 13494313
  misc_feature: MA Experiment ID: 108435 Result: Down-regulated in Transcription
  misc_feature: MA Experiment 108435 PARAMETER Experiment Name: At_stm_Mutants_cDNA_P Parameter: Plant Line Value: wt Landsburg vs stm
  misc_feature: MA Experiment 108435 PARAMETER Experiment Name: At_stm_Mutants_cDNA_P Parameter: Tissue Value: Shoot Apical Meristem Region
  misc_feature: MA Experiment ID: 108461 Result: Up-regulated in Transcription
  misc_feature: MA Experiment 108461 PARAMETER Experiment Name: At_Germinating_Seeds_cDNA_P Parameter: Age (day) Value: 1 vs. 0
  misc_feature: MA Experiment 108461 PARAMETER Experiment Name: At_Germinating_Seeds_cDNA_P Parameter: Tissue Value: Germinating Seeds
  misc_feature: MA Experiment ID: 108462 Result: Up-regulated in Transcription
  misc_feature: MA Experiment 108462 PARAMETER Experiment Name: At_Germinating_Seeds_cDNA_P Parameter: Age (day) Value: 2 vs. 0
  misc_feature: MA Experiment 108462 PARAMETER Experiment Name: At_Germinating_Seeds_cDNA_P Parameter: Tissue Value: Germinating Seeds
  misc_feature: MA Experiment ID: 108463 Result: Up-regulated in Transcription
  misc_feature: MA Experiment 108463 PARAMETER Experiment Name: At_Germinating_Seeds_cDNA_P Parameter: Age (day) Value: 3 vs. 0
  misc_feature: MA Experiment 108463 PARAMETER Experiment Name: At_Germinating_Seeds_cDNA_P Parameter: Tissue Value: Germinating Seeds
  misc_feature: MA Experiment ID: 108464 Result: Up-regulated in Transcription
  misc_feature: MA Experiment 108464 PARAMETER Experiment Name: At_Germinating_Seeds_cDNA_P Parameter: Age (day) Value: 4 vs. 0
  misc_feature: MA Experiment 108464 PARAMETER Experiment Name: At_Germinating_Seeds_cDNA_P Parameter: Tissue Value: Germinating Seeds
  misc_feature: MA Experiment ID: 108488 Result: Up-regulated in Transcription
  misc_feature: MA Experiment ID: 108577 Result: Up-regulated in Transcription
  misc_feature: MA Experiment 108577 PARAMETER Experiment Name: At_42deg_Heat_cDNA_P Parameter: Temperature (deg C) Value: 42 vs. 22
  misc_feature: MA Experiment 108577 PARAMETER Experiment Name: At_42deg_Heat_cDNA_P Parameter: Timepoint (hr) Value: 6
  misc_feature: MA Experiment 108577 PARAMETER Experiment Name: At_42deg_Heat_cDNA_P Parameter: Tissue Value: Aerial
  misc_feature: MA Experiment ID: 108594 Result: Down-regulated in Transcription
  misc_feature: MA Experiment 108594 PARAMETER Experiment Name: At_Ler-rhl_Root_cDNA_P Parameter: Plant Line Value: null
  misc_feature: MA Experiment ID: 20000088 Result: Down-regulated in Transcription
  misc_feature: MA Experiment 20000088 PARAMETER Experiment Name: At_100uM_ABA_Mutants_cDNA_P Parameter: Plant Line Value: Landsberg
  misc_feature: MA Experiment 20000088 PARAMETER Experiment Name: At_100uM_ABA_Mutants_cDNA_P Parameter: Timepoint (hr) Value: 6
  misc_feature: MA Experiment 20000088 PARAMETER Experiment Name: At_100uM_ABA_Mutants_cDNA_P Parameter: Tissue Value: Aerial
  misc_feature: MA Experiment 20000088 PARAMETER Experiment Name: At_100uM_ABA_Mutants_cDNA_P Parameter: Treatment Value: 100uM ABA vs. No Treatment
  misc_feature: MA Experiment ID: 20000113 Result: Up-regulated in Transcription
  misc_feature: MA Experiment 20000113 PARAMETER Experiment Name: At_42deg_Heat_cDNA_P Parameter: Temperature (deg C) Value: 42 vs. 22
  misc_feature: MA Experiment 20000113 PARAMETER Experiment Name: At_42deg_Heat_cDNA_P Parameter: Timepoint (hr) Value: 8
  misc_feature: MA Experiment 20000113 PARAMETER Experiment Name: At_42deg_Heat_cDNA_P Parameter: Tissue Value: Aerial
  misc_feature: MA Experiment ID: 20000117 Result: Down-regulated in Transcription
  misc_feature: MA Experiment 20000117 PARAMETER Experiment Name: At_100uM_ABA_Mutants_cDNA_P Parameter: Plant Line Value: Columbia
  misc_feature: MA Experiment 20000117 PARAMETER Experiment Name: At_100uM_ABA_Mutants_cDNA_P Parameter: Timepoint (hr) Value: 6
  misc_feature: MA Experiment 20000117 PARAMETER Experiment Name: At_100uM_ABA_Mutants_cDNA_P Parameter: Tissue Value: Aerial
  misc_feature: MA Experiment 20000117 PARAMETER Experiment Name: At_100uM_ABA_Mutants_cDNA_P Parameter: Treatment Value: 100uM ABA vs. No Treatment
  misc_feature: MA Experiment ID: 20000180 Result: Up-regulated in Transcription
  misc_feature: MA Experiment 20000180 PARAMETER Experiment Name: At_Germinating_Seeds_P Parameter: Age (hr) Value: 24 vs. 0
  misc_feature: MA Experiment 20000180 PARAMETER Experiment Name: At_Germinating_Seeds_P Parameter: Tissue Value: Germinating Seeds
  misc_feature: MA Experiment ID: 20000185 Result: Down-regulated in Transcription
  misc_feature: MA Experiment 20000185 PARAMETER Experiment Name: At_Roots__P Parameter: Age (day) Value: 7 vs. 21
  misc_feature: MA Experiment 20000185 PARAMETER Experiment Name: At_Roots__P Parameter: Organism Value: A. thaliana
  misc_feature: MA Experiment 20000185 PARAMETER Experiment Name: At_Roots__P Parameter: Tissue Value: Roots vs. Whole Plant
  misc_feature: MA Experiment ID: 20000264 Result: Down-regulated in Transcription
  misc_feature: MA Experiment 20000264 PARAMETER Experiment Name: At_Open_Flower_P Parameter: Age (day) Value: 21
  misc_feature: MA Experiment 20000264 PARAMETER Experiment Name: At_Open_Flower_P Parameter: Plant Line Value: WS
  misc_feature: MA Experiment 20000264 PARAMETER Experiment Name: At_Open_Flower_P Parameter: Tissue Value: Open Flower vs. Whole Plant
  misc_feature: MA Experiment ID: 20000286 Result: Down-regulated in Transcription
  misc_feature: MA Experiment 20000286 PARAMETER Experiment Name: At_Open_Flower_P Parameter: Age (day) Value: 21
  misc_feature: MA Experiment 20000286 PARAMETER Experiment Name: At_Open_Flower_P Parameter: Plant Line Value: WS
  misc_feature: MA Experiment 20000286 PARAMETER Experiment Name: At_Open_Flower_P Parameter: Tissue Value: Half Open vs. Whole Plant
  misc_feature: MA Experiment ID: 20000308 Result: Down-regulated in Transcription
  misc_feature: MA Experiment 20000308 PARAMETER Experiment Name: At_100mM_NaCl__P Parameter: Age (day) Value: 17
  misc_feature: MA Experiment 20000308 PARAMETER Experiment Name: At_100mM_NaCl__P Parameter: Organism Value: A. thaliana
  misc_feature: MA Experiment 20000308 PARAMETER Experiment Name: At_100mM_NaCl__P Parameter: Plant Line Value: WS
  misc_feature: MA Experiment 20000308 PARAMETER Experiment Name: At_100mM_NaCl__P Parameter: Timepoint (hr) Value: 72
  misc_feature: MA Experiment 20000308 PARAMETER Experiment Name: At_100mM_NaCl__P Parameter: Tissue Value: Whole Plant
  misc_feature: MA Experiment 20000308 PARAMETER Experiment Name: At_100mM_NaCl__P Parameter: Treatment Value: 100mM NaCl vs. No Treatment
  misc_feature: MA Experiment ID: 20000438 Result: Up-regulated in Transcription
  misc_feature: MA Experiment 20000438 PARAMETER Experiment Name: At_Shoots__P Parameter: Age (day) Value: 14
  misc_feature: MA Experiment 20000438 PARAMETER Experiment Name: At_Shoots__P Parameter: Tissue Value: Shoots vs. Whole Plant
  misc_feature: MA Experiment ID: 20000439 Result: Down-regulated in Transcription
  misc_feature: MA Experiment 20000439 PARAMETER Experiment Name: At_Roots__P Parameter: Age (day) Value: 14 vs. 21
  misc_feature: MA Experiment 20000439 PARAMETER Experiment Name: At_Roots__P Parameter: Organism Value: A. thaliana
  misc_feature: MA Experiment 20000439 PARAMETER Experiment Name: At_Roots__P Parameter: Tissue Value: Roots vs. Whole Plant
  misc_feature: MA Experiment ID: 20000794 Result: Down-regulated in Transcription
  misc_feature: MA Experiment 20000794 PARAMETER Experiment Name: At_Petals_P Parameter: Age (day) Value: 23-25 days
  misc_feature: MA Experiment 20000794 PARAMETER Experiment Name: At_Petals_P Parameter: Plant Line Value: WS
  misc_feature: MA Experiment 20000794 PARAMETER Experiment Name: At_Petals_P Parameter: Tissue Value: Petals vs. Whole plant
  misc_feature: MA Experiment ID: 20001557 Result: Down-regulated in Transcription
  misc_feature: MA Experiment 20001557 PARAMETER Experiment Name: At_Drought_Soil_Dry_P Parameter: Age (day) Value: 27
  misc_feature: MA Experiment 20001557 PARAMETER Experiment Name: At_Drought_Soil_Dry_P Parameter: Organism Value: A. thaliana
  misc_feature: MA Experiment 20001557 PARAMETER Experiment Name: At_Drought_Soil_Dry_P Parameter: Plant Line Value: WS
  misc_feature: MA Experiment 20001557 PARAMETER Experiment Name: At_Drought_Soil_Dry_P Parameter: Post Timepoint (hr) Value: 3
  misc_feature: MA Experiment 20001557 PARAMETER Experiment Name: At_Drought_Soil_Dry_P Parameter: Post-Treatment Value: Re-Water vs. No Drought
  misc_feature: MA Experiment 20001557 PARAMETER Experiment Name: At_Drought_Soil_Dry_P Parameter: Timepoint (day) Value: 13
  misc_feature: MA Experiment 20001557 PARAMETER Experiment Name: At_Drought_Soil_Dry_P Parameter: Treatment Value: Drought vs. No Drought
  misc_feature: MA Experiment ID: 20001560 Result: Down-regulated in Transcription
  misc_feature: MA Experiment 20001560 PARAMETER Experiment Name: At_Drought_Soil_Dry_P Parameter: Age (day) Value: 28
  misc_feature: MA Experiment 20001560 PARAMETER Experiment Name: At_Drought_Soil_Dry_P Parameter: Organism Value: A. thaliana
  misc_feature: MA Experiment 20001560 PARAMETER Experiment Name: At_Drought_Soil_Dry_P Parameter: Plant Line Value: WS
  misc_feature: MA Experiment 20001560 PARAMETER Experiment Name: At_Drought_Soil_Dry_P Parameter: Post Timepoint (hr) Value: None
  misc_feature: MA Experiment 20001560 PARAMETER Experiment Name: At_Drought_Soil_Dry_P Parameter: Post-Treatment Value: None
  misc_feature: MA Experiment 20001560 PARAMETER Experiment Name: At_Drought_Soil_Dry_P Parameter: Timepoint (day) Value: 14
  misc_feature: MA Experiment 20001560 PARAMETER Experiment Name: At_Drought_Soil_Dry_P Parameter: Treatment Value: Drought vs. No Drought
  misc_feature: MA Experiment ID: 20001905 Result: Down-regulated in Transcription
  misc_feature: MA Experiment 20001905 PARAMETER Experiment Name: At_Drought_Reproduction_P Parameter: Age (day) Value: 40
  misc_feature: MA Experiment 20001905 PARAMETER Experiment Name: At_Drought_Reproduction_P Parameter: Organism Value: A. thaliana
  misc_feature: MA Experiment 20001905 PARAMETER Experiment Name: At_Drought_Reproduction_P Parameter: Plant Line Value: WS
  misc_feature: MA Experiment 20001905 PARAMETER Experiment Name: At_Drought_Reproduction_P Parameter: Timepoint (day) Value: 10
  misc_feature: MA Experiment 20001905 PARAMETER Experiment Name: At_Drought_Reproduction_P Parameter: Tissue Value: Rosettes
  misc_feature: MA Experiment 20001905 PARAMETER Experiment Name: At_Drought_Reproduction_P Parameter: Treatment Value: Drought vs. No Drought
acactaatattttaactctccccactctttgccttgcccttggctctagaaccgaacgtgactctccagatagacttttggagtcacaacattgagtttgaagaggagggaagaagtgagctagggattggttcagagtgaacataaatggctctcaaggcattagactacgatactctgaatgaaaacgtcaagaagtgtcagtatgccgtaagaggtgaactttatctccgagcttctgagctgcagaaagaaggcaaaaagattattttcacaaacgttgggaaccctcatgctttaggacagaagccattgacatttcctcgccaggtggttgcgctttgccaagctccgtttctactagatgacccaaatgttggaatgctatttccagctgatgctattgcaagagctaaacattatctttccttgacttcaggcggtttaggtgcttacagtgattcaagaggccttccaggagttaggaaagaggttgctgagttcattcaacggcgtgatgggtatccaagtgacccagaactcatctttctcactgatggagctagcaaaggtgtgatgcaaatcttgaattgtgttatacgcggtaatggagatgggattctagttccggttccacagtatccactttactcagctaccatatcactgttaggtggtactcttgttccttactatcttgatgagtctgaaaactggggacttgatgttgctaaccttcgacaatccgttgctcaggctcgttctcaagggataacagtaagggcaatggtgatcattaaccctgggaacccaactggccagtgtctaagcgaagctaacataagagagatattgaagttctgttataacgagaaactggttcttctgggagacgaggtttatcagcagaacatataccaggatgagcgtccctttatcagctccaagaaggttttgatggaaatgggttcgccgttcagcaaggaagttcagcttgtatcttttcacacagtctctaaaggatattggggtgaatgtggacagcgaggtggatactttgagatgaccaacctccctccaagggttgttgaggagatatacaaggttgcatcaattgccctcagccctaatgtctctgcgcaaatctttatgggtttgatggttaatcctccaaagcctggagacatttcatatgaccagttcgcccgtgaaagcaaggggattcttgaatctttgagaagaagagcaaggctcatgacagatggattcaacagctgcaaaaacgtcgtgtgcaatttcacagaaggtgcaatgtattcgtttcctcaaatacggttaccaacgggagctctccaagctgcaaaacaagctggaaaagtgccagacgttttctactgtctcaagctcttagaagccacaggaatctccacagtacctggctctggatttggacagaaagaaggtgtgttccatctgaggacaacaatcctgccagcagaagatgagatgccggagatcatggatagcttcaagaagttcaacgacgagttcatgactcagtatgataataactttggttattcgaaaatgtgattacttcttcttctgaacgactattgtgttctgctacactctttaaagctaaatctctgtagtacactctttctctttgccctattctataaaccatatctctctctttgtgtctcttttttttgggtgtaaactctctcttgtgtctctatttctattttcaattggaaactgattaagatcttttctcaatgaaatgaagtttaggcc

SEQ ID NO: 28645 - protein, 481 aa, Arabidopsis thaliana
  peptide (1)..(481): Ceres Seq. ID no. 13494314
  misc_feature (118)..(465): Pfam Name: Aminotransferase class I and II Pfam Description: Aminotransferase class I and II
  misc_feature (1)..(472): Homolog of NCBI NO: 37533928 NR Description: putative alanine aminotransferase
  misc_feature (4)..(472): Homolog of NCBI NO: 7434113 NR Description: alanine transaminase (EC 2.6.1.2) - Chlamydomonas
  misc_feature (103)..(481): Homolog of NCBI NO: 14596229 NR Description: alanine aminotransferase-like protein
  misc_feature (4)..(481): Homolog of NCBI NO: 34899390 NR Description: putative alanine aminotransferase
  misc_feature (4)..(481): Homolog of NCBI NO: 29569153 NR Description: alanine aminotransferase [Oryza sativa (indica
  misc_feature (1)..(481): Homolog of NCBI NO: 21537112 NR Description: putative alanine aminotransferase [Arabidopsis
  misc_feature (1)..(481): Homolog of NCBI NO: 15223186 NR Description: alanine aminotransferase, putative [Arabidopsis
  misc_feature (1)..(481): Homolog of NCBI NO: 13430566 NR Description: putative alanine aminotransferase [Arabidopsis
  misc_feature (1)..(481): Homolog of NCBI NO: 16604499 NR Description: At1g23310/F26F24_4 [Arabidopsis thaliana]
  misc_feature (1)..(481): Homolog of NCBI NO: 30688330 NR Description: alanine aminotransferase -related [Arabidopsis
MALKALDYDTLNENVKKCQYAVRGELYLRASELQKEGKKIIFTNVGNPHALGQKPLTFPRQVVALCQAPFLLDDPNVGMLFPADAIARAKHYLSLTSGGLGAYSDSRGLPGVRKEVAEFIQRRDGYPSDPELIFLTDGASKGVMQILNCVIRGNGDGILVPVPQYPLYSATISLLGGTLVPYYLDESENWGLDVANLRQSVAQARSQGITVRAMVIINPGNPTGQCLSEANIREILKFCYNEKLVLLGDEVYQQNIYQDERPFISSKKVLMEMGSPFSKEVQLVSFHTVSKGYWGECGQRGGYFEMTNLPPRVVEEIYKVASIALSPNVSAQIFMGLMVNPPKPGDISYDQFARESKGILESLRRRARLMTDGFNSCKNVVCNFTEGAMYSFPQIRLPTGALQAAKQAGKVPDVFYCLKLLEATGISTVPGSGFGQKEGVFHLRTTILPAEDEMPEIMDSFKKFNDEFMTQYDNNFGYSKM

SEQ ID NO: 28646 - protein, 403 aa, Arabidopsis thaliana
  peptide (1)..(403): Ceres Seq. ID no. 13494315
  misc_feature (40)..(387): Pfam Name: Aminotransferase class I and II Pfam Description: Aminotransferase class I and II
  misc_feature (1)..(394): Homolog of NCBI NO: 37533928 NR Description: putative alanine aminotransferase
  misc_feature (1)..(394): Homolog of NCBI NO: 7434113 NR Description: alanine transaminase (EC 2.6.1.2) - Chlamydomonas
  misc_feature (25)..(403): Homolog of NCBI NO: 14596229 NR Description: alanine aminotransferase-like protein
  misc_feature (1)..(403): Homolog of NCBI NO: 34899390 NR Description: putative alanine aminotransferase
  misc_feature (1)..(403): Homolog of NCBI NO: 29569153 NR Description: alanine aminotransferase [Oryza sativa (indica
  misc_feature (1)..(403): Homolog of NCBI NO: 21537112 NR Description: putative alanine aminotransferase [Arabidopsis
  misc_feature (1)..(403): Homolog of NCBI NO: 15223186 NR Description: alanine aminotransferase, putative [Arabidopsis
  misc_feature (1)..(403): Homolog of NCBI NO: 13430566 NR Description: putative alanine aminotransferase [Arabidopsis
  misc_feature (1)..(403): Homolog of NCBI NO: 16604499 NR Description: At1g23310/F26F24_4 [Arabidopsis thaliana]
  misc_feature (1)..(403): Homolog of NCBI NO: 30688330 NR Description: alanine aminotransferase -related [Arabidopsis
MLFPADAIARAKHYLSLTSGGLGAYSDSRGLPGVRKEVAEFIQRRDGYPSDPELIFLTDGASKGVMQILNCVIRGNGDGILVPVPQYPLYSATISLLGGTLVPYYLDESENWGLDVANLRQSVAQARSQGITVRAMVIINPGNPTGQCLSEANIREILKFCYNEKLVLLGDEVYQQNIYQDERPFISSKKVLMEMGSPFSKEVQLVSFHTVSKGYWGECGQRGGYFEMTNLPPRVVEEIYKVASIALSPNVSAQIFMGLMVNPPKPGDISYDQFARESKGILESLRRRARLMTDGFNSCKNVVCNFTEGAMYSFPQIRLPTGALQAAKQAGKVPDVFYCLKLLEATGISTVPGSGFGQKEGVFHLRTTILPAEDEMPEIMDSFKKFNDEFMTQYDNNFGYSKM

SEQ ID NO: 28647 - protein, 338 aa, Arabidopsis thaliana
  peptide (1)..(338): Ceres Seq. ID no. 13494316
  misc_feature (1)..(322): Pfam Name: Aminotransferase class I and II Pfam Description: Aminotransferase class I and II
  misc_feature (1)..(329): Homolog of NCBI NO: 37533928 NR Description: putative alanine aminotransferase
  misc_feature (1)..(329): Homolog of NCBI NO: 7434113 NR Description: alanine transaminase (EC 2.6.1.2) - Chlamydomonas
  misc_feature (1)..(338): Homolog of NCBI NO: 14596229 NR Description: alanine aminotransferase-like protein
  misc_feature (1)..(338): Homolog of NCBI NO: 34899390 NR Description: putative alanine aminotransferase
  misc_feature (1)..(338): Homolog of NCBI NO: 29569153 NR Description: alanine aminotransferase [Oryza sativa (indica
  misc_feature (1)..(338): Homolog of NCBI NO: 21537112 NR Description: putative alanine aminotransferase [Arabidopsis
  misc_feature (1)..(338): Homolog of NCBI NO: 15223186 NR Description: alanine aminotransferase, putative [Arabidopsis
  misc_feature (1)..(338): Homolog of NCBI NO: 13430566 NR Description: putative alanine aminotransferase [Arabidopsis
  misc_feature (1)..(338): Homolog of NCBI NO: 16604499 NR Description: At1g23310/F26F24_4 [Arabidopsis thaliana]
  misc_feature (1)..(338): Homolog of NCBI NO: 30688330 NR Description: alanine aminotransferase -related [Arabidopsis
MQILNCVIRGNGDGILVPVPQYPLYSATISLLGGTLVPYYLDESENWGLDVANLRQSVAQARSQGITVRAMVIINPGNPTGQCLSEANIREILKFCYNEKLVLLGDEVYQQNIYQDERPFISSKKVLMEMGSPFSKEVQLVSFHTVSKGYWGECGQRGGYFEMTNLPPRVVEEIYKVASIALSPNVSAQIFMGLMVNPPKPGDISYDQFARESKGILESLRRRARLMTDGFNSCKNVVCNFTEGAMYSFPQIRLPTGALQAAKQAGKVPDVFYCLKLLEATGISTVPGSGFGQKEGVFHLRTTILPAEDEMPEIMDSFKKFNDEFMTQYDNNFGYSKM

SEQ ID NO: 28648 - DNA, 920 bp, Arabidopsis thaliana
  misc_feature (1)..(920): Ceres Seq. ID no. 13580545
  misc_feature: MA Experiment ID: 108434 Result: Down-regulated in Transcription
  misc_feature: MA Experiment 108434 PARAMETER Experiment Name: At_Root_Tips_cDNA_P Parameter: Tissue Value: Root Tips
  misc_feature: MA Experiment ID: 108577 Result: Up-regulated in Transcription
  misc_feature: MA Experiment 108577 PARAMETER Experiment Name: At_42deg_Heat_cDNA_P Parameter: Temperature (deg C) Value: 42 vs. 22
  misc_feature: MA Experiment 108577 PARAMETER Experiment Name: At_42deg_Heat_cDNA_P Parameter: Timepoint (hr) Value: 6
  misc_feature: MA Experiment 108577 PARAMETER Experiment Name: At_42deg_Heat_cDNA_P Parameter: Tissue Value: Aerial
  misc_feature: MA Experiment ID: 108579 Result: Up-regulated in Transcription
  misc_feature: MA Experiment 108579 PARAMETER Experiment Name: At_4deg_Cold_cDNA_P Parameter: Temperature (deg C) Value: 4 vs. 22
  misc_feature: MA Experiment 108579 PARAMETER Experiment Name: At_4deg_Cold_cDNA_P Parameter: Timepoint (hr) Value: 6
  misc_feature: MA Experiment 108579 PARAMETER Experiment Name: At_4deg_Cold_cDNA_P Parameter: Tissue Value: Aerial
  misc_feature: MA Experiment ID: 20000087 Result: Down-regulated in Transcription
  misc_feature: MA Experiment 20000087 PARAMETER Experiment Name: At_100uM_ABA_Mutants_cDNA_P Parameter: Plant Line Value: WS
  misc_feature: MA Experiment 20000087 PARAMETER Experiment Name: At_100uM_ABA_Mutants_cDNA_P Parameter: Timepoint (hr) Value: 6
  misc_feature: MA Experiment 20000087 PARAMETER Experiment Name: At_100uM_ABA_Mutants_cDNA_P Parameter: Tissue Value: Aerial
  misc_feature: MA Experiment 20000087 PARAMETER Experiment Name: At_100uM_ABA_Mutants_cDNA_P Parameter: Treatment Value: 100uM ABA vs. No Treatment
  misc_feature: MA Experiment ID: 20000093 Result: Up-regulated in Transcription
  misc_feature: MA Experiment 20000093 PARAMETER Experiment Name: At_42deg_Heat_cDNA_P Parameter: Temperature (deg C) Value: 42 vs. 22
  misc_feature: MA Experiment 20000093 PARAMETER Experiment Name: At_42deg_Heat_cDNA_P Parameter: Timepoint (hr) Value: 0.5
  misc_feature: MA Experiment 20000093 PARAMETER Experiment Name: At_42deg_Heat_cDNA_P Parameter: Tissue Value: Aerial
  misc_feature: MA Experiment ID: 20000111 Result: Up-regulated in Transcription
  misc_feature: MA Experiment 20000111 PARAMETER Experiment Name: At_42deg_Heat_cDNA_P Parameter: Temperature (deg C) Value: 42 vs. 22
  misc_feature: MA Experiment 20000111 PARAMETER Experiment Name: At_42deg_Heat_cDNA_P Parameter: Timepoint (hr) Value: 6
  misc_feature: MA Experiment 20000111 PARAMETER Experiment Name: At_42deg_Heat_cDNA_P Parameter: Tissue Value: Aerial
  misc_feature: MA Experiment ID: 20000113 Result: Up-regulated in Transcription
  misc_feature: MA Experiment 20000113 PARAMETER Experiment Name: At_42deg_Heat_cDNA_P Parameter: Temperature (deg C) Value: 42 vs. 22
  misc_feature: MA Experiment 20000113 PARAMETER Experiment Name: At_42deg_Heat_cDNA_P Parameter: Timepoint (hr) Value: 8
  misc_feature: MA Experiment 20000113 PARAMETER Experiment Name: At_42deg_Heat_cDNA_P Parameter: Tissue Value: Aerial
  misc_feature: MA Experiment ID: 20000144 Result: Up-regulated in Transcription
  misc_feature: MA Experiment 20000144 PARAMETER Experiment Name: At_42deg_Heat_cDNA_P Parameter: Temperature (deg C) Value: 42 vs. 22
  misc_feature: MA Experiment 20000144 PARAMETER Experiment Name: At_42deg_Heat_cDNA_P Parameter: Timepoint (hr) Value: 1
  misc_feature: MA Experiment 20000144 PARAMETER Experiment Name: At_42deg_Heat_cDNA_P Parameter: Tissue Value: Aerial
  misc_feature: MA Experiment ID: 20000327 Result: Up-regulated in Transcription
  misc_feature: MA Experiment 20000327 PARAMETER Experiment Name: At_42deg_Heat_Sub_P Parameter: Age (day) Value: 14
  misc_feature: MA Experiment 20000327 PARAMETER Experiment Name: At_42deg_Heat_Sub_P Parameter: Organism Value: A. thaliana
  misc_feature: MA Experiment 20000327 PARAMETER Experiment Name: At_42deg_Heat_Sub_P Parameter: Plant Line Value: WS
  misc_feature: MA Experiment 20000327 PARAMETER Experiment Name: At_42deg_Heat_Sub_P Parameter: Temperature (deg C) Value: 42 vs. 22
  misc_feature: MA Experiment 20000327 PARAMETER Experiment Name: At_42deg_Heat_Sub_P Parameter: Timepoint (hr) Value: 1
  misc_feature: MA Experiment 20000327 PARAMETER Experiment Name: At_42deg_Heat_Sub_P Parameter: Tissue Value: Aerial
  misc_feature: MA Experiment ID: 20000328 Result: Up-regulated in Transcription
  misc_feature: MA Experiment 20000328 PARAMETER Experiment Name: At_42deg_Heat_Sub_P Parameter: Age (day) Value: 14
  misc_feature: MA Experiment 20000328 PARAMETER Experiment Name: At_42deg_Heat_Sub_P Parameter: Organism Value: A. thaliana
  misc_feature: MA Experiment 20000328 PARAMETER Experiment Name: At_42deg_Heat_Sub_P Parameter: Plant Line Value: WS
  misc_feature: MA Experiment 20000328 PARAMETER Experiment Name: At_42deg_Heat_Sub_P Parameter: Temperature (deg C) Value: 42 vs. 22
  misc_feature: MA Experiment 20000328 PARAMETER Experiment Name: At_42deg_Heat_Sub_P Parameter: Timepoint (hr) Value: 6
  misc_feature: MA Experiment 20000328 PARAMETER Experiment Name: At_42deg_Heat_Sub_P Parameter: Tissue Value: Aerial
aaaaattcagattccaaatttctcaaactcctaaatcgttctctcaaatctctagtcgtgatcaagatgcagatctttgttaagactctcaccggaaagactatcaccctcgaggtggaaagctctgacaccatcgacaacgttaaggccaagatccaggataaggaaggcattcctccggatcagcagaggcttattttcgccggaaaacagctagaggatggccgtacgttggctgattacaatatccagaaggartccaccctycayttggttctcaggctccgtggtggtatgcagatttttgtcaagacsttracgggaaagacgatcactyttgaggtggagagytctgacaccatcgacaaygtcaargccaagatccargacaargagggtatyccwccggaccagcagagrttgatcttcgcyggaaarcaasttggargatggyagaactcttggctgactacaacatycagaaggagtcyacacttcacttggtgttgcgkctccgtggaggtatgcagattttcgtgaagactctsactggaaagaccatcactcttgargtkgagagctcygacaccatygacaacgtgaaggcyaagatccaggacaaggarggtatccctccggaccagcagmgrtytsatcttcgctggaaaacagcttgaggatggtmgwactttggcygactacaacatccaaaaggagtctacccttcacttggtgctaaggctccgtggtggtttctaaaaacttatctctgttatgaatcagaagaagttcatgtctcgtttcatttaaaactttggtggtttgtgttttggggccttgtaaagcccctgatgaataattgttcaactatgtttccgttcctgtgttatacctttctttctaatgagtaatgacatacc

SEQ ID NO: 28649 - protein, 179 aa, Arabidopsis thaliana
  peptide (1)..(179): Ceres Seq. ID no. 15222729
  misc_feature (23)..(96): Pfam Name: Ubiquitin family Pfam Description: Ubiquitin family
  misc_feature (23)..(147): Homolog of NCBI NO: 15982787 NR Description: AT4g05320/C17L7_240 [Arabidopsis thaliana]
  misc_feature (23)..(147): Homolog of NCBI NO: 1800281 NR Description: polyubiquitin [Fragaria x ananassa]
  misc_feature (23)..(147): Homolog of NCBI NO: 170354 NR Description: pentameric polyubiquitin
  misc_feature (23)..(147): Homolog of NCBI NO: 170352 NR Description: hexameric polyubiquitin
  misc_feature (23)..(147): Homolog of NCBI NO: 170352 NR Description: hexameric polyubiquitin
  misc_feature (23)..(147): Homolog of NCBI NO: 100490 NR Description: polyubiquitin - garden snapdragon (fragment)
  misc_feature (23)..(147): Homolog of NCBI NO: 70644 NR Description: ubiquitin precursor - common sunflower (fragment)
  misc_feature (23)..(147): Homolog of NCBI NO: 70645 NR Description: polyubiquitin 5 - garden pea
  misc_feature (23)..(147): Homolog of NCBI NO: 70644 NR Description: ubiquitin precursor - common sunflower (fragment)
  misc_feature (23)..(147): Homolog of NCBI NO: 70644 NR Description: ubiquitin precursor - common sunflower (fragment)
  misc_feature (86)..(86): Xaa is any aa, unknown or other
  misc_feature (89)..(89): Xaa is any aa, unknown or other
  misc_feature (90)..(90): Xaa is any aa, unknown or other
  misc_feature (105)..(105): Xaa is any aa, unknown or other
  misc_feature (106)..(106): Xaa is any aa, unknown or other
  misc_feature (113)..(113): Xaa is any aa, unknown or other
  misc_feature (117)..(117): Xaa is any aa, unknown or other
  misc_feature (123)..(123): Xaa is any aa, unknown or other
  misc_feature (125)..(125): Xaa is any aa, unknown or other
  misc_feature (129)..(129): Xaa is any aa, unknown or other
  misc_feature (131)..(131): Xaa is any aa, unknown or other
  misc_feature (134)..(134): Xaa is any aa, unknown or other
  misc_feature (135)..(135): Xaa is any aa, unknown or other
  misc_feature (140)..(140): Xaa is any aa, unknown or other
  misc_feature (144)..(144): Xaa is any aa, unknown or other
  misc_feature (146)..(146): Xaa is any aa, unknown or other
  misc_feature (148)..(148): Xaa is any aa, unknown or other
  misc_feature (150)..(150): Xaa is any aa, unknown or other
  misc_feature (152)..(152): Xaa is any aa, unknown or other
  misc_feature (160)..(160): Xaa is any aa, unknown or other
  misc_feature (164)..(164): Xaa is any aa, unknown or other
  misc_feature (171)..(171): Xaa is any aa, unknown or other
KNSDSKFLKLLNRSLKSLVVIKMQIFVKTLTGKTITLEVESSDTIDNVKAKIQDKEGIPPDQQRLIFAGKQLEDGRTLADYNIQKXSTXXLVLRLRGGMQIFVKXXTGKTITXEVEXSDTIDXVXAKIXDXEGXXPDQQXLIFXGXQXGXWXNSWLTTTXRRSXHFTWCCXSVEVCRFS

SEQ ID NO: 28650 - protein, 157 aa, Arabidopsis thaliana
  peptide (1)..(157): Ceres Seq. ID no. 15222730
  misc_feature (1)..(74): Pfam Name: Ubiquitin family Pfam Description: Ubiquitin family
  misc_feature (1)..(125): Homolog of NCBI NO: 170354 NR Description: pentameric polyubiquitin
  misc_feature (1)..(125): Homolog of NCBI NO: 1800281 NR Description: polyubiquitin [Fragaria x ananassa]
  misc_feature (1)..(125): Homolog of NCBI NO: 7488781 NR Description: polyubiquitin 4.4 - kidney bean
  misc_feature (1)..(125): Homolog of NCBI NO: 7488781 NR Description: polyubiquitin 4.4 - kidney bean
  misc_feature (1)..(125): Homolog of NCBI NO: 15982787 NR Description: AT4g05320/C17L7_240 [Arabidopsis thaliana]
  misc_feature (1)..(125): Homolog of NCBI NO: 15982787 NR Description: AT4g05320/C17L7_240 [Arabidopsis thaliana]
  misc_feature (1)..(125): Homolog of NCBI NO: 18412077 NR Description: polyubiquitin (UBQ14) [Arabidopsis thaliana]
  misc_feature (1)..(125): Homolog of NCBI NO: 18412077 NR Description: polyubiquitin (UBQ14) [Arabidopsis thaliana]
  misc_feature (1)..(125): Homolog of NCBI NO: 18412785 NR Description: polyubiquitin UBQ11 [Arabidopsis thaliana]
  misc_feature (1)..(125): Homolog of NCBI NO: 70644 NR Description: ubiquitin precursor - common sunflower (fragment)
  misc_feature (64)..(64): Xaa is any aa, unknown or other
  misc_feature (67)..(67): Xaa is any aa, unknown or other
  misc_feature (68)..(68): Xaa is any aa, unknown or other
  misc_feature (83)..(83): Xaa is any aa, unknown or other
  misc_feature (84)..(84): Xaa is any aa, unknown or other
  misc_feature (91)..(91): Xaa is any aa, unknown or other
  misc_feature (95)..(95): Xaa is any aa, unknown or other
  misc_feature (101)..(101): Xaa is any aa, unknown or other
  misc_feature (103)..(103): Xaa is any aa, unknown or other
  misc_feature (107)..(107): Xaa is any aa, unknown or other
  misc_feature (109)..(109): Xaa is any aa, unknown or other
  misc_feature (112)..(112): Xaa is any aa, unknown or other
  misc_feature (113)..(113): Xaa is any aa, unknown or other
  misc_feature (118)..(118): Xaa is any aa, unknown or other
  misc_feature (122)..(122): Xaa is any aa, unknown or other
  misc_feature (124)..(124): Xaa is any aa, unknown or other
  misc_feature (126)..(126): Xaa is any aa, unknown or other
  misc_feature (128)..(128): Xaa is any aa, unknown or other
  misc_feature (130)..(130): Xaa is any aa, unknown or other
  misc_feature (138)..(138): Xaa is any aa, unknown or other
  misc_feature (142)..(142): Xaa is any aa, unknown or other
  misc_feature (149)..(149): Xaa is any aa, unknown or other
MQIFVKTLTGKTITLEVESSDTIDNVKAKIQDKEGIPPDQQRLIFAGKQLEDGRTLADYNIQKXSTXXLVLRLRGGMQIFVKXXTGKTITXEVEXSDTIDXVXAKIXDXEGXXPDQQXLIFXGXQXGXWXNSWLTTTXRRSXHFTWCCXSVEVCRFS

SEQ ID NO: 28651 - DNA, 1287 bp, Arabidopsis thaliana
  misc_feature (1)..(1287): Ceres Seq. ID no. 13497685
  misc_feature: MA Experiment ID: 108433 Result: Down-regulated in Transcription
  misc_feature: MA Experiment 108433 PARAMETER Experiment Name: At_rhl_Mutant2_cDNA_P Parameter: Age (day) Value: 7
  misc_feature: MA Experiment 108433 PARAMETER Experiment Name: At_rhl_Mutant2_cDNA_P Parameter: Organism Value: A. thaliana
  misc_feature: MA Experiment 108433 PARAMETER Experiment Name: At_rhl_Mutant2_cDNA_P Parameter: Plant Line Value: rhl Mutant vs. wt landsburg
  misc_feature: MA Experiment 108433 PARAMETER Experiment Name: At_rhl_Mutant2_cDNA_P Parameter: Tissue Value: Roots
  misc_feature: MA Experiment ID: 108434 Result: Up-regulated in Transcription
  misc_feature: MA Experiment 108434 PARAMETER Experiment Name: At_Root_Tips_cDNA_P Parameter: Tissue Value: Root Tips
  misc_feature: MA Experiment ID: 108435 Result: Up-regulated in Transcription
  misc_feature: MA Experiment 108435 PARAMETER Experiment Name: At_stm_Mutants_cDNA_P Parameter: Plant Line Value: wt Landsburg vs stm
  misc_feature: MA Experiment 108435 PARAMETER Experiment Name: At_stm_Mutants_cDNA_P Parameter: Tissue Value: Shoot Apical Meristem Region
  misc_feature: MA Experiment ID: 108461 Result: Down-regulated in Transcription
  misc_feature: MA Experiment 108461 PARAMETER Experiment Name: At_Germinating_Seeds_cDNA_P Parameter: Age (day) Value: 1 vs. 0
  misc_feature: MA Experiment 108461 PARAMETER Experiment Name: At_Germinating_Seeds_cDNA_P Parameter: Tissue Value: Germinating Seeds
  misc_feature: MA Experiment ID: 108462 Result: Down-regulated in Transcription
  misc_feature: MA Experiment 108462 PARAMETER Experiment Name: At_Germinating_Seeds_cDNA_P Parameter: Age (day) Value: 2 vs. 0
  misc_feature: MA Experiment 108462 PARAMETER Experiment Name: At_Germinating_Seeds_cDNA_P Parameter: Tissue Value: Germinating Seeds
  misc_feature: MA Experiment ID: 108463 Result: Down-regulated in Transcription
  misc_feature: MA Experiment 108463 PARAMETER Experiment Name: At_Germinating_Seeds_cDNA_P Parameter: Age (day) Value: 3 vs. 0
  misc_feature: MA Experiment 108463 PARAMETER Experiment Name: At_Germinating_Seeds_cDNA_P Parameter: Tissue Value: Germinating Seeds
  misc_feature: MA Experiment ID: 108464 Result: Down-regulated in Transcription
  misc_feature: MA Experiment 108464 PARAMETER Experiment Name: At_Germinating_Seeds_cDNA_P Parameter: Age (day) Value: 4 vs. 0
  misc_feature: MA Experiment 108464 PARAMETER Experiment Name: At_Germinating_Seeds_cDNA_P Parameter: Tissue Value: Germinating Seeds
  misc_feature: MA Experiment ID: 108488 Result: Up-regulated in Transcription
  misc_feature: MA Experiment ID: 108489 Result: Up-regulated in Transcription
  misc_feature: MA Experiment ID: 108561 Result: Down-regulated in Transcription
  misc_feature: MA Experiment 108561 PARAMETER Experiment Name: At_100uM_ABA_cDNA_P Parameter: Timepoint (hr) Value: 6
  misc_feature: MA Experiment 108561 PARAMETER Experiment Name: At_100uM_ABA_cDNA_P Parameter: Tissue Value: Aerial
  misc_feature: MA Experiment 108561 PARAMETER Experiment Name: At_100uM_ABA_cDNA_P Parameter: Treatment Value: 100uM ABA vs. No Treatment
  misc_feature: MA Experiment ID: 108572 Result: Down-regulated in Transcription
  misc_feature: MA Experiment 108572 PARAMETER Experiment Name: At_Drought_cDNA_P Parameter: Timepoint (hr) Value: 1
  misc_feature: MA Experiment 108572 PARAMETER Experiment Name: At_Drought_cDNA_P Parameter: Tissue Value: Aerial
  misc_feature: MA Experiment 108572 PARAMETER Experiment Name: At_Drought_cDNA_P Parameter: Treatment Value: Drought vs. No Drought
  misc_feature: MA Experiment ID: 108573 Result: Down-regulated in Transcription
  misc_feature: MA Experiment 108573 PARAMETER Experiment Name: At_Drought_cDNA_P Parameter: Timepoint (hr) Value: 6
  misc_feature: MA Experiment 108573 PARAMETER Experiment Name: At_Drought_cDNA_P Parameter: Tissue Value: Aerial
  misc_feature: MA Experiment 108573 PARAMETER Experiment Name: At_Drought_cDNA_P Parameter: Treatment Value: Drought vs. No Drought
  misc_feature: MA Experiment ID: 108579 Result: Up-regulated in Transcription
  misc_feature: MA Experiment 108579 PARAMETER Experiment Name: At_4deg_Cold_cDNA_P Parameter: Temperature (deg C) Value: 4 vs. 22
  misc_feature: MA Experiment 108579 PARAMETER Experiment Name: At_4deg_Cold_cDNA_P Parameter: Timepoint (hr) Value: 6
  misc_feature: MA Experiment 108579 PARAMETER Experiment Name: At_4deg_Cold_cDNA_P Parameter: Tissue Value: Aerial
  misc_feature: MA Experiment ID: 108609 Result: Down-regulated in Transcription
  misc_feature: MA Experiment 108609 PARAMETER Experiment Name: At_100uM_ABA_cDNA_P Parameter: Timepoint (hr) Value: 24
  misc_feature: MA Experiment 108609 PARAMETER Experiment Name: At_100uM_ABA_cDNA_P Parameter: Tissue Value: Aerial
  misc_feature: MA Experiment 108609 PARAMETER Experiment Name: At_100uM_ABA_cDNA_P Parameter: Treatment Value: 100uM ABA vs. No Treatment
  misc_feature: MA Experiment ID: 20000180 Result: Down-regulated in Transcription
  misc_feature: MA Experiment 20000180 PARAMETER Experiment Name: At_Germinating_Seeds_P Parameter: Age (hr) Value: 24 vs. 0
  misc_feature: MA Experiment 20000180 PARAMETER Experiment Name: At_Germinating_Seeds_P Parameter: Tissue Value: Germinating Seeds
  misc_feature: MA Experiment ID: 20000185 Result: Up-regulated in Transcription
  misc_feature: MA Experiment 20000185 PARAMETER Experiment Name: At_Roots__P Parameter: Age (day) Value: 7 vs. 21
  misc_feature: MA Experiment 20000185 PARAMETER Experiment Name: At_Roots__P Parameter: Organism Value: A. thaliana
  misc_feature: MA Experiment 20000185 PARAMETER Experiment Name: At_Roots__P Parameter: Tissue Value: Roots vs. Whole Plant
  misc_feature: MA Experiment ID: 20000227 Result: Up-regulated in Transcription
  misc_feature: MA Experiment 20000227 PARAMETER Experiment Name: At_Root-Tips-vs-Tops_P Parameter: Tissue Value: Root Tips vs. Root Tops
  misc_feature: MA Experiment ID: 20000234 Result: Up-regulated in Transcription
  misc_feature: MA Experiment 20000234 PARAMETER Experiment Name: At_Siliques_P Parameter: Age (day) Value: 21
  misc_feature: MA Experiment 20000234 PARAMETER Experiment Name: At_Siliques_P Parameter: Organism Value: A. thaliana
  misc_feature: MA Experiment 20000234 PARAMETER Experiment Name: At_Siliques_P Parameter: Plant Line Value: WS
  misc_feature: MA Experiment 20000234 PARAMETER Experiment Name: At_Siliques_P Parameter: Tissue Value: Less Than 5mm Siliques vs. Whole Plant
  misc_feature: MA Experiment ID: 20000264 Result: Up-regulated in Transcription
  misc_feature: MA Experiment 20000264 PARAMETER Experiment Name: At_Open_Flower_P Parameter: Age (day) Value: 21
  misc_feature: MA Experiment 20000264 PARAMETER Experiment Name: At_Open_Flower_P Parameter: Plant Line Value: WS
  misc_feature: MA Experiment 20000264 PARAMETER Experiment Name: At_Open_Flower_P Parameter: Tissue Value: Open Flower vs. Whole Plant
  misc_feature: MA Experiment ID: 20000265 Result: Up-regulated in Transcription
  misc_feature: MA Experiment 20000265 PARAMETER Experiment Name: At_Open_Flower_P Parameter: Age (day) Value: 21
  misc_feature: MA Experiment 20000265 PARAMETER Experiment Name: At_Open_Flower_P Parameter: Plant Line Value: WS
  misc_feature: MA Experiment 20000265 PARAMETER Experiment Name: At_Open_Flower_P Parameter: Tissue Value: Closed Flower vs. Whole Plant
  misc_feature: MA Experiment ID: 20000286 Result: Up-regulated in Transcription
  misc_feature: MA Experiment 20000286 PARAMETER Experiment Name: At_Open_Flower_P Parameter: Age (day) Value: 21
  misc_feature: MA Experiment 20000286 PARAMETER Experiment Name: At_Open_Flower_P Parameter: Plant Line Value: WS
  misc_feature: MA Experiment 20000286 PARAMETER Experiment Name: At_Open_Flower_P Parameter: Tissue Value: Half Open vs. Whole Plant
  misc_feature: MA Experiment ID: 20000436 Result: Down-regulated in Transcription
  misc_feature: MA Experiment 20000436 PARAMETER Experiment Name: At_Drought_P Parameter: Age (day) Value: 7
  misc_feature: MA Experiment 20000436 PARAMETER Experiment Name: At_Drought_P Parameter: Organism Value: A. thaliana
  misc_feature: MA Experiment 20000436 PARAMETER Experiment Name: At_Drought_P Parameter: Plant Line Value: WS
  misc_feature: MA Experiment 20000436 PARAMETER Experiment Name: At_Drought_P Parameter: Timepoint (hr) Value: 12
  misc_feature: MA Experiment 20000436 PARAMETER Experiment Name: At_Drought_P Parameter: Tissue Value: Whole Plant
  misc_feature: MA Experiment 20000436 PARAMETER Experiment Name: At_Drought_P Parameter: Treatment Value: Drought vs. No Drought
  misc_feature: MA Experiment ID: 20000437 Result: Down-regulated in Transcription
  misc_feature: MA Experiment 20000437 PARAMETER Experiment Name: At_Drought_P Parameter: Age (day) Value: 8
  misc_feature: MA Experiment 20000437 PARAMETER Experiment Name: At_Drought_P Parameter: Organism Value: A. thaliana
  misc_feature: MA Experiment 20000437 PARAMETER Experiment Name: At_Drought_P Parameter: Plant Line Value: WS
  misc_feature: MA Experiment 20000437 PARAMETER Experiment Name: At_Drought_P Parameter: Timepoint (hr) Value: 24
  misc_feature: MA Experiment 20000437 PARAMETER Experiment Name: At_Drought_P Parameter: Tissue Value: Whole Plant
  misc_feature: MA Experiment 20000437 PARAMETER Experiment Name: At_Drought_P Parameter: Treatment Value: Drought vs. No Drought
  misc_feature: MA Experiment ID: 20000453 Result: Down-regulated in Transcription
  misc_feature: MA Experiment 20000453 PARAMETER Experiment Name: At_100uM_ABA_P Parameter: Age (day) Value: 15
  misc_feature: MA Experiment 20000453 PARAMETER Experiment Name: At_100uM_ABA_P Parameter: Organism Value: A. thaliana
  misc_feature: MA Experiment 20000453 PARAMETER Experiment Name: At_100uM_ABA_P Parameter: Plant Line Value: WS
  misc_feature: MA Experiment 20000453 PARAMETER Experiment Name: At_100uM_ABA_P Parameter: Timepoint (hr) Value: 24
  misc_feature: MA Experiment 20000453 PARAMETER Experiment Name: At_100uM_ABA_P Parameter: Tissue Value: Aerial
  misc_feature: MA Experiment 20000453 PARAMETER Experiment Name: At_100uM_ABA_P Parameter: Treatment Value: 100uM ABA vs. No Treatment
  misc_feature: MA Experiment ID: 20000456 Result: Up-regulated in Transcription
  misc_feature: MA Experiment 20000456 PARAMETER Experiment Name: At_100uM_BA_P Parameter: Age (day) Value: 14
  misc_feature: MA Experiment 20000456 PARAMETER Experiment Name: At_100uM_BA_P Parameter: Organism Value: A. thaliana
  misc_feature: MA Experiment 20000456 PARAMETER Experiment Name: At_100uM_BA_P Parameter: Plant Line Value: WS
  misc_feature: MA Experiment 20000456 PARAMETER Experiment Name: At_100uM_BA_P Parameter: Timepoint (hr) Value: 6
  misc_feature: MA Experiment 20000456 PARAMETER Experiment Name: At_100uM_BA_P Parameter: Tissue Value: Aerial
  misc_feature: MA Experiment 20000456 PARAMETER Experiment Name: At_100uM_BA_P Parameter: Treatment Value: 100uM BA vs. No Treatment
  misc_feature: MA Experiment ID: 20000709 Result: Up-regulated in Transcription
  misc_feature: MA Experiment 20000709 PARAMETER Experiment Name: At_15mM_NH4NO3_L-to-H_P Parameter: Age (hr) Value: 14
  misc_feature: MA Experiment 20000709 PARAMETER Experiment Name: At_15mM_NH4NO3_L-to-H_P Parameter: Organism Value: A. thaliana
  misc_feature: MA Experiment 20000709 PARAMETER Experiment Name: At_15mM_NH4NO3_L-to-H_P Parameter: Plant Line Value: WS
  misc_feature: MA Experiment 20000709 PARAMETER Experiment Name: At_15mM_NH4NO3_L-to-H_P Parameter: Timepoint (hr) Value: 4
  misc_feature: MA Experiment 20000709 PARAMETER Experiment Name: At_15mM_NH4NO3_L-to-H_P Parameter: Tissue Value: Aerial
  misc_feature: MA Experiment 20000709 PARAMETER Experiment Name: At_15mM_NH4NO3_L-to-H_P Parameter: Treatment Value: 15mM NH4NO3 vs. 30mM Mannitol
  misc_feature: MA Experiment ID: 20000794 Result: Down-regulated in Transcription
  misc_feature: MA Experiment 20000794 PARAMETER Experiment Name: At_Petals_P Parameter: Age (day) Value: 23-25 days
  misc_feature: MA Experiment 20000794 PARAMETER Experiment Name: At_Petals_P Parameter: Plant Line Value: WS
  misc_feature: MA Experiment 20000794 PARAMETER Experiment Name: At_Petals_P Parameter: Tissue Value: Petals vs. Whole plant
  misc_feature: MA Experiment ID: 20001247 Result: Down-regulated in Transcription
  misc_feature: MA Experiment 20001247 PARAMETER Experiment Name: At_Far-red-induction_P Parameter: Age (day) Value: 7
  misc_feature: MA Experiment 20001247 PARAMETER Experiment Name: At_Far-red-induction_P Parameter: Light Value: Far-red vs. White
  misc_feature: MA Experiment 20001247 PARAMETER Experiment Name: At_Far-red-induction_P Parameter: Organism Value: A. thaliana
  misc_feature: MA Experiment 20001247 PARAMETER Experiment Name: At_Far-red-induction_P Parameter: Plant Line Value: Columbia
  misc_feature: MA Experiment 20001247 PARAMETER Experiment Name: At_Far-red-induction_P Parameter: Timepoint (hr) Value: 1
  misc_feature: MA Experiment 20001247 PARAMETER Experiment Name: At_Far-red-induction_P Parameter: Tissue Value: Whole Plant
  misc_feature: MA Experiment ID: 20001450 Result: Down-regulated in Transcription
  misc_feature: MA Experiment 20001450 PARAMETER Experiment Name: At_Far-red-induction_P Parameter: Age (day) Value: 7
  misc_feature: MA Experiment 20001450 PARAMETER Experiment Name: At_Far-red-induction_P Parameter: Light Value: Far-red vs. White
  misc_feature: MA Experiment 20001450 PARAMETER Experiment Name: At_Far-red-induction_P Parameter: Organism Value: A. thaliana
  misc_feature: MA Experiment 20001450 PARAMETER Experiment Name: At_Far-red-induction_P Parameter: Plant Line Value: Columbia
  misc_feature: MA Experiment 20001450 PARAMETER Experiment Name: At_Far-red-induction_P Parameter: Timepoint (hr) Value: 8
  misc_feature: MA Experiment 20001450 PARAMETER Experiment Name: At_Far-red-induction_P Parameter: Tissue Value: Whole Plant
  misc_feature: MA Experiment ID: 20001451 Result: Down-regulated in Transcription
  misc_feature: MA Experiment 20001451 PARAMETER Experiment Name: At_Far-red-induction_P Parameter: Age (day) Value: 7
  misc_feature: MA Experiment 20001451 PARAMETER Experiment Name: At_Far-red-induction_P Parameter: Light Value: Far-red vs. White
  misc_feature: MA Experiment 20001451 PARAMETER Experiment Name: At_Far-red-induction_P Parameter: Organism Value: A. thaliana
  misc_feature: MA Experiment 20001451 PARAMETER Experiment Name: At_Far-red-induction_P Parameter: Plant Line Value: Columbia
  misc_feature: MA Experiment 20001451 PARAMETER Experiment Name: At_Far-red-induction_P Parameter: Timepoint (hr) Value: 24
  misc_feature: MA Experiment 20001451 PARAMETER Experiment Name: At_Far-red-induction_P Parameter: Tissue Value: Whole Plant
  misc_feature: MA Experiment ID: 20001458 Result: Up-regulated in Transcription
  misc_feature: MA Experiment 20001458 PARAMETER Experiment Name: At_50mM_NH4NO3_L-to-H_P Parameter: Age (day) Value: Undefined
  misc_feature: MA Experiment 20001458 PARAMETER Experiment Name: At_50mM_NH4NO3_L-to-H_P Parameter: Organism Value: Undefined
  misc_feature: MA Experiment 20001458 PARAMETER Experiment Name: At_50mM_NH4NO3_L-to-H_P Parameter: Plant Line Value: Undefined
  misc_feature: MA Experiment 20001458 PARAMETER Experiment Name: At_50mM_NH4NO3_L-to-H_P Parameter: Timepoint (hr) Value: 2
  misc_feature: MA Experiment 20001458 PARAMETER Experiment Name: At_50mM_NH4NO3_L-to-H_P Parameter: Tissue Value: Siliques
  misc_feature: MA Experiment 20001458 PARAMETER Experiment Name: At_50mM_NH4NO3_L-to-H_P Parameter: Treatment Value: 50mM NH4NO3 vs. 100mM Manitol
  misc_feature: MA Experiment ID: 20001557 Result: Up-regulated in Transcription
  misc_feature: MA Experiment 20001557 PARAMETER Experiment Name: At_Drought_Soil_Dry_P Parameter: Age (day) Value: 27
  misc_feature: MA Experiment 20001557 PARAMETER Experiment Name: At_Drought_Soil_Dry_P Parameter: Organism Value: A. thaliana
  misc_feature: MA Experiment 20001557 PARAMETER Experiment Name: At_Drought_Soil_Dry_P Parameter: Plant Line Value: WS
  misc_feature: MA Experiment 20001557 PARAMETER Experiment Name: At_Drought_Soil_Dry_P Parameter: Post Timepoint (hr) Value: 3
  misc_feature: MA Experiment 20001557 PARAMETER Experiment Name: At_Drought_Soil_Dry_P Parameter: Post-Treatment Value: Re-Water vs. No Drought
  misc_feature: MA Experiment 20001557 PARAMETER Experiment Name: At_Drought_Soil_Dry_P Parameter: Timepoint (day) Value: 13
  misc_feature: MA Experiment 20001557 PARAMETER Experiment Name: At_Drought_Soil_Dry_P Parameter: Treatment Value: Drought vs. No Drought
  misc_feature: MA Experiment ID: 20001558 Result: Up-regulated in Transcription
  misc_feature: MA Experiment 20001558 PARAMETER Experiment Name: At_Drought_Soil_Dry_P Parameter: Age (day) Value: 27
  misc_feature: MA Experiment 20001558 PARAMETER Experiment Name: At_Drought_Soil_Dry_P Parameter: Organism Value: A. thaliana
  misc_feature: MA Experiment 20001558 PARAMETER Experiment Name: At_Drought_Soil_Dry_P Parameter: Plant Line Value: WS
  misc_feature: MA Experiment 20001558 PARAMETER Experiment Name: At_Drought_Soil_Dry_P Parameter: Post Timepoint (hr) Value: 6
  misc_feature: MA Experiment 20001558 PARAMETER Experiment Name: At_Drought_Soil_Dry_P Parameter: Post-Treatment Value: Re-Water vs. No Drought
  misc_feature: MA Experiment 20001558 PARAMETER Experiment Name: At_Drought_Soil_Dry_P Parameter: Timepoint (day) Value: 13
  misc_feature: MA Experiment 20001558 PARAMETER Experiment Name: At_Drought_Soil_Dry_P Parameter: Treatment Value: Drought vs. No Drought
  misc_feature: MA Experiment ID: 20001560 Result: Up-regulated in Transcription
  misc_feature: MA Experiment 20001560 PARAMETER Experiment Name: At_Drought_Soil_Dry_P Parameter: Age (day) Value: 28
  misc_feature: MA Experiment 20001560 PARAMETER Experiment Name: At_Drought_Soil_Dry_P Parameter: Organism Value: A. thaliana
  misc_feature: MA Experiment 20001560 PARAMETER Experiment Name: At_Drought_Soil_Dry_P Parameter: Plant Line Value: WS
  misc_feature: MA Experiment 20001560 PARAMETER Experiment Name: At_Drought_Soil_Dry_P Parameter: Post Timepoint (hr) Value: None
  misc_feature: MA Experiment 20001560 PARAMETER Experiment Name: At_Drought_Soil_Dry_P Parameter: Post-Treatment Value: None
  misc_feature: MA Experiment 20001560 PARAMETER Experiment Name: At_Drought_Soil_Dry_P Parameter: Timepoint (day) Value: 14
  misc_feature: MA Experiment 20001560 PARAMETER Experiment Name: At_Drought_Soil_Dry_P Parameter: Treatment Value: Drought vs. No Drought
  misc_feature: MA Experiment ID: 20001756 Result: Up-regulated in Transcription
  misc_feature: MA Experiment 20001756 PARAMETER Experiment Name: At_50mM_NH4NO3_L-to-H_P Parameter: Timepoint (hr) Value: 4
  misc_feature: MA Experiment 20001756 PARAMETER Experiment Name: At_50mM_NH4NO3_L-to-H_P Parameter: Tissue Value: Leaf
  misc_feature: MA Experiment 20001756 PARAMETER Experiment Name: At_50mM_NH4NO3_L-to-H_P Parameter: Treatment Value: 50mM NH4NO3 vs 100mM Mannitol
  misc_feature: MA Experiment ID: 20001757 Result: Up-regulated in Transcription
  misc_feature: MA Experiment 20001757 PARAMETER Experiment Name: At_50mM_NH4NO3_L-to-H_P Parameter: Timepoint (hr) Value: 6
  misc_feature: MA Experiment 20001757 PARAMETER Experiment Name: At_50mM_NH4NO3_L-to-H_P Parameter: Tissue Value: Leaf
  misc_feature: MA Experiment 20001757 PARAMETER Experiment Name: At_50mM_NH4NO3_L-to-H_P Parameter: Treatment Value: 50mM NH4NO3 vs 100mM Mannitol
atgtataaaaacacttgcgagcgcagcttcatcgccatcgccattctctctctcatcaaaagcttttctccttgattttcgcattctttagagtcttaacgcaaagatgagacctcctctaactggaagtggtggtgggttcagtggtggaagagggcgtggtggatacagtggtggtagaggtgacggtggattcagtggtggtcgaggtggcggtggtagaggaggaggaagaggtttcagcgaccgtggtggtcgcggcagaggaagaggaccaccacgtggtggtgctcgcggcggcagaggaccagctggccgtggaggcatgaaaggaggaagcaaagtgattgtggaacctcacagacacgcaggagtgttcattgcaaagggtaaagaagatgcccttgttaccaagaatttggttcctggtgaagctgtctacaacgagaagagaatctctgttcagaacgaagatggaaccaagactgaatacagagtttggaatcctttccgttcgaagttggctgctgctattcttggtggtgttgataacatctggattaaacctggtgctaaagttctataccttggtgctgcttctggaaccacagtctctcatgtgtctgatcttgttggccctgaggggtgtgtgtacgcggttgagttttctcatagaagtggtagagatttggtgaacatggcaaagaagagaaccaatgttattccaatcatcgaggatgctagacacccagctaaatacagaatgcttgtaggcatggttgatgttatcttctctgatgttgctcagccagatcaggctaggatcttggctttgaatgcatcatacttcctcaagtcaggaggacactttgtgatctcaataaaggcaaactgtatcgactccaccgttccagcagaagctgtgttccagactgaagtgaagaagcttcaacaggagcaattcaaaccagctgagcaagtgacgcttgagccatttgagcgtgaccatgcatgtgtcgttggtggctaccgtatgcctaagaagccaaaggctgctactgctgcttagaagttttctactctacgctcttcccagtacctcagattttgctttgtctcggtctctttagaatctgtatggttttagggtttatcttaaattttgagctttgtaatcattttgaaccctggttatgttcacttggcttccagcgctaactttttcgacaagtttttgatatatggaacaattataatagaattttgtcgactgaggttgatttcttt

SEQ ID NO: 28652 - protein, 320 aa, Arabidopsis thaliana
  peptide (1)..(320): Ceres Seq. ID no. 13497686
  misc_feature (78)..(310): Pfam Name: Fibrillarin Pfam Description: Fibrillarin
  misc_feature (1)..(315): Homolog of NCBI NO: 119856 NR Description: Fibrillarin
  misc_feature (1)..(315): Homolog of NCBI NO: 34855407 NR Description: similar to fibrillarin [Rattus norvegicus]
  misc_feature (7)..(313): Homolog of NCBI NO: 17647425 NR Description: Fibrillarin CG9888-PA [Drosophila melanogaster]
  misc_feature (1)..(315): Homolog of NCBI NO: 27924365 NR Description: Unknown (protein for IMAGE:5543421) [Xenopus
  misc_feature (7)..(313): Homolog of NCBI NO: 27374264 NR Description: Fib-PA [Drosophila erecta]
  misc_feature (7)..(315): Homolog of NCBI NO: 38566188 NR Description: Fibrillarin [Silurana tropicalis]
  misc_feature (1)..(316): Homolog of NCBI NO: 6003681 NR Description: fibrillarin homolog [Arabidopsis thaliana]
  misc_feature (1)..(315): Homolog of NCBI NO: 30696189 NR Description: fibrillarin 1 (Fib1) (SKIP7) [Arabidopsis
  misc_feature (1)..(320): Homolog of NCBI NO: 15028155 NR Description: putative fibrillarin 2 protein AtFib2
  misc_feature (1)..(320): Homolog of NCBI NO: 18416588 NR Description: fibrillarin 2 (AtFib2) [Arabidopsis thaliana]
MRPPLTGSGGGFSGGRGRGGYSGGRGDGGFSGGRGGGGRGGGRGFSDRGGRGRGRGPPRGGARGGRGPAGRGGMKGGSKVIVEPHRHAGVFIAKGKEDALVTKNLVPGEAVYNEKRISVQNEDGTKTEYRVWNPFRSKLAAAILGGVDNIWIKPGAKVLYLGAASGTTVSHVSDLVGPEGCVYAVEFSHRSGRDLVNMAKKRTNVIPIIEDARHPAKYRMLVGMVDVIFSDVAQPDQARILALNASYFLKSGGHFVISIKANCIDSTVPAEAVFQTEVKKLQQEQFKPAEQVTLEPFERDHACVVGGYRMPKKPKAATAA

SEQ ID NO: 28653 - protein, 247 aa, Arabidopsis thaliana
  peptide (1)..(247): Ceres Seq. ID no. 13497687
  misc_feature (5)..(237): Pfam Name: Fibrillarin Pfam Description: Fibrillarin
  misc_feature (1)..(242): Homolog of NCBI NO: 119856 NR Description: Fibrillarin
  misc_feature (1)..(242): Homolog of NCBI NO: 34855407 NR Description: similar to fibrillarin [Rattus norvegicus]
  misc_feature (1)..(240): Homolog of NCBI NO: 17647425 NR Description: Fibrillarin CG9888-PA [Drosophila melanogaster]
  misc_feature (1)..(242): Homolog of NCBI NO: 27924365 NR Description: Unknown (protein for IMAGE:5543421) [Xenopus
  misc_feature (1)..(240): Homolog of NCBI NO: 27374264 NR Description: Fib-PA [Drosophila erecta]
  misc_feature (1)..(242): Homolog of NCBI NO: 38566188 NR Description: Fibrillarin [Silurana tropicalis]
  misc_feature (1)..(243): Homolog of NCBI NO: 6003681 NR Description: fibrillarin homolog [Arabidopsis thaliana]
  misc_feature (1)..(242): Homolog of NCBI NO: 30696189 NR Description: fibrillarin 1 (Fib1) (SKIP7) [Arabidopsis
  misc_feature (1)..(247): Homolog of NCBI NO: 15028155 NR Description: putative fibrillarin 2 protein AtFib2
  misc_feature (1)..(247): Homolog of NCBI NO: 18416588 NR Description: fibrillarin 2 (AtFib2) [Arabidopsis thaliana]
MKGGSKVIVEPHRHAGVFIAKGKEDALVTKNLVPGEAVYNEKRISVQNEDGTKTEYRVWNPFRSKLAAAILGGVDNIWIKPGAKVLYLGAASGTTVSHVSDLVGPEGCVYAVEFSHRSGRDLVNMAKKRTNVIPIIEDARHPAKYRMLVGMVDVIFSDVAQPDQARILALNASYFLKSGGHFVISIKANCIDSTVPAEAVFQTEVKKLQQEQFKPAEQVTLEPFERDHACVVGGYRMPKKPKAATAA

SEQ ID NO: 28654 - DNA, 2388 bp, Arabidopsis thaliana
  misc_feature (1)..(2388): Ceres Seq. ID no. 12326046
  misc_feature: MA Experiment ID: 20000171 Result: Down-regulated in Transcription
  misc_feature: MA Experiment 20000171 PARAMETER Experiment Name: At_42deg_Heat_P Parameter: Age (day) Value: 14
  misc_feature: MA Experiment 20000171 PARAMETER Experiment Name: At_42deg_Heat_P Parameter: Organism Value: A. thaliana
  misc_feature: MA Experiment 20000171 PARAMETER Experiment Name: At_42deg_Heat_P Parameter: Plant Line Value: WS
  misc_feature: MA Experiment 20000171 PARAMETER Experiment Name: At_42deg_Heat_P Parameter: Temperature (deg C) Value: 42 vs. 22
  misc_feature: MA Experiment 20000171 PARAMETER Experiment Name: At_42deg_Heat_P Parameter: Timepoint (hr) Value: 1
  misc_feature: MA Experiment 20000171 PARAMETER Experiment Name: At_42deg_Heat_P Parameter: Tissue Value: Aerial
  misc_feature: MA Experiment ID: 20000173 Result: Down-regulated in Transcription
  misc_feature: MA Experiment 20000173 PARAMETER Experiment Name: At_42deg_Heat_P Parameter: Age (day) Value: 14
  misc_feature: MA Experiment 20000173 PARAMETER Experiment Name: At_42deg_Heat_P Parameter: Organism Value: A. thaliana
  misc_feature: MA Experiment 20000173 PARAMETER Experiment Name: At_42deg_Heat_P Parameter: Plant Line Value: WS
  misc_feature: MA Experiment 20000173 PARAMETER Experiment Name: At_42deg_Heat_P Parameter: Temperature (deg C) Value: 42 vs. 22
  misc_feature: MA Experiment 20000173 PARAMETER Experiment Name: At_42deg_Heat_P Parameter: Timepoint (hr) Value: 6
  misc_feature: MA Experiment 20000173 PARAMETER Experiment Name: At_42deg_Heat_P Parameter: Tissue Value: Aerial
  misc_feature: MA Experiment ID: 20000184 Result: Down-regulated in Transcription
  misc_feature: MA Experiment 20000184 PARAMETER Experiment Name: At_Shoots__P Parameter: Age (day) Value: 7
  misc_feature: MA Experiment 20000184 PARAMETER Experiment Name: At_Shoots__P Parameter: Tissue Value: Shoots vs. Whole Plant
  misc_feature: MA Experiment ID: 20000185 Result: Up-regulated in Transcription
  misc_feature: MA Experiment 20000185 PARAMETER Experiment Name: At_Roots__P Parameter: Age (day) Value: 7 vs. 21
  misc_feature: MA Experiment 20000185 PARAMETER Experiment Name: At_Roots__P Parameter: Organism Value: A. thaliana
  misc_feature: MA Experiment 20000185 PARAMETER Experiment Name: At_Roots__P Parameter: Tissue Value: Roots vs. Whole Plant
  misc_feature: MA Experiment ID: 20000234 Result: Up-regulated in Transcription
  misc_feature: MA Experiment 20000234 PARAMETER Experiment Name: At_Siliques_P Parameter: Age (day) Value: 21
  misc_feature: MA Experiment 20000234 PARAMETER Experiment Name: At_Siliques_P Parameter: Organism Value: A. thaliana
  misc_feature: MA Experiment 20000234 PARAMETER Experiment Name: At_Siliques_P Parameter: Plant Line Value: WS
  misc_feature: MA Experiment 20000234 PARAMETER Experiment Name: At_Siliques_P Parameter: Tissue Value: Less Than 5mm Siliques vs. Whole Plant
  misc_feature: MA Experiment ID: 20000264 Result: Up-regulated in Transcription
  misc_feature: MA Experiment 20000264 PARAMETER Experiment Name: At_Open_Flower_P Parameter: Age (day) Value: 21
  misc_feature: MA Experiment 20000264 PARAMETER Experiment Name: At_Open_Flower_P Parameter: Plant Line Value: WS
  misc_feature: MA Experiment 20000264 PARAMETER Experiment Name: At_Open_Flower_P Parameter: Tissue Value: Open Flower vs. Whole Plant
  misc_feature: MA Experiment ID: 20000265 Result: Up-regulated in Transcription
  misc_feature: MA Experiment 20000265 PARAMETER Experiment Name: At_Open_Flower_P Parameter: Age (day) Value: 21
  misc_feature: MA Experiment 20000265 PARAMETER Experiment Name: At_Open_Flower_P Parameter: Plant Line Value: WS
  misc_feature: MA Experiment 20000265 PARAMETER Experiment Name: At_Open_Flower_P Parameter: Tissue Value: Closed Flower vs. Whole Plant
  misc_feature: MA Experiment ID: 20000286 Result: Up-regulated in Transcription
  misc_feature: MA Experiment 20000286 PARAMETER Experiment Name: At_Open_Flower_P Parameter: Age (day) Value: 21
  misc_feature: MA Experiment 20000286 PARAMETER Experiment Name: At_Open_Flower_P Parameter: Plant Line Value: WS
  misc_feature: MA Experiment 20000286 PARAMETER Experiment Name: At_Open_Flower_P Parameter: Tissue Value: Half Open vs. Whole Plant
  misc_feature: MA Experiment ID: 20000439 Result: Up-regulated in Transcription
  misc_feature: MA Experiment 20000439 PARAMETER Experiment Name: At_Roots__P Parameter: Age (day) Value: 14 vs. 21
  misc_feature: MA Experiment 20000439 PARAMETER Experiment Name: At_Roots__P Parameter: Organism Value: A. thaliana
  misc_feature: MA Experiment 20000439 PARAMETER Experiment Name: At_Roots__P Parameter: Tissue Value: Roots vs. Whole Plant
  misc_feature: MA Experiment ID: 20001451 Result: Down-regulated in Transcription
  misc_feature: MA Experiment 20001451 PARAMETER Experiment Name: At_Far-red-induction_P Parameter: Age (day) Value: 7
  misc_feature: MA Experiment 20001451 PARAMETER Experiment Name: At_Far-red-induction_P Parameter: Light Value: Far-red vs. White
  misc_feature: MA Experiment 20001451 PARAMETER Experiment Name: At_Far-red-induction_P Parameter: Organism Value: A. thaliana
  misc_feature: MA Experiment 20001451 PARAMETER Experiment Name: At_Far-red-induction_P Parameter: Plant Line Value: Columbia
  misc_feature: MA Experiment 20001451 PARAMETER Experiment Name: At_Far-red-induction_P Parameter: Timepoint (hr) Value: 24
  misc_feature: MA Experiment 20001451 PARAMETER Experiment Name: At_Far-red-induction_P Parameter: Tissue Value: Whole Plant
cttcgtcttcttctctggtttgggattcatgagttgagtcacaaggaaaaagcatgttagactgtggcaaaaaagcagtcaaatcacaagtaatcagtggccgtctcgagaagtttgtaaggttggatagtatggattctaggtactcgcagacttctgatactggtctaaacagatgcactctcaatttacaaggaccaacacgtggtggtggtgctcagggaaacaatgtatcttctggttcctttaagaaagggtttagaaaatgttctaaaggtctttggtctataggaagatcaattggtttaggggtttcacgagcagtttttcctaaagatcttaaagtatcagagaagaagatttttgatccacaggacaagtttcttttgctctgtaacaaactgtttgttacttcttgcattctcgctgtgtctgtggatccgctcttcttgtatcttccgtttgttaaggataatgagaaatgtatcggtatagaccggaagttggctattatagcaacaacgctgcggacagtaattgatgcgttttatctttttcacatggctcttcggtttagaacagcttttgtcgccccttcttctcgggtttttggtcgaggcgaacttgtgattgaccctgcacagatagcaaaacgttatttgcagcagtatttcatcattgactttctctctgtgcttccacttccacagattgtagtttggagatttctttacatctctaaaggtgcaagtgtgctagcaacaaagcgggcattgcgatctatcattttagttcaatatattccaagattcattcggttgtatcctttgagctcagagttaaagagaacagctggtgtttttgctgaaactgcttgggctggtgcagcttattacttgctactctacatgctcgcaagccatattgttggggctatatggtacttattggccttggaacgttataatggatgctggaccaaggtttgcagtaatagcagcttggactgtcacagaaacttcctgttttgtggtaatgaaaaaatggatggttatgcagcttggactaccatcaaagattctgttctgcaattaaattgcccagttaatacaaccgataatcctccttttgattttgggatctacttaagagccttgtcctctggcattgtctcatctaagagctttgtctctaagtacttcttctgtttatggtggggacttcagaatctcagcactcttggtcaagggcttgaaaccagcacataccctggagaagttatattctccatagcacttgccattgctggacttcttctctttgctcttcttattggaaacatgcagacttatcttcaatcccttacaatccggcttgaagaaatgagagtgaaaagacgtgattcagaacagtggatgcatcatcgaatgcttccaccggaactgcgagaacgagtcagacgatatgaccagtacaaatggttggagacacgcggagttgatgaagagaatttggttcagaacctcccaaaggatctgagaagagatatcaaacgccatctctgtctggctttggttcggagggttccattgtttgagaatatggatgagaggctgctcgatgcaatctgtgagcggttgaagccgtgtctgtacacagagagctcttatttggttcgggaaggcgacccggttaacgagatgctcttcattatccgtggtcggcttgagagtgtgaccaccgatggcggaagaagcggtttcttcaaccgcagtttgcttaaagaaggagatttctgtggggaagagcttttgacatgggcacttgatcccaaatctggttccaacctaccatcctctaccagaaccgcaaaggctctaactgaagtagaggcttttgctttgatagcagatgagctcaaatttgtggctagccagttcagaagactacacagcaggcgagttcaacacacattcagattctactcgcaacaatggagaacttgggctgctatcttcatacaagccgcgtggcgacgatacgtgaagaagaagaaacttgagcaactcaggaaagaagaagaagaaggagaaggatcagttactagcatcagagcgacgttcctggcttcaaagtttgctgcaaatgcacttcgtaaagttcacaagaaccgtattgaagcaaagtctactatagaacttgtgaaatatcagaagccttcagaacctgatttctctgctgatgatactagttgaccaaattttaccagaaaagtgctaatgtctatgaacgcttataacttgtataactcggattgaattttattgtttgatttgtgttgctacattaagataaagaaaaaggtggtaacataaaagattatttgtt

SEQ ID NO: 28655 - protein, 733 aa, Arabidopsis thaliana
  peptide (1)..(733): Ceres Seq. ID no. 12326047
  misc_feature (154)..(430): Pfam Name: Ion transport protein Pfam Description: Ion transport protein
  misc_feature (56)..(733): Homolog of NCBI NO: 18378827 NR Description: cyclic nucleotide-regulated ion channel
  misc_feature (17)..(731): Homolog of NCBI NO: 15238657 NR Description: cyclic nucleotide-regulated ion channel (CNGC1)
  misc_feature (8)..(731): Homolog of NCBI NO: 38344883 NR Description: OSJNBa0033G05.7 [Oryza sativa (japonica
  misc_feature (61)..(680): Homolog of NCBI NO: 15219100 NR Description: cyclic nucleotide-regulated ion channel, putative
  misc_feature (37)..(680): Homolog of NCBI NO: 15223667 NR Description: cyclic nucleotide-regulated ion channel, putative
  misc_feature (10)..(680): Homolog of NCBI NO: 25513728 NR Description: probable cyclic nucleotide and
  misc_feature (14)..(730): Homolog of NCBI NO: 15242908 NR Description: cyclic nucleotide-regulated ion channel (CNGC5)
  misc_feature (14)..(730): Homolog of NCBI NO: 30696976 NR Description: cyclic nucleotide-regulated ion channel (CNGC5)
  misc_feature (27)..(276): Homolog of NCBI NO: 25412181 NR Description: hypothetical protein At2g23980 [imported] -
  misc_feature (281)..(731): Homolog of NCBI NO: 25412181 NR Description: hypothetical protein At2g23980 [imported] -
MLDCGKKAVKSQVISGRLEKFVRLDSMDSRYSQTSDTGLNRCTLNLQGPTRGGGAQGNNVSSGSFKKGFRKCSKGLWSIGRSIGLGVSRAVFPKDLKVSEKKIFDPQDKFLLLCNKLFVTSCILAVSVDPLFLYLPFVKDNEKCIGIDRKLAIIATTLRTVIDAFYLFHMALRFRTAFVAPSSRVFGRGELVIDPAQIAKRYLQQYFIIDFLSVLPLPQIVVWRFLYISKGASVLATKRALRSIILVQYIPRFIRLYPLSSELKRTAGVFAETAWAGAAYYLLLYMLASHIVGAIWYLLALERYNGCWTKVCSNSSLDCHRNFLFCGNEKMDGYAAWTTIKDSVLQLNCPVNTTDNPPFDFGIYLRALSSGIVSSKSFVSKYFFCLWWGLQNLSTLGQGLETSTYPGEVIFSIALAIAGLLLFALLIGNMQTYLQSLTIRLEEMRVKRRDSEQWMHHRMLPPELRERVRRYDQYKWLETRGVDEENLVQNLPKDLRRDIKRHLCLALVRRVPLFENMDERLLDAICERLKPCLYTESSYLVREGDPVNEMLFIIRGRLESVTTDGGRSGFFNRSLLKEGDFCGEELLTWALDPKSGSNLPSSTRTAKALTEVEAFALIADELKFVASQFRRLHSRRVQHTFRFYSQQWRTWAAIFIQAAWRRYVKKKKLEQLRKEEEEGEGSVTSIRATFLASKFAANALRKVHKNRIEAKSTIELVKYQKPSEPDFSADDTS

SEQ ID NO: 28656 - protein, 707 aa, Arabidopsis thaliana
  peptide (1)..(707): Ceres Seq. ID no. 12326048
  misc_feature (128)..(404): Pfam Name: Ion transport protein Pfam Description: Ion transport protein
  misc_feature (30)..(707): Homolog of NCBI NO: 18378827 NR Description: cyclic nucleotide-regulated ion channel
  misc_feature (1)..(705): Homolog of NCBI NO: 15238657 NR Description: cyclic nucleotide-regulated ion channel (CNGC1)
  misc_feature (1)..(705): Homolog of NCBI NO: 38344883 NR Description: OSJNBa0033G05.7 [Oryza sativa (japonica
  misc_feature (35)..(654): Homolog of NCBI NO: 15219100 NR Description: cyclic nucleotide-regulated ion channel, putative
  misc_feature (11)..(654): Homolog of NCBI NO: 15223667 NR Description: cyclic nucleotide-regulated ion channel, putative
  misc_feature (1)..(654): Homolog of NCBI NO: 25513728 NR Description: probable cyclic nucleotide and
  misc_feature (1)..(704): Homolog of NCBI NO: 15242908 NR Description: cyclic nucleotide-regulated ion channel (CNGC5)
  misc_feature (1)..(704): Homolog of NCBI NO: 30696976 NR Description: cyclic nucleotide-regulated ion channel (CNGC5)
  misc_feature (1)..(250): Homolog of NCBI NO: 25412181 NR Description: hypothetical protein At2g23980 [imported] -
  misc_feature (255)..(705): Homolog of NCBI NO: 25412181 NR Description: hypothetical protein At2g23980 [imported] -
MDSRYSQTSDTGLNRCTLNLQGPTRGGGAQGNNVSSGSFKKGFRKCSKGLWSIGRSIGLGVSRAVFPKDLKVSEKKIFDPQDKFLLLCNKLFVTSCILAVSVDPLFLYLPFVKDNEKCIGIDRKLAIIATTLRTVIDAFYLFHMALRFRTAFVAPSSRVFGRGELVIDPAQIAKRYLQQYFIIDFLSVLPLPQIVVWRFLYISKGASVLATKRALRSIILVQYIPRFIRLYPLSSELKRTAGVFAETAWAGAAYYLLLYMLASHIVGAIWYLLALERYNGCWTKVCSNSSLDCHRNFLFCGNEKMDGYAAWTTIKDSVLQLNCPVNTTDNPPFDFGIYLRALSSGIVSSKSFVSKYFFCLWWGLQNLSTLGQGLETSTYPGEVIFSIALAIAGLLLFALLIGNMQTYLQSLTIRLEEMRVKRRDSEQWMHHRMLPPELRERVRRYDQYKWLETRGVDEENLVQNLPKDLRRDIKRHLCLALVRRVPLFENMDERLLDAICERLKPCLYTESSYLVREGDPVNEMLFIIRGRLESVTTDGGRSGFFNRSLLKEGDFCGEELLTWALDPKSGSNLPSSTRTAKALTEVEAFALIADELKFVASQFRRLHSRRVQHTFRFYSQQWRTWAAIFIQAAWRRYVKKKKLEQLRKEEEEGEGSVTSIRATFLASKFAANALRKVHKNRIEAKSTIELVKYQKPSEPDFSADDTS

SEQ ID NO: 28657 - protein, 564 aa, Arabidopsis thaliana
  peptide (1)..(564): Ceres Seq. ID no. 12326049
  misc_feature (1)..(261): Pfam Name: Ion transport protein Pfam Description: Ion transport protein
  misc_feature (1)..(564): Homolog of NCBI NO: 18378827 NR Description: cyclic nucleotide-regulated ion channel
  misc_feature (1)..(562): Homolog of NCBI NO: 15238657 NR Description: cyclic nucleotide-regulated ion channel (CNGC1)
  misc_feature (1)..(562): Homolog of NCBI NO: 38344883 NR Description: OSJNBa0033G05.7 [Oryza sativa (japonica
  misc_feature (1)..(511): Homolog of NCBI NO: 15219100 NR Description: cyclic nucleotide-regulated ion channel, putative
  misc_feature (1)..(511): Homolog of NCBI NO: 15223667 NR Description: cyclic nucleotide-regulated ion channel, putative
  misc_feature (1)..(511): Homolog of NCBI NO: 25513728 NR Description: probable cyclic nucleotide and
  misc_feature (1)..(561): Homolog of NCBI NO: 15242908 NR Description: cyclic nucleotide-regulated ion channel (CNGC5)
  misc_feature (1)..(561): Homolog of NCBI NO: 30696976 NR Description: cyclic nucleotide-regulated ion channel (CNGC5)
  misc_feature (1)..(107): Homolog of NCBI NO: 25412181 NR Description: hypothetical protein At2g23980 [imported] -
  misc_feature (112)..(562): Homolog of NCBI NO: 25412181 NR Description: hypothetical protein At2g23980 [imported] -
MALRFRTAFVAPSSRVFGRGELVIDPAQIAKRYLQQYFIIDFLSVLPLPQIVVWRFLYISKGASVLATKRALRSIILVQYIPRFIRLYPLSSELKRTAGVFAETAWAGAAYYLLLYMLASHIVGAIWYLLALERYNGCWTKVCSNSSLDCHRNFLFCGNEKMDGYAAWTTIKDSVLQLNCPVNTTDNPPFDFGIYLRALSSGIVSSKSFVSKYFFCLWWGLQNLSTLGQGLETSTYPGEVIFSIALAIAGLLLFALLIGNMQTYLQSLTIRLEEMRVKRRDSEQWMHHRMLPPELRERVRRYDQYKWLETRGVDEENLVQNLPKDLRRDIKRHLCLALVRRVPLFENMDERLLDAICERLKPCLYTESSYLVREGDPVNEMLFIIRGRLESVTTDGGRSGFFNRSLLKEGDFCGEELLTWALDPKSGSNLPSSTRTAKALTEVEAFALIADELKFVASQFRRLHSRRVQHTFRFYSQQWRTWAAIFIQAAWRRYVKKKKLEQLRKEEEEGEGSVTSIRATFLASKFAANALRKVHKNRIEAKSTIELVKYQKPSEPDFSADDTS

SEQ ID NO: 28658 - DNA, 1401 bp, Arabidopsis thaliana
  misc_feature (1)..(1401): Ceres Seq. ID no. 13500186
  misc_feature: MA Experiment ID: 20000307 Result: Down-regulated in Transcription
  misc_feature: MA Experiment 20000307 PARAMETER Experiment Name: At_Germinating_Seeds_Sub_P Parameter: Age (hr) Value: 24 vs. 0
  misc_feature: MA Experiment 20000307 PARAMETER Experiment Name: At_Germinating_Seeds_Sub_P Parameter: Organism Value: A. thaliana
  misc_feature: MA Experiment 20000307 PARAMETER Experiment Name: At_Germinating_Seeds_Sub_P Parameter: Plant Line Value: WS
  misc_feature: MA Experiment 20000307 PARAMETER Experiment Name: At_Germinating_Seeds_Sub_P Parameter: Tissue Value: Germinating Seeds
  misc_feature: MA Experiment ID: 20000315 Result: Down-regulated in Transcription
  misc_feature: MA Experiment 20000315 PARAMETER Experiment Name: At_14day_Shoots-Roots_Sub_P Parameter: Age (day) Value: 14
  misc_feature: MA Experiment 20000315 PARAMETER Experiment Name: At_14day_Shoots-Roots_Sub_P Parameter: Organism Value: A. thaliana
  misc_feature: MA Experiment 20000315 PARAMETER Experiment Name: At_14day_Shoots-Roots_Sub_P Parameter: Plant Line Value: WS
  misc_feature: MA Experiment 20000315 PARAMETER Experiment Name: At_14day_Shoots-Roots_Sub_P Parameter: Tissue Value: Shoots vs. Whole Plant
  misc_feature: MA Experiment ID: 20000348 Result: Up-regulated in Transcription
  misc_feature: MA Experiment 20000348 PARAMETER Experiment Name: At_100uM_ABA_Sub_P Parameter: Age (day) Value: 14
  misc_feature: MA Experiment 20000348 PARAMETER Experiment Name: At_100uM_ABA_Sub_P Parameter: Organism Value: A. thaliana
  misc_feature: MA Experiment 20000348 PARAMETER Experiment Name: At_100uM_ABA_Sub_P Parameter: Plant Line Value: WS
  misc_feature: MA Experiment 20000348 PARAMETER Experiment Name: At_100uM_ABA_Sub_P Parameter: Timepoint (hr) Value: 1
  misc_feature: MA Experiment 20000348 PARAMETER Experiment Name: At_100uM_ABA_Sub_P Parameter: Tissue Value: Aerial
  misc_feature: MA Experiment 20000348 PARAMETER Experiment Name: At_100uM_ABA_Sub_P Parameter: Treatment Value: 100uM ABA vs. No Treatment
  misc_feature: MA Experiment ID: 20000440 Result: Up-regulated in Transcription
  misc_feature: MA Experiment 20000440 PARAMETER Experiment Name: At_Closed-Flower__Sub_P Parameter: Tissue Value: Closed Flower vs. Whole Plant
gtgtcggttccagaaatcagaaagtaaatcatacagtcaaaaccgcttcttctataaaaccctttttagctcaatcccaaaacgcaataaaaaacaaaacgctctccagaatttcgaaacttctaagatattttgttttctctcttaacgatggcgaagagtgttttggttaccggcggcgctggctatatcggaagtcatactgttcttcaactgcttgaaggtggttactccgccgtcgttgttgacaattacgacaattcctctgctgcttcgcttcagcgcgtgaagaaactcgccggcgaaaacggaaaccgcctctccttccaccaggtggatctccgagacaggcctgcgcttgagaagatattctcagaaacaaagtttgatgcagtgatacactttgctggacttaaagcagtaggtgagagtgtggagaagcctttgctctattataataataacattgttggcactgttactcttttggaggttatggctcaatacggctgcaaaaatcttgtattttcatcatcagctactgtctatggctggcctaaggaggttccttgcactgaggagtcaccaatttctgccactaacccatatggccgtacaaagctttttatcgaagagatttgccgggatgtacatcgttctgactcggaatggaagatcatattgcttagatacttcaaccctgttggtgcacatcctagtggttacattggtgaagatcctcttggagttcccaacaatctcatgccttatgtccaacaagttgcagttggccggagacctcaccttactgtctttggaaccgactacaagacaaaggatggtacaggggttagagattacattcatgtcatggatttagcagatggacacatagctgctctgcgtaagctagatgatctcaaaatcagttgtgaggtatacaatcttggaacgggtaatggaacatcggtcctagaaatggtcgctgcctttgaaaaagcatccggaaagaaaatccctttggtgatggctggacgacgtcctggagacgctgaagttgtttacgcctcaacggaaaaagcagagcgcgaactaaattggaaggctaagaatgggatagaggagatgtgtagggatctatggaattgggcaagcaataacccttacggctacaattcctcctccaacggctcctcttcataattctccttttttaatttttattttgccttttttgcttacttatattcatataaacaaacacataaaaaaaaagaagagaaaggctgacaagtacccaaactttagaagaaattgaggaaaattcttgtactatcaatttatcatagaaactatatttattaaatcgttagttttcaatcgttgggagttttttttctt

SEQ ID NO: 28659 - protein, 350 aa, Arabidopsis thaliana
  peptide (1)..(350): Ceres Seq. ID no. 13500187
  misc_feature (5)..(338): Pfam Name: NAD dependent epimerase/dehydratase family Pfam Description: NAD dependent epimerase/dehydratase family
  misc_feature (1)..(62): Homolog of NCBI NO: 6633809 NR Description: F1N19.2 [Arabidopsis thaliana]
  misc_feature (234)..(348): Homolog of NCBI NO: 6633809 NR Description: F1N19.2 [Arabidopsis thaliana]
  misc_feature (62)..(235): Homolog of NCBI NO: 6633809 NR Description: F1N19.2 [Arabidopsis thaliana]
  misc_feature (2)..(349): Homolog of NCBI NO: 11386775 NR Description: UDP-glucose 4-epimerase GEPI48 (Galactowaldenase)
  misc_feature (1)..(348): Homolog of NCBI NO: 15217653 NR Description: UDP-glucose 4-epimerase (UDP-galactose
  misc_feature (1)..(346): Homolog of NCBI NO: 21553659 NR Description: UDP-galactose 4-epimerase-like protein
  misc_feature (1)..(349): Homolog of NCBI NO: 15236988 NR Description: UDP-glucose 4-epimerase (UDP-galactose
  misc_feature (1)..(349): Homolog of NCBI NO: 12643850 NR Description: Probable UDP-glucose 4-epimerase At4g10960
  misc_feature (1)..(350): Homolog of NCBI NO: 21536846 NR Description: UDPglucose 4-epimerase-like protein [Arabidopsis
  misc_feature (1)..(350): Homolog of NCBI NO: 15236663 NR Description: UDP-glucose 4-epimerase (UDP-galactose
MAKSVLVTGGAGYIGSHTVLQLLEGGYSAVVVDNYDNSSAASLQRVKKLAGENGNRLSFHQVDLRDRPALEKIFSETKFDAVIHFAGLKAVGESVEKPLLYYNNNIVGTVTLLEVMAQYGCKNLVFSSSATVYGWPKEVPCTEESPISATNPYGRTKLFIEEICRDVHRSDSEWKIILLRYFNPVGAHPSGYIGEDPLGVPNNLMPYVQQVAVGRRPHLTVFGTDYKTKDGTGVRDYIHVMDLADGHIAALRKLDDLKISCEVYNLGTGNGTSVLEMVAAFEKASGKKIPLVMAGRRPGDAEVVYASTEKAERELNWKAKNGIEEMCRDLWNWASNNPYGYNSSSNGSSS

SEQ ID NO: 28660 - protein, 235 aa, Arabidopsis thaliana
  peptide (1)..(235): Ceres Seq. ID no. 13500188
  misc_feature (1)..(223): Pfam Name: NAD dependent epimerase/dehydratase family Pfam Description: NAD dependent epimerase/dehydratase family
  misc_feature (1)..(231): Homolog of NCBI NO: 21715990 NR Description: UDP-glucose 4-epimerase [Oryza sativa (japonica
  misc_feature (119)..(233): Homolog of NCBI NO: 6633809 NR Description: F1N19.2 [Arabidopsis thaliana]
  misc_feature (1)..(120): Homolog of NCBI NO: 6633809 NR Description: F1N19.2 [Arabidopsis thaliana]
  misc_feature (1)..(234): Homolog of NCBI NO: 11386775 NR Description: UDP-glucose 4-epimerase GEPI48 (Galactowaldenase)
  misc_feature (1)..(233): Homolog of NCBI NO: 15217653 NR Description: UDP-glucose 4-epimerase (UDP-galactose
  misc_feature (1)..(231): Homolog of NCBI NO: 21553659 NR Description: UDP-galactose 4-epimerase-like protein
  misc_feature (1)..(234): Homolog of NCBI NO: 15236988 NR Description: UDP-glucose 4-epimerase (UDP-galactose
  misc_feature (1)..(234): Homolog of NCBI NO: 12643850 NR Description: Probable UDP-glucose 4-epimerase At4g10960
  misc_feature (1)..(235): Homolog of NCBI NO: 21536846 NR Description: UDPglucose 4-epimerase-like protein [Arabidopsis
  misc_feature (1)..(235): Homolog of NCBI NO: 15236663 NR Description: UDP-glucose 4-epimerase (UDP-galactose
MAQYGCKNLVFSSSATVYGWPKEVPCTEESPISATNPYGRTKLFIEEICRDVHRSDSEWKIILLRYFNPVGAHPSGYIGEDPLGVPNNLMPYVQQVAVGRRPHLTVFGTDYKTKDGTGVRDYIHVMDLADGHIAALRKLDDLKISCEVYNLGTGNGTSVLEMVAAFEKASGKKIPLVMAGRRPGDAEVVYASTEKAERELNWKAKNGIEEMCRDLWNWASNNPYGYNSSSNGSSS

SEQ ID NO: 28661 - DNA, 925 bp, Arabidopsis thaliana
  misc_feature (1)..(925): Ceres Seq. ID no. 12397142
  misc_feature: MA Experiment ID: 20000227 Result: Down-regulated in Transcription
  misc_feature: MA Experiment 20000227 PARAMETER Experiment Name: At_Root-Tips-vs-Tops_P Parameter: Tissue Value: Root Tips vs. Root Tops
  misc_feature: MA Experiment ID: 20000437 Result: Up-regulated in Transcription
  misc_feature: MA Experiment 20000437 PARAMETER Experiment Name: At_Drought_P Parameter: Age (day) Value: 8
  misc_feature: MA Experiment 20000437 PARAMETER Experiment Name: At_Drought_P Parameter: Organism Value: A. thaliana
  misc_feature: MA Experiment 20000437 PARAMETER Experiment Name: At_Drought_P Parameter: Plant Line Value: WS
  misc_feature: MA Experiment 20000437 PARAMETER Experiment Name: At_Drought_P Parameter: Timepoint (hr) Value: 24
  misc_feature: MA Experiment 20000437 PARAMETER Experiment Name: At_Drought_P Parameter: Tissue Value: Whole Plant
  misc_feature: MA Experiment 20000437 PARAMETER Experiment Name: At_Drought_P Parameter: Treatment Value: Drought vs. No Drought
  misc_feature: MA Experiment ID: 20000453 Result: Up-regulated in Transcription
  misc_feature: MA Experiment 20000453 PARAMETER Experiment Name: At_100uM_ABA_P Parameter: Age (day) Value: 15
  misc_feature: MA Experiment 20000453 PARAMETER Experiment Name: At_100uM_ABA_P Parameter: Organism Value: A. thaliana
  misc_feature: MA Experiment 20000453 PARAMETER Experiment Name: At_100uM_ABA_P Parameter: Plant Line Value: WS
  misc_feature: MA Experiment 20000453 PARAMETER Experiment Name: At_100uM_ABA_P Parameter: Timepoint (hr) Value: 24
  misc_feature: MA Experiment 20000453 PARAMETER Experiment Name: At_100uM_ABA_P Parameter: Tissue Value: Aerial
  misc_feature: MA Experiment 20000453 PARAMETER Experiment Name: At_100uM_ABA_P Parameter: Treatment Value: 100uM ABA vs. No Treatment
  misc_feature: MA Experiment ID: 20000794 Result: Up-regulated in Transcription
  misc_feature: MA Experiment 20000794 PARAMETER Experiment Name: At_Petals_P Parameter: Age (day) Value: 23-25 days
  misc_feature: MA Experiment 20000794 PARAMETER Experiment Name: At_Petals_P Parameter: Plant Line Value: WS
  misc_feature: MA Experiment 20000794 PARAMETER Experiment Name: At_Petals_P Parameter: Tissue Value: Petals vs. Whole plant
  misc_feature: MA Experiment ID: 20001558 Result: Down-regulated in Transcription
  misc_feature: MA Experiment 20001558 PARAMETER Experiment Name: At_Drought_Soil_Dry_P Parameter: Age (day) Value: 27
  misc_feature: MA Experiment 20001558 PARAMETER Experiment Name: At_Drought_Soil_Dry_P Parameter: Organism Value: A. thaliana
  misc_feature: MA Experiment 20001558 PARAMETER Experiment Name: At_Drought_Soil_Dry_P Parameter: Plant Line Value: WS
  misc_feature: MA Experiment 20001558 PARAMETER Experiment Name: At_Drought_Soil_Dry_P Parameter: Post Timepoint (hr) Value: 6
  misc_feature: MA Experiment 20001558 PARAMETER Experiment Name: At_Drought_Soil_Dry_P Parameter: Post-Treatment Value: Re-Water vs. No Drought
  misc_feature: MA Experiment 20001558 PARAMETER Experiment Name: At_Drought_Soil_Dry_P Parameter: Timepoint (day) Value: 13
  misc_feature: MA Experiment 20001558 PARAMETER Experiment Name: At_Drought_Soil_Dry_P Parameter: Treatment Value: Drought vs. No Drought
cttggtatcatctctctgtttttccgaagaactaacacatgtcgggacctcagtgctgtgaaaacccgccaactcttaacccggtttccgggtcgggtcatgtcgagaagctgggtgggcttgatgcctacgtctccggctctgccgagtccaagctctgcgtcctcctcatttctgatatttttggttttgaagctccaaacttaagggcgcttgcggacaaggttgcagcttctggattctatgttgtggttcctgattactttggtggagatccttataatccctctaaccaggacagacccatccctgtctggatcaaagaccatggctgtgataagggctttgaaaacacgaaaccagtacttgaaaccataaagaacaaaggcataactgccattggagccgcagggatgtgttggggtgcaaaagtagtggtggaactgtctaaagaagagcttattcaagcagctgtgttgcttcatccttcttttgtcaatgttgatgatatcaaaggtgggaaggctccaattgctatattaggagctgaaattgatcaaatgtccccaccagcactcttgaagcaatttgaggagattctatcttccaaacccgaggtgaatagttacgtgaagatacacccgaaagtgtcacacggatggacagttagatacaacatcgatgaaccagaggcggttaaagcagcagaagaagctcacaaggagatgcttgattggtttgtgacctacatcaaatgatttgagaaagaaagaaaggtattgtctattacttcatatatgcaaagaataaaaattaaagagagacaaagcaaaactcttggttggtgtttcaatttctactttctatagtcttttgaagcattctctgagattctgtgataccttttgttaatcattgttttatg

SEQ ID NO: 28662 - protein, 239 aa, Arabidopsis thaliana
  peptide (1)..(239): Ceres Seq. ID no. 12397143
  misc_feature (28)..(238): Pfam Name: Dienelactone hydrolase family Pfam Description: Dienelactone hydrolase family
  misc_feature (14)..(238): Homolog of NCBI NO: 40740730 NR Description: hypothetical protein AN3712.2 [Aspergillus
  misc_feature (20)..(238): Homolog of NCBI NO: 38181938 NR Description: Unknown (protein for MGC:76315) [Silurana
  misc_feature (69)..(239): Homolog of NCBI NO: 40253308 NR Description: Endo-1,3;1,4-beta-D-glucanase precursor-like
  misc_feature (5)..(194): Homolog of NCBI NO: 8928122 NR Description: Endo-1,3;1,4-beta-D-glucanase precursor
  misc_feature (6)..(239): Homolog of NCBI NO: 40253306 NR Description: putative Endo-1,3;1,4-beta-D-glucanase precursor
  misc_feature (5)..(239): Homolog of NCBI NO: 40253303 NR Description: putative Endo-1,3;1,4-beta-D-glucanase precursor
  misc_feature (9)..(239): Homolog of NCBI NO: 9294513 NR Description: contains similarity to
  misc_feature (1)..(239): Homolog of NCBI NO: 24899687 NR Description: Unknown protein [Arabidopsis thaliana]
  misc_feature (1)..(239): Homolog of NCBI NO: 18403812 NR Description: expressed protein
  misc_feature (1)..(239): Homolog of NCBI NO: 18403820 NR Description: expressed protein
MSGPQCCENPPTLNPVSGSGHVEKLGGLDAYVSGSAESKLCVLLISDIFGFEAPNLRALADKVAASGFYVVVPDYFGGDPYNPSNQDRPIPVWIKDHGCDKGFENTKPVLETIKNKGITAIGAAGMCWGAKVVVELSKEELIQAAVLLHPSFVNVDDIKGGKAPIAILGAEIDQMSPPALLKQFEEILSSKPEVNSYVKIHPKVSHGWTVRYNIDEPEAVKAAEEAHKEMLDWFVTYIK

SEQ ID NO: 28663 - DNA, 1392 bp, Arabidopsis thaliana
  misc_feature (1)..(1392): Ceres Seq. ID no. 13487454
  misc_feature: MA Experiment ID: 108434 Result: Down-regulated in Transcription
  misc_feature: MA Experiment 108434 PARAMETER Experiment Name: At_Root_Tips_cDNA_P Parameter: Tissue Value: Root Tips
  misc_feature: MA Experiment ID: 108488 Result: Down-regulated in Transcription
  misc_feature: MA Experiment ID: 108585 Result: Up-regulated in Transcription
  misc_feature: MA Experiment 108585 PARAMETER Experiment Name: At_5mM_NaNP_cDNA_P Parameter: Timepoint (hr) Value: 6
  misc_feature: MA Experiment 108585 PARAMETER Experiment Name: At_5mM_NaNP_cDNA_P Parameter: Tissue Value: Aerial
  misc_feature: MA Experiment 108585 PARAMETER Experiment Name: At_5mM_NaNP_cDNA_P Parameter: Treatment Value: null
  misc_feature: MA Experiment ID: 108668 Result: Up-regulated in Transcription
  misc_feature: MA Experiment 108668 PARAMETER Experiment Name: At_2mM_SA_cDNA_P Parameter: Plant Line Value: WS
  misc_feature: MA Experiment 108668 PARAMETER Experiment Name: At_2mM_SA_cDNA_P Parameter: Timepoint (hr) Value: 6
  misc_feature: MA Experiment 108668 PARAMETER Experiment Name: At_2mM_SA_cDNA_P Parameter: Treatment Value: 2mM SA vs. No Treatment
  misc_feature: MA Experiment ID: 20000112 Result: Up-regulated in Transcription
  misc_feature: MA Experiment 20000112 PARAMETER Experiment Name: At_42deg_Heat_cDNA_P Parameter: Temperature (deg C) Value: 42 vs. 22
  misc_feature: MA Experiment 20000112 PARAMETER Experiment Name: At_42deg_Heat_cDNA_P Parameter: Timepoint (hr) Value: 2
  misc_feature: MA Experiment 20000112 PARAMETER Experiment Name: At_42deg_Heat_cDNA_P Parameter: Tissue Value: Aerial
  misc_feature: MA Experiment ID: 20000144 Result: Up-regulated in Transcription
  misc_feature: MA Experiment 20000144 PARAMETER Experiment Name: At_42deg_Heat_cDNA_P Parameter: Temperature (deg C) Value: 42 vs. 22
  misc_feature: MA Experiment 20000144 PARAMETER Experiment Name: At_42deg_Heat_cDNA_P Parameter: Timepoint (hr) Value: 1
  misc_feature: MA Experiment 20000144 PARAMETER Experiment Name: At_42deg_Heat_cDNA_P Parameter: Tissue Value: Aerial
  misc_feature: MA Experiment ID: 20000180 Result: Down-regulated in Transcription
  misc_feature: MA Experiment 20000180 PARAMETER Experiment Name: At_Germinating_Seeds_P Parameter: Age (hr) Value: 24 vs. 0
  misc_feature: MA Experiment 20000180 PARAMETER Experiment Name: At_Germinating_Seeds_P Parameter: Tissue Value: Germinating Seeds
  misc_feature: MA Experiment ID: 20000182 Result: Up-regulated in Transcription
  misc_feature: MA Experiment 20000182 PARAMETER Experiment Name: At_2mM_SA_P Parameter: Age (day) Value: 14
  misc_feature: MA Experiment 20000182 PARAMETER Experiment Name: At_2mM_SA_P Parameter: Organism Value: A. thaliana
  misc_feature: MA Experiment 20000182 PARAMETER Experiment Name: At_2mM_SA_P Parameter: Plant Line Value: WS
  misc_feature: MA Experiment 20000182 PARAMETER Experiment Name: At_2mM_SA_P Parameter: Timepoint (hr) Value: 6
  misc_feature: MA Experiment 20000182 PARAMETER Experiment Name: At_2mM_SA_P Parameter: Tissue Value: Aerial
  misc_feature: MA Experiment 20000182 PARAMETER Experiment Name: At_2mM_SA_P Parameter: Treatment Value: 2mM SA vs. No Treatment
  misc_feature: MA Experiment ID: 20000184 Result: Down-regulated in Transcription
  misc_feature: MA Experiment 20000184 PARAMETER Experiment Name: At_Shoots__P Parameter: Age (day) Value: 7
  misc_feature: MA Experiment 20000184 PARAMETER Experiment Name: At_Shoots__P Parameter: Tissue Value: Shoots vs. Whole Plant
  misc_feature: MA Experiment ID: 20000794 Result: Up-regulated in Transcription
  misc_feature: MA Experiment 20000794 PARAMETER Experiment Name: At_Petals_P Parameter: Age (day) Value: 23-25 days
  misc_feature: MA Experiment 20000794 PARAMETER Experiment Name: At_Petals_P Parameter: Plant Line Value: WS
  misc_feature: MA Experiment 20000794 PARAMETER Experiment Name: At_Petals_P Parameter: Tissue Value: Petals vs. Whole plant
  misc_feature: MA Experiment ID: 20001560 Result: Down-regulated in Transcription
  misc_feature: MA Experiment 20001560 PARAMETER Experiment Name: At_Drought_Soil_Dry_P Parameter: Age (day) Value: 28
  misc_feature: MA Experiment 20001560 PARAMETER Experiment Name: At_Drought_Soil_Dry_P Parameter: Organism Value: A. thaliana
  misc_feature: MA Experiment 20001560 PARAMETER Experiment Name: At_Drought_Soil_Dry_P Parameter: Plant Line Value: WS
  misc_feature: MA Experiment 20001560 PARAMETER Experiment Name: At_Drought_Soil_Dry_P Parameter: Post Timepoint (hr) Value: None
  misc_feature: MA Experiment 20001560 PARAMETER Experiment Name: At_Drought_Soil_Dry_P Parameter: Post-Treatment Value: None
  misc_feature: MA Experiment 20001560 PARAMETER Experiment Name: At_Drought_Soil_Dry_P Parameter: Timepoint (day) Value: 14
  misc_feature: MA Experiment 20001560 PARAMETER Experiment Name: At_Drought_Soil_Dry_P Parameter: Treatment Value: Drought vs. No Drought
  misc_feature: MA Experiment ID: 20001911 Result: Up-regulated in Transcription
  misc_feature: MA Experiment 20001911 PARAMETER Experiment Name: At_Drought_Reproduction_P Parameter: Age (day) Value: 40
  misc_feature: MA Experiment 20001911 PARAMETER Experiment Name: At_Drought_Reproduction_P Parameter: Organism Value: A. thaliana
  misc_feature: MA Experiment 20001911 PARAMETER Experiment Name: At_Drought_Reproduction_P Parameter: Plant Line Value: WS
  misc_feature: MA Experiment 20001911 PARAMETER Experiment Name: At_Drought_Reproduction_P Parameter: Timepoint (day) Value: 10
  misc_feature: MA Experiment 20001911 PARAMETER Experiment Name: At_Drought_Reproduction_P Parameter: Tissue Value: Flowers
  misc_feature: MA Experiment 20001911 PARAMETER Experiment Name: At_Drought_Reproduction_P Parameter: Treatment Value: Drought vs. No Drought
atttgaatttccggaaaagaaaaaaaaacaaacacaaaacacgcttctcttgttgagaagctagcaaaacaacactaaacctgaaacaaacgtaaatccgccgcaacaacccagtttttttcgacggtgtacaagcttcctccgccgtaacgccgtcgtttaacaccacgaagcttgattaggtttccgtagtgtgtgatttgtgagattcgttttaaggttctgaacactgatgtcaaacccattgaaggagtcaagagaggatattgcagattctactcctcacatgagggataatgagtatgttcggctagttgtggctcatgaagcctccgcagctgaaaccgtgttgtctctatcgcaatcagaggtgcagagtaagaaattgatgtggtggttgaaagctttgggaatatgtgcagttgctctcttgcttacgcttgttttcggtaaatggggagttccgtttgtgtttcaaaaggttcttattccaattttgcaatgggaagcaactgcgtttggccgtcctatgctcgcgattgtccttgttgtttccttggctttgtttcctgtgttcttgataccttctggtccttccatgtggttagctgggatgatttttggttatggtctcggttttgttattatcatggttggaaccaccattggcatggttctcccttacttaatcgggcttatgttccgtgatcgcctccatcaatggttaaaaagatggcctcgtcaagctgctgttctaagactagctgcagaaggaagctggttccatcaattcagagtcgtggcaatctttcgggtttccccatttccttacacgatttttaactacgcaatcgtcgtgacaagcatgagattctggccttacttcttcggatccatagcaggaatgataccagaagctttcatctacatttacagcggtcggttaatcagaacattcgcagatgtgcaatacggacatcaacgtttgacaacagtggagattgtgtacaatgtaatctccttaatcattgcggttgtgaccactgttgctttcactgtgtacgcgaaaagagctttgagagagcttcaaaacgcagaagctaatgaagatgaagaagttcaagtaagaaaagtgagattcgagatgaagaacgtagttcagcacgaagaagataatcatcagcgtttgccttagccgaaagttgacacaaagctatgataggtttgtataaagctttgaacgttgacatgttcttcagcaggatttagagtaaataacaaaaggggtaaaaaaagtctgatgtagtaggaagactaagactagtcaagattggatttatattagtgtgactgattccaattattgaaacaaataaaagaagcatttaggcc

SEQ ID NO: 28664 - protein, 320 aa, Arabidopsis thaliana
  peptide (1)..(320): Ceres Seq. ID no. 13487455
  misc_feature (96)..(232): Pfam Name: DedA family Pfam Description: DedA family
  misc_feature (233)..(289): Homolog of NCBI NO: 8778630 NR Description: F5O11.19 [Arabidopsis thaliana]
  misc_feature (32)..(161): Homolog of NCBI NO: 8778630 NR Description: F5O11.19 [Arabidopsis thaliana]
  misc_feature (148)..(289): Homolog of NCBI NO: 7486891 NR Description: hypothetical protein T12H17.240 - Arabidopsis
  misc_feature (24)..(289): Homolog of NCBI NO: 30685958 NR Description: expressed protein [Arabidopsis thaliana]
  misc_feature (10)..(286): Homolog of NCBI NO: 15234386 NR Description: expressed protein [Arabidopsis thaliana]
  misc_feature (32)..(289): Homolog of NCBI NO: 15221330 NR Description: expressed protein [Arabidopsis thaliana]
  misc_feature (55)..(320): Homolog of NCBI NO: 34913316 NR Description: P0519E12.36 [Oryza sativa (japonica
  misc_feature (161)..(320): Homolog of NCBI NO: 25410981 NR Description: hypothetical protein At2g02370 [imported] -
  misc_feature (8)..(289): Homolog of NCBI NO: 31249711 NR Description: hypothetical protein [Oryza sativa (japonica
  misc_feature (1)..(320): Homolog of NCBI NO: 18395356 NR Description: expressed protein [Arabidopsis thaliana]
MSNPLKESREDIADSTPHMRDNEYVRLVVAHEASAAETVLSLSQSEVQSKKLMWWLKALGICAVALLLTLVFGKWGVPFVFQKVLIPILQWEATAFGRPMLAIVLVVSLALFPVFLIPSGPSMWLAGMIFGYGLGFVIIMVGTTIGMVLPYLIGLMFRDRLHQWLKRWPRQAAVLRLAAEGSWFHQFRVVAIFRVSPFPYTIFNYAIVVTSMRFWPYFFGSIAGMIPEAFIYIYSGRLIRTFADVQYGHQRLTTVEIVYNVISLIIAVVTTVAFTVYAKRALRELQNAEANEDEEVQVRKVRFEMKNVVQHEEDNHQRLP

SEQ ID NO: 28665 - protein, 302 aa, Arabidopsis thaliana
  peptide (1)..(302): Ceres Seq. ID no. 13487456
  misc_feature (78)..(214): Pfam Name: DedA family Pfam Description: DedA family
  misc_feature (215)..(271): Homolog of NCBI NO: 8778630 NR Description: F5O11.19 [Arabidopsis thaliana]
  misc_feature (14)..(143): Homolog of NCBI NO: 8778630 NR Description: F5O11.19 [Arabidopsis thaliana]
  misc_feature (130)..(271): Homolog of NCBI NO: 7486891 NR Description: hypothetical protein T12H17.240 - Arabidopsis
  misc_feature (6)..(271): Homolog of NCBI NO: 30685958 NR Description: expressed protein [Arabidopsis thaliana]
  misc_feature (1)..(268): Homolog of NCBI NO: 15234386 NR Description: expressed protein [Arabidopsis thaliana]
  misc_feature (14)..(271): Homolog of NCBI NO: 15221330 NR Description: expressed protein [Arabidopsis thaliana]
  misc_feature (37)..(302): Homolog of NCBI NO: 34913316 NR Description: P0519E12.36 [Oryza sativa (japonica
  misc_feature (143)..(302): Homolog of NCBI NO: 25410981 NR Description: hypothetical protein At2g02370 [imported] -
  misc_feature (1)..(271): Homolog of NCBI NO: 31249711 NR Description: hypothetical protein [Oryza sativa (japonica
  misc_feature (1)..(302): Homolog of NCBI NO: 18395356 NR Description: expressed protein [Arabidopsis thaliana]
MRDNEYVRLVVAHEASAAETVLSLSQSEVQSKKLMWWLKALGICAVALLLTLVFGKWGVPFVFQKVLIPILQWEATAFGRPMLAIVLVVSLALFPVFLIPSGPSMWLAGMIFGYGLGFVIIMVGTTIGMVLPYLIGLMFRDRLHQWLKRWPRQAAVLRLAAEGSWFHQFRVVAIFRVSPFPYTIFNYAIVVTSMRFWPYFFGSIAGMIPEAFIYIYSGRLIRTFADVQYGHQRLTTVEIVYNVISLIIAVVTTVAFTVYAKRALRELQNAEANEDEEVQVRKVRFEMKNVVQHEEDNHQRLP

SEQ ID NO: 28666 - protein, 268 aa, Arabidopsis thaliana
  peptide (1)..(268): Ceres Seq. ID no. 13487457
  misc_feature (44)..(180): Pfam Name: DedA family Pfam Description: DedA family
  misc_feature (181)..(237): Homolog of NCBI NO: 8778630 NR Description: F5O11.19 [Arabidopsis thaliana]
  misc_feature (1)..(109): Homolog of NCBI NO: 8778630 NR Description: F5O11.19 [Arabidopsis thaliana]
  misc_feature (96)..(237): Homolog of NCBI NO: 7486891 NR Description: hypothetical protein T12H17.240 - Arabidopsis
  misc_feature (1)..(237): Homolog of NCBI NO: 30685958 NR Description: expressed protein [Arabidopsis thaliana]
  misc_feature (1)..(234): Homolog of NCBI NO: 15234386 NR Description: expressed protein [Arabidopsis thaliana]
  misc_feature (1)..(237): Homolog of NCBI NO: 15221330 NR Description: expressed protein [Arabidopsis thaliana]
  misc_feature (3)..(268): Homolog of NCBI NO: 34913316 NR Description: P0519E12.36 [Oryza sativa (japonica
  misc_feature (109)..(268): Homolog of NCBI NO: 25410981 NR Description: hypothetical protein At2g02370 [imported] -
  misc_feature (1)..(237): Homolog of NCBI NO: 31249711 NR Description: hypothetical protein [Oryza sativa (japonica
  misc_feature (1)..(268): Homolog of NCBI NO: 18395356 NR Description: expressed protein [Arabidopsis thaliana]
MWWLKALGICAVALLLTLVFGKWGVPFVFQKVLIPILQWEATAFGRPMLAIVLVVSLALFPVFLIPSGPSMWLAGMIFGYGLGFVIIMVGTTIGMVLPYLIGLMFRDRLHQWLKRWPRQAAVLRLAAEGSWFHQFRVVAIFRVSPFPYTIFNYAIVVTSMRFWPYFFGSIAGMIPEAFIYIYSGRLIRTFADVQYGHQRLTTVEIVYNVISLIIAVVTTVAFTVYAKRALRELQNAEANEDEEVQVRKVRFEMKNVVQHEEDNHQRLP

SEQ ID NO: 28667 - DNA, 1012 bp, Arabidopsis thaliana
  misc_feature (1)..(1012): Ceres Seq. ID no. 12423264
  misc_feature: MA Experiment ID: 108434 Result: Up-regulated in Transcription
  misc_feature: MA Experiment 108434 PARAMETER Experiment Name: At_Root_Tips_cDNA_P Parameter: Tissue Value: Root Tips
  misc_feature: MA Experiment ID: 108462 Result: Down-regulated in Transcription
  misc_feature: MA Experiment 108462 PARAMETER Experiment Name: At_Germinating_Seeds_cDNA_P Parameter: Age (day) Value: 2 vs. 0
  misc_feature: MA Experiment 108462 PARAMETER Experiment Name: At_Germinating_Seeds_cDNA_P Parameter: Tissue Value: Germinating Seeds
  misc_feature: MA Experiment ID: 108463 Result: Down-regulated in Transcription
  misc_feature: MA Experiment 108463 PARAMETER Experiment Name: At_Germinating_Seeds_cDNA_P Parameter: Age (day) Value: 3 vs. 0
  misc_feature: MA Experiment 108463 PARAMETER Experiment Name: At_Germinating_Seeds_cDNA_P Parameter: Tissue Value: Germinating Seeds
  misc_feature: MA Experiment ID: 108464 Result: Down-regulated in Transcription
  misc_feature: MA Experiment 108464 PARAMETER Experiment Name: At_Germinating_Seeds_cDNA_P Parameter: Age (day) Value: 4 vs. 0
  misc_feature: MA Experiment 108464 PARAMETER Experiment Name: At_Germinating_Seeds_cDNA_P Parameter: Tissue Value: Germinating Seeds
  misc_feature: MA Experiment ID: 20000185 Result: Up-regulated in Transcription
  misc_feature: MA Experiment 20000185 PARAMETER Experiment Name: At_Roots__P Parameter: Age (day) Value: 7 vs. 21
  misc_feature: MA Experiment 20000185 PARAMETER Experiment Name: At_Roots__P Parameter: Organism Value: A. thaliana
  misc_feature: MA Experiment 20000185 PARAMETER Experiment Name: At_Roots__P Parameter: Tissue Value: Roots vs. Whole Plant
  misc_feature: MA Experiment ID: 20000234 Result: Up-regulated in Transcription
  misc_feature: MA Experiment 20000234 PARAMETER Experiment Name: At_Siliques_P Parameter: Age (day) Value: 21
  misc_feature: MA Experiment 20000234 PARAMETER Experiment Name: At_Siliques_P Parameter: Organism Value: A. thaliana
  misc_feature: MA Experiment 20000234 PARAMETER Experiment Name: At_Siliques_P Parameter: Plant Line Value: WS
  misc_feature: MA Experiment 20000234 PARAMETER Experiment Name: At_Siliques_P Parameter: Tissue Value: Less Than 5mm Siliques vs. Whole Plant
  misc_feature: MA Experiment ID: 20000235 Result: Up-regulated in Transcription
  misc_feature: MA Experiment 20000235 PARAMETER Experiment Name: At_Siliques_P Parameter: Age (day) Value: 21
  misc_feature: MA Experiment 20000235 PARAMETER Experiment Name: At_Siliques_P Parameter: Organism Value: A. thaliana
  misc_feature: MA Experiment 20000235 PARAMETER Experiment Name: At_Siliques_P Parameter: Plant Line Value: WS
  misc_feature: MA Experiment 20000235 PARAMETER Experiment Name: At_Siliques_P Parameter: Tissue Value: 5-10mm Siliques vs. Whole Plant
  misc_feature: MA Experiment ID: 20000265 Result: Up-regulated in Transcription
  misc_feature: MA Experiment 20000265 PARAMETER Experiment Name: At_Open_Flower_P Parameter: Age (day) Value: 21
  misc_feature: MA Experiment 20000265 PARAMETER Experiment Name: At_Open_Flower_P Parameter: Plant Line Value: WS
  misc_feature: MA Experiment 20000265 PARAMETER Experiment Name: At_Open_Flower_P Parameter: Tissue Value: Closed Flower vs. Whole Plant
  misc_feature: MA Experiment ID: 20000267 Result: Up-regulated in Transcription
  misc_feature: MA Experiment 20000267 PARAMETER Experiment Name: At_Drought_P Parameter: Age (day) Value: 7
  misc_feature: MA Experiment 20000267 PARAMETER Experiment Name: At_Drought_P Parameter: Organism Value: A. thaliana
  misc_feature: MA Experiment 20000267 PARAMETER Experiment Name: At_Drought_P Parameter: Plant Line Value: WS
  misc_feature: MA Experiment 20000267 PARAMETER Experiment Name: At_Drought_P Parameter: Timepoint (hr) Value: 6
  misc_feature: MA Experiment 20000267 PARAMETER Experiment Name: At_Drought_P Parameter: Tissue Value: Whole Plant
  misc_feature: MA Experiment 20000267 PARAMETER Experiment Name: At_Drought_P Parameter: Treatment Value: Drought vs. No Drought
  misc_feature: MA Experiment ID: 20000437 Result: Up-regulated in Transcription
  misc_feature: MA Experiment 20000437 PARAMETER Experiment Name: At_Drought_P Parameter: Age (day) Value: 8
  misc_feature: MA Experiment 20000437 PARAMETER Experiment Name: At_Drought_P Parameter: Organism Value: A. thaliana
  misc_feature: MA Experiment 20000437 PARAMETER Experiment Name: At_Drought_P Parameter: Plant Line Value: WS
  misc_feature: MA Experiment 20000437 PARAMETER Experiment Name: At_Drought_P Parameter: Timepoint (hr) Value: 24
  misc_feature: MA Experiment 20000437 PARAMETER Experiment Name: At_Drought_P Parameter: Tissue Value: Whole Plant
  misc_feature: MA Experiment 20000437 PARAMETER Experiment Name: At_Drought_P Parameter: Treatment Value: Drought vs. No Drought
  misc_feature: MA Experiment ID: 20000438 Result: Down-regulated in Transcription
  misc_feature: MA Experiment 20000438 PARAMETER Experiment Name: At_Shoots__P Parameter: Age (day) Value: 14
  misc_feature: MA Experiment 20000438 PARAMETER Experiment Name: At_Shoots__P Parameter: Tissue Value: Shoots vs. Whole Plant
  misc_feature: MA Experiment ID: 20000439 Result: Up-regulated in Transcription
  misc_feature: MA Experiment 20000439 PARAMETER Experiment Name: At_Roots__P Parameter: Age (day) Value: 14 vs. 21
  misc_feature: MA Experiment 20000439 PARAMETER Experiment Name: At_Roots__P Parameter: Organism Value: A. thaliana
  misc_feature: MA Experiment 20000439 PARAMETER Experiment Name: At_Roots__P Parameter: Tissue Value: Roots vs. Whole Plant
  misc_feature: MA Experiment ID: 20000441 Result: Down-regulated in Transcription
  misc_feature: MA Experiment 20000441 PARAMETER Experiment Name: At_1uM_BR-BRZ__P Parameter: Tissue Value: Shoot Apices
  misc_feature: MA Experiment 20000441 PARAMETER Experiment Name: At_1uM_BR-BRZ__P Parameter: Treatment Value: 1uM BR vs. No Treatment
  misc_feature: MA Experiment ID: 20000443 Result: Down-regulated in Transcription
  misc_feature: MA Experiment 20000443 PARAMETER Experiment Name: At_1uM_BR-BRZ__P Parameter: Tissue Value: Shoot Apices
  misc_feature: MA Experiment 20000443 PARAMETER Experiment Name: At_1uM_BR-BRZ__P Parameter: Treatment Value: 1uM BRZ vs. No Treatment
acttcagcaaaaccactacacctttcttatctctcagattttctcaagaagattgtgtggaagatgatgagacggaagatttttctctttggtgattccatcactgaagaatcctttagtgacggtggctggggtgcttctctcgccgatcttctccgccgcaaggctgatatggtgctacgaggatacagtggatataacacgaggtgggcactgaaagtggtggagagagtttttccggtggcagaagaagacggcggagattctccggcagctgtgactgttttctttggagcgaacgacgcgtgtcttccggagagatgctcggggtttcagcatgtgccacttcacgagtacaagcagaatcttcgctctattgtttcgtttctcaagaatcgttggccacaaacggccattattcttataactccgcctccaatagacgaagaggcccgcctcagatatccttatatcgaaaacacaacggggttgccggaaagaacgaatgaagtagccggactatacgcaaaagcatgtatagcagtagctgaggaatgtcaaatttcggtcactgatctttggtccaaaatgcagcaaattccaaattggcaaacagaatgtctatgggacgggttacatttgagtcgggtcggtaacaaagtagtgtttgaagaagtagcaaagaagcttaaagaagaaggcattggagctgaggacttagctgtggatcttccccttatagaagatgttgaccctaaggatcctctcaaatcctttgatgagttttgatgctttatattactaccatgcagtttggttcttctatctttgattacttcttaatttcgatattaatttagggaatgtgacattattaggcactttgtgagaatctttttgtgagaatctttttacgtttgaggcacttgtgagagagagggcactttgccatctttttttagaggagattgaaccaatttgcccctgaagtgatgaaaacacaataattttt

SEQ ID NO: 28668 - protein, 262 aa, Arabidopsis thaliana
  peptide (1)..(262): Ceres Seq. ID no. 12423265
  misc_feature (27)..(226): Pfam Name: GDSL-like Lipase/Acylhydrolase Pfam Description: GDSL-like Lipase/Acylhydrolase
  misc_feature (24)..(232): Homolog of NCBI NO: 18399151 NR Description: expressed protein
  misc_feature (24)..(232): Homolog of NCBI NO: 21554235 NR Description: CPRD49 [Arabidopsis thaliana]
  misc_feature (23)..(232): Homolog of NCBI NO: 13161403 NR Description: CPRD49 [Vigna unguiculata]
  misc_feature (26)..(255): Homolog of NCBI NO: 27754071 NR Description: hypothetical protein 4833421E05Rik; RIKEN cDNA
  misc_feature (26)..(255): Homolog of NCBI NO: 27478045 NR Description: hypothetical protein XP_209490 [Homo sapiens]
  misc_feature (22)..(259): Homolog of NCBI NO: 37535366 NR Description: putative esterase [Oryza sativa (japonica
  misc_feature (23)..(261): Homolog of NCBI NO: 15242002 NR Description: putative protein
  misc_feature (23)..(260): Homolog of NCBI NO: 34903948 NR Description: OSJNBa0038J17.19 [Oryza sativa (japonica
  misc_feature (23)..(262): Homolog of NCBI NO: 15242539 NR Description: putative protein; protein id: At5g45920.1
  misc_feature (22)..(262): Homolog of NCBI NO: 38454102 NR Description: At5g45920 [Arabidopsis thaliana]
TSAKPLHLSYLSDFLKKIVWKMMRRKIFLFGDSITEESFSDGGWGASLADLLRRKADMVLRGYSGYNTRWALKVVERVFPVAEEDGGDSPAAVTVFFGANDACLPERCSGFQHVPLHEYKQNLRSIVSFLKNRWPQTAIILITPPPIDEEARLRYPYIENTTGLPERTNEVAGLYAKACIAVAEECQISVTDLWSKMQQIPNWQTECLWDGLHLSRVGNKVVFEEVAKKLKEEGIGAEDLAVDLPLIEDVDPKDPLKSFDEF

SEQ ID NO: 28669 - protein, 241 aa, Arabidopsis thaliana
  peptide (1)..(241): Ceres Seq. ID no. 12423266
  misc_feature (6)..(205): Pfam Name: GDSL-like Lipase/Acylhydrolase Pfam Description: GDSL-like Lipase/Acylhydrolase
  misc_feature (3)..(211): Homolog of NCBI NO: 18399151 NR Description: expressed protein
  misc_feature (3)..(211): Homolog of NCBI NO: 21554235 NR Description: CPRD49 [Arabidopsis thaliana]
  misc_feature (2)..(211): Homolog of NCBI NO: 13161403 NR Description: CPRD49 [Vigna unguiculata]
  misc_feature (5)..(234): Homolog of NCBI NO: 27754071 NR Description: hypothetical protein 4833421E05Rik; RIKEN cDNA
  misc_feature (5)..(234): Homolog of NCBI NO: 27478045 NR Description: hypothetical protein XP_209490 [Homo sapiens]
  misc_feature (1)..(238): Homolog of NCBI NO: 37535366 NR Description: putative esterase [Oryza sativa (japonica
  misc_feature (2)..(240): Homolog of NCBI NO: 15242002 NR Description: putative protein
  misc_feature (2)..(239): Homolog of NCBI NO: 34903948 NR Description: OSJNBa0038J17.19 [Oryza sativa (japonica
  misc_feature (2)..(241): Homolog of NCBI NO: 15242539 NR Description: putative protein; protein id: At5g45920.1
  misc_feature (1)..(241): Homolog of NCBI NO: 38454102 NR Description: At5g45920 [Arabidopsis thaliana]
MMRRKIFLFGDSITEESFSDGGWGASLADLLRRKADMVLRGYSGYNTRWALKVVERVFPVAEEDGGDSPAAVTVFFGANDACLPERCSGFQHVPLHEYKQNLRSIVSFLKNRWPQTAIILITPPPIDEEARLRYPYIENTTGLPERTNEVAGLYAKACIAVAEECQISVTDLWSKMQQIPNWQTECLWDGLHLSRVGNKVVFEEVAKKLKEEGIGAEDLAVDLPLIEDVDPKDPLKSFDEF

SEQ ID NO: 28670 - protein, 240 aa, Arabidopsis thaliana
  peptide (1)..(240): Ceres Seq. ID no. 12423267
  misc_feature (5)..(204): Pfam Name: GDSL-like Lipase/Acylhydrolase Pfam Description: GDSL-like Lipase/Acylhydrolase
  misc_feature (2)..(210): Homolog of NCBI NO: 18399151 NR Description: expressed protein
  misc_feature (2)..(210): Homolog of NCBI NO: 21554235 NR Description: CPRD49 [Arabidopsis thaliana]
  misc_feature (1)..(210): Homolog of NCBI NO: 13161403 NR Description: CPRD49 [Vigna unguiculata]
  misc_feature (4)..(233): Homolog of NCBI NO: 27754071 NR Description: hypothetical protein 4833421E05Rik; RIKEN cDNA
  misc_feature (4)..(233): Homolog of NCBI NO: 27478045 NR Description: hypothetical protein XP_209490 [Homo sapiens]
  misc_feature (1)..(237): Homolog of NCBI NO: 37535366 NR Description: putative esterase [Oryza sativa (japonica
  misc_feature (1)..(239): Homolog of NCBI NO: 15242002 NR Description: putative protein
  misc_feature (1)..(238): Homolog of NCBI NO: 34903948 NR Description: OSJNBa0038J17.19 [Oryza sativa (japonica
  misc_feature (1)..(240): Homolog of NCBI NO: 15242539 NR Description: putative protein; protein id: At5g45920.1
  misc_feature (1)..(240): Homolog of NCBI NO: 38454102 NR Description: At5g45920 [Arabidopsis thaliana]
MRRKIFLFGDSITEESFSDGGWGASLADLLRRKADMVLRGYSGYNTRWALKVVERVFPVAEEDGGDSPAAVTVFFGANDACLPERCSGFQHVPLHEYKQNLRSIVSFLKNRWPQTAIILITPPPIDEEARLRYPYIENTTGLPERTNEVAGLYAKACIAVAEECQISVTDLWSKMQQIPNWQTECLWDGLHLSRVGNKVVFEEVAKKLKEEGIGAEDLAVDLPLIEDVDPKDPLKSFDEF

SEQ ID NO: 28671 - DNA, 606 bp, Arabidopsis thaliana
  misc_feature (1)..(606): Ceres Seq. ID no. 12421141
  misc_feature: MA Experiment ID: 108435 Result: Down-regulated in Transcription
  misc_feature: MA Experiment 108435 PARAMETER Experiment Name: At_stm_Mutants_cDNA_P Parameter: Plant Line Value: wt Landsburg vs stm
  misc_feature: MA Experiment 108435 PARAMETER Experiment Name: At_stm_Mutants_cDNA_P Parameter: Tissue Value: Shoot Apical Meristem Region
  misc_feature: MA Experiment ID: 108462 Result: Up-regulated in Transcription
  misc_feature: MA Experiment 108462 PARAMETER Experiment Name: At_Germinating_Seeds_cDNA_P Parameter: Age (day) Value: 2 vs. 0
  misc_feature: MA Experiment 108462 PARAMETER Experiment Name: At_Germinating_Seeds_cDNA_P Parameter: Tissue Value: Germinating Seeds
  misc_feature: MA Experiment ID: 108464 Result: Up-regulated in Transcription
  misc_feature: MA Experiment 108464 PARAMETER Experiment Name: At_Germinating_Seeds_cDNA_P Parameter: Age (day) Value: 4 vs. 0
  misc_feature: MA Experiment 108464 PARAMETER Experiment Name: At_Germinating_Seeds_cDNA_P Parameter: Tissue Value: Germinating Seeds
  misc_feature: MA Experiment ID: 108668 Result: Up-regulated in Transcription
  misc_feature: MA Experiment 108668 PARAMETER Experiment Name: At_2mM_SA_cDNA_P Parameter: Plant Line Value: WS
  misc_feature: MA Experiment 108668 PARAMETER Experiment Name: At_2mM_SA_cDNA_P Parameter: Timepoint (hr) Value: 6
  misc_feature: MA Experiment 108668 PARAMETER Experiment Name: At_2mM_SA_cDNA_P Parameter: Treatment Value: 2mM SA vs. No Treatment
  misc_feature: MA Experiment ID: 20000113 Result: Down-regulated in Transcription
  misc_feature: MA Experiment 20000113 PARAMETER Experiment Name: At_42deg_Heat_cDNA_P Parameter: Temperature (deg C) Value: 42 vs. 22
  misc_feature: MA Experiment 20000113 PARAMETER Experiment Name: At_42deg_Heat_cDNA_P Parameter: Timepoint (hr) Value: 8
  misc_feature: MA Experiment 20000113 PARAMETER Experiment Name: At_42deg_Heat_cDNA_P Parameter: Tissue Value: Aerial
  misc_feature: MA Experiment ID: 20000180 Result: Up-regulated in Transcription
  misc_feature: MA Experiment 20000180 PARAMETER Experiment Name: At_Germinating_Seeds_P Parameter: Age (hr) Value: 24 vs. 0
  misc_feature: MA Experiment 20000180 PARAMETER Experiment Name: At_Germinating_Seeds_P Parameter: Tissue Value: Germinating Seeds
  misc_feature: MA Experiment ID: 20001248 Result: Down-regulated in Transcription
  misc_feature: MA Experiment 20001248 PARAMETER Experiment Name: At_Far-red-induction_P Parameter: Age (day) Value: 7
  misc_feature: MA Experiment 20001248 PARAMETER Experiment Name: At_Far-red-induction_P Parameter: Light Value: Far-red vs. White
  misc_feature: MA Experiment 20001248 PARAMETER Experiment Name: At_Far-red-induction_P Parameter: Organism Value: A. thaliana
  misc_feature: MA Experiment 20001248 PARAMETER Experiment Name: At_Far-red-induction_P Parameter: Plant Line Value: Columbia
  misc_feature: MA Experiment 20001248 PARAMETER Experiment Name: At_Far-red-induction_P Parameter: Timepoint (hr) Value: 4
  misc_feature: MA Experiment 20001248 PARAMETER Experiment Name: At_Far-red-induction_P Parameter: Tissue Value: Whole Plant
  misc_feature: MA Experiment ID: 20001557 Result: Down-regulated in Transcription
  misc_feature: MA Experiment 20001557 PARAMETER Experiment Name: At_Drought_Soil_Dry_P Parameter: Age (day) Value: 27
  misc_feature: MA Experiment 20001557 PARAMETER Experiment Name: At_Drought_Soil_Dry_P Parameter: Organism Value: A. thaliana
  misc_feature: MA Experiment 20001557 PARAMETER Experiment Name: At_Drought_Soil_Dry_P Parameter: Plant Line Value: WS
  misc_feature: MA Experiment 20001557 PARAMETER Experiment Name: At_Drought_Soil_Dry_P Parameter: Post Timepoint (hr) Value: 3
  misc_feature: MA Experiment 20001557 PARAMETER Experiment Name: At_Drought_Soil_Dry_P Parameter: Post-Treatment Value: Re-Water vs. No Drought
  misc_feature: MA Experiment 20001557 PARAMETER Experiment Name: At_Drought_Soil_Dry_P Parameter: Timepoint (day) Value: 13
  misc_feature: MA Experiment 20001557 PARAMETER Experiment Name: At_Drought_Soil_Dry_P Parameter: Treatment Value: Drought vs. No Drought
  misc_feature: MA Experiment ID: 20001558 Result: Down-regulated in Transcription
  misc_feature: MA Experiment 20001558 PARAMETER Experiment Name: At_Drought_Soil_Dry_P Parameter: Age (day) Value: 27
  misc_feature: MA Experiment 20001558 PARAMETER Experiment Name: At_Drought_Soil_Dry_P Parameter: Organism Value: A. thaliana
  misc_feature: MA Experiment 20001558 PARAMETER Experiment Name: At_Drought_Soil_Dry_P Parameter: Plant Line Value: WS
  misc_feature: MA Experiment 20001558 PARAMETER Experiment Name: At_Drought_Soil_Dry_P Parameter: Post Timepoint (hr) Value: 6
  misc_feature: MA Experiment 20001558 PARAMETER Experiment Name: At_Drought_Soil_Dry_P Parameter: Post-Treatment Value: Re-Water vs. No Drought
  misc_feature: MA Experiment 20001558 PARAMETER Experiment Name: At_Drought_Soil_Dry_P Parameter: Timepoint (day) Value: 13
  misc_feature: MA Experiment 20001558 PARAMETER Experiment Name: At_Drought_Soil_Dry_P Parameter: Treatment Value: Drought vs. No Drought
accaatttctctctttcatctacaatcactgaacaatggcgatttctcaagctcagtctctgcttcttctcctcgtatcgctcttcttcttacctgctttgcacgccacttctttctcctactgcgataagaggttcgatcccgttaaggtcacgggtgtgaagatctctcctgaccctgttgtgagtggtgcagccgcaacatttaagatttttggttctactggcgaagacatctctggaggaaaagtagtgatcagggtttcatactttgggattcctgtccataccgaaactcatgacctctgcgatgagacggcatgtccggttgcacctggcagctttgtgctttctcattctcaaacactcccttcaattacaccatctggtacttacacgctaaagatgacaatcaacgacaagaatggcggaagactaacatgtatcagcttcaaattcaagatcacagtaggttccgcggtctttgctagttaagttttatggtgtaaattgtgtctttgtgaatctctctctcgtttacttttgtggtgtccaaataaaaaatgctcttttgagacttgagttgatctatatgaaacaaagagtc

SEQ ID NO: 28672 - protein, 152 aa, Arabidopsis thaliana
  peptide (1)..(152): Ceres Seq. ID no. 12421142
  misc_feature (23)..(143): Pfam Name: ML domain Pfam Description: ML domain
  misc_feature (29)..(137): Homolog of NCBI NO: 4322563 NR Description: phosphatidylglycerol/phosphatidylinositol
  misc_feature (1)..(147): Homolog of NCBI NO: 22330033 NR Description: unknown protein; protein id: At1g45015.1
  misc_feature (1)..(144): Homolog of NCBI NO: 18397991 NR Description: Expressed protein
  misc_feature (1)..(144): Homolog of NCBI NO: 21618166 NR Description: unknown [Arabidopsis thaliana]
  misc_feature (1)..(143): Homolog of NCBI NO: 34899866 NR Description: OJ1714_H10.15 [Oryza sativa (japonica
  misc_feature (6)..(149): Homolog of NCBI NO: 21593850 NR Description: unknown [Arabidopsis thaliana]
  misc_feature (6)..(149): Homolog of NCBI NO: 15240063 NR Description: putative protein
  misc_feature (12)..(149): Homolog of NCBI NO: 21554315 NR Description: unknown [Arabidopsis thaliana]
  misc_feature (12)..(149): Homolog of NCBI NO: 18399355 NR Description: expressed protein
  misc_feature (1)..(152): Homolog of NCBI NO: 15229872 NR Description: putative protein
MAISQAQSLLLLLVSLFFLPALHATSFSYCDKRFDPVKVTGVKISPDPVVSGAAATFKIFGSTGEDISGGKVVIRVSYFGIPVHTETHDLCDETACPVAPGSFVLSHSQTLPSITPSGTYTLKMTINDKNGGRLTCISFKFKITVGSAVFAS

SEQ ID NO: 28673 - DNA, 1061 bp, Arabidopsis thaliana
  misc_feature (1)..(1061): Ceres Seq. ID no. 13580294
  misc_feature: MA Experiment ID: 108433 Result: Up-regulated in Transcription
  misc_feature: MA Experiment 108433 PARAMETER Experiment Name: At_rhl_Mutant2_cDNA_P Parameter: Age (day) Value: 7
  misc_feature: MA Experiment 108433 PARAMETER Experiment Name: At_rhl_Mutant2_cDNA_P Parameter: Organism Value: A. thaliana
  misc_feature: MA Experiment 108433 PARAMETER Experiment Name: At_rhl_Mutant2_cDNA_P Parameter: Plant Line Value: rhl Mutant vs. wt landsburg
  misc_feature: MA Experiment 108433 PARAMETER Experiment Name: At_rhl_Mutant2_cDNA_P Parameter: Tissue Value: Roots
  misc_feature: MA Experiment ID: 108501 Result: Up-regulated in Transcription
  misc_feature: MA Experiment 108501 PARAMETER Experiment Name: At_ap2_floral_buds_cDNA_P Parameter: Plant Line Value: ap2 (Ler.)
  misc_feature: MA Experiment 108501 PARAMETER Experiment Name: At_ap2_floral_buds_cDNA_P Parameter: Tissue Value: Closed Flower
  misc_feature: MA Experiment ID: 108572 Result: Up-regulated in Transcription
  misc_feature: MA Experiment 108572 PARAMETER Experiment Name: At_Drought_cDNA_P Parameter: Timepoint (hr) Value: 1
  misc_feature: MA Experiment 108572 PARAMETER Experiment Name: At_Drought_cDNA_P Parameter: Tissue Value: Aerial
  misc_feature: MA Experiment 108572 PARAMETER Experiment Name: At_Drought_cDNA_P Parameter: Treatment Value: Drought vs. No Drought
  misc_feature: MA Experiment ID: 108576 Result: Down-regulated in Transcription
  misc_feature: MA Experiment 108576 PARAMETER Experiment Name: At_42deg_Heat_cDNA_P Parameter: Temperature (deg C) Value: 42 vs. 22
  misc_feature: MA Experiment 108576 PARAMETER Experiment Name: At_42deg_Heat_cDNA_P Parameter: Timepoint (hr) Value: 1
  misc_feature: MA Experiment 108576 PARAMETER Experiment Name: At_42deg_Heat_cDNA_P Parameter: Tissue Value: Aerial
  misc_feature: MA Experiment ID: 108608 Result: Up-regulated in Transcription
  misc_feature: MA Experiment 108608 PARAMETER Experiment Name: At_100uM_ABA_cDNA_P Parameter: Timepoint (hr) Value: 1
  misc_feature: MA Experiment 108608 PARAMETER Experiment Name: At_100uM_ABA_cDNA_P Parameter: Tissue Value: Aerial
  misc_feature: MA Experiment 108608 PARAMETER Experiment Name: At_100uM_ABA_cDNA_P Parameter: Treatment Value: 100uM ABA vs. No Treatment
  misc_feature: MA Experiment ID: 20000071 Result: Up-regulated in Transcription
  misc_feature: MA Experiment 20000071 PARAMETER Experiment Name: At_100uM_ABA_Mutants_cDNA_P Parameter: Plant Line Value: CS8104
  misc_feature: MA Experiment 20000071 PARAMETER Experiment Name: At_100uM_ABA_Mutants_cDNA_P Parameter: Timepoint (hr) Value: 6
  misc_feature: MA Experiment 20000071 PARAMETER Experiment Name: At_100uM_ABA_Mutants_cDNA_P Parameter: Tissue Value: Aerial
  misc_feature: MA Experiment 20000071 PARAMETER Experiment Name: At_100uM_ABA_Mutants_cDNA_P Parameter: Treatment Value: 100uM ABA vs. No Treatment
  misc_feature: MA Experiment ID: 20000111 Result: Down-regulated in Transcription
  misc_feature: MA Experiment 20000111 PARAMETER Experiment Name: At_42deg_Heat_cDNA_P Parameter: Temperature (deg C) Value: 42 vs. 22
  misc_feature: MA Experiment 20000111 PARAMETER Experiment Name: At_42deg_Heat_cDNA_P Parameter: Timepoint (hr) Value: 6
  misc_feature: MA Experiment 20000111 PARAMETER Experiment Name: At_42deg_Heat_cDNA_P Parameter: Tissue Value: Aerial
  misc_feature: MA Experiment ID: 20000112 Result: Down-regulated in Transcription
  misc_feature: MA Experiment 20000112 PARAMETER Experiment Name: At_42deg_Heat_cDNA_P Parameter: Temperature (deg C) Value: 42 vs. 22
  misc_feature: MA Experiment 20000112 PARAMETER Experiment Name: At_42deg_Heat_cDNA_P Parameter: Timepoint (hr) Value: 2
  misc_feature: MA Experiment 20000112 PARAMETER Experiment Name: At_42deg_Heat_cDNA_P Parameter: Tissue Value: Aerial
  misc_feature: MA Experiment ID: 20000144 Result: Down-regulated in Transcription
  misc_feature: MA Experiment 20000144 PARAMETER Experiment Name: At_42deg_Heat_cDNA_P Parameter: Temperature (deg C) Value: 42 vs. 22
  misc_feature: MA Experiment 20000144 PARAMETER Experiment Name: At_42deg_Heat_cDNA_P Parameter: Timepoint (hr) Value: 1
  misc_feature: MA Experiment 20000144 PARAMETER Experiment Name: At_42deg_Heat_cDNA_P Parameter: Tissue Value: Aerial
  misc_feature: MA Experiment ID: 20000166 Result: Up-regulated in Transcription
  misc_feature: MA Experiment 20000166 PARAMETER Experiment Name: At_100uM_ABA_P Parameter: Age (day) Value: 14
  misc_feature: MA Experiment 20000166 PARAMETER Experiment Name: At_100uM_ABA_P Parameter: Organism Value: A. thaliana
  misc_feature: MA Experiment 20000166 PARAMETER Experiment Name: At_100uM_ABA_P Parameter: Plant Line Value: WS
  misc_feature: MA Experiment 20000166 PARAMETER Experiment Name: At_100uM_ABA_P Parameter: Timepoint (hr) Value: 1
  misc_feature: MA Experiment 20000166 PARAMETER Experiment Name: At_100uM_ABA_P Parameter: Tissue Value: Aerial
  misc_feature: MA Experiment 20000166 PARAMETER Experiment Name: At_100uM_ABA_P Parameter: Treatment Value: 100uM ABA vs. No Treatment
  misc_feature: MA Experiment ID: 20000171 Result: Down-regulated in Transcription
  misc_feature: MA Experiment 20000171 PARAMETER Experiment Name: At_42deg_Heat_P Parameter: Age (day) Value: 14
  misc_feature: MA Experiment 20000171 PARAMETER Experiment Name: At_42deg_Heat_P Parameter: Organism Value: A. thaliana
  misc_feature: MA Experiment 20000171 PARAMETER Experiment Name: At_42deg_Heat_P Parameter: Plant Line Value: WS
  misc_feature: MA Experiment 20000171 PARAMETER Experiment Name: At_42deg_Heat_P Parameter: Temperature (deg C) Value: 42 vs. 22
  misc_feature: MA Experiment 20000171 PARAMETER Experiment Name: At_42deg_Heat_P Parameter: Timepoint (hr) Value: 1
  misc_feature: MA Experiment 20000171 PARAMETER Experiment Name: At_42deg_Heat_P Parameter: Tissue Value: Aerial
  misc_feature: MA Experiment ID: 20000173 Result: Down-regulated in Transcription
  misc_feature: MA Experiment 20000173 PARAMETER Experiment Name: At_42deg_Heat_P Parameter: Age (day) Value: 14
  misc_feature: MA Experiment 20000173 PARAMETER Experiment Name: At_42deg_Heat_P Parameter: Organism Value: A. thaliana
  misc_feature: MA Experiment 20000173 PARAMETER Experiment Name: At_42deg_Heat_P Parameter: Plant Line Value: WS
  misc_feature: MA Experiment 20000173 PARAMETER Experiment Name: At_42deg_Heat_P Parameter: Temperature (deg C) Value: 42 vs. 22
  misc_feature: MA Experiment 20000173 PARAMETER Experiment Name: At_42deg_Heat_P Parameter: Timepoint (hr) Value: 6
  misc_feature: MA Experiment 20000173 PARAMETER Experiment Name: At_42deg_Heat_P Parameter: Tissue Value: Aerial
  misc_feature: MA Experiment ID: 20000185 Result: Up-regulated in Transcription
  misc_feature: MA Experiment 20000185 PARAMETER Experiment Name: At_Roots__P Parameter: Age (day) Value: 7 vs. 21
  misc_feature: MA Experiment 20000185 PARAMETER Experiment Name: At_Roots__P Parameter: Organism Value: A. thaliana
  misc_feature: MA Experiment 20000185 PARAMETER Experiment Name: At_Roots__P Parameter: Tissue Value: Roots vs. Whole Plant
  misc_feature: MA Experiment ID: 20000224 Result: Down-regulated in Transcription
  misc_feature: MA Experiment ID: 20000439 Result: Up-regulated in Transcription
  misc_feature: MA Experiment 20000439 PARAMETER Experiment Name: At_Roots__P Parameter: Age (day) Value: 14 vs. 21
  misc_feature: MA Experiment 20000439 PARAMETER Experiment Name: At_Roots__P Parameter: Organism Value: A. thaliana
  misc_feature: MA Experiment 20000439 PARAMETER Experiment Name: At_Roots__P Parameter: Tissue Value: Roots vs. Whole Plant
  misc_feature: MA Experiment ID: 20000451 Result: Down-regulated in Transcription
  misc_feature: MA Experiment 20000451 PARAMETER Experiment Name: At_CS6879_Shoots-Roots_P Parameter: Age (day) Value: 14
  misc_feature: MA Experiment 20000451 PARAMETER Experiment Name: At_CS6879_Shoots-Roots_P Parameter: Organism Value: A. thaliana
  misc_feature: MA Experiment 20000451 PARAMETER Experiment Name: At_CS6879_Shoots-Roots_P Parameter: Plant Line Value: CS6879 vs. WS
  misc_feature: MA Experiment 20000451 PARAMETER Experiment Name: At_CS6879_Shoots-Roots_P Parameter: Tissue Value: Roots
  misc_feature: MA Experiment ID: 20000496 Result: Down-regulated in Transcription
  misc_feature: MA Experiment 20000496 PARAMETER Experiment Name: At_Guard_Cells_P Parameter: Harvest Date Value: 7/19/2002
  misc_feature: MA Experiment 20000496 PARAMETER Experiment Name: At_Guard_Cells_P Parameter: Organism Value: Canola
  misc_feature: MA Experiment 20000496 PARAMETER Experiment Name: At_Guard_Cells_P Parameter: Tissue Value: Guard Cells vs. Leaves
  misc_feature: MA Experiment ID: 20001557 Result: Down-regulated in Transcription
  misc_feature: MA Experiment 20001557 PARAMETER Experiment Name: At_Drought_Soil_Dry_P Parameter: Age (day) Value: 27
  misc_feature: MA Experiment 20001557 PARAMETER Experiment Name: At_Drought_Soil_Dry_P Parameter: Organism Value: A. thaliana
  misc_feature: MA Experiment 20001557 PARAMETER Experiment Name: At_Drought_Soil_Dry_P Parameter: Plant Line Value: WS
  misc_feature: MA Experiment 20001557 PARAMETER Experiment Name: At_Drought_Soil_Dry_P Parameter: Post Timepoint (hr) Value: 3
  misc_feature: MA Experiment 20001557 PARAMETER Experiment Name: At_Drought_Soil_Dry_P Parameter: Post-Treatment Value: Re-Water vs. No Drought
  misc_feature: MA Experiment 20001557 PARAMETER Experiment Name: At_Drought_Soil_Dry_P Parameter: Timepoint (day) Value: 13
  misc_feature: MA Experiment 20001557 PARAMETER Experiment Name: At_Drought_Soil_Dry_P Parameter: Treatment Value: Drought vs. No Drought
  misc_feature: MA Experiment ID: 20001558 Result: Down-regulated in Transcription
  misc_feature: MA Experiment 20001558 PARAMETER Experiment Name: At_Drought_Soil_Dry_P Parameter: Age (day) Value: 27
  misc_feature: MA Experiment 20001558 PARAMETER Experiment Name: At_Drought_Soil_Dry_P Parameter: Organism Value: A. thaliana
  misc_feature: MA Experiment 20001558 PARAMETER Experiment Name: At_Drought_Soil_Dry_P Parameter: Plant Line Value: WS
  misc_feature: MA Experiment 20001558 PARAMETER Experiment Name: At_Drought_Soil_Dry_P Parameter: Post Timepoint (hr) Value: 6
  misc_feature: MA Experiment 20001558 PARAMETER Experiment Name: At_Drought_Soil_Dry_P Parameter: Post-Treatment Value: Re-Water vs. No Drought
  misc_feature: MA Experiment 20001558 PARAMETER Experiment Name: At_Drought_Soil_Dry_P Parameter: Timepoint (day) Value: 13
  misc_feature: MA Experiment 20001558 PARAMETER Experiment Name: At_Drought_Soil_Dry_P Parameter: Treatment Value: Drought vs. No Drought
  misc_feature: MA Experiment ID: 20001560 Result: Down-regulated in Transcription
  misc_feature: MA Experiment 20001560 PARAMETER Experiment Name: At_Drought_Soil_Dry_P Parameter: Age (day) Value: 28
  misc_feature: MA Experiment 20001560 PARAMETER Experiment Name: At_Drought_Soil_Dry_P Parameter: Organism Value: A. thaliana
  misc_feature: MA Experiment 20001560 PARAMETER Experiment Name: At_Drought_Soil_Dry_P Parameter: Plant Line Value: WS
  misc_feature: MA Experiment 20001560 PARAMETER Experiment Name: At_Drought_Soil_Dry_P Parameter: Post Timepoint (hr) Value: None
  misc_feature: MA Experiment 20001560 PARAMETER Experiment Name: At_Drought_Soil_Dry_P Parameter: Post-Treatment Value: None
  misc_feature: MA Experiment 20001560 PARAMETER Experiment Name: At_Drought_Soil_Dry_P Parameter: Timepoint (day) Value: 14
  misc_feature: MA Experiment 20001560 PARAMETER Experiment Name: At_Drought_Soil_Dry_P Parameter: Treatment Value: Drought vs. No Drought
  misc_feature: MA Experiment ID: 20001905 Result: Down-regulated in Transcription
  misc_feature: MA Experiment 20001905 PARAMETER Experiment Name: At_Drought_Reproduction_P Parameter: Age (day) Value: 40
  misc_feature: MA Experiment 20001905 PARAMETER Experiment Name: At_Drought_Reproduction_P Parameter: Organism Value: A. thaliana
  misc_feature: MA Experiment 20001905 PARAMETER Experiment Name: At_Drought_Reproduction_P Parameter: Plant Line Value: WS
  misc_feature: MA Experiment 20001905 PARAMETER Experiment Name: At_Drought_Reproduction_P Parameter: Timepoint (day) Value: 10
  misc_feature: MA Experiment 20001905 PARAMETER Experiment Name: At_Drought_Reproduction_P Parameter: Tissue Value: Rosettes
  misc_feature: MA Experiment 20001905 PARAMETER Experiment Name: At_Drought_Reproduction_P Parameter: Treatment Value: Drought vs. No Drought
  misc_feature: MA Experiment ID: 20001911 Result: Down-regulated in Transcription
  misc_feature: MA Experiment 20001911 PARAMETER Experiment Name: At_Drought_Reproduction_P Parameter: Age (day) Value: 40
  misc_feature: MA Experiment 20001911 PARAMETER Experiment Name: At_Drought_Reproduction_P Parameter: Organism Value: A. thaliana
  misc_feature: MA Experiment 20001911 PARAMETER Experiment Name: At_Drought_Reproduction_P Parameter: Plant Line Value: WS
  misc_feature: MA Experiment 20001911 PARAMETER Experiment Name: At_Drought_Reproduction_P Parameter: Timepoint (day) Value: 10
  misc_feature: MA Experiment 20001911 PARAMETER Experiment Name: At_Drought_Reproduction_P Parameter: Tissue Value: Flowers
  misc_feature: MA Experiment 20001911 PARAMETER Experiment Name: At_Drought_Reproduction_P Parameter: Treatment Value: Drought vs. No Drought
atgtcttcatcacctcttctttaacgcctctggctctgcatttctcagtctttttgcacaagaaacaaagctcaggaaaacctcaaaaccctaagctatgagaacaagcaaccatctcataggtttagtcaacttcctcactttcctcctctcaataccaatcctcggcggtggaatatggttaagcagccgagctaactccaccgactgtttaagattccttcaatggcctctcatcgtcatcggaatctcaatcatggtcgtatctttagctggattcgctggagcttgttaccgtaacaagttccttatgtggctatacctagtagtcatgcttctcatcatcgctgctcttatcggtttcatcatcttcgcttacgcggttacagataaaggatccggtcgaaccgtacttaaccggggttatcttgactattatcttgaagattactctggttggttgaaagatcgagtttctgatgatagctattggggtaaaattagttcttgtcttagagattctggtgcttgtagaaagatcgaagaaattttaatggtgtacctgaaactgctgatatgttcttccttagaagacttagccctgttgagtccggttgttgcaagccaccaacagattgcggtttttcatatgtgaatgagaccggatgggacacgagaggagggatgataggaccgaaccaggactgtatggtgtggagcaacgaccagagcatgctctgttatcagtgtagttcttgtaaagctggtgttcttgggagtttgaagaagagttggagaaaagtatcggtgatcaacattgtggtacttatcattctagttatcttttacgttatcgcttatgcagcttataggaatgtcaagaggaacgataacgatgaaccggctggtgaagctaggatgacaaaatcacatcctagtcatttccatctttgatcaaaatttggaacagttcaaaaaaatgtatcgaggctttgatttatgtttaaaggttttagtacttttgtgtatgtttttggtatgtaacacatttttttgtgtgc

SEQ ID NO: 28674 - protein, 185 aa, Arabidopsis thaliana
  peptide (1)..(185): Ceres Seq. ID no. 13580295
  misc_feature (3)..(148): Pfam Name: Tetraspanin family Pfam Description: Tetraspanin family
  misc_feature (1)..(150): Homolog of NCBI NO: 15237490 NR Description: senescence-associated protein, putative
  misc_feature (1)..(150): Homolog of NCBI NO: 15224802 NR Description: senescence-associated protein- related
  misc_feature (1)..(149): Homolog of NCBI NO: 21537169 NR Description: senescence-associated protein-like protein
  misc_feature (1)..(149): Homolog of NCBI NO: 15234743 NR Description: senescence-associated protein family [Arabidopsis
  misc_feature (1)..(145): Homolog of NCBI NO: 15234374 NR Description: senescence-associated protein, putative
  misc_feature (2)..(149): Homolog of NCBI NO: 20197174 NR Description: hypothetical protein [Arabidopsis thaliana]
  misc_feature (1)..(150): Homolog of NCBI NO: 29367553 NR Description: senescence-associated protein-like protein
  misc_feature (2)..(147): Homolog of NCBI NO: 3551954 NR Description: senescence-associated protein 5 [Hemerocallis
  misc_feature (1)..(148): Homolog of NCBI NO: 15238641 NR Description: senescence-associated protein family [Arabidopsis
  misc_feature (1)..(148): Homolog of NCBI NO: 15231187 NR Description: senescence-associated protein family [Arabidopsis
MRTSNHLIGLVNFLTFLLSIPILGGGIWLSSRANSTDCLRFLQWPLIVIGISIMVVSLAGFAGACYRNKFLMWLYLVVMLLIIAALIGFIIFAYAVTDKGSGRTVLNRGYLDYYLEDYSGWLKDRVSDDSYWGKISSCLRDSGACRKIEEILMVYLKLLICSSLEDLALLSPVVASHQQIAVFHM

SEQ ID NO: 28675 - protein, 132 aa, Arabidopsis thaliana
  peptide (1)..(132): Ceres Seq. ID no. 13580296
  misc_feature (1)..(95): Pfam Name: Tetraspanin family Pfam Description: Tetraspanin family
  misc_feature (1)..(97): Homolog of NCBI NO: 15237490 NR Description: senescence-associated protein, putative
  misc_feature (1)..(97): Homolog of NCBI NO: 15224802 NR Description: senescence-associated protein- related
  misc_feature (1)..(96): Homolog of NCBI NO: 21537169 NR Description: senescence-associated protein-like protein
  misc_feature (1)..(96): Homolog of NCBI NO: 15234743 NR Description: senescence-associated protein family [Arabidopsis
  misc_feature (1)..(92): Homolog of NCBI NO: 15234374 NR Description: senescence-associated protein, putative
  misc_feature (1)..(96): Homolog of NCBI NO: 20197174 NR Description: hypothetical protein [Arabidopsis thaliana]
  misc_feature (1)..(97): Homolog of NCBI NO: 29367553 NR Description: senescence-associated protein-like protein
  misc_feature (1)..(94): Homolog of NCBI NO: 3551954 NR Description: senescence-associated protein 5 [Hemerocallis
  misc_feature (1)..(95): Homolog of NCBI NO: 15238641 NR Description: senescence-associated protein family [Arabidopsis
  misc_feature (1)..(95): Homolog of NCBI NO: 15231187 NR Description: senescence-associated protein family [Arabidopsis
MVVSLAGFAGACYRNKFLMWLYLVVMLLIIAALIGFIIFAYAVTDKGSGRTVLNRGYLDYYLEDYSGWLKDRVSDDSYWGKISSCLRDSGACRKIEEILMVYLKLLICSSLEDLALLSPVVASHQQIAVFHM

SEQ ID NO: 28676 - protein, 125 aa, Arabidopsis thaliana
  peptide (1)..(125): Ceres Seq. ID no. 13580297
  misc_feature (1)..(87): Pfam Name: Tetraspanin family Pfam Description: Tetraspanin family
  misc_feature (1)..(105): Homolog of NCBI NO: 15237490 NR Description: senescence-associated protein, putative
  misc_feature (1)..(105): Homolog of NCBI NO: 15224802 NR Description: senescence-associated protein- related
  misc_feature (1)..(104): Homolog of NCBI NO: 21537169 NR Description: senescence-associated protein-like protein
  misc_feature (1)..(104): Homolog of NCBI NO: 15234743 NR Description: senescence-associated protein family [Arabidopsis
  misc_feature (2)..(103): Homolog of NCBI NO: 15234374 NR Description: senescence-associated protein, putative
  misc_feature (1)..(106): Homolog of NCBI NO: 20197174 NR Description: hypothetical protein [Arabidopsis thaliana]
  misc_feature (2)..(113): Homolog of NCBI NO: 29367553 NR Description: senescence-associated protein-like protein
  misc_feature (1)..(104): Homolog of NCBI NO: 3551954 NR Description: senescence-associated protein 5 [Hemerocallis
  misc_feature (1)..(116): Homolog of NCBI NO: 15238641 NR Description: senescence-associated protein family [Arabidopsis
  misc_feature (1)..(125): Homolog of NCBI NO: 15231187 NR Description: senescence-associated protein family [Arabidopsis
MFFLRRLSPVESGCCKPPTDCGFSYVNETGWDTRGGMIGPNQDCMVWSNDQSMLCYQCSSCKAGVLGSLKKSWRKVSVINIVVLIILVIFYVIAYAAYRNVKRNDNDEPAGEARMTKSHPSHFHL

SEQ ID NO: 28677 - DNA, 1518 bp, Arabidopsis thaliana
  misc_feature (1)..(1518): Ceres Seq. ID no. 12579421
  misc_feature: MA Experiment ID: 108463 Result: Up-regulated in Transcription
  misc_feature: MA Experiment 108463 PARAMETER Experiment Name: At_Germinating_Seeds_cDNA_P Parameter: Age (day) Value: 3 vs. 0
  misc_feature: MA Experiment 108463 PARAMETER Experiment Name: At_Germinating_Seeds_cDNA_P Parameter: Tissue Value: Germinating Seeds
  misc_feature: MA Experiment ID: 108464 Result: Up-regulated in Transcription
  misc_feature: MA Experiment 108464 PARAMETER Experiment Name: At_Germinating_Seeds_cDNA_P Parameter: Age (day) Value: 4 vs. 0
  misc_feature: MA Experiment 108464 PARAMETER Experiment Name: At_Germinating_Seeds_cDNA_P Parameter: Tissue Value: Germinating Seeds
  misc_feature: MA Experiment ID: 108595 Result: Down-regulated in Transcription
  misc_feature: MA Experiment 108595 PARAMETER Experiment Name: At_Ler-pi_Ovule_cDNA_P Parameter: Plant Line Value: null
  misc_feature: MA Experiment ID: 20000112 Result: Up-regulated in Transcription
  misc_feature: MA Experiment 20000112 PARAMETER Experiment Name: At_42deg_Heat_cDNA_P Parameter: Temperature (deg C) Value: 42 vs. 22
  misc_feature: MA Experiment 20000112 PARAMETER Experiment Name: At_42deg_Heat_cDNA_P Parameter: Timepoint (hr) Value: 2
  misc_feature: MA Experiment 20000112 PARAMETER Experiment Name: At_42deg_Heat_cDNA_P Parameter: Tissue Value: Aerial
  misc_feature: MA Experiment ID: 20000184 Result: Down-regulated in Transcription
  misc_feature: MA Experiment 20000184 PARAMETER Experiment Name: At_Shoots__P Parameter: Age (day) Value: 7
  misc_feature: MA Experiment 20000184 PARAMETER Experiment Name: At_Shoots__P Parameter: Tissue Value: Shoots vs. Whole Plant
  misc_feature: MA Experiment ID: 20000235 Result: Down-regulated in Transcription
  misc_feature: MA Experiment 20000235 PARAMETER Experiment Name: At_Siliques_P Parameter: Age (day) Value: 21
  misc_feature: MA Experiment 20000235 PARAMETER Experiment Name: At_Siliques_P Parameter: Organism Value: A. thaliana
  misc_feature: MA Experiment 20000235 PARAMETER Experiment Name: At_Siliques_P Parameter: Plant Line Value: WS
  misc_feature: MA Experiment 20000235 PARAMETER Experiment Name: At_Siliques_P Parameter: Tissue Value: 5-10mm Siliques vs. Whole Plant
  misc_feature: MA Experiment ID: 20000286 Result: Down-regulated in Transcription
  misc_feature: MA Experiment 20000286 PARAMETER Experiment Name: At_Open_Flower_P Parameter: Age (day) Value: 21
  misc_feature: MA Experiment 20000286 PARAMETER Experiment Name: At_Open_Flower_P Parameter: Plant Line Value: WS
  misc_feature: MA Experiment 20000286 PARAMETER Experiment Name: At_Open_Flower_P Parameter: Tissue Value: Half Open vs. Whole Plant
ttttttgtccttaggatttgattgtacatacatctgatctcaagtgatttcaagtggttggttctgttccttttctcgtccccgatcaagtttcttctcctaaactccagaatttggtcttgaagatctctaaaggctcttcctttttgttcatttctctacccagatatcgatgggtacatacctaagttctccgaaaactgaaaagttatcagaagatggtgagaatgataagctcagatttggtttatcgtctatgcaaggttggcgcgctaccatggaagacgcgcatgctgcaattcttgatcttgatgataagacatcgttcttcggtgtgtatgatggccatggaggtaaagtcgttgcaaagttctgtgccaagtatctacaccagcaggttatcagtaatgaagcgtataaaactggagacgtcgaaacatctcttcgaagagcattctttagaatggatgacatgatgcaaggacaaagaggatggcgagagttagctgtacttggcgacaagatgaacaaatttagcggcatgattgaaggatttatatggtcaccaagaagcggtgacaccaataaccaacccgatagttggcctcttgaagatggtcctcattctgatttcacgggacctacctcggggtgcacagcgtgtgtagctcttattaaagataagaagctctttgttgcaaatgccggtgactcacgttgtgtgatatcaagaaagagtcaggcttacaatctttctaaagatcacaagcctgatcttgaagttgaaaaagaaaggatattgaaagctggtggctttattcacgctgggagaatcaatggaagcttgaatctgacaagagccattggtgatatggagttcaagcagaataagtttttaccatctgaaaagcaaatggttactgctgatccagatataaacactattgacctatgtgatgatgatgactttcttgttgttgcttgcgatggaatatgggattgtatgtcaagccaggaactagttgattttatccatgaacagttaaaatctgaaacaaaactttcaacagtatgtgaaaaggttgttgatagatgtttggctccagatacagcgactggtgaaggttgtgataatatgaccatcatcttggttcagttcaagaagcctaacccatctgagactgaaccagaagattccaaaccagaaccaagcgaagatgagccgagctcatcaagctagatatctttaaagagccaagaggaagaagatttgtgaaagtgtctcttttatcattgactttttgttcaacattgtaaatccttttgaatgtggcttagattcaagaagctggctttttcccagtttagcttcaagaagtctgagatgtcacagagtttggtttaatcttaaaaggacctttgtatagatatttcttgtgattgatgttttcagctatagtttaaaaaattcacaaggacaagctttttgtaccaacatcatgggatttgttttcatcg

SEQ ID NO: 28678 - protein, 355 aa, Arabidopsis thaliana
  peptide (1)..(355): Ceres Seq. ID no. 12579422
  misc_feature (22)..(322): Pfam Name: Protein phosphatase 2C Pfam Description: Protein phosphatase 2C
  misc_feature (156)..(348): Homolog of NCBI NO: 22219444 NR Description: protein phosphatase 1G (formerly 2C),
  misc_feature (1)..(117): Homolog of NCBI NO: 4505999 NR Description: protein phosphatase 1G (formerly 2C),
  misc_feature (1)..(120): Homolog of NCBI NO: 27697184 NR Description: Similar to protein phosphatase 1G (formerly 2C),
  misc_feature (156)..(348): Homolog of NCBI NO: 4505999 NR Description: protein phosphatase 1G (formerly 2C),
  misc_feature (134)..(355): Homolog of NCBI NO: 27697184 NR Description: Similar to protein phosphatase 1G (formerly 2C),
  misc_feature (1)..(99): Homolog of NCBI NO: 19921654 NR Description: CG10417-PA [Drosophila melanogaster]
  misc_feature (156)..(331): Homolog of NCBI NO: 19921654 NR Description: CG10417-PA [Drosophila melanogaster]
  misc_feature (1)..(343): Homolog of NCBI NO: 12003990 NR Description: protein phosphatase type-2C [Zea mays]
  misc_feature (1)..(355): Homolog of NCBI NO: 15236548 NR Description: protein phosphatase 2C (PP2C)
  misc_feature (1)..(355): Homolog of NCBI NO: 15224677 NR Description: protein phosphatase 2C (PP2C)
MGTYLSSPKTEKLSEDGENDKLRFGLSSMQGWRATMEDAHAAILDLDDKTSFFGVYDGHGGKVVAKFCAKYLHQQVISNEAYKTGDVETSLRRAFFRMDDMMQGQRGWRELAVLGDKMNKFSGMIEGFIWSPRSGDTNNQPDSWPLEDGPHSDFTGPTSGCTACVALIKDKKLFVANAGDSRCVISRKSQAYNLSKDHKPDLEVEKERILKAGGFIHAGRINGSLNLTRAIGDMEFKQNKFLPSEKQMVTADPDINTIDLCDDDDFLVVACDGIWDCMSSQELVDFIHEQLKSETKLSTVCEKVVDRCLAPDTATGEGCDNMTIILVQFKKPNPSETEPEDSKPEPSEDEPSSSS

SEQ ID NO: 28679 - protein, 327 aa, Arabidopsis thaliana
  peptide (1)..(327): Ceres Seq. ID no. 12579423
  misc_feature (1)..(294): Pfam Name: Protein phosphatase 2C Pfam Description: Protein phosphatase 2C
  misc_feature (128)..(320): Homolog of NCBI NO: 22219444 NR Description: protein phosphatase 1G (formerly 2C),
  misc_feature (1)..(89): Homolog of NCBI NO: 4505999 NR Description: protein phosphatase 1G (formerly 2C),
  misc_feature (1)..(92): Homolog of NCBI NO: 27697184 NR Description: Similar to protein phosphatase 1G (formerly 2C),
  misc_feature (128)..(320): Homolog of NCBI NO: 4505999 NR Description: protein phosphatase 1G (formerly 2C),
  misc_feature (106)..(327): Homolog of NCBI NO: 27697184 NR Description: Similar to protein phosphatase 1G (formerly 2C),
  misc_feature (1)..(71): Homolog of NCBI NO: 19921654 NR Description: CG10417-PA [Drosophila melanogaster]
  misc_feature (128)..(303): Homolog of NCBI NO: 19921654 NR Description: CG10417-PA [Drosophila melanogaster]
  misc_feature (1)..(315): Homolog of NCBI NO: 12003990 NR Description: protein phosphatase type-2C [Zea mays]
  misc_feature (1)..(327): Homolog of NCBI NO: 15236548 NR Description: protein phosphatase 2C (PP2C)
  misc_feature (1)..(327): Homolog of NCBI NO: 15224677 NR Description: protein phosphatase 2C (PP2C)
MQGWRATMEDAHAAILDLDDKTSFFGVYDGHGGKVVAKFCAKYLHQQVISNEAYKTGDVETSLRRAFFRMDDMMQGQRGWRELAVLGDKMNKFSGMIEGFIWSPRSGDTNNQPDSWPLEDGPHSDFTGPTSGCTACVALIKDKKLFVANAGDSRCVISRKSQAYNLSKDHKPDLEVEKERILKAGGFIHAGRINGSLNLTRAIGDMEFKQNKFLPSEKQMVTADPDINTIDLCDDDDFLVVACDGIWDCMSSQELVDFIHEQLKSETKLSTVCEKVVDRCLAPDTATGEGCDNMTIILVQFKKPNPSETEPEDSKPEPSEDEPSSSS

SEQ ID NO: 28680 - protein, 320 aa, Arabidopsis thaliana
  peptide (1)..(320): Ceres Seq. ID no. 12579424
  misc_feature (1)..(287): Pfam Name: Protein phosphatase 2C Pfam Description: Protein phosphatase 2C
  misc_feature (121)..(313): Homolog of NCBI NO: 22219444 NR Description: protein phosphatase 1G (formerly 2C),
  misc_feature (1)..(82): Homolog of NCBI NO: 4505999 NR Description: protein phosphatase 1G (formerly 2C),
  misc_feature (1)..(85): Homolog of NCBI NO: 27697184 NR Description: Similar to protein phosphatase 1G (formerly 2C),
  misc_feature (121)..(313): Homolog of NCBI NO: 4505999 NR Description: protein phosphatase 1G (formerly 2C),
  misc_feature (99)..(320): Homolog of NCBI NO: 27697184 NR Description: Similar to protein phosphatase 1G (formerly 2C),
  misc_feature (1)..(64): Homolog of NCBI NO: 19921654 NR Description: CG10417-PA [Drosophila melanogaster]
  misc_feature (121)..(296): Homolog of NCBI NO: 19921654 NR Description: CG10417-PA [Drosophila melanogaster]
  misc_feature (1)..(308): Homolog of NCBI NO: 12003990 NR Description: protein phosphatase type-2C [Zea mays]
  misc_feature (1)..(320): Homolog of NCBI NO: 15236548 NR Description: protein phosphatase 2C (PP2C)
  misc_feature (1)..(320): Homolog of NCBI NO: 15224677 NR Description: protein phosphatase 2C (PP2C)
MEDAHAAILDLDDKTSFFGVYDGHGGKVVAKFCAKYLHQQVISNEAYKTGDVETSLRRAFFRMDDMMQGQRGWRELAVLGDKMNKFSGMIEGFIWSPRSGDTNNQPDSWPLEDGPHSDFTGPTSGCTACVALIKDKKLFVANAGDSRCVISRKSQAYNLSKDHKPDLEVEKERILKAGGFIHAGRINGSLNLTRAIGDMEFKQNKFLPSEKQMVTADPDINTIDLCDDDDFLVVACDGIWDCMSSQELVDFIHEQLKSETKLSTVCEKVVDRCLAPDTATGEGCDNMTIILVQFKKPNPSETEPEDSKPEPSEDEPSSSS

SEQ ID NO: 28681 - DNA, 1331 bp, Arabidopsis thaliana
  misc_feature (1)..(1331): Ceres Seq. ID no. 12337850
  misc_feature: MA Experiment ID: 20001451 Result: Down-regulated in Transcription
  misc_feature: MA Experiment 20001451 PARAMETER Experiment Name: At_Far-red-induction_P Parameter: Age (day) Value: 7
  misc_feature: MA Experiment 20001451 PARAMETER Experiment Name: At_Far-red-induction_P Parameter: Light Value: Far-red vs. White
  misc_feature: MA Experiment 20001451 PARAMETER Experiment Name: At_Far-red-induction_P Parameter: Organism Value: A. thaliana
  misc_feature: MA Experiment 20001451 PARAMETER Experiment Name: At_Far-red-induction_P Parameter: Plant Line Value: Columbia
  misc_feature: MA Experiment 20001451 PARAMETER Experiment Name: At_Far-red-induction_P Parameter: Timepoint (hr) Value: 24
  misc_feature: MA Experiment 20001451 PARAMETER Experiment Name: At_Far-red-induction_P Parameter: Tissue Value: Whole Plant
ggagatatgaatctcttctttctctggatttgaaagttcgatgaaaatctactgatacatcgacttctggaagcgatctcgatctctctagaattgtttcgacgacgaagatgaagaagattcaaattggtgcggtggcgctattggtgtttctatctgtggcctctctctttgaaatcggattggcttctccgaacacagttcctgctttcctctggtctccgcatctccagtctgctaatggtgaattggatgaggctgtaaattatcaggtcatgtctgcaaaggatctagttggttctgttttcactcaaggaggttggtcaaactttctgtgctcagagaagaagcttgagcaacctgttgatgttgcacttgtgttcataggcagagagttactgtcttctgatgtttcttcaaaaaggaactcagatcctgcccttgttaacacattgaataatctatttacagcttccaacttctcattggcattcccatatattgctgctccagaggaagaaaggatggagaatttgttactttcagggcttaaagaagcttgtcccaacaatgtaggagtcagcaatatcgtgttctcagattcgtgctttgttgaggatggaacaattcagaaactttcagacttgcagtctttcaaagatcatttgcttgctagaagagaaacaaggaaagaaggagaaactgacttggttgtgctctgttccgagggttctgaatcgaatagtcaagctggacagtcacattcagagcgtgaaagcttcttggaacttgttagttctgtagaacaatccggcagtaaatatacagctctttatgtttctgatccttattggtacacatcttacaaaactctccaaaggtttctagctgaaactgctaaaggaaacagtactcctgaaattgctactggctgtgatgaactctgcaaatttaagtcatcacttttggagggcatactagtgggaatcgtttttcttctcatcttgatcagtggactttgctgtatggcgggtatcgatacaccgactagattcgagactcctcaagattcttaagctgttgaccttaagagccatccccaccttttgctttgcttttgacgagtcttttcttgtgcatagtgcgcattgtggaaggtacttcaatgtcgatttgttacattattacttcaaaacaaaatctgcatatgccataaaatccccttgtatcatttattcatcttgtttgtgagtctttcttaaacgtcataaattaataatggagaacgagtaaaaaaccagagatacatacactggagaacggattacatt

SEQ ID NO: 28682 - protein, 321 aa, Arabidopsis thaliana
  peptide (1)..(321): Ceres Seq. ID no. 12337851
  misc_feature (56)..(118): Homolog of NCBI NO: 25405838 NR Description: hypothetical protein T5A14.4 [imported] -
  misc_feature (119)..(321): Homolog of NCBI NO: 21618303 NR Description: unknown [Arabidopsis thaliana]
  misc_feature (1)..(321): Homolog of NCBI NO: 24417230 NR Description: unknown [Arabidopsis thaliana]
  misc_feature (1)..(321): Homolog of NCBI NO: 30682651 NR Description: expressed protein [Arabidopsis thaliana]
MKKIQIGAVALLVFLSVASLFEIGLASPNTVPAFLWSPHLQSANGELDEAVNYQVMSAKDLVGSVFTQGGWSNFLCSEKKLEQPVDVALVFIGRELLSSDVSSKRNSDPALVNTLNNLFTASNFSLAFPYIAAPEEERMENLLLSGLKEACPNNVGVSNIVFSDSCFVEDGTIQKLSDLQSFKDHLLARRETRKEGETDLVVLCSEGSESNSQAGQSHSERESFLELVSSVEQSGSKYTALYVSDPYWYTSYKTLQRFLAETAKGNSTPEIATGCDELCKFKSSLLEGILVGIVFLLILISGLCCMAGIDTPTRFETPQDS

SEQ ID NO: 28683 - protein, 266 aa, Arabidopsis thaliana
  peptide (1)..(266): Ceres Seq. ID no. 12337852
  misc_feature (1)..(63): Homolog of NCBI NO: 25405838 NR Description: hypothetical protein T5A14.4 [imported] -
  misc_feature (64)..(266): Homolog of NCBI NO: 21618303 NR Description: unknown [Arabidopsis thaliana]
  misc_feature (1)..(266): Homolog of NCBI NO: 24417230 NR Description: unknown [Arabidopsis thaliana]
  misc_feature (1)..(266): Homolog of NCBI NO: 30682651 NR Description: expressed protein [Arabidopsis thaliana]
MSAKDLVGSVFTQGGWSNFLCSEKKLEQPVDVALVFIGRELLSSDVSSKRNSDPALVNTLNNLFTASNFSLAFPYIAAPEEERMENLLLSGLKEACPNNVGVSNIVFSDSCFVEDGTIQKLSDLQSFKDHLLARRETRKEGETDLVVLCSEGSESNSQAGQSHSERESFLELVSSVEQSGSKYTALYVSDPYWYTSYKTLQRFLAETAKGNSTPEIATGCDELCKFKSSLLEGILVGIVFLLILISGLCCMAGIDTPTRFETPQDS

SEQ ID NO: 28684 - protein, 183 aa, Arabidopsis thaliana
  peptide (1)..(183): Ceres Seq. ID no. 12337853
  misc_feature (1)..(183): Homolog of NCBI NO: 21618303 NR Description: unknown [Arabidopsis thaliana]
  misc_feature (1)..(183): Homolog of NCBI NO: 24417230 NR Description: unknown [Arabidopsis thaliana]
  misc_feature (1)..(183): Homolog of NCBI NO: 30682651 NR Description: expressed protein [Arabidopsis thaliana]
MENLLLSGLKEACPNNVGVSNIVFSDSCFVEDGTIQKLSDLQSFKDHLLARRETRKEGETDLVVLCSEGSESNSQAGQSHSERESFLELVSSVEQSGSKYTALYVSDPYWYTSYKTLQRFLAETAKGNSTPEIATGCDELCKFKSSLLEGILVGIVFLLILISGLCCMAGIDTPTRFETPQDS

SEQ ID NO: 28685 - DNA, 737 bp, Arabidopsis thaliana
  misc_feature (1)..(737): Ceres Seq. ID no. 12580393
  misc_feature: MA Experiment ID: 108433 Result: Up-regulated in Transcription
  misc_feature: MA Experiment 108433 PARAMETER Experiment Name: At_rhl_Mutant2_cDNA_P Parameter: Age (day) Value: 7
  misc_feature: MA Experiment 108433 PARAMETER Experiment Name: At_rhl_Mutant2_cDNA_P Parameter: Organism Value: A. thaliana
  misc_feature: MA Experiment 108433 PARAMETER Experiment Name: At_rhl_Mutant2_cDNA_P Parameter: Plant Line Value: rhl Mutant vs. wt landsburg
  misc_feature: MA Experiment 108433 PARAMETER Experiment Name: At_rhl_Mutant2_cDNA_P Parameter: Tissue Value: Roots
  misc_feature: MA Experiment ID: 108434 Result: Down-regulated in Transcription
  misc_feature: MA Experiment 108434 PARAMETER Experiment Name: At_Root_Tips_cDNA_P Parameter: Tissue Value: Root Tips
  misc_feature: MA Experiment ID: 108488 Result: Down-regulated in Transcription
  misc_feature: MA Experiment ID: 108561 Result: Up-regulated in Transcription
  misc_feature: MA Experiment 108561 PARAMETER Experiment Name: At_100uM_ABA_cDNA_P Parameter: Timepoint (hr) Value: 6
  misc_feature: MA Experiment 108561 PARAMETER Experiment Name: At_100uM_ABA_cDNA_P Parameter: Tissue Value: Aerial
  misc_feature: MA Experiment 108561 PARAMETER Experiment Name: At_100uM_ABA_cDNA_P Parameter: Treatment Value: 100uM ABA vs. No Treatment
  misc_feature: MA Experiment ID: 108572 Result: Up-regulated in Transcription
  misc_feature: MA Experiment 108572 PARAMETER Experiment Name: At_Drought_cDNA_P Parameter: Timepoint (hr) Value: 1
  misc_feature: MA Experiment 108572 PARAMETER Experiment Name: At_Drought_cDNA_P Parameter: Tissue Value: Aerial
  misc_feature: MA Experiment 108572 PARAMETER Experiment Name: At_Drought_cDNA_P Parameter: Treatment Value: Drought vs. No Drought
  misc_feature: MA Experiment ID: 108605 Result: Up-regulated in Transcription
  misc_feature: MA Experiment 108605 PARAMETER Experiment Name: At_100uM_ABA_cDNA_P Parameter: Timepoint (hr) Value: 6
  misc_feature: MA Experiment 108605 PARAMETER Experiment Name: At_100uM_ABA_cDNA_P Parameter: Tissue Value: Aerial
  misc_feature: MA Experiment 108605 PARAMETER Experiment Name: At_100uM_ABA_cDNA_P Parameter: Treatment Value: 100uM ABA vs. No Treatment
  misc_feature: MA Experiment ID: 108607 Result: Up-regulated in Transcription
  misc_feature: MA Experiment 108607 PARAMETER Experiment Name: At_100uM_ABA_cDNA_P Parameter: Timepoint (hr) Value: 4
  misc_feature: MA Experiment 108607 PARAMETER Experiment Name: At_100uM_ABA_cDNA_P Parameter: Tissue Value: Aerial
  misc_feature: MA Experiment 108607 PARAMETER Experiment Name: At_100uM_ABA_cDNA_P Parameter: Treatment Value: 100uM ABA vs. No Treatment
  misc_feature: MA Experiment ID: 108668 Result: Up-regulated in Transcription
  misc_feature: MA Experiment 108668 PARAMETER Experiment Name: At_2mM_SA_cDNA_P Parameter: Plant Line Value: WS
  misc_feature: MA Experiment 108668 PARAMETER Experiment Name: At_2mM_SA_cDNA_P Parameter: Timepoint (hr) Value: 6
  misc_feature: MA Experiment 108668 PARAMETER Experiment Name: At_2mM_SA_cDNA_P Parameter: Treatment Value: 2mM SA vs. No Treatment
  misc_feature: MA Experiment ID: 20000069 Result: Up-regulated in Transcription
  misc_feature: MA Experiment 20000069 PARAMETER Experiment Name: At_100uM_ABA_Mutants_cDNA_P Parameter: Plant Line Value: CS23
  misc_feature: MA Experiment 20000069 PARAMETER Experiment Name: At_100uM_ABA_Mutants_cDNA_P Parameter: Timepoint (hr) Value: 6
  misc_feature: MA Experiment 20000069 PARAMETER Experiment Name: At_100uM_ABA_Mutants_cDNA_P Parameter: Tissue Value: Aerial
  misc_feature: MA Experiment 20000069 PARAMETER Experiment Name: At_100uM_ABA_Mutants_cDNA_P Parameter: Treatment Value: 100uM ABA vs. No Treatment
  misc_feature: MA Experiment ID: 20000224 Result: Down-regulated in Transcription
aaacaaaaagcttccttttgattatcttcaatcggaatttcaggtgggagagatgggttctgaaggaccaaaagcaataacgattcatgtgactggtttcaagaaatttcttggggtttcagagaatcctactgagaagatagctaatggtttgaaatcgtatgtggagaaacgaggtttgccttctggattgtgtcttggtagctgtagtgttcttgacactgctggggaaggtgcaaaatctaagctttatgaggttttggagtctagtgttgtctctggagataagaacaacaatggaactgttgtctggcttcatctcggggtgaatagcggagcgacaaaattcgccattgaaagacaggcagtgaacgaagctcatttccgttgtcctgatgaattgggctggcaaccgcagcggcttcccatagttgttgaagatggaggcatttcaaaggcaaaagagacttcatgctcgacggagtccattttccagttattaaagaagaaaggctttgaggttgttcaatcagacgatgctggacgttttgtatgcaactacgtgtactatcactctctaaggttcgcagagcaaaagggacacaagtctctgttcgttcacgttcctctcttctccaaaatcgatgaagatactcaaatgcagttcgtggcttcactcttggaggcaattgcagctacttgctagtgtttataagaatccactaaagccaaatatt

SEQ ID NO: 28686 - protein, 234 aa, Arabidopsis thaliana
  peptide (1)..(234): Ceres Seq. ID no. 12580394
  misc_feature (28)..(234): Pfam Name: Pyroglutamyl peptidase Pfam Description: Pyroglutamyl peptidase
  misc_feature (71)..(209): Homolog of NCBI NO: 14590492 NR Description: pyrrolidone-carboxylate peptidase [Pyrococcus
  misc_feature (18)..(107): Homolog of NCBI NO: 15220751 NR Description: hypothetical protein; protein id: At1g23430.1
  misc_feature (18)..(107): Homolog of NCBI NO: 9295697 NR Description: F26F24.31 [Arabidopsis thaliana]
  misc_feature (103)..(234): Homolog of NCBI NO: 15220753 NR Description: hypothetical protein; protein id: At1g23440.1
  misc_feature (18)..(232): Homolog of NCBI NO: 12039349 NR Description: putative pyrrolidone carboxyl peptidase [Oryza
  misc_feature (18)..(234): Homolog of NCBI NO: 18405940 NR Description: expressed protein
  misc_feature (18)..(231): Homolog of NCBI NO: 38175741 NR Description: pyrrolidone carboxyl peptidase-like protein
  misc_feature (18)..(107): Homolog of NCBI NO: 8778575 NR Description: F28C11.8 [Arabidopsis thaliana]
  misc_feature (108)..(234): Homolog of NCBI NO: 8778575 NR Description: F28C11.8 [Arabidopsis thaliana]
  misc_feature (18)..(234): Homolog of NCBI NO: 13430708 NR Description: unknown protein [Arabidopsis thaliana]
NKKLPFDYLQSEFQVGEMGSEGPKAITIHVTGFKKFLGVSENPTEKIANGLKSYVEKRGLPSGLCLGSCSVLDTAGEGAKSKLYEVLESSVVSGDKNNNGTVVWLHLGVNSGATKFAIERQAVNEAHFRCPDELGWQPQRLPIVVEDGGISKAKETSCSTESIFQLLKKKGFEVVQSDDAGRFVCNYVYYHSLRFAEQKGHKSLFVHVPLFSKIDEDTQMQFVASLLEAIAATC

SEQ ID NO: 28687 - protein, 217 aa, Arabidopsis thaliana
  peptide (1)..(217): Ceres Seq. ID no. 12580395
  misc_feature (11)..(217): Pfam Name: Pyroglutamyl peptidase Pfam Description: Pyroglutamyl peptidase
  misc_feature (54)..(192): Homolog of NCBI NO: 14590492 NR Description: pyrrolidone-carboxylate peptidase [Pyrococcus
  misc_feature (1)..(90): Homolog of NCBI NO: 15220751 NR Description: hypothetical protein; protein id: At1g23430.1
  misc_feature (1)..(90): Homolog of NCBI NO: 9295697 NR Description: F26F24.31 [Arabidopsis thaliana]
  misc_feature (86)..(217): Homolog of NCBI NO: 15220753 NR Description: hypothetical protein; protein id: At1g23440.1
  misc_feature (1)..(215): Homolog of NCBI NO: 12039349 NR Description: putative pyrrolidone carboxyl peptidase [Oryza
  misc_feature (1)..(217): Homolog of NCBI NO: 18405940 NR Description: expressed protein
  misc_feature (1)..(214): Homolog of NCBI NO: 38175741 NR Description: pyrrolidone carboxyl peptidase-like protein
  misc_feature (1)..(90): Homolog of NCBI NO: 8778575 NR Description: F28C11.8 [Arabidopsis thaliana]
  misc_feature (91)..(217): Homolog of NCBI NO: 8778575 NR Description: F28C11.8 [Arabidopsis thaliana]
  misc_feature (1)..(217): Homolog of NCBI NO: 13430708 NR Description: unknown protein [Arabidopsis thaliana]
MGSEGPKAITIHVTGFKKFLGVSENPTEKIANGLKSYVEKRGLPSGLCLGSCSVLDTAGEGAKSKLYEVLESSVVSGDKNNNGTVVWLHLGVNSGATKFAIERQAVNEAHFRCPDELGWQPQRLPIVVEDGGISKAKETSCSTESIFQLLKKKGFEVVQSDDAGRFVCNYVYYHSLRFAEQKGHKSLFVHVPLFSKIDEDTQMQFVASLLEAIAATC

SEQ ID NO: 28688 - DNA, 998 bp, Arabidopsis thaliana
  misc_feature (1)..(998): Ceres Seq. ID no. 12384543
  misc_feature: MA Experiment ID: 108573 Result: Up-regulated in Transcription
  misc_feature: MA Experiment 108573 PARAMETER Experiment Name: At_Drought_cDNA_P Parameter: Timepoint (hr) Value: 6
  misc_feature: MA Experiment 108573 PARAMETER Experiment Name: At_Drought_cDNA_P Parameter: Tissue Value: Aerial
  misc_feature: MA Experiment 108573 PARAMETER Experiment Name: At_Drought_cDNA_P Parameter: Treatment Value: Drought vs. No Drought
  misc_feature: MA Experiment ID: 20000112 Result: Up-regulated in Transcription
  misc_feature: MA Experiment 20000112 PARAMETER Experiment Name: At_42deg_Heat_cDNA_P Parameter: Temperature (deg C) Value: 42 vs. 22
  misc_feature: MA Experiment 20000112 PARAMETER Experiment Name: At_42deg_Heat_cDNA_P Parameter: Timepoint (hr) Value: 2
  misc_feature: MA Experiment 20000112 PARAMETER Experiment Name: At_42deg_Heat_cDNA_P Parameter: Tissue Value: Aerial
  misc_feature: MA Experiment ID: 20000113 Result: Up-regulated in Transcription
  misc_feature: MA Experiment 20000113 PARAMETER Experiment Name: At_42deg_Heat_cDNA_P Parameter: Temperature (deg C) Value: 42 vs. 22
  misc_feature: MA Experiment 20000113 PARAMETER Experiment Name: At_42deg_Heat_cDNA_P Parameter: Timepoint (hr) Value: 8
  misc_feature: MA Experiment 20000113 PARAMETER Experiment Name: At_42deg_Heat_cDNA_P Parameter: Tissue Value: Aerial
  misc_feature: MA Experiment ID: 20000224 Result: Down-regulated in Transcription
  misc_feature: MA Experiment ID: 20000227 Result: Down-regulated in Transcription
  misc_feature: MA Experiment 20000227 PARAMETER Experiment Name: At_Root-Tips-vs-Tops_P Parameter: Tissue Value: Root Tips vs. Root Tops
  misc_feature: MA Experiment ID: 20000234 Result: Down-regulated in Transcription
  misc_feature: MA Experiment 20000234 PARAMETER Experiment Name: At_Siliques_P Parameter: Age (day) Value: 21
  misc_feature: MA Experiment 20000234 PARAMETER Experiment Name: At_Siliques_P Parameter: Organism Value: A. thaliana
  misc_feature: MA Experiment 20000234 PARAMETER Experiment Name: At_Siliques_P Parameter: Plant Line Value: WS
  misc_feature: MA Experiment 20000234 PARAMETER Experiment Name: At_Siliques_P Parameter: Tissue Value: Less Than 5mm Siliques vs. Whole Plant
  misc_feature: MA Experiment ID: 20000264 Result: Down-regulated in Transcription
  misc_feature: MA Experiment 20000264 PARAMETER Experiment Name: At_Open_Flower_P Parameter: Age (day) Value: 21
  misc_feature: MA Experiment 20000264 PARAMETER Experiment Name: At_Open_Flower_P Parameter: Plant Line Value: WS
  misc_feature: MA Experiment 20000264 PARAMETER Experiment Name: At_Open_Flower_P Parameter: Tissue Value: Open Flower vs. Whole Plant
  misc_feature: MA Experiment ID: 20000265 Result: Down-regulated in Transcription
  misc_feature: MA Experiment 20000265 PARAMETER Experiment Name: At_Open_Flower_P Parameter: Age (day) Value: 21
  misc_feature: MA Experiment 20000265 PARAMETER Experiment Name: At_Open_Flower_P Parameter: Plant Line Value: WS
  misc_feature: MA Experiment 20000265 PARAMETER Experiment Name: At_Open_Flower_P Parameter: Tissue Value: Closed Flower vs. Whole Plant
  misc_feature: MA Experiment ID: 20000286 Result: Down-regulated in Transcription
  misc_feature: MA Experiment 20000286 PARAMETER Experiment Name: At_Open_Flower_P Parameter: Age (day) Value: 21
  misc_feature: MA Experiment 20000286 PARAMETER Experiment Name: At_Open_Flower_P Parameter: Plant Line Value: WS
  misc_feature: MA Experiment 20000286 PARAMETER Experiment Name: At_Open_Flower_P Parameter: Tissue Value: Half Open vs. Whole Plant
  misc_feature: MA Experiment ID: 20000496 Result: Down-regulated in Transcription
  misc_feature: MA Experiment 20000496 PARAMETER Experiment Name: At_Guard_Cells_P Parameter: Harvest Date Value: 7/19/2002
  misc_feature: MA Experiment 20000496 PARAMETER Experiment Name: At_Guard_Cells_P Parameter: Organism Value: Canola
  misc_feature: MA Experiment 20000496 PARAMETER Experiment Name: At_Guard_Cells_P Parameter: Tissue Value: Guard Cells vs. Leaves
  misc_feature: MA Experiment ID: 20000794 Result: Down-regulated in Transcription
  misc_feature: MA Experiment 20000794 PARAMETER Experiment Name: At_Petals_P Parameter: Age (day) Value: 23-25 days
  misc_feature: MA Experiment 20000794 PARAMETER Experiment Name: At_Petals_P Parameter: Plant Line Value: WS
  misc_feature: MA Experiment 20000794 PARAMETER Experiment Name: At_Petals_P Parameter: Tissue Value: Petals vs. Whole plant
  misc_feature: MA Experiment ID: 20001558 Result: Down-regulated in Transcription
  misc_feature: MA Experiment 20001558 PARAMETER Experiment Name: At_Drought_Soil_Dry_P Parameter: Age (day) Value: 27
  misc_feature: MA Experiment 20001558 PARAMETER Experiment Name: At_Drought_Soil_Dry_P Parameter: Organism Value: A. thaliana
  misc_feature: MA Experiment 20001558 PARAMETER Experiment Name: At_Drought_Soil_Dry_P Parameter: Plant Line Value: WS
  misc_feature: MA Experiment 20001558 PARAMETER Experiment Name: At_Drought_Soil_Dry_P Parameter: Post Timepoint (hr) Value: 6
  misc_feature: MA Experiment 20001558 PARAMETER Experiment Name: At_Drought_Soil_Dry_P Parameter: Post-Treatment Value: Re-Water vs. No Drought
  misc_feature: MA Experiment 20001558 PARAMETER Experiment Name: At_Drought_Soil_Dry_P Parameter: Timepoint (day) Value: 13
  misc_feature: MA Experiment 20001558 PARAMETER Experiment Name: At_Drought_Soil_Dry_P Parameter: Treatment Value: Drought vs. No Drought
  misc_feature: MA Experiment ID: 20001560 Result: Down-regulated in Transcription
  misc_feature: MA Experiment 20001560 PARAMETER Experiment Name: At_Drought_Soil_Dry_P Parameter: Age (day) Value: 28
  misc_feature: MA Experiment 20001560 PARAMETER Experiment Name: At_Drought_Soil_Dry_P Parameter: Organism Value: A. thaliana
  misc_feature: MA Experiment 20001560 PARAMETER Experiment Name: At_Drought_Soil_Dry_P Parameter: Plant Line Value: WS
  misc_feature: MA Experiment 20001560 PARAMETER Experiment Name: At_Drought_Soil_Dry_P Parameter: Post Timepoint (hr) Value: None
  misc_feature: MA Experiment 20001560 PARAMETER Experiment Name: At_Drought_Soil_Dry_P Parameter: Post-Treatment Value: None
  misc_feature: MA Experiment 20001560 PARAMETER Experiment Name: At_Drought_Soil_Dry_P Parameter: Timepoint (day) Value: 14
  misc_feature: MA Experiment 20001560 PARAMETER Experiment Name: At_Drought_Soil_Dry_P Parameter: Treatment Value: Drought vs. No Drought
aatttcatttccatttcgattcgattcctcctttgtgtgggaggcctttgttcggtcaacttatgtgttctgtttttgtctcttttttattgattagggaccgatctatcaaggcttcaagggcaaacagaaatggaccacgacaagacaggatgccaaagcccacctgaaggtcccaagctatgtactaacaactgcggtttctttggaagcgctgccacaatgaacatgtgttctaagtgtcacaaggatatgttgttccaacaggagcagggcgctaagtttgcatctgcagtgtctggaacatcgtcatccagcaacatcataaaggaaacctttaccgctgcgttggtcgatattgaaaccaaatccgttgagccgatgactgtttctgtacagccatcctctgtccaagtcgttgcagaggtagtagcaccagaagaagctgcgaaaccaaagggaccaagccgatgtactacttgcaataagcgggttggcctgactggattcaaatgtcgctgtgggagcctcttctgcggaacacaccgctatgcagacatacatgactgctccttcaattaccatgctgctgcgcaagaggcgatagctaaggcaaacccggttgtgaaagcagagaagcttgacaaaatctgaaaatctaagtaaacttctctggtttcatcaggtggcctggtgtttccttctcctgtctgtgtctggttcaagtattctcatgttaaaaaggttttatataaggtcgaatgaaagcgtgcttgatctttagcgtcttccatctctctgcaatatttgtggtgtggaactttctattatctgtgtttgcaagcagagaaacgtgctcttaaaaaaaatgctttgtgtgtttatctttctactatttttgagcactgtgttattgtttcctgtttggtctgtatcatattgagattgtctctgtagctacatgaagcttatttaaaaaaggcctgtgtttgtccttc

SEQ ID NO: 28689 - protein, 173 aa, Arabidopsis thaliana
  peptide (1)..(173): Ceres Seq. ID no. 12384544
  misc_feature (114)..(154): Pfam Name: AN1-like Zinc finger Pfam Description: AN1-like Zinc finger
  misc_feature (1)..(173): Homolog of NCBI NO: 8778645 NR Description: F5O11.17 [Arabidopsis thaliana]
  misc_feature (15)..(173): Homolog of NCBI NO: 15225894 NR Description: putative zinc finger protein
  misc_feature (8)..(173): Homolog of NCBI NO: 14596167 NR Description: zinc finger-like protein [Arabidopsis thaliana]
  misc_feature (11)..(173): Homolog of NCBI NO: 15234402 NR Description: putative protein
  misc_feature (8)..(173): Homolog of NCBI NO: 15231686 NR Description: zinc finger - like protein
  misc_feature (8)..(173): Homolog of NCBI NO: 18404102 NR Description: expressed protein
  misc_feature (1)..(173): Homolog of NCBI NO: 35187687 NR Description: zinc-finger protein [Oryza sativa (indica
  misc_feature (1)..(173): Homolog of NCBI NO: 11361253 NR Description: hypothetical protein p85RF [imported] - Prunus
  misc_feature (1)..(173): Homolog of NCBI NO: 25082726 NR Description: expressed protein [Arabidopsis thaliana]
  misc_feature (1)..(173): Homolog of NCBI NO: 18403408 NR Description: expressed protein
MDHDKTGCQSPPEGPKLCTNNCGFFGSAATMNMCSKCHKDMLFQQEQGAKFASAVSGTSSSSNIIKETFTAALVDIETKSVEPMTVSVQPSSVQVVAEVVAPEEAAKPKGPSRCTTCNKRVGLTGFKCRCGSLFCGTHRYADIHDCSFNYHAAAQEAIAKANPVVKAEKLDKI

SEQ ID NO: 28690 - protein, 143 aa, Arabidopsis thaliana
  peptide (1)..(143): Ceres Seq. ID no. 12384545
  misc_feature (84)..(124): Pfam Name: AN1-like Zinc finger Pfam Description: AN1-like Zinc finger
  misc_feature (1)..(143): Homolog of NCBI NO: 8778645 NR Description: F5O11.17 [Arabidopsis thaliana]
  misc_feature (1)..(143): Homolog of NCBI NO: 15225894 NR Description: putative zinc finger protein
  misc_feature (1)..(143): Homolog of NCBI NO: 14596167 NR Description: zinc finger-like protein [Arabidopsis thaliana]
  misc_feature (1)..(143): Homolog of NCBI NO: 15234402 NR Description: putative protein
  misc_feature (1)..(143): Homolog of NCBI NO: 15231686 NR Description: zinc finger - like protein
  misc_feature (1)..(143): Homolog of NCBI NO: 18404102 NR Description: expressed protein
  misc_feature (1)..(143): Homolog of NCBI NO: 35187687 NR Description: zinc-finger protein [Oryza sativa (indica
  misc_feature (1)..(143): Homolog of NCBI NO: 11361253 NR Description: hypothetical protein p85RF [imported] - Prunus
  misc_feature (1)..(143): Homolog of NCBI NO: 25082726 NR Description: expressed protein [Arabidopsis thaliana]
  misc_feature (1)..(143): Homolog of NCBI NO: 18403408 NR Description: expressed protein
MNMCSKCHKDMLFQQEQGAKFASAVSGTSSSSNIIKETFTAALVDIETKSVEPMTVSVQPSSVQVVAEVVAPEEAAKPKGPSRCTTCNKRVGLTGFKCRCGSLFCGTHRYADIHDCSFNYHAAAQEAIAKANPVVKAEKLDKI

SEQ ID NO: 28691 - protein, 141 aa, Arabidopsis thaliana
  peptide (1)..(141): Ceres Seq. ID no. 12384546
  misc_feature (82)..(122): Pfam Name: AN1-like Zinc finger Pfam Description: AN1-like Zinc finger
  misc_feature (1)..(141): Homolog of NCBI NO: 8778645 NR Description: F5O11.17 [Arabidopsis thaliana]
  misc_feature (1)..(141): Homolog of NCBI NO: 15225894 NR Description: putative zinc finger protein
  misc_feature (1)..(141): Homolog of NCBI NO: 14596167 NR Description: zinc finger-like protein [Arabidopsis thaliana]
  misc_feature (1)..(141): Homolog of NCBI NO: 15234402 NR Description: putative protein
  misc_feature (1)..(141): Homolog of NCBI NO: 15231686 NR Description: zinc finger - like protein
  misc_feature (1)..(141): Homolog of NCBI NO: 18404102 NR Description: expressed protein
  misc_feature (1)..(141): Homolog of NCBI NO: 35187687 NR Description: zinc-finger protein [Oryza sativa (indica
  misc_feature (1)..(141): Homolog of NCBI NO: 11361253 NR Description: hypothetical protein p85RF [imported] - Prunus
  misc_feature (1)..(141): Homolog of NCBI NO: 25082726 NR Description: expressed protein [Arabidopsis thaliana]
  misc_feature (1)..(141): Homolog of NCBI NO: 18403408 NR Description: expressed protein
MCSKCHKDMLFQQEQGAKFASAVSGTSSSSNIIKETFTAALVDIETKSVEPMTVSVQPSSVQVVAEVVAPEEAAKPKGPSRCTTCNKRVGLTGFKCRCGSLFCGTHRYADIHDCSFNYHAAAQEAIAKANPVVKAEKLDKI

SEQ ID NO: 28692 - DNA, 905 bp, Arabidopsis thaliana
  misc_feature (1)..(905): Ceres Seq. ID no. 12711793
  misc_feature: MA Experiment ID: 108434 Result: Down-regulated in Transcription
  misc_feature: MA Experiment 108434 PARAMETER Experiment Name: At_Root_Tips_cDNA_P Parameter: Tissue Value: Root Tips
  misc_feature: MA Experiment ID: 108435 Result: Down-regulated in Transcription
  misc_feature: MA Experiment 108435 PARAMETER Experiment Name: At_stm_Mutants_cDNA_P Parameter: Plant Line Value: wt Landsburg vs stm
  misc_feature: MA Experiment 108435 PARAMETER Experiment Name: At_stm_Mutants_cDNA_P Parameter: Tissue Value: Shoot Apical Meristem Region
  misc_feature: MA Experiment ID: 108488 Result: Down-regulated in Transcription
  misc_feature: MA Experiment ID: 108574 Result: Up-regulated in Transcription
  misc_feature: MA Experiment 108574 PARAMETER Experiment Name: At_Wounding__cDNA_P Parameter: Timepoint (hr) Value: 1
  misc_feature: MA Experiment 108574 PARAMETER Experiment Name: At_Wounding__cDNA_P Parameter: Tissue Value: Aerial
  misc_feature: MA Experiment 108574 PARAMETER Experiment Name: At_Wounding__cDNA_P Parameter: Treatment Value: Wounding vs. No Wounding
  misc_feature: MA Experiment ID: 108579 Result: Up-regulated in Transcription
  misc_feature: MA Experiment 108579 PARAMETER Experiment Name: At_4deg_Cold_cDNA_P Parameter: Temperature (deg C) Value: 4 vs. 22
  misc_feature: MA Experiment 108579 PARAMETER Experiment Name: At_4deg_Cold_cDNA_P Parameter: Timepoint (hr) Value: 6
  misc_feature: MA Experiment 108579 PARAMETER Experiment Name: At_4deg_Cold_cDNA_P Parameter: Tissue Value: Aerial
  misc_feature: MA Experiment ID: 108585 Result: Up-regulated in Transcription
  misc_feature: MA Experiment 108585 PARAMETER Experiment Name: At_5mM_NaNP_cDNA_P Parameter: Timepoint (hr) Value: 6
  misc_feature: MA Experiment 108585 PARAMETER Experiment Name: At_5mM_NaNP_cDNA_P Parameter: Tissue Value: Aerial
  misc_feature: MA Experiment 108585 PARAMETER Experiment Name: At_5mM_NaNP_cDNA_P Parameter: Treatment Value: null
  misc_feature: MA Experiment ID: 108608 Result: Up-regulated in Transcription
  misc_feature: MA Experiment 108608 PARAMETER Experiment Name: At_100uM_ABA_cDNA_P Parameter: Timepoint (hr) Value: 1
  misc_feature: MA Experiment 108608 PARAMETER Experiment Name: At_100uM_ABA_cDNA_P Parameter: Tissue Value: Aerial
  misc_feature: MA Experiment 108608 PARAMETER Experiment Name: At_100uM_ABA_cDNA_P Parameter: Treatment Value: 100uM ABA vs. No Treatment
  misc_feature: MA Experiment ID: 108668 Result: Up-regulated in Transcription
  misc_feature: MA Experiment 108668 PARAMETER Experiment Name: At_2mM_SA_cDNA_P Parameter: Plant Line Value: WS
  misc_feature: MA Experiment 108668 PARAMETER Experiment Name: At_2mM_SA_cDNA_P Parameter: Timepoint (hr) Value: 6
  misc_feature: MA Experiment 108668 PARAMETER Experiment Name: At_2mM_SA_cDNA_P Parameter: Treatment Value: 2mM SA vs. No Treatment
  misc_feature: MA Experiment ID: 20000069 Result: Up-regulated in Transcription
  misc_feature: MA Experiment 20000069 PARAMETER Experiment Name: At_100uM_ABA_Mutants_cDNA_P Parameter: Plant Line Value: CS23
  misc_feature: MA Experiment 20000069 PARAMETER Experiment Name: At_100uM_ABA_Mutants_cDNA_P Parameter: Timepoint (hr) Value: 6
  misc_feature: MA Experiment 20000069 PARAMETER Experiment Name: At_100uM_ABA_Mutants_cDNA_P Parameter: Tissue Value: Aerial
  misc_feature: MA Experiment 20000069 PARAMETER Experiment Name: At_100uM_ABA_Mutants_cDNA_P Parameter: Treatment Value: 100uM ABA vs. No Treatment
  misc_feature: MA Experiment ID: 20000070 Result: Up-regulated in Transcription
  misc_feature: MA Experiment 20000070 PARAMETER Experiment Name: At_100uM_ABA_Mutants_cDNA_P Parameter: Plant Line Value: CS24
  misc_feature: MA Experiment 20000070 PARAMETER Experiment Name: At_100uM_ABA_Mutants_cDNA_P Parameter: Timepoint (hr) Value: 6
  misc_feature: MA Experiment 20000070 PARAMETER Experiment Name: At_100uM_ABA_Mutants_cDNA_P Parameter: Tissue Value: Aerial
  misc_feature: MA Experiment 20000070 PARAMETER Experiment Name: At_100uM_ABA_Mutants_cDNA_P Parameter: Treatment Value: 100uM ABA vs. No Treatment
  misc_feature: MA Experiment ID: 20000071 Result: Up-regulated in Transcription
  misc_feature: MA Experiment 20000071 PARAMETER Experiment Name: At_100uM_ABA_Mutants_cDNA_P Parameter: Plant Line Value: CS8104
  misc_feature: MA Experiment 20000071 PARAMETER Experiment Name: At_100uM_ABA_Mutants_cDNA_P Parameter: Timepoint (hr) Value: 6
  misc_feature: MA Experiment 20000071 PARAMETER Experiment Name: At_100uM_ABA_Mutants_cDNA_P Parameter: Tissue Value: Aerial
  misc_feature: MA Experiment 20000071 PARAMETER Experiment Name: At_100uM_ABA_Mutants_cDNA_P Parameter: Treatment Value: 100uM ABA vs. No Treatment
  misc_feature: MA Experiment ID: 20000072 Result: Up-regulated in Transcription
  misc_feature: MA Experiment 20000072 PARAMETER Experiment Name: At_100uM_ABA_Mutants_cDNA_P Parameter: Plant Line Value: CS8105
  misc_feature: MA Experiment 20000072 PARAMETER Experiment Name: At_100uM_ABA_Mutants_cDNA_P Parameter: Timepoint (hr) Value: 6
  misc_feature: MA Experiment 20000072 PARAMETER Experiment Name: At_100uM_ABA_Mutants_cDNA_P Parameter: Tissue Value: Aerial
  misc_feature: MA Experiment 20000072 PARAMETER Experiment Name: At_100uM_ABA_Mutants_cDNA_P Parameter: Treatment Value: 100uM ABA vs. No Treatment
  misc_feature: MA Experiment ID: 20000086 Result: Up-regulated in Transcription
  misc_feature: MA Experiment 20000086 PARAMETER Experiment Name: At_100uM_ABA_Mutants_cDNA_P Parameter: Plant Line Value: CS22
  misc_feature: MA Experiment 20000086 PARAMETER Experiment Name: At_100uM_ABA_Mutants_cDNA_P Parameter: Timepoint (hr) Value: 6
  misc_feature: MA Experiment 20000086 PARAMETER Experiment Name: At_100uM_ABA_Mutants_cDNA_P Parameter: Tissue Value: Aerial
  misc_feature: MA Experiment 20000086 PARAMETER Experiment Name: At_100uM_ABA_Mutants_cDNA_P Parameter: Treatment Value: 100uM ABA vs. No Treatment
  misc_feature: MA Experiment ID: 20000087 Result: Up-regulated in Transcription
  misc_feature: MA Experiment 20000087 PARAMETER Experiment Name: At_100uM_ABA_Mutants_cDNA_P Parameter: Plant Line Value: WS
  misc_feature: MA Experiment 20000087 PARAMETER Experiment Name: At_100uM_ABA_Mutants_cDNA_P Parameter: Timepoint (hr) Value: 6
  misc_feature: MA Experiment 20000087 PARAMETER Experiment Name: At_100uM_ABA_Mutants_cDNA_P Parameter: Tissue Value: Aerial
  misc_feature: MA Experiment 20000087 PARAMETER Experiment Name: At_100uM_ABA_Mutants_cDNA_P Parameter: Treatment Value: 100uM ABA vs. No Treatment
  misc_feature: MA Experiment ID: 20000088 Result: Up-regulated in Transcription
  misc_feature: MA Experiment 20000088 PARAMETER Experiment Name: At_100uM_ABA_Mutants_cDNA_P Parameter: Plant Line Value: Landsberg
  misc_feature: MA Experiment 20000088 PARAMETER Experiment Name: At_100uM_ABA_Mutants_cDNA_P Parameter: Timepoint (hr) Value: 6
  misc_feature: MA Experiment 20000088 PARAMETER Experiment Name: At_100uM_ABA_Mutants_cDNA_P Parameter: Tissue Value: Aerial
  misc_feature: MA Experiment 20000088 PARAMETER Experiment Name: At_100uM_ABA_Mutants_cDNA_P Parameter: Treatment Value: 100uM ABA vs. No Treatment
  misc_feature: MA Experiment ID: 20000089 Result: Up-regulated in Transcription
  misc_feature: MA Experiment ID: 20000090 Result: Up-regulated in Transcription
  misc_feature: MA Experiment ID: 20000117 Result: Up-regulated in Transcription
  misc_feature: MA Experiment 20000117 PARAMETER Experiment Name: At_100uM_ABA_Mutants_cDNA_P Parameter: Plant Line Value: Columbia
  misc_feature: MA Experiment 20000117 PARAMETER Experiment Name: At_100uM_ABA_Mutants_cDNA_P Parameter: Timepoint (hr) Value: 6
  misc_feature: MA Experiment 20000117 PARAMETER Experiment Name: At_100uM_ABA_Mutants_cDNA_P Parameter: Tissue Value: Aerial
  misc_feature: MA Experiment 20000117 PARAMETER Experiment Name: At_100uM_ABA_Mutants_cDNA_P Parameter: Treatment Value: 100uM ABA vs. No Treatment
  misc_feature: MA Experiment ID: 20000166 Result: Up-regulated in Transcription
  misc_feature: MA Experiment 20000166 PARAMETER Experiment Name: At_100uM_ABA_P Parameter: Age (day) Value: 14
  misc_feature: MA Experiment 20000166 PARAMETER Experiment Name: At_100uM_ABA_P Parameter: Organism Value: A. thaliana
  misc_feature: MA Experiment 20000166 PARAMETER Experiment Name: At_100uM_ABA_P Parameter: Plant Line Value: WS
  misc_feature: MA Experiment 20000166 PARAMETER Experiment Name: At_100uM_ABA_P Parameter: Timepoint (hr) Value: 1
  misc_feature: MA Experiment 20000166 PARAMETER Experiment Name: At_100uM_ABA_P Parameter: Tissue Value: Aerial
  misc_feature: MA Experiment 20000166 PARAMETER Experiment Name: At_100uM_ABA_P Parameter: Treatment Value: 100uM ABA vs. No Treatment
  misc_feature: MA Experiment ID: 20000182 Result: Up-regulated in Transcription
  misc_feature: MA Experiment 20000182 PARAMETER Experiment Name: At_2mM_SA_P Parameter: Age (day) Value: 14
  misc_feature: MA Experiment 20000182 PARAMETER Experiment Name: At_2mM_SA_P Parameter: Organism Value: A. thaliana
  misc_feature: MA Experiment 20000182 PARAMETER Experiment Name: At_2mM_SA_P Parameter: Plant Line Value: WS
  misc_feature: MA Experiment 20000182 PARAMETER Experiment Name: At_2mM_SA_P Parameter: Timepoint (hr) Value: 6
  misc_feature: MA Experiment 20000182 PARAMETER Experiment Name: At_2mM_SA_P Parameter: Tissue Value: Aerial
  misc_feature: MA Experiment 20000182 PARAMETER Experiment Name: At_2mM_SA_P Parameter: Treatment Value: 2mM SA vs. No Treatment
  misc_feature: MA Experiment ID: 20000184 Result: Down-regulated in Transcription
  misc_feature: MA Experiment 20000184 PARAMETER Experiment Name: At_Shoots__P Parameter: Age (day) Value: 7
  misc_feature: MA Experiment 20000184 PARAMETER Experiment Name: At_Shoots__P Parameter: Tissue Value: Shoots vs. Whole Plant
  misc_feature: MA Experiment ID: 20000213 Result: Up-regulated in Transcription
  misc_feature: MA Experiment 20000213 PARAMETER Experiment Name: At_4deg_Cold_P Parameter: Timepoint (hr) Value: 2
  misc_feature: MA Experiment ID: 20000264 Result: Up-regulated in Transcription
  misc_feature: MA Experiment 20000264 PARAMETER Experiment Name: At_Open_Flower_P Parameter: Age (day) Value: 21
  misc_feature: MA Experiment 20000264 PARAMETER Experiment Name: At_Open_Flower_P Parameter: Plant Line Value: WS
  misc_feature: MA Experiment 20000264 PARAMETER Experiment Name: At_Open_Flower_P Parameter: Tissue Value: Open Flower vs. Whole Plant
  misc_feature: MA Experiment ID: 20000437 Result: Up-regulated in Transcription
  misc_feature: MA Experiment 20000437 PARAMETER Experiment Name: At_Drought_P Parameter: Age (day) Value: 8
  misc_feature: MA Experiment 20000437 PARAMETER Experiment Name: At_Drought_P Parameter: Organism Value: A. thaliana
  misc_feature: MA Experiment 20000437 PARAMETER Experiment Name: At_Drought_P Parameter: Plant Line Value: WS
  misc_feature: MA Experiment 20000437 PARAMETER Experiment Name: At_Drought_P Parameter: Timepoint (hr) Value: 24
  misc_feature: MA Experiment 20000437 PARAMETER Experiment Name: At_Drought_P Parameter: Tissue Value: Whole Plant
  misc_feature: MA Experiment 20000437 PARAMETER Experiment Name: At_Drought_P Parameter: Treatment Value: Drought vs. No Drought
  misc_feature: MA Experiment ID: 20000439 Result: Up-regulated in Transcription
  misc_feature: MA Experiment 20000439 PARAMETER Experiment Name: At_Roots__P Parameter: Age (day) Value: 14 vs. 21
  misc_feature: MA Experiment 20000439 PARAMETER Experiment Name: At_Roots__P Parameter: Organism Value: A. thaliana
  misc_feature: MA Experiment 20000439 PARAMETER Experiment Name: At_Roots__P Parameter: Tissue Value: Roots vs. Whole Plant
  misc_feature: MA Experiment ID: 20000794 Result: Up-regulated in Transcription
  misc_feature: MA Experiment 20000794 PARAMETER Experiment Name: At_Petals_P Parameter: Age (day) Value: 23-25 days
  misc_feature: MA Experiment 20000794 PARAMETER Experiment Name: At_Petals_P Parameter: Plant Line Value: WS
  misc_feature: MA Experiment 20000794 PARAMETER Experiment Name: At_Petals_P Parameter: Tissue Value: Petals vs. Whole plant
  misc_feature: MA Experiment ID: 20001450 Result: Down-regulated in Transcription
  misc_feature: MA Experiment 20001450 PARAMETER Experiment Name: At_Far-red-induction_P Parameter: Age (day) Value: 7
  misc_feature: MA Experiment 20001450 PARAMETER Experiment Name: At_Far-red-induction_P Parameter: Light Value: Far-red vs. White
  misc_feature: MA Experiment 20001450 PARAMETER Experiment Name: At_Far-red-induction_P Parameter: Organism Value: A. thaliana
  misc_feature: MA Experiment 20001450 PARAMETER Experiment Name: At_Far-red-induction_P Parameter: Plant Line Value: Columbia
  misc_feature: MA Experiment 20001450 PARAMETER Experiment Name: At_Far-red-induction_P Parameter: Timepoint (hr) Value: 8
  misc_feature: MA Experiment 20001450 PARAMETER Experiment Name: At_Far-red-induction_P Parameter: Tissue Value: Whole Plant
  misc_feature: MA Experiment ID: 20001451 Result: Down-regulated in Transcription
  misc_feature: MA Experiment 20001451 PARAMETER Experiment Name: At_Far-red-induction_P Parameter: Age (day) Value: 7
  misc_feature: MA Experiment 20001451 PARAMETER Experiment Name: At_Far-red-induction_P Parameter: Light Value: Far-red vs. White
  misc_feature: MA Experiment 20001451 PARAMETER Experiment Name: At_Far-red-induction_P Parameter: Organism Value: A. thaliana
  misc_feature: MA Experiment 20001451 PARAMETER Experiment Name: At_Far-red-induction_P Parameter: Plant Line Value: Columbia
  misc_feature: MA Experiment 20001451 PARAMETER Experiment Name: At_Far-red-induction_P Parameter: Timepoint (hr) Value: 24
  misc_feature: MA Experiment 20001451 PARAMETER Experiment Name: At_Far-red-induction_P Parameter: Tissue Value: Whole Plant
gtgagaaaagaatcttcttttgcaaatgcttcgctcctcaattcgacttctctatataagaagaaccagtcctctgcttcgaagtttatcatcatcatcatcatcatcatcatcaaaacgattcgattctgcgaaaccacttttcaattctcatcggattatttctcttccaatttctacaacgggagctaaactatctagatcggagcattcaatggctgcttcttccgaacccaaatctctttacgatttcaccgtcaaggatgctaagggaaacgatgttgatctaagcatctacaaagggaaggttcttttgattgtgaacgttgcttctcaatgtggcttgactaattcgaattatactgagcttgcgcagctgtatgagaagtacaaaggccatggtttcgagattcttgcgtttccgtgtaaccagtttgggaatcaagagcctggtactaatgaagagattgttcagtttgcttgtactcgtttcaaggctgagtacccgattttcgacaaggttgatgttaacggtgacaaagctgccccagtctacaagtttctgaaatcaagcaaaggcgggctctttggagacggcattaagtggaacttcgcaaagttcttggttgacaaagatggaaatgttgtcgatcgtttcgcaccaactacctcacctctcagcattgagaaggatgtgaagaagttgttgggagttactgcttaagcaaggcaagattgcataattagacaaataaaagctcattagtattgtattaccaatactgtgtagtaagctgagttcgtgagtgtgtgcctttgggaccgcgtacaattataatccgttttttagcggccaaactatgtaataatcgtagatctaaatatcagatttcccgttaccttac

SEQ ID NO: 28693 - protein, 232 aa, Arabidopsis thaliana
  peptide (1)..(232): Ceres Seq. ID no. 12711794
  misc_feature (72)..(181): Pfam Name: Glutathione peroxidase Pfam Description: Glutathione peroxidase
  misc_feature (64)..(231): Homolog of NCBI NO: 20138384 NR Description: Probable phospholipid hydroperoxide glutathione
  misc_feature (64)..(228): Homolog of NCBI NO: 6179604 NR Description: glutathione peroxidase-like protein GPX54Hv
  misc_feature (64)..(229): Homolog of NCBI NO: 21360380 NR Description: glutathione peroxidase 1 [Oryza sativa]
  misc_feature (64)..(229): Homolog of NCBI NO: 34334012 NR Description: cytosolic glutathione peroxidase [Triticum
  misc_feature (66)..(230): Homolog of NCBI NO: 20138151 NR Description: Probable phospholipid hydroperoxide glutathione
  misc_feature (64)..(229): Homolog of NCBI NO: 22268405 NR Description: putative glutathione peroxidase [Zea mays]
  misc_feature (65)..(228): Homolog of NCBI NO: 27544804 NR Description: phospholipid hydroperoxide glutathione
  misc_feature (54)..(228): Homolog of NCBI NO: 6179600 NR Description: GPX12Hv, glutathione peroxidase-like protein
  misc_feature (64)..(232): Homolog of NCBI NO: 20138157 NR Description: Probable phospholipid hydroperoxide glutathione
  misc_feature (1)..(232): Homolog of NCBI NO: 30681827 NR Description: glutathione peroxidase, putative [Arabidopsis
MLRSSIRLLYIRRTSPLLRSLSSSSSSSSSKRFDSAKPLFNSHRIISLPISTTGAKLSRSEHSMAASSEPKSLYDFTVKDAKGNDVDLSIYKGKVLLIVNVASQCGLTNSNYTELAQLYEKYKGHGFEILAFPCNQFGNQEPGTNEEIVQFACTRFKAEYPIFDKVDVNGDKAAPVYKFLKSSKGGLFGDGIKWNFAKFLVDKDGNVVDRFAPTTSPLSIEKDVKKLLGVTA

SEQ ID NO: 28694 - protein, 169 aa, Arabidopsis thaliana; identical to SEQ ID NO: 28163
  peptide (1)..(169): Ceres Seq. ID no. 12711795
  misc_feature (9)..(118): Pfam Name: Glutathione peroxidase Pfam Description: Glutathione peroxidase
  misc_feature (1)..(168): Homolog of NCBI NO: 20138384 NR Description: Probable phospholipid hydroperoxide glutathione
  misc_feature (1)..(165): Homolog of NCBI NO: 6179604 NR Description: glutathione peroxidase-like protein GPX54Hv
  misc_feature (1)..(166): Homolog of NCBI NO: 21360380 NR Description: glutathione peroxidase 1 [Oryza sativa]
  misc_feature (1)..(166): Homolog of NCBI NO: 34334012 NR Description: cytosolic glutathione peroxidase [Triticum
  misc_feature (3)..(167): Homolog of NCBI NO: 20138151 NR Description: Probable phospholipid hydroperoxide glutathione
  misc_feature (1)..(166): Homolog of NCBI NO: 22268405 NR Description: putative glutathione peroxidase [Zea mays]
  misc_feature (2)..(165): Homolog of NCBI NO: 27544804 NR Description: phospholipid hydroperoxide glutathione
  misc_feature (1)..(165): Homolog of NCBI NO: 6179600 NR Description: GPX12Hv, glutathione peroxidase-like protein
  misc_feature (1)..(169): Homolog of NCBI NO: 20138157 NR Description: Probable phospholipid hydroperoxide glutathione
  misc_feature (1)..(169): Homolog of NCBI NO: 30681827 NR Description: glutathione peroxidase, putative [Arabidopsis

SEQ ID NO: 28695 - DNA, 1645 bp, Arabidopsis thaliana
  misc_feature (1)..(1645): Ceres Seq. ID no. 12343397
  misc_feature: MA Experiment ID: 108462 Result: Down-regulated in Transcription
  misc_feature: MA Experiment 108462 PARAMETER Experiment Name: At_Germinating_Seeds_cDNA_P Parameter: Age (day) Value: 2 vs. 0
  misc_feature: MA Experiment 108462 PARAMETER Experiment Name: At_Germinating_Seeds_cDNA_P Parameter: Tissue Value: Germinating Seeds
  misc_feature: MA Experiment ID: 108463 Result: Down-regulated in Transcription
  misc_feature: MA Experiment 108463 PARAMETER Experiment Name: At_Germinating_Seeds_cDNA_P Parameter: Age (day) Value: 3 vs. 0
  misc_feature: MA Experiment 108463 PARAMETER Experiment Name: At_Germinating_Seeds_cDNA_P Parameter: Tissue Value: Germinating Seeds
  misc_feature: MA Experiment ID: 108573 Result: Up-regulated in Transcription
  misc_feature: MA Experiment 108573 PARAMETER Experiment Name: At_Drought_cDNA_P Parameter: Timepoint (hr) Value: 6
  misc_feature: MA Experiment 108573 PARAMETER Experiment Name: At_Drought_cDNA_P Parameter: Tissue Value: Aerial
  misc_feature: MA Experiment 108573 PARAMETER Experiment Name: At_Drought_cDNA_P Parameter: Treatment Value: Drought vs. No Drought
  misc_feature: MA Experiment ID: 108577 Result: Up-regulated in Transcription
  misc_feature: MA Experiment 108577 PARAMETER Experiment Name: At_42deg_Heat_cDNA_P Parameter: Temperature (deg C) Value: 42 vs. 22
  misc_feature: MA Experiment 108577 PARAMETER Experiment Name: At_42deg_Heat_cDNA_P Parameter: Timepoint (hr) Value: 6
  misc_feature: MA Experiment 108577 PARAMETER Experiment Name: At_42deg_Heat_cDNA_P Parameter: Tissue Value: Aerial
  misc_feature: MA Experiment ID: 20000087 Result: Down-regulated in Transcription
  misc_feature: MA Experiment 20000087 PARAMETER Experiment Name: At_100uM_ABA_Mutants_cDNA_P Parameter: Plant Line Value: WS
  misc_feature: MA Experiment 20000087 PARAMETER Experiment Name: At_100uM_ABA_Mutants_cDNA_P Parameter: Timepoint (hr) Value: 6
  misc_feature: MA Experiment 20000087 PARAMETER Experiment Name: At_100uM_ABA_Mutants_cDNA_P Parameter: Tissue Value: Aerial
  misc_feature: MA Experiment 20000087 PARAMETER Experiment Name: At_100uM_ABA_Mutants_cDNA_P Parameter: Treatment Value: 100uM ABA vs. No Treatment
  misc_feature: MA Experiment ID: 20000111 Result: Up-regulated in Transcription
  misc_feature: MA Experiment 20000111 PARAMETER Experiment Name: At_42deg_Heat_cDNA_P Parameter: Temperature (deg C) Value: 42 vs. 22
  misc_feature: MA Experiment 20000111 PARAMETER Experiment Name: At_42deg_Heat_cDNA_P Parameter: Timepoint (hr) Value: 6
  misc_feature: MA Experiment 20000111 PARAMETER Experiment Name: At_42deg_Heat_cDNA_P Parameter: Tissue Value: Aerial
  misc_feature: MA Experiment ID: 20000113 Result: Up-regulated in Transcription
  misc_feature: MA Experiment 20000113 PARAMETER Experiment Name: At_42deg_Heat_cDNA_P Parameter: Temperature (deg C) Value: 42 vs. 22
  misc_feature: MA Experiment 20000113 PARAMETER Experiment Name: At_42deg_Heat_cDNA_P Parameter: Timepoint (hr) Value: 8
  misc_feature: MA Experiment 20000113 PARAMETER Experiment Name: At_42deg_Heat_cDNA_P Parameter: Tissue Value: Aerial
  misc_feature: MA Experiment ID: 20000173 Result: Up-regulated in Transcription
  misc_feature: MA Experiment 20000173 PARAMETER Experiment Name: At_42deg_Heat_P Parameter: Age (day) Value: 14
  misc_feature: MA Experiment 20000173 PARAMETER Experiment Name: At_42deg_Heat_P Parameter: Organism Value: A. thaliana
  misc_feature: MA Experiment 20000173 PARAMETER Experiment Name: At_42deg_Heat_P Parameter: Plant Line Value: WS
  misc_feature: MA Experiment 20000173 PARAMETER Experiment Name: At_42deg_Heat_P Parameter: Temperature (deg C) Value: 42 vs. 22
  misc_feature: MA Experiment 20000173 PARAMETER Experiment Name: At_42deg_Heat_P Parameter: Timepoint (hr) Value: 6
  misc_feature: MA Experiment 20000173 PARAMETER Experiment Name: At_42deg_Heat_P Parameter: Tissue Value: Aerial
  misc_feature: MA Experiment ID: 20000179 Result: Down-regulated in Transcription
  misc_feature: MA Experiment 20000179 PARAMETER Experiment Name: At_Germinating_Seeds_P Parameter: Age (hr) Value: 6 vs. 0
  misc_feature: MA Experiment 20000179 PARAMETER Experiment Name: At_Germinating_Seeds_P Parameter: Tissue Value: Germinating Seeds
  misc_feature: MA Experiment ID: 20000180 Result: Down-regulated in Transcription
  misc_feature: MA Experiment 20000180 PARAMETER Experiment Name: At_Germinating_Seeds_P Parameter: Age (hr) Value: 24 vs. 0
  misc_feature: MA Experiment 20000180 PARAMETER Experiment Name: At_Germinating_Seeds_P Parameter: Tissue Value: Germinating Seeds
  misc_feature: MA Experiment ID: 20001557 Result: Up-regulated in Transcription
  misc_feature: MA Experiment 20001557 PARAMETER Experiment Name: At_Drought_Soil_Dry_P Parameter: Age (day) Value: 27
  misc_feature: MA Experiment 20001557 PARAMETER Experiment Name: At_Drought_Soil_Dry_P Parameter: Organism Value: A. thaliana
  misc_feature: MA Experiment 20001557 PARAMETER Experiment Name: At_Drought_Soil_Dry_P Parameter: Plant Line Value: WS
  misc_feature: MA Experiment 20001557 PARAMETER Experiment Name: At_Drought_Soil_Dry_P Parameter: Post Timepoint (hr) Value: 3
  misc_feature: MA Experiment 20001557 PARAMETER Experiment Name: At_Drought_Soil_Dry_P Parameter: Post-Treatment Value: Re-Water vs. No Drought
  misc_feature: MA Experiment 20001557 PARAMETER Experiment Name: At_Drought_Soil_Dry_P Parameter: Timepoint (day) Value: 13
  misc_feature: MA Experiment 20001557 PARAMETER Experiment Name: At_Drought_Soil_Dry_P Parameter: Treatment Value: Drought vs. No Drought
aaagcatttgggggaaatcaatcgaaaaccctaggagagataaaaacaaaaatctagacggagatttatggcgacagcgaatcctggccgtggaggtggtagaagaggcggtggagctatggatgacgataagttggtcttcgagactaccgatggaattgagcccatcacgagcttcaatgatatgggcattaaggaagatgtgcttcgcggtgtctacgaatatggattcgagaagccttccgcgattcagcagagggctgttatgccgattcttcaaggacgtgatgttattgctcaagctcagtccggtaccgggaagacatctatgattgctctctccgtttgtcaagtcgttgatacttcttctagagaggttcaggccttgatattatccccaacaagagagctggctacacaaacagagaagacgatacaagctattggattacatgccaatattcaggcacatgcttgcatcggtgggaatagtgttggagaagacatcaggaagctggagcatggtgttcatgttgtgtctgggacacctggtcgtgtctgtgacatgataaagaggagaagtcttcgtaccagagctattaaacttctgattcttgatgaatcagatgaaatgctgagcagagggttcaaggaccagatctatgatgtttacagatatcttccaccagatcttcaggtttgcttggtttctgcaactcttcctcacgagattttggagatgacatccaagtttatgacagaaccagtgaagatacttgtgaagcgtgatgagttgactcttgaaggaatcaaacaattttttgttgctgttgagaaggaagagtggaaatttgatacactctgtgatctttatgacacgcttactatcactcaagctgttatcttctgcaatactaaacgaaaggtggattatcttagtgagaaaatgagaagtcacaacttcactgtctcatcaatgcatggagacatgcctcagaaggagagagacgccatcatgaatgagtttcggtcaggtgatagtcgtgttttgataacaacagatgtatgggcacgtgggattgatgtgcaacaagtttctcttgttatcaattatgatctccccaacaaccgtgagctctacatccatcgtattgggcggtctggtcgattcgggcgtaagggtgttgcaatcaactttgttaaaagcgacgacatcaagattctcagagacattgagcagtactacagtacccagattgatgagatgccaatgaatgtagctgatcttatctaaaagagcttgtctgagatttttgtgctttcagcggggaagtgtctggatgaaaaagtattgttgagcgcttctgtcaaattattgcactatcttaacggtgtatttcctttgatgtttctgtgggctcttttgaacaaacttaaactcgcgtgtggtaaatgtttaatgacttgagaagcgatttaggtttagggtttggaccgtttggtttttcgtttcctcgtaattgattctgggggctttgattgtggtttgtgggtcaaaactctcaactatcactacttgtaagacttttgctcgacagttgaaacggttcattgttatcttatttcgtaaagcttggatcattgc

SEQ ID NO: 28696 - protein, 408 aa, Arabidopsis thaliana
  peptide (1)..(408): Ceres Seq. ID no. 12343398
  misc_feature (48)..(251): Pfam Name: DEAD/DEAH box helicase Pfam Description: DEAD/DEAH box helicase
  misc_feature (14)..(408): Homolog of NCBI NO: 29612461 NR Description: Similar to eukaryotic translation initiation
  misc_feature (19)..(408): Homolog of NCBI NO: 28277876 NR Description: Unknown (protein for MGC:56139) [Danio rerio]
  misc_feature (12)..(408): Homolog of NCBI NO: 19528517 NR Description: RE50350p [Drosophila melanogaster]
  misc_feature (12)..(408): Homolog of NCBI NO: 24645031 NR Description: CG7483-PA [Drosophila melanogaster]
  misc_feature (13)..(408): Homolog of NCBI NO: 7443503 NR Description: translation initiation factor - garden pea
  misc_feature (18)..(408): Homolog of NCBI NO: 1170507 NR Description: Eukaryotic initiation factor 4A-3 (eIF-4A-3)
  misc_feature (12)..(408): Homolog of NCBI NO: 34896594 NR Description: putative translation initiation factor [Oryza
  misc_feature (18)..(408): Homolog of NCBI NO: 11277760 NR Description: RNA helicase RH2 [imported] - Arabidopsis
  misc_feature (1)..(408): Homolog of NCBI NO: 15215678 NR Description: AT3g19760/MMB12_21 [Arabidopsis thaliana]
  misc_feature (1)..(408): Homolog of NCBI NO: 15230945 NR Description: eukaryotic translation initiation factor 4A
MATANPGRGGGRRGGGAMDDDKLVFETTDGIEPITSFNDMGIKEDVLRGVYEYGFEKPSAIQQRAVMPILQGRDVIAQAQSGTGKTSMIALSVCQVVDTSSREVQALILSPTRELATQTEKTIQAIGLHANIQAHACIGGNSVGEDIRKLEHGVHVVSGTPGRVCDMIKRRSLRTRAIKLLILDESDEMLSRGFKDQIYDVYRYLPPDLQVCLVSATLPHEILEMTSKFMTEPVKILVKRDELTLEGIKQFFVAVEKEEWKFDTLCDLYDTLTITQAVIFCNTKRKVDYLSEKMRSHNFTVSSMHGDMPQKERDAIMNEFRSGDSRVLITTDVWARGIDVQQVSLVINYDLPNNRELYIHRIGRSGRFGRKGVAINFVKSDDIKILRDIEQYYSTQIDEMPMNVADLI

SEQ ID NO: 28697 - protein, 391 aa, Arabidopsis thaliana
  peptide (1)..(391): Ceres Seq. ID no. 12343399
  misc_feature (31)..(234): Pfam Name: DEAD/DEAH box helicase Pfam Description: DEAD/DEAH box helicase
  misc_feature (1)..(391): Homolog of NCBI NO: 29612461 NR Description: Similar to eukaryotic translation initiation
  misc_feature (2)..(391): Homolog of NCBI NO: 28277876 NR Description: Unknown (protein for MGC:56139) [Danio rerio]
  misc_feature (1)..(391): Homolog of NCBI NO: 19528517 NR Description: RE50350p [Drosophila melanogaster]
  misc_feature (1)..(391): Homolog of NCBI NO: 24645031 NR Description: CG7483-PA [Drosophila melanogaster]
  misc_feature (1)..(391): Homolog of NCBI NO: 7443503 NR Description: translation initiation factor - garden pea
  misc_feature (1)..(391): Homolog of NCBI NO: 1170507 NR Description: Eukaryotic initiation factor 4A-3 (eIF-4A-3)
  misc_feature (1)..(391): Homolog of NCBI NO: 34896594 NR Description: putative translation initiation factor [Oryza
  misc_feature (1)..(391): Homolog of NCBI NO: 11277760 NR Description: RNA helicase RH2 [imported] - Arabidopsis
  misc_feature (1)..(391): Homolog of NCBI NO: 15215678 NR Description: AT3g19760/MMB12_21 [Arabidopsis thaliana]
  misc_feature (1)..(391): Homolog of NCBI NO: 15230945 NR Description: eukaryotic translation initiation factor 4A
MDDDKLVFETTDGIEPITSFNDMGIKEDVLRGVYEYGFEKPSAIQQRAVMPILQGRDVIAQAQSGTGKTSMIALSVCQVVDTSSREVQALILSPTRELATQTEKTIQAIGLHANIQAHACIGGNSVGEDIRKLEHGVHVVSGTPGRVCDMIKRRSLRTRAIKLLILDESDEMLSRGFKDQIYDVYRYLPPDLQVCLVSATLPHEILEMTSKFMTEPVKILVKRDELTLEGIKQFFVAVEKEEWKFDTLCDLYDTLTITQAVIFCNTKRKVDYLSEKMRSHNFTVSSMHGDMPQKERDAIMNEFRSGDSRVLITTDVWARGIDVQQVSLVINYDLPNNRELYIHRIGRSGRFGRKGVAINFVKSDDIKILRDIEQYYSTQIDEMPMNVADLI

SEQ ID NO: 28698 - protein, 369 aa, Arabidopsis thaliana
  peptide (1)..(369): Ceres Seq. ID no. 12343400
  misc_feature (9)..(212): Pfam Name: DEAD/DEAH box helicase Pfam Description: DEAD/DEAH box helicase
  misc_feature (1)..(369): Homolog of NCBI NO: 29612461 NR Description: Similar to eukaryotic translation initiation
  misc_feature (1)..(369): Homolog of NCBI NO: 28277876 NR Description: Unknown (protein for MGC:56139) [Danio rerio]
  misc_feature (1)..(369): Homolog of NCBI NO: 19528517 NR Description: RE50350p [Drosophila melanogaster]
  misc_feature (1)..(369): Homolog of NCBI NO: 24645031 NR Description: CG7483-PA [Drosophila melanogaster]
  misc_feature (1)..(369): Homolog of NCBI NO: 7443503 NR Description: translation initiation factor - garden pea
  misc_feature (1)..(369): Homolog of NCBI NO: 1170507 NR Description: Eukaryotic initiation factor 4A-3 (eIF-4A-3)
  misc_feature (1)..(369): Homolog of NCBI NO: 34896594 NR Description: putative translation initiation factor [Oryza
  misc_feature (1)..(369): Homolog of NCBI NO: 11277760 NR Description: RNA helicase RH2 [imported] - Arabidopsis
  misc_feature (1)..(369): Homolog of NCBI NO: 15215678 NR Description: AT3g19760/MMB12_21 [Arabidopsis thaliana]
  misc_feature (1)..(369): Homolog of NCBI NO: 15230945 NR Description: eukaryotic translation initiation factor 4A
MGIKEDVLRGVYEYGFEKPSAIQQRAVMPILQGRDVIAQAQSGTGKTSMIALSVCQVVDTSSREVQALILSPTRELATQTEKTIQAIGLHANIQAHACIGGNSVGEDIRKLEHGVHVVSGTPGRVCDMIKRRSLRTRAIKLLILDESDEMLSRGFKDQIYDVYRYLPPDLQVCLVSATLPHEILEMTSKFMTEPVKILVKRDELTLEGIKQFFVAVEKEEWKFDTLCDLYDTLTITQAVIFCNTKRKVDYLSEKMRSHNFTVSSMHGDMPQKERDAIMNEFRSGDSRVLITTDVWARGIDVQQVSLVINYDLPNNRELYIHRIGRSGRFGRKGVAINFVKSDDIKILRDIEQYYSTQIDEMPMNVADLI

SEQ ID NO: 28699 - DNA, 1047 bp, Arabidopsis thaliana
  misc_feature (1)..(1047): Ceres Seq. ID no. 12333793
  misc_feature: MA Experiment ID: 20000171 Result: Down-regulated in Transcription
  misc_feature: MA Experiment 20000171 PARAMETER Experiment Name: At_42deg_Heat_P Parameter: Age (day) Value: 14
  misc_feature: MA Experiment 20000171 PARAMETER Experiment Name: At_42deg_Heat_P Parameter: Organism Value: A. thaliana
  misc_feature: MA Experiment 20000171 PARAMETER Experiment Name: At_42deg_Heat_P Parameter: Plant Line Value: WS
  misc_feature: MA Experiment 20000171 PARAMETER Experiment Name: At_42deg_Heat_P Parameter: Temperature (deg C) Value: 42 vs. 22
  misc_feature: MA Experiment 20000171 PARAMETER Experiment Name: At_42deg_Heat_P Parameter: Timepoint (hr) Value: 1
  misc_feature: MA Experiment 20000171 PARAMETER Experiment Name: At_42deg_Heat_P Parameter: Tissue Value: Aerial
  misc_feature: MA Experiment ID: 20000173 Result: Down-regulated in Transcription
  misc_feature: MA Experiment 20000173 PARAMETER Experiment Name: At_42deg_Heat_P Parameter: Age (day) Value: 14
  misc_feature: MA Experiment 20000173 PARAMETER Experiment Name: At_42deg_Heat_P Parameter: Organism Value: A. thaliana
  misc_feature: MA Experiment 20000173 PARAMETER Experiment Name: At_42deg_Heat_P Parameter: Plant Line Value: WS
  misc_feature: MA Experiment 20000173 PARAMETER Experiment Name: At_42deg_Heat_P Parameter: Temperature (deg C) Value: 42 vs. 22
  misc_feature: MA Experiment 20000173 PARAMETER Experiment Name: At_42deg_Heat_P Parameter: Timepoint (hr) Value: 6
  misc_feature: MA Experiment 20000173 PARAMETER Experiment Name: At_42deg_Heat_P Parameter: Tissue Value: Aerial
  misc_feature: MA Experiment ID: 20000182 Result: Up-regulated in Transcription
  misc_feature: MA Experiment 20000182 PARAMETER Experiment Name: At_2mM_SA_P Parameter: Age (day) Value: 14
  misc_feature: MA Experiment 20000182 PARAMETER Experiment Name: At_2mM_SA_P Parameter: Organism Value: A. thaliana
  misc_feature: MA Experiment 20000182 PARAMETER Experiment Name: At_2mM_SA_P Parameter: Plant Line Value: WS
  misc_feature: MA Experiment 20000182 PARAMETER Experiment Name: At_2mM_SA_P Parameter: Timepoint (hr) Value: 6
  misc_feature: MA Experiment 20000182 PARAMETER Experiment Name: At_2mM_SA_P Parameter: Tissue Value: Aerial
  misc_feature: MA Experiment 20000182 PARAMETER Experiment Name: At_2mM_SA_P Parameter: Treatment Value: 2mM SA vs. No Treatment
  misc_feature: MA Experiment ID: 20000185 Result: Down-regulated in Transcription
  misc_feature: MA Experiment 20000185 PARAMETER Experiment Name: At_Roots__P Parameter: Age (day) Value: 7 vs. 21
  misc_feature: MA Experiment 20000185 PARAMETER Experiment Name: At_Roots__P Parameter: Organism Value: A. thaliana
  misc_feature: MA Experiment 20000185 PARAMETER Experiment Name: At_Roots__P Parameter: Tissue Value: Roots vs. Whole Plant
  misc_feature: MA Experiment ID: 20000234 Result: Down-regulated in Transcription
  misc_feature: MA Experiment 20000234 PARAMETER Experiment Name: At_Siliques_P Parameter: Age (day) Value: 21
  misc_feature: MA Experiment 20000234 PARAMETER Experiment Name: At_Siliques_P Parameter: Organism Value: A. thaliana
  misc_feature: MA Experiment 20000234 PARAMETER Experiment Name: At_Siliques_P Parameter: Plant Line Value: WS
  misc_feature: MA Experiment 20000234 PARAMETER Experiment Name: At_Siliques_P Parameter: Tissue Value: Less Than 5mm Siliques vs. Whole Plant
  misc_feature: MA Experiment ID: 20000264 Result: Down-regulated in Transcription
  misc_feature: MA Experiment 20000264 PARAMETER Experiment Name: At_Open_Flower_P Parameter: Age (day) Value: 21
  misc_feature: MA Experiment 20000264 PARAMETER Experiment Name: At_Open_Flower_P Parameter: Plant Line Value: WS
  misc_feature: MA Experiment 20000264 PARAMETER Experiment Name: At_Open_Flower_P Parameter: Tissue Value: Open Flower vs. Whole Plant
  misc_feature: MA Experiment ID: 20000265 Result: Down-regulated in Transcription
  misc_feature: MA Experiment 20000265 PARAMETER Experiment Name: At_Open_Flower_P Parameter: Age (day) Value: 21
  misc_feature: MA Experiment 20000265 PARAMETER Experiment Name: At_Open_Flower_P Parameter: Plant Line Value: WS
  misc_feature: MA Experiment 20000265 PARAMETER Experiment Name: At_Open_Flower_P Parameter: Tissue Value: Closed Flower vs. Whole Plant
  misc_feature: MA Experiment ID: 20000267 Result: Up-regulated in Transcription
  misc_feature: MA Experiment 20000267 PARAMETER Experiment Name: At_Drought_P Parameter: Age (day) Value: 7
  misc_feature: MA Experiment 20000267 PARAMETER Experiment Name: At_Drought_P Parameter: Organism Value: A. thaliana
  misc_feature: MA Experiment 20000267 PARAMETER Experiment Name: At_Drought_P Parameter: Plant Line Value: WS
  misc_feature: MA Experiment 20000267 PARAMETER Experiment Name: At_Drought_P Parameter: Timepoint (hr) Value: 6
  misc_feature: MA Experiment 20000267 PARAMETER Experiment Name: At_Drought_P Parameter: Tissue Value: Whole Plant
  misc_feature: MA Experiment 20000267 PARAMETER Experiment Name: At_Drought_P Parameter: Treatment Value: Drought vs. No Drought
  misc_feature: MA Experiment ID: 20000286 Result: Down-regulated in Transcription
  misc_feature: MA Experiment 20000286 PARAMETER Experiment Name: At_Open_Flower_P Parameter: Age (day) Value: 21
  misc_feature: MA Experiment 20000286 PARAMETER Experiment Name: At_Open_Flower_P Parameter: Plant Line Value: WS
  misc_feature: MA Experiment 20000286 PARAMETER Experiment Name: At_Open_Flower_P Parameter: Tissue Value: Half Open vs. Whole Plant
  misc_feature: MA Experiment ID: 20000436 Result: Up-regulated in Transcription
  misc_feature: MA Experiment 20000436 PARAMETER Experiment Name: At_Drought_P Parameter: Age (day) Value: 7
  misc_feature: MA Experiment 20000436 PARAMETER Experiment Name: At_Drought_P Parameter: Organism Value: A. thaliana
  misc_feature: MA Experiment 20000436 PARAMETER Experiment Name: At_Drought_P Parameter: Plant Line Value: WS
  misc_feature: MA Experiment 20000436 PARAMETER Experiment Name: At_Drought_P Parameter: Timepoint (hr) Value: 12
  misc_feature: MA Experiment 20000436 PARAMETER Experiment Name: At_Drought_P Parameter: Tissue Value: Whole Plant
  misc_feature: MA Experiment 20000436 PARAMETER Experiment Name: At_Drought_P Parameter: Treatment Value: Drought vs. No Drought
  misc_feature: MA Experiment ID: 20000438 Result: Down-regulated in Transcription
  misc_feature: MA Experiment 20000438 PARAMETER Experiment Name: At_Shoots__P Parameter: Age (day) Value: 14
  misc_feature: MA Experiment 20000438 PARAMETER Experiment Name: At_Shoots__P Parameter: Tissue Value: Shoots vs. Whole Plant
  misc_feature: MA Experiment ID: 20000439 Result: Down-regulated in Transcription
  misc_feature: MA Experiment 20000439 PARAMETER Experiment Name: At_Roots__P Parameter: Age (day) Value: 14 vs. 21
  misc_feature: MA Experiment 20000439 PARAMETER Experiment Name: At_Roots__P Parameter: Organism Value: A. thaliana
  misc_feature: MA Experiment 20000439 PARAMETER Experiment Name: At_Roots__P Parameter: Tissue Value: Roots vs. Whole Plant
  misc_feature: MA Experiment ID: 20000441 Result: Up-regulated in Transcription
  misc_feature: MA Experiment 20000441 PARAMETER Experiment Name: At_1uM_BR-BRZ__P Parameter: Tissue Value: Shoot Apices
  misc_feature: MA Experiment 20000441 PARAMETER Experiment Name: At_1uM_BR-BRZ__P Parameter: Treatment Value: 1uM BR vs. No Treatment
  misc_feature: MA Experiment ID: 20000443 Result: Up-regulated in Transcription
  misc_feature: MA Experiment 20000443 PARAMETER Experiment Name: At_1uM_BR-BRZ__P Parameter: Tissue Value: Shoot Apices
  misc_feature: MA Experiment 20000443 PARAMETER Experiment Name: At_1uM_BR-BRZ__P Parameter: Treatment Value: 1uM BRZ vs. No Treatment
  misc_feature: MA Experiment ID: 20000453 Result: Up-regulated in Transcription
  misc_feature: MA Experiment 20000453 PARAMETER Experiment Name: At_100uM_ABA_P Parameter: Age (day) Value: 15
  misc_feature: MA Experiment 20000453 PARAMETER Experiment Name: At_100uM_ABA_P Parameter: Organism Value: A. thaliana
  misc_feature: MA Experiment 20000453 PARAMETER Experiment Name: At_100uM_ABA_P Parameter: Plant Line Value: WS
  misc_feature: MA Experiment 20000453 PARAMETER Experiment Name: At_100uM_ABA_P Parameter: Timepoint (hr) Value: 24
  misc_feature: MA Experiment 20000453 PARAMETER Experiment Name: At_100uM_ABA_P Parameter: Tissue Value: Aerial
  misc_feature: MA Experiment 20000453 PARAMETER Experiment Name: At_100uM_ABA_P Parameter: Treatment Value: 100uM ABA vs. No Treatment
  misc_feature: MA Experiment ID: 20001554 Result: Up-regulated in Transcription
  misc_feature: MA Experiment 20001554 PARAMETER Experiment Name: At_Drought_Soil_Dry_P Parameter: Age (day) Value: 21
  misc_feature: MA Experiment 20001554 PARAMETER Experiment Name: At_Drought_Soil_Dry_P Parameter: Organism Value: A. thaliana
  misc_feature: MA Experiment 20001554 PARAMETER Experiment Name: At_Drought_Soil_Dry_P Parameter: Plant Line Value: WS
  misc_feature: MA Experiment 20001554 PARAMETER Experiment Name: At_Drought_Soil_Dry_P Parameter: Post Timepoint (hr) Value: None
  misc_feature: MA Experiment 20001554 PARAMETER Experiment Name: At_Drought_Soil_Dry_P Parameter: Post-Treatment Value: None
  misc_feature: MA Experiment 20001554 PARAMETER Experiment Name: At_Drought_Soil_Dry_P Parameter: Timepoint (day) Value: 7
  misc_feature: MA Experiment 20001554 PARAMETER Experiment Name: At_Drought_Soil_Dry_P Parameter: Treatment Value: Drought vs. No Drought
  misc_feature: MA Experiment ID: 20001555 Result: Up-regulated in Transcription
  misc_feature: MA Experiment 20001555 PARAMETER Experiment Name: At_Drought_Soil_Dry_P Parameter: Age (day) Value: 24
  misc_feature: MA Experiment 20001555 PARAMETER Experiment Name: At_Drought_Soil_Dry_P Parameter: Organism Value: A. thaliana
  misc_feature: MA Experiment 20001555 PARAMETER Experiment Name: At_Drought_Soil_Dry_P Parameter: Plant Line Value: WS
  misc_feature: MA Experiment 20001555 PARAMETER Experiment Name: At_Drought_Soil_Dry_P Parameter: Post Timepoint (hr) Value: None
  misc_feature: MA Experiment 20001555 PARAMETER Experiment Name: At_Drought_Soil_Dry_P Parameter: Post-Treatment Value: None
  misc_feature: MA Experiment 20001555 PARAMETER Experiment Name: At_Drought_Soil_Dry_P Parameter: Timepoint (day) Value: 10
  misc_feature: MA Experiment 20001555 PARAMETER Experiment Name: At_Drought_Soil_Dry_P Parameter: Treatment Value: Drought vs. No Drought
  misc_feature: MA Experiment ID: 20001557 Result: Up-regulated in Transcription
  misc_feature: MA Experiment 20001557 PARAMETER Experiment Name: At_Drought_Soil_Dry_P Parameter: Age (day) Value: 27
  misc_feature: MA Experiment 20001557 PARAMETER Experiment Name: At_Drought_Soil_Dry_P Parameter: Organism Value: A. thaliana
  misc_feature: MA Experiment 20001557 PARAMETER Experiment Name: At_Drought_Soil_Dry_P Parameter: Plant Line Value: WS
  misc_feature: MA Experiment 20001557 PARAMETER Experiment Name: At_Drought_Soil_Dry_P Parameter: Post Timepoint (hr) Value: 3
  misc_feature: MA Experiment 20001557 PARAMETER Experiment Name: At_Drought_Soil_Dry_P Parameter: Post-Treatment Value: Re-Water vs. No Drought
  misc_feature: MA Experiment 20001557 PARAMETER Experiment Name: At_Drought_Soil_Dry_P Parameter: Timepoint (day) Value: 13
  misc_feature: MA Experiment 20001557 PARAMETER Experiment Name: At_Drought_Soil_Dry_P Parameter: Treatment Value: Drought vs. No Drought
  misc_feature: MA Experiment ID: 20001757 Result: Down-regulated in Transcription
  misc_feature: MA Experiment 20001757 PARAMETER Experiment Name: At_50mM_NH4NO3_L-to-H_P Parameter: Timepoint (hr) Value: 6
  misc_feature: MA Experiment 20001757 PARAMETER Experiment Name: At_50mM_NH4NO3_L-to-H_P Parameter: Tissue Value: Leaf
  misc_feature: MA Experiment 20001757 PARAMETER Experiment Name: At_50mM_NH4NO3_L-to-H_P Parameter: Treatment Value: 50mM NH4NO3 vs 100mM Mannitol
aggaagcttcgtggaagctgccatggcttctctctttctctccccatttaataccctccttcctcgttctttcctctcaaaccaaaaaacaagaagaagaatcaatactcaaatctcaatcatctctctttcttatcttcttctccgatatgaagctcgccgctagcctcaaccgcctcagccccaaacgtctcttccgtaccaaatcaaaagcttccgtctccagatctgagccttcttccttcagctccaatgcttcttcctcttcctctgatggatcttacggtaacctcaaacaaggtccaaccgcgactccgatcagtgttctccctcaaaactccggcgatttttacactgagcttgttcaagcttttaaactgatcgatcgtgatgacgacggtgttgtttccagaggagatctcgcggcgttgattagcaggttaagtcatgaaccaccgagtcaagaagaggtgagtttgatgctaagagaagtagacggcggagacggtggttgtatcagccttgaagatcttgctagccgtgtcgctggtacttccggtgaaggctctgttgagacggaggagctgagagaggtgttcgagatttttgacgtggatcgtaacggaaaaatatcggcggaggagttacacagagtttttggagtgatcggagatgaacggtgcacgttagaagagtgtatgcgtatgatagcgacggttgatggaaacggtgacggttttgtttgcttcgatgacttttgccgcatgatggttccagcgatgaatgatcatcatcattagaatcatgtttgattgatgatggtgacatcaccatactctttgtcttttttttttgttaccgaaaaattatttattttactgtttttgcggtggttattgtgacggcaagcatttaaattgttcaccgtcggtttaaattcagacgtctttctcaaaatggttatatactaatgtgaacatgtttctagtttcactcttctgttggttcaaaacaaactagtttcctcgaaacgtattaacatatggt

SEQ ID NO: 28700 - protein, 265 aa, Arabidopsis thaliana
  peptide (1)..(265): Ceres Seq. ID no. 12333794
  misc_feature (115)..(257): Homolog of NCBI NO: 14625425 NR Description: calmodulin NtCaM13 [Nicotiana tabacum]
  misc_feature (119)..(256): Homolog of NCBI NO: 34895640 NR Description: OSJNBa0083M16.33 [Oryza sativa (japonica
  misc_feature (119)..(257): Homolog of NCBI NO: 18408502 NR Description: calmodulin-related protein
  misc_feature (119)..(257): Homolog of NCBI NO: 21618074 NR Description: calmodulin-related protein [Arabidopsis thaliana]
  misc_feature (84)..(256): Homolog of NCBI NO: 15221781 NR Description: putative calmodulin; protein id: At1g24620.1
  misc_feature (119)..(256): Homolog of NCBI NO: 19386815 NR Description: B1147A04.10 [Oryza sativa (japonica
  misc_feature (50)..(256): Homolog of NCBI NO: 15228219 NR Description: calmodulin-like protein; protein id: At3g10190.1
  misc_feature (50)..(265): Homolog of NCBI NO: 322474 NR Description: calmodulin-related protein (clone PM129) -
  misc_feature (50)..(265): Homolog of NCBI NO: 21536925 NR Description: calmodulin-like protein [Arabidopsis thaliana]
  misc_feature (50)..(265): Homolog of NCBI NO: 15227349 NR Description: calmodulin-like protein
EASWKLPWLLSFSPHLIPSFLVLSSQTKKQEEESILKSQSSLFLIFFSDMKLAASLNRLSPKRLFRTKSKASVSRSEPSSFSSNASSSSSDGSYGNLKQGPTATPISVLPQNSGDFYTELVQAFKLIDRDDDGVVSRGDLAALISRLSHEPPSQEEVSLMLREVDGGDGGCISLEDLASRVAGTSGEGSVETEELREVFEIFDVDRNGKISAEELHRVFGVIGDERCTLEECMRMIATVDGNGDGFVCFDDFCRMMVPAMNDHHH

SEQ ID NO: 28701 - protein, 216 aa, Arabidopsis thaliana
  peptide (1)..(216): Ceres Seq. ID no. 12333795
  misc_feature (66)..(208): Homolog of NCBI NO: 14625425 NR Description: calmodulin NtCaM13 [Nicotiana tabacum]
  misc_feature (70)..(207): Homolog of NCBI NO: 34895640 NR Description: OSJNBa0083M16.33 [Oryza sativa (japonica
  misc_feature (70)..(208): Homolog of NCBI NO: 18408502 NR Description: calmodulin-related protein
  misc_feature (70)..(208): Homolog of NCBI NO: 21618074 NR Description: calmodulin-related protein [Arabidopsis thaliana]
  misc_feature (35)..(207): Homolog of NCBI NO: 15221781 NR Description: putative calmodulin; protein id: At1g24620.1
  misc_feature (70)..(207): Homolog of NCBI NO: 19386815 NR Description: B1147A04.10 [Oryza sativa (japonica
  misc_feature (1)..(207): Homolog of NCBI NO: 15228219 NR Description: calmodulin-like protein; protein id: At3g10190.1
  misc_feature (1)..(216): Homolog of NCBI NO: 322474 NR Description: calmodulin-related protein (clone PM129) -
  misc_feature (1)..(216): Homolog of NCBI NO: 21536925 NR Description: calmodulin-like protein [Arabidopsis thaliana]
  misc_feature (1)..(216): Homolog of NCBI NO: 15227349 NR Description: calmodulin-like protein
MKLAASLNRLSPKRLFRTKSKASVSRSEPSSFSSNASSSSSDGSYGNLKQGPTATPISVLPQNSGDFYTELVQAFKLIDRDDDGVVSRGDLAALISRLSHEPPSQEEVSLMLREVDGGDGGCISLEDLASRVAGTSGEGSVETEELREVFEIFDVDRNGKISAEELHRVFGVIGDERCTLEECMRMIATVDGNGDGFVCFDDFCRMMVPAMNDHHH

SEQ ID NO: 28702 - DNA, 1351 bp, Arabidopsis thaliana; identical to SEQ ID NO: 24717
  misc_feature (1)..(1351): Ceres Seq. ID no. 12334222
  misc_feature: MA Experiment ID: 108433 Result: Down-regulated in Transcription
  misc_feature: MA Experiment 108433 PARAMETER Experiment Name: At_rhl_Mutant2_cDNA_P Parameter: Age (day) Value: 7
  misc_feature: MA Experiment 108433 PARAMETER Experiment Name: At_rhl_Mutant2_cDNA_P Parameter: Organism Value: A. thaliana
  misc_feature: MA Experiment 108433 PARAMETER Experiment Name: At_rhl_Mutant2_cDNA_P Parameter: Plant Line Value: rhl Mutant vs. wt landsburg
  misc_feature: MA Experiment 108433 PARAMETER Experiment Name: At_rhl_Mutant2_cDNA_P Parameter: Tissue Value: Roots
  misc_feature: MA Experiment ID: 108434 Result: Up-regulated in Transcription
  misc_feature: MA Experiment 108434 PARAMETER Experiment Name: At_Root_Tips_cDNA_P Parameter: Tissue Value: Root Tips
  misc_feature: MA Experiment ID: 108462 Result: Down-regulated in Transcription
  misc_feature: MA Experiment 108462 PARAMETER Experiment Name: At_Germinating_Seeds_cDNA_P Parameter: Age (day) Value: 2 vs. 0
  misc_feature: MA Experiment 108462 PARAMETER Experiment Name: At_Germinating_Seeds_cDNA_P Parameter: Tissue Value: Germinating Seeds
  misc_feature: MA Experiment ID: 108463 Result: Down-regulated in Transcription
  misc_feature: MA Experiment 108463 PARAMETER Experiment Name: At_Germinating_Seeds_cDNA_P Parameter: Age (day) Value: 3 vs. 0
  misc_feature: MA Experiment 108463 PARAMETER Experiment Name: At_Germinating_Seeds_cDNA_P Parameter: Tissue Value: Germinating Seeds
  misc_feature: MA Experiment ID: 108489 Result: Up-regulated in Transcription
  misc_feature: MA Experiment ID: 108573 Result: Down-regulated in Transcription
  misc_feature: MA Experiment 108573 PARAMETER Experiment Name: At_Drought_cDNA_P Parameter: Timepoint (hr) Value: 6
  misc_feature: MA Experiment 108573 PARAMETER Experiment Name: At_Drought_cDNA_P Parameter: Tissue Value: Aerial
  misc_feature: MA Experiment 108573 PARAMETER Experiment Name: At_Drought_cDNA_P Parameter: Treatment Value: Drought vs. No Drought
  misc_feature: MA Experiment ID: 20001557 Result: Up-regulated in Transcription
  misc_feature: MA Experiment 20001557 PARAMETER Experiment Name: At_Drought_Soil_Dry_P Parameter: Age (day) Value: 27
  misc_feature: MA Experiment 20001557 PARAMETER Experiment Name: At_Drought_Soil_Dry_P Parameter: Organism Value: A. thaliana
  misc_feature: MA Experiment 20001557 PARAMETER Experiment Name: At_Drought_Soil_Dry_P Parameter: Plant Line Value: WS
  misc_feature: MA Experiment 20001557 PARAMETER Experiment Name: At_Drought_Soil_Dry_P Parameter: Post Timepoint (hr) Value: 3
  misc_feature: MA Experiment 20001557 PARAMETER Experiment Name: At_Drought_Soil_Dry_P Parameter: Post-Treatment Value: Re-Water vs. No Drought
  misc_feature: MA Experiment 20001557 PARAMETER Experiment Name: At_Drought_Soil_Dry_P Parameter: Timepoint (day) Value: 13
  misc_feature: MA Experiment 20001557 PARAMETER Experiment Name: At_Drought_Soil_Dry_P Parameter: Treatment Value: Drought vs. No Drought
  misc_feature: MA Experiment ID: 20001558 Result: Up-regulated in Transcription
  misc_feature: MA Experiment 20001558 PARAMETER Experiment Name: At_Drought_Soil_Dry_P Parameter: Age (day) Value: 27
  misc_feature: MA Experiment 20001558 PARAMETER Experiment Name: At_Drought_Soil_Dry_P Parameter: Organism Value: A. thaliana
  misc_feature: MA Experiment 20001558 PARAMETER Experiment Name: At_Drought_Soil_Dry_P Parameter: Plant Line Value: WS
  misc_feature: MA Experiment 20001558 PARAMETER Experiment Name: At_Drought_Soil_Dry_P Parameter: Post Timepoint (hr) Value: 6
  misc_feature: MA Experiment 20001558 PARAMETER Experiment Name: At_Drought_Soil_Dry_P Parameter: Post-Treatment Value: Re-Water vs. No Drought
  misc_feature: MA Experiment 20001558 PARAMETER Experiment Name: At_Drought_Soil_Dry_P Parameter: Timepoint (day) Value: 13
  misc_feature: MA Experiment 20001558 PARAMETER Experiment Name: At_Drought_Soil_Dry_P Parameter: Treatment Value: Drought vs. No Drought
  misc_feature: MA Experiment ID: 20001560 Result: Up-regulated in Transcription
  misc_feature: MA Experiment 20001560 PARAMETER Experiment Name: At_Drought_Soil_Dry_P Parameter: Age (day) Value: 28
  misc_feature: MA Experiment 20001560 PARAMETER Experiment Name: At_Drought_Soil_Dry_P Parameter: Organism Value: A. thaliana
  misc_feature: MA Experiment 20001560 PARAMETER Experiment Name: At_Drought_Soil_Dry_P Parameter: Plant Line Value: WS
  misc_feature: MA Experiment 20001560 PARAMETER Experiment Name: At_Drought_Soil_Dry_P Parameter: Post Timepoint (hr) Value: None
  misc_feature: MA Experiment 20001560 PARAMETER Experiment Name: At_Drought_Soil_Dry_P Parameter: Post-Treatment Value: None
  misc_feature: MA Experiment 20001560 PARAMETER Experiment Name: At_Drought_Soil_Dry_P Parameter: Timepoint (day) Value: 14
  misc_feature: MA Experiment 20001560 PARAMETER Experiment Name: At_Drought_Soil_Dry_P Parameter: Treatment Value: Drought vs. No Drought
  misc_feature: MA Experiment ID: 20001757 Result: Up-regulated in Transcription
  misc_feature: MA Experiment 20001757 PARAMETER Experiment Name: At_50mM_NH4NO3_L-to-H_P Parameter: Timepoint (hr) Value: 6
  misc_feature: MA Experiment 20001757 PARAMETER Experiment Name: At_50mM_NH4NO3_L-to-H_P Parameter: Tissue Value: Leaf
  misc_feature: MA Experiment 20001757 PARAMETER Experiment Name: At_50mM_NH4NO3_L-to-H_P Parameter: Treatment Value: 50mM NH4NO3 vs 100mM Mannitol

SEQ ID NO: 28703 - protein, 309 aa, Arabidopsis thaliana; identical to SEQ ID NO: 24718
  peptide (1)..(309): Ceres Seq. ID no. 12334223
  misc_feature (30)..(303): Pfam Name: Eukaryotic porin Pfam Description: Eukaryotic porin
  misc_feature (30)..(303): Pfam Name: Eukaryotic porin Pfam Description: Eukaryotic porin
  misc_feature (213)..(309): Homolog of NCBI NO: 34903264 NR Description: unnamed protein product [Oryza sativa (japonica
  misc_feature (218)..(309): Homolog of NCBI NO: 2982293 NR Description: ISP42-like protein [Picea mariana]
  misc_feature (73)..(105): Homolog of NCBI NO: 25405370 NR Description: hypothetical protein F14I3.2 [imported] -
  misc_feature (137)..(306): Homolog of NCBI NO: 25405370 NR Description: hypothetical protein F14I3.2 [imported] -
  misc_feature (1)..(105): Homolog of NCBI NO: 13162531 NR Description: Hypothetical protein [Arabidopsis thaliana]
  misc_feature (213)..(309): Homolog of NCBI NO: 34903264 NR Description: unnamed protein product [Oryza sativa (japonica
  misc_feature (73)..(105): Homolog of NCBI NO: 25405370 NR Description: hypothetical protein F14I3.2 [imported] -
  misc_feature (1)..(105): Homolog of NCBI NO: 13162531 NR Description: Hypothetical protein [Arabidopsis thaliana]
  misc_feature (1)..(309): Homolog of NCBI NO: 15231008 NR Description: membrane import protein, putative
  misc_feature (137)..(309): Homolog of NCBI NO: 11994775 NR Description: membrane import protein-like [Arabidopsis
  misc_feature (1)..(105): Homolog of NCBI NO: 11994775 NR Description: membrane import protein-like [Arabidopsis
  misc_feature (1)..(306): Homolog of NCBI NO: 15222963 NR Description: hypothetical protein; protein id: At1g50400.1
  misc_feature (137)..(306): Homolog of NCBI NO: 13162531 NR Description: Hypothetical protein [Arabidopsis thaliana]
  misc_feature (137)..(306): Homolog of NCBI NO: 25405370 NR Description: hypothetical protein F14I3.2 [imported] -
  misc_feature (218)..(309): Homolog of NCBI NO: 2982293 NR Description: ISP42-like protein [Picea mariana]
  misc_feature (137)..(306): Homolog of NCBI NO: 13162531 NR Description: Hypothetical protein [Arabidopsis thaliana]
  misc_feature (1)..(306): Homolog of NCBI NO: 15222963 NR Description: hypothetical protein; protein id: At1g50400.1
  misc_feature (1)..(105): Homolog of NCBI NO: 11994775 NR Description: membrane import protein-like [Arabidopsis
  misc_feature (137)..(309): Homolog of NCBI NO: 11994775 NR Description: membrane import protein-like [Arabidopsis
  misc_feature (1)..(309): Homolog of NCBI NO: 15231008 NR Description: membrane import protein, putative

SEQ ID NO: 28704 - protein, 267 aa, Arabidopsis thaliana; identical to SEQ ID NO: 24719
  peptide (1)..(267): Ceres Seq. ID no. 12334224
  misc_feature (1)..(261): Pfam Name: Eukaryotic porin Pfam Description: Eukaryotic porin
  misc_feature (1)..(261): Pfam Name: Eukaryotic porin Pfam Description: Eukaryotic porin
  misc_feature (171)..(267): Homolog of NCBI NO: 34903264 NR Description: unnamed protein product [Oryza sativa (japonica
  misc_feature (176)..(267): Homolog of NCBI NO: 2982293 NR Description: ISP42-like protein [Picea mariana]
  misc_feature (31)..(63): Homolog of NCBI NO: 25405370 NR Description: hypothetical protein F14I3.2 [imported] -
  misc_feature (95)..(264): Homolog of NCBI NO: 25405370 NR Description: hypothetical protein F14I3.2 [imported] -
  misc_feature (1)..(63): Homolog of NCBI NO: 13162531 NR Description: Hypothetical protein [Arabidopsis thaliana]
  misc_feature (171)..(267): Homolog of NCBI NO: 34903264 NR Description: unnamed protein product [Oryza sativa (japonica
  misc_feature (31)..(63): Homolog of NCBI NO: 25405370 NR Description: hypothetical protein F14I3.2 [imported] -
  misc_feature (1)..(63): Homolog of NCBI NO: 13162531 NR Description: Hypothetical protein [Arabidopsis thaliana]
  misc_feature (1)..(267): Homolog of NCBI NO: 15231008 NR Description: membrane import protein, putative
  misc_feature (95)..(267): Homolog of NCBI NO: 11994775 NR Description: membrane import protein-like [Arabidopsis
  misc_feature (1)..(63): Homolog of NCBI NO: 11994775 NR Description: membrane import protein-like [Arabidopsis
  misc_feature (1)..(264): Homolog of NCBI NO: 15222963 NR Description: hypothetical protein; protein id: At1g50400.1
  misc_feature (95)..(264): Homolog of NCBI NO: 13162531 NR Description: Hypothetical protein [Arabidopsis thaliana]
  misc_feature (95)..(264): Homolog of NCBI NO: 25405370 NR Description: hypothetical protein F14I3.2 [imported] -
  misc_feature (176)..(267): Homolog of NCBI NO: 2982293 NR Description: ISP42-like protein [Picea mariana]
  misc_feature (95)..(264): Homolog of NCBI NO: 13162531 NR Description: Hypothetical protein [Arabidopsis thaliana]
  misc_feature (1)..(264): Homolog of NCBI NO: 15222963 NR Description: hypothetical protein; protein id: At1g50400.1
  misc_feature (1)..(63): Homolog of NCBI NO: 11994775 NR Description: membrane import protein-like [Arabidopsis
  misc_feature (95)..(267): Homolog of NCBI NO: 11994775 NR Description: membrane import protein-like [Arabidopsis
  misc_feature (1)..(267): Homolog of NCBI NO: 15231008 NR Description: membrane import protein, putative

SEQ ID NO: 28705 - protein, 238 aa, Arabidopsis thaliana; identical to SEQ ID NO: 24720
  peptide (1)..(238): Ceres Seq. ID no. 12334225
  misc_feature (1)..(232): Pfam Name: Eukaryotic porin Pfam Description: Eukaryotic porin
  misc_feature (1)..(232): Pfam Name: Eukaryotic porin Pfam Description: Eukaryotic porin
  misc_feature (142)..(238): Homolog of NCBI NO: 34903264 NR Description: unnamed protein product [Oryza sativa (japonica
  misc_feature (147)..(238): Homolog of NCBI NO: 2982293 NR Description: ISP42-like protein [Picea mariana]
  misc_feature (2)..(34): Homolog of NCBI NO: 25405370 NR Description: hypothetical protein F14I3.2 [imported] -
  misc_feature (66)..(235): Homolog of NCBI NO: 25405370 NR Description: hypothetical protein F14I3.2 [imported] -
  misc_feature (1)..(34): Homolog of NCBI NO: 13162531 NR Description: Hypothetical protein [Arabidopsis thaliana]
  misc_feature (142)..(238): Homolog of NCBI NO: 34903264 NR Description: unnamed protein product [Oryza sativa (japonica
  misc_feature (2)..(34): Homolog of NCBI NO: 25405370 NR Description: hypothetical protein F14I3.2 [imported] -
  misc_feature (1)..(34): Homolog of NCBI NO: 13162531 NR Description: Hypothetical protein [Arabidopsis thaliana]
  misc_feature (1)..(238): Homolog of NCBI NO: 15231008 NR Description: membrane import protein, putative
  misc_feature (66)..(238): Homolog of NCBI NO: 11994775 NR Description: membrane import protein-like [Arabidopsis
  misc_feature (1)..(34): Homolog of NCBI NO: 11994775 NR Description: membrane import protein-like [Arabidopsis
  misc_feature (1)..(235): Homolog of NCBI NO: 15222963 NR Description: hypothetical protein; protein id: At1g50400.1
  misc_feature (66)..(235): Homolog of NCBI NO: 13162531 NR Description: Hypothetical protein [Arabidopsis thaliana]
  misc_feature (66)..(235): Homolog of NCBI NO: 25405370 NR Description: hypothetical protein F14I3.2 [imported] -
  misc_feature (147)..(238): Homolog of NCBI NO: 2982293 NR Description: ISP42-like protein [Picea mariana]
  misc_feature (66)..(235): Homolog of NCBI NO: 13162531 NR Description: Hypothetical protein [Arabidopsis thaliana]
  misc_feature (1)..(235): Homolog of NCBI NO: 15222963 NR Description: hypothetical protein; protein id: At1g50400.1
  misc_feature (1)..(34): Homolog of NCBI NO: 11994775 NR Description: membrane import protein-like [Arabidopsis
  misc_feature (66)..(238): Homolog of NCBI NO: 11994775 NR Description: membrane import protein-like [Arabidopsis
  misc_feature (1)..(238): Homolog of NCBI NO: 15231008 NR Description: membrane import protein, putative

SEQ ID NO: 28706 - DNA, 1511 bp, Arabidopsis thaliana
  misc_feature (1)..(1511): Ceres Seq. ID no. 12394381
  misc_feature: MA Experiment ID: 108434 Result: Down-regulated in Transcription
  misc_feature: MA Experiment 108434 PARAMETER Experiment Name: At_Root_Tips_cDNA_P Parameter: Tissue Value: Root Tips
  misc_feature: MA Experiment ID: 108488 Result: Up-regulated in Transcription
  misc_feature: MA Experiment ID: 108489 Result: Up-regulated in Transcription
  misc_feature: MA Experiment ID: 108561 Result: Down-regulated in Transcription
  misc_feature: MA Experiment 108561 PARAMETER Experiment Name: At_100uM_ABA_cDNA_P Parameter: Timepoint (hr) Value: 6
  misc_feature: MA Experiment 108561 PARAMETER Experiment Name: At_100uM_ABA_cDNA_P Parameter: Tissue Value: Aerial
  misc_feature: MA Experiment 108561 PARAMETER Experiment Name: At_100uM_ABA_cDNA_P Parameter: Treatment Value: 100uM ABA vs. No Treatment
  misc_feature: MA Experiment ID: 108573 Result: Down-regulated in Transcription
  misc_feature: MA Experiment 108573 PARAMETER Experiment Name: At_Drought_cDNA_P Parameter: Timepoint (hr) Value: 6
  misc_feature: MA Experiment 108573 PARAMETER Experiment Name: At_Drought_cDNA_P Parameter: Tissue Value: Aerial
  misc_feature: MA Experiment 108573 PARAMETER Experiment Name: At_Drought_cDNA_P Parameter: Treatment Value: Drought vs. No Drought
  misc_feature: MA Experiment ID: 108595 Result: Down-regulated in Transcription
  misc_feature: MA Experiment 108595 PARAMETER Experiment Name: At_Ler-pi_Ovule_cDNA_P Parameter: Plant Line Value: null
  misc_feature: MA Experiment ID: 108607 Result: Down-regulated in Transcription
  misc_feature: MA Experiment 108607 PARAMETER Experiment Name: At_100uM_ABA_cDNA_P Parameter: Timepoint (hr) Value: 4
  misc_feature: MA Experiment 108607 PARAMETER Experiment Name: At_100uM_ABA_cDNA_P Parameter: Tissue Value: Aerial
  misc_feature: MA Experiment 108607 PARAMETER Experiment Name: At_100uM_ABA_cDNA_P Parameter: Treatment Value: 100uM ABA vs. No Treatment
  misc_feature: MA Experiment ID: 20000069 Result: Down-regulated in Transcription
  misc_feature: MA Experiment 20000069 PARAMETER Experiment Name: At_100uM_ABA_Mutants_cDNA_P Parameter: Plant Line Value: CS23
  misc_feature: MA Experiment 20000069 PARAMETER Experiment Name: At_100uM_ABA_Mutants_cDNA_P Parameter: Timepoint (hr) Value: 6
  misc_feature: MA Experiment 20000069 PARAMETER Experiment Name: At_100uM_ABA_Mutants_cDNA_P Parameter: Tissue Value: Aerial
  misc_feature: MA Experiment 20000069 PARAMETER Experiment Name: At_100uM_ABA_Mutants_cDNA_P Parameter: Treatment Value: 100uM ABA vs. No Treatment
  misc_feature: MA Experiment ID: 20000070 Result: Down-regulated in Transcription
  misc_feature: MA Experiment 20000070 PARAMETER Experiment Name: At_100uM_ABA_Mutants_cDNA_P Parameter: Plant Line Value: CS24
  misc_feature: MA Experiment 20000070 PARAMETER Experiment Name: At_100uM_ABA_Mutants_cDNA_P Parameter: Timepoint (hr) Value: 6
  misc_feature: MA Experiment 20000070 PARAMETER Experiment Name: At_100uM_ABA_Mutants_cDNA_P Parameter: Tissue Value: Aerial
  misc_feature: MA Experiment 20000070 PARAMETER Experiment Name: At_100uM_ABA_Mutants_cDNA_P Parameter: Treatment Value: 100uM ABA vs. No Treatment
  misc_feature: MA Experiment ID: 20000071 Result: Down-regulated in Transcription
  misc_feature: MA Experiment 20000071 PARAMETER Experiment Name: At_100uM_ABA_Mutants_cDNA_P Parameter: Plant Line Value: CS8104
  misc_feature: MA Experiment 20000071 PARAMETER Experiment Name: At_100uM_ABA_Mutants_cDNA_P Parameter: Timepoint (hr) Value: 6
  misc_feature: MA Experiment 20000071 PARAMETER Experiment Name: At_100uM_ABA_Mutants_cDNA_P Parameter: Tissue Value: Aerial
  misc_feature: MA Experiment 20000071 PARAMETER Experiment Name: At_100uM_ABA_Mutants_cDNA_P Parameter: Treatment Value: 100uM ABA vs. No Treatment
  misc_feature: MA Experiment ID: 20000072 Result: Down-regulated in Transcription
  misc_feature: MA Experiment 20000072 PARAMETER Experiment Name: At_100uM_ABA_Mutants_cDNA_P Parameter: Plant Line Value: CS8105
  misc_feature: MA Experiment 20000072 PARAMETER Experiment Name: At_100uM_ABA_Mutants_cDNA_P Parameter: Timepoint (hr) Value: 6
  misc_feature: MA Experiment 20000072 PARAMETER Experiment Name: At_100uM_ABA_Mutants_cDNA_P Parameter: Tissue Value: Aerial
  misc_feature: MA Experiment 20000072 PARAMETER Experiment Name: At_100uM_ABA_Mutants_cDNA_P Parameter: Treatment Value: 100uM ABA vs. No Treatment
  misc_feature: MA Experiment ID: 20000086 Result: Down-regulated in Transcription
  misc_feature: MA Experiment 20000086 PARAMETER Experiment Name: At_100uM_ABA_Mutants_cDNA_P Parameter: Plant Line Value: CS22
  misc_feature: MA Experiment 20000086 PARAMETER Experiment Name: At_100uM_ABA_Mutants_cDNA_P Parameter: Timepoint (hr) Value: 6
  misc_feature: MA Experiment 20000086 PARAMETER Experiment Name: At_100uM_ABA_Mutants_cDNA_P Parameter: Tissue Value: Aerial
  misc_feature: MA Experiment 20000086 PARAMETER Experiment Name: At_100uM_ABA_Mutants_cDNA_P Parameter: Treatment Value: 100uM ABA vs. No Treatment
  misc_feature: MA Experiment ID: 20000088 Result: Down-regulated in Transcription
  misc_feature: MA Experiment 20000088 PARAMETER Experiment Name: At_100uM_ABA_Mutants_cDNA_P Parameter: Plant Line Value: Landsberg
  misc_feature: MA Experiment 20000088 PARAMETER Experiment Name: At_100uM_ABA_Mutants_cDNA_P Parameter: Timepoint (hr) Value: 6
  misc_feature: MA Experiment 20000088 PARAMETER Experiment Name: At_100uM_ABA_Mutants_cDNA_P Parameter: Tissue Value: Aerial
  misc_feature: MA Experiment 20000088 PARAMETER Experiment Name: At_100uM_ABA_Mutants_cDNA_P Parameter: Treatment Value: 100uM ABA vs. No Treatment
  misc_feature: MA Experiment ID: 20000090 Result: Down-regulated in Transcription
  misc_feature: MA Experiment ID: 20000117 Result: Down-regulated in Transcription
  misc_feature: MA Experiment 20000117 PARAMETER Experiment Name: At_100uM_ABA_Mutants_cDNA_P Parameter: Plant Line Value: Columbia
  misc_feature: MA Experiment 20000117 PARAMETER Experiment Name: At_100uM_ABA_Mutants_cDNA_P Parameter: Timepoint (hr) Value: 6
  misc_feature: MA Experiment 20000117 PARAMETER Experiment Name: At_100uM_ABA_Mutants_cDNA_P Parameter: Tissue Value: Aerial
  misc_feature: MA Experiment 20000117 PARAMETER Experiment Name: At_100uM_ABA_Mutants_cDNA_P Parameter: Treatment Value: 100uM ABA vs. No Treatment
  misc_feature: MA Experiment ID: 20000169 Result: Down-regulated in Transcription
  misc_feature: MA Experiment 20000169 PARAMETER Experiment Name: At_100uM_ABA_P Parameter: Age (day) Value: 14
  misc_feature: MA Experiment 20000169 PARAMETER Experiment Name: At_100uM_ABA_P Parameter: Organism Value: A. thaliana
  misc_feature: MA Experiment 20000169 PARAMETER Experiment Name: At_100uM_ABA_P Parameter: Plant Line Value: WS
  misc_feature: MA Experiment 20000169 PARAMETER Experiment Name: At_100uM_ABA_P Parameter: Timepoint (hr) Value: 6
  misc_feature: MA Experiment 20000169 PARAMETER Experiment Name: At_100uM_ABA_P Parameter: Tissue Value: Aerial
  misc_feature: MA Experiment 20000169 PARAMETER Experiment Name: At_100uM_ABA_P Parameter: Treatment Value: 100uM ABA vs. No Treatment
  misc_feature: MA Experiment ID: 20000184 Result: Up-regulated in Transcription
  misc_feature: MA Experiment 20000184 PARAMETER Experiment Name: At_Shoots__P Parameter: Age (day) Value: 7
  misc_feature: MA Experiment 20000184 PARAMETER Experiment Name: At_Shoots__P Parameter: Tissue Value: Shoots vs. Whole Plant
  misc_feature: MA Experiment ID: 20000185 Result: Down-regulated in Transcription
  misc_feature: MA Experiment 20000185 PARAMETER Experiment Name: At_Roots__P Parameter: Age (day) Value: 7 vs. 21
  misc_feature: MA Experiment 20000185 PARAMETER Experiment Name: At_Roots__P Parameter: Organism Value: A. thaliana
  misc_feature: MA Experiment 20000185 PARAMETER Experiment Name: At_Roots__P Parameter: Tissue Value: Roots vs. Whole Plant
  misc_feature: MA Experiment ID: 20000214 Result: Up-regulated in Transcription
  misc_feature: MA Experiment 20000214 PARAMETER Experiment Name: At_4deg_Cold_P Parameter: Timepoint (hr) Value: 6
  misc_feature: MA Experiment ID: 20000227 Result: Down-regulated in Transcription
  misc_feature: MA Experiment 20000227 PARAMETER Experiment Name: At_Root-Tips-vs-Tops_P Parameter: Tissue Value: Root Tips vs. Root Tops
  misc_feature: MA Experiment ID: 20000267 Result: Down-regulated in Transcription
  misc_feature: MA Experiment 20000267 PARAMETER Experiment Name: At_Drought_P Parameter: Age (day) Value: 7
  misc_feature: MA Experiment 20000267 PARAMETER Experiment Name: At_Drought_P Parameter: Organism Value: A. thaliana
  misc_feature: MA Experiment 20000267 PARAMETER Experiment Name: At_Drought_P Parameter: Plant Line Value: WS
  misc_feature: MA Experiment 20000267 PARAMETER Experiment Name: At_Drought_P Parameter: Timepoint (hr) Value: 6
  misc_feature: MA Experiment 20000267 PARAMETER Experiment Name: At_Drought_P Parameter: Tissue Value: Whole Plant
  misc_feature: MA Experiment 20000267 PARAMETER Experiment Name: At_Drought_P Parameter: Treatment Value: Drought vs. No Drought
  misc_feature: MA Experiment ID: 20000268 Result: Down-regulated in Transcription
  misc_feature: MA Experiment 20000268 PARAMETER Experiment Name: At_100mM_NaCl__P Parameter: Age (day) Value: 14
  misc_feature: MA Experiment 20000268 PARAMETER Experiment Name: At_100mM_NaCl__P Parameter: Organism Value: A. thaliana
  misc_feature: MA Experiment 20000268 PARAMETER Experiment Name: At_100mM_NaCl__P Parameter: Plant Line Value: WS
  misc_feature: MA Experiment 20000268 PARAMETER Experiment Name: At_100mM_NaCl__P Parameter: Timepoint (hr) Value: 6
  misc_feature: MA Experiment 20000268 PARAMETER Experiment Name: At_100mM_NaCl__P Parameter: Tissue Value: Whole Plant
  misc_feature: MA Experiment 20000268 PARAMETER Experiment Name: At_100mM_NaCl__P Parameter: Treatment Value: 100mM NaCl vs. No Treatment
  misc_feature: MA Experiment ID: 20000269 Result: Down-regulated in Transcription
  misc_feature: MA Experiment 20000269 PARAMETER Experiment Name: At_1mM_KNO3_L-vs-H_Roots_P Parameter: Age (day) Value: 7,10,12
  misc_feature: MA Experiment 20000269 PARAMETER Experiment Name: At_1mM_KNO3_L-vs-H_Roots_P Parameter: Organism Value: A. thaliana
  misc_feature: MA Experiment 20000269 PARAMETER Experiment Name: At_1mM_KNO3_L-vs-H_Roots_P Parameter: Plant Line Value: WS
  misc_feature: MA Experiment 20000269 PARAMETER Experiment Name: At_1mM_KNO3_L-vs-H_Roots_P Parameter: Timepoint (day) Value: 7,10,12
  misc_feature: MA Experiment 20000269 PARAMETER Experiment Name: At_1mM_KNO3_L-vs-H_Roots_P Parameter: Tissue Value: Roots
  misc_feature: MA Experiment 20000269 PARAMETER Experiment Name: At_1mM_KNO3_L-vs-H_Roots_P Parameter: Treatment Value: 1mM KNO3 vs. 50mM KNO3
  misc_feature: MA Experiment ID: 20000436 Result: Down-regulated in Transcription
  misc_feature: MA Experiment 20000436 PARAMETER Experiment Name: At_Drought_P Parameter: Age (day) Value: 7
  misc_feature: MA Experiment 20000436 PARAMETER Experiment Name: At_Drought_P Parameter: Organism Value: A. thaliana
  misc_feature: MA Experiment 20000436 PARAMETER Experiment Name: At_Drought_P Parameter: Plant Line Value: WS
  misc_feature: MA Experiment 20000436 PARAMETER Experiment Name: At_Drought_P Parameter: Timepoint (hr) Value: 12
  misc_feature: MA Experiment 20000436 PARAMETER Experiment Name: At_Drought_P Parameter: Tissue Value: Whole Plant
  misc_feature: MA Experiment 20000436 PARAMETER Experiment Name: At_Drought_P Parameter: Treatment Value: Drought vs. No Drought
  misc_feature: MA Experiment ID: 20000437 Result: Down-regulated in Transcription
  misc_feature: MA Experiment 20000437 PARAMETER Experiment Name: At_Drought_P Parameter: Age (day) Value: 8
  misc_feature: MA Experiment 20000437 PARAMETER Experiment Name: At_Drought_P Parameter: Organism Value: A. thaliana
  misc_feature: MA Experiment 20000437 PARAMETER Experiment Name: At_Drought_P Parameter: Plant Line Value: WS
  misc_feature: MA Experiment 20000437 PARAMETER Experiment Name: At_Drought_P Parameter: Timepoint (hr) Value: 24
  misc_feature: MA Experiment 20000437 PARAMETER Experiment Name: At_Drought_P Parameter: Tissue Value: Whole Plant
  misc_feature: MA Experiment 20000437 PARAMETER Experiment Name: At_Drought_P Parameter: Treatment Value: Drought vs. No Drought
  misc_feature: MA Experiment ID: 20000438 Result: Up-regulated in Transcription
  misc_feature: MA Experiment 20000438 PARAMETER Experiment Name: At_Shoots__P Parameter: Age (day) Value: 14
  misc_feature: MA Experiment 20000438 PARAMETER Experiment Name: At_Shoots__P Parameter: Tissue Value: Shoots vs. Whole Plant
  misc_feature: MA Experiment ID: 20000439 Result: Down-regulated in Transcription
  misc_feature: MA Experiment 20000439 PARAMETER Experiment Name: At_Roots__P Parameter: Age (day) Value: 14 vs. 21
  misc_feature: MA Experiment 20000439 PARAMETER Experiment Name: At_Roots__P Parameter: Organism Value: A. thaliana
  misc_feature: MA Experiment 20000439 PARAMETER Experiment Name: At_Roots__P Parameter: Tissue Value: Roots vs. Whole Plant
  misc_feature: MA Experiment ID: 20000453 Result: Down-regulated in Transcription
  misc_feature: MA Experiment 20000453 PARAMETER Experiment Name: At_100uM_ABA_P Parameter: Age (day) Value: 15
  misc_feature: MA Experiment 20000453 PARAMETER Experiment Name: At_100uM_ABA_P Parameter: Organism Value: A. thaliana
  misc_feature: MA Experiment 20000453 PARAMETER Experiment Name: At_100uM_ABA_P Parameter: Plant Line Value: WS
  misc_feature: MA Experiment 20000453 PARAMETER Experiment Name: At_100uM_ABA_P Parameter: Timepoint (hr) Value: 24
  misc_feature: MA Experiment 20000453 PARAMETER Experiment Name: At_100uM_ABA_P Parameter: Tissue Value: Aerial
  misc_feature: MA Experiment 20000453 PARAMETER Experiment Name: At_100uM_ABA_P Parameter: Treatment Value: 100uM ABA vs. No Treatment
  misc_feature: MA Experiment ID: 20000709 Result: Up-regulated in Transcription
  misc_feature: MA Experiment 20000709 PARAMETER Experiment Name: At_15mM_NH4NO3_L-to-H_P Parameter: Age (hr) Value: 14
  misc_feature: MA Experiment 20000709 PARAMETER Experiment Name: At_15mM_NH4NO3_L-to-H_P Parameter: Organism Value: A. thaliana
  misc_feature: MA Experiment 20000709 PARAMETER Experiment Name: At_15mM_NH4NO3_L-to-H_P Parameter: Plant Line Value: WS
  misc_feature: MA Experiment 20000709 PARAMETER Experiment Name: At_15mM_NH4NO3_L-to-H_P Parameter: Timepoint (hr) Value: 4
  misc_feature: MA Experiment 20000709 PARAMETER Experiment Name: At_15mM_NH4NO3_L-to-H_P Parameter: Tissue Value: Aerial
  misc_feature: MA Experiment 20000709 PARAMETER Experiment Name: At_15mM_NH4NO3_L-to-H_P Parameter: Treatment Value: 15mM NH4NO3 vs. 30mM Mannitol
  misc_feature: MA Experiment ID: 20000794 Result: Down-regulated in Transcription
  misc_feature: MA Experiment 20000794 PARAMETER Experiment Name: At_Petals_P Parameter: Age (day) Value: 23-25 days
  misc_feature: MA Experiment 20000794 PARAMETER Experiment Name: At_Petals_P Parameter: Plant Line Value: WS
  misc_feature: MA Experiment 20000794 PARAMETER Experiment Name: At_Petals_P Parameter: Tissue Value: Petals vs. Whole plant
  misc_feature: MA Experiment ID: 20001248 Result: Down-regulated in Transcription
  misc_feature: MA Experiment 20001248 PARAMETER Experiment Name: At_Far-red-induction_P Parameter: Age (day) Value: 7
  misc_feature: MA Experiment 20001248 PARAMETER Experiment Name: At_Far-red-induction_P Parameter: Light Value: Far-red vs. White
  misc_feature: MA Experiment 20001248 PARAMETER Experiment Name: At_Far-red-induction_P Parameter: Organism Value: A. thaliana
  misc_feature: MA Experiment 20001248 PARAMETER Experiment Name: At_Far-red-induction_P Parameter: Plant Line Value: Columbia
  misc_feature: MA Experiment 20001248 PARAMETER Experiment Name: At_Far-red-induction_P Parameter: Timepoint (hr) Value: 4
  misc_feature: MA Experiment 20001248 PARAMETER Experiment Name: At_Far-red-induction_P Parameter: Tissue Value: Whole Plant
  misc_feature: MA Experiment ID: 20001450 Result: Down-regulated in Transcription
  misc_feature: MA Experiment 20001450 PARAMETER Experiment Name: At_Far-red-induction_P Parameter: Age (day) Value: 7
  misc_feature: MA Experiment 20001450 PARAMETER Experiment Name: At_Far-red-induction_P Parameter: Light Value: Far-red vs. White
  misc_feature: MA Experiment 20001450 PARAMETER Experiment Name: At_Far-red-induction_P Parameter: Organism Value: A. thaliana
  misc_feature: MA Experiment 20001450 PARAMETER Experiment Name: At_Far-red-induction_P Parameter: Plant Line Value: Columbia
  misc_feature: MA Experiment 20001450 PARAMETER Experiment Name: At_Far-red-induction_P Parameter: Timepoint (hr) Value: 8
  misc_feature: MA Experiment 20001450 PARAMETER Experiment Name: At_Far-red-induction_P Parameter: Tissue Value: Whole Plant
  misc_feature: MA Experiment ID: 20001554 Result: Down-regulated in Transcription
  misc_feature: MA Experiment 20001554 PARAMETER Experiment Name: At_Drought_Soil_Dry_P Parameter: Age (day) Value: 21
  misc_feature: MA Experiment 20001554 PARAMETER Experiment Name: At_Drought_Soil_Dry_P Parameter: Organism Value: A. thaliana
  misc_feature: MA Experiment 20001554 PARAMETER Experiment Name: At_Drought_Soil_Dry_P Parameter: Plant Line Value: WS
  misc_feature: MA Experiment 20001554 PARAMETER Experiment Name: At_Drought_Soil_Dry_P Parameter: Post Timepoint (hr) Value: None
  misc_feature: MA Experiment 20001554 PARAMETER Experiment Name: At_Drought_Soil_Dry_P Parameter: Post-Treatment Value: None
  misc_feature: MA Experiment 20001554 PARAMETER Experiment Name: At_Drought_Soil_Dry_P Parameter: Timepoint (day) Value: 7
  misc_feature: MA Experiment 20001554 PARAMETER Experiment Name: At_Drought_Soil_Dry_P Parameter: Treatment Value: Drought vs. No Drought
  misc_feature: MA Experiment ID: 20001555 Result: Down-regulated in Transcription
  misc_feature: MA Experiment 20001555 PARAMETER Experiment Name: At_Drought_Soil_Dry_P Parameter: Age (day) Value: 24
  misc_feature: MA Experiment 20001555 PARAMETER Experiment Name: At_Drought_Soil_Dry_P Parameter: Organism Value: A. thaliana
  misc_feature: MA Experiment 20001555 PARAMETER Experiment Name: At_Drought_Soil_Dry_P Parameter: Plant Line Value: WS
  misc_feature: MA Experiment 20001555 PARAMETER Experiment Name: At_Drought_Soil_Dry_P Parameter: Post Timepoint (hr) Value: None
  misc_feature: MA Experiment 20001555 PARAMETER Experiment Name: At_Drought_Soil_Dry_P Parameter: Post-Treatment Value: None
  misc_feature: MA Experiment 20001555 PARAMETER Experiment Name: At_Drought_Soil_Dry_P Parameter: Timepoint (day) Value: 10
  misc_feature: MA Experiment 20001555 PARAMETER Experiment Name: At_Drought_Soil_Dry_P Parameter: Treatment Value: Drought vs. No Drought
  misc_feature: MA Experiment ID: 20001558 Result: Up-regulated in Transcription
  misc_feature: MA Experiment 20001558 PARAMETER Experiment Name: At_Drought_Soil_Dry_P Parameter: Age (day) Value: 27
  misc_feature: MA Experiment 20001558 PARAMETER Experiment Name: At_Drought_Soil_Dry_P Parameter: Organism Value: A. thaliana
  misc_feature: MA Experiment 20001558 PARAMETER Experiment Name: At_Drought_Soil_Dry_P Parameter: Plant Line Value: WS
  misc_feature: MA Experiment 20001558 PARAMETER Experiment Name: At_Drought_Soil_Dry_P Parameter: Post Timepoint (hr) Value: 6
  misc_feature: MA Experiment 20001558 PARAMETER Experiment Name: At_Drought_Soil_Dry_P Parameter: Post-Treatment Value: Re-Water vs. No Drought
  misc_feature: MA Experiment 20001558 PARAMETER Experiment Name: At_Drought_Soil_Dry_P Parameter: Timepoint (day) Value: 13
  misc_feature: MA Experiment 20001558 PARAMETER Experiment Name: At_Drought_Soil_Dry_P Parameter: Treatment Value: Drought vs. No Drought
  misc_feature: MA Experiment ID: 20001559 Result: Down-regulated in Transcription
  misc_feature: MA Experiment 20001559 PARAMETER Experiment Name: At_Drought_Soil_Dry_P Parameter: Age (day) Value: 28
  misc_feature: MA Experiment 20001559 PARAMETER Experiment Name: At_Drought_Soil_Dry_P Parameter: Organism Value: A. thaliana
  misc_feature: MA Experiment 20001559 PARAMETER Experiment Name: At_Drought_Soil_Dry_P Parameter: Plant Line Value: WS
  misc_feature: MA Experiment 20001559 PARAMETER Experiment Name: At_Drought_Soil_Dry_P Parameter: Post Timepoint (hr) Value: 29
  misc_feature: MA Experiment 20001559 PARAMETER Experiment Name: At_Drought_Soil_Dry_P Parameter: Post-Treatment Value: Re-Water vs. No Drought
  misc_feature: MA Experiment 20001559 PARAMETER Experiment Name: At_Drought_Soil_Dry_P Parameter: Timepoint (day) Value: 14
  misc_feature: MA Experiment 20001559 PARAMETER Experiment Name: At_Drought_Soil_Dry_P Parameter: Treatment Value: Drought vs. No Drought
  misc_feature: MA Experiment ID: 20001757 Result: Up-regulated in Transcription
  misc_feature: MA Experiment 20001757 PARAMETER Experiment Name: At_50mM_NH4NO3_L-to-H_P Parameter: Timepoint (hr) Value: 6
  misc_feature: MA Experiment 20001757 PARAMETER Experiment Name: At_50mM_NH4NO3_L-to-H_P Parameter: Tissue Value: Leaf
  misc_feature: MA Experiment 20001757 PARAMETER Experiment Name: At_50mM_NH4NO3_L-to-H_P Parameter: Treatment Value: 50mM NH4NO3 vs 100mM Mannitol
  misc_feature: MA Experiment ID: 20001906 Result: Down-regulated in Transcription
  misc_feature: MA Experiment 20001906 PARAMETER Experiment Name: At_Drought_Reproduction_P Parameter: Age (day) Value: 35
  misc_feature: MA Experiment 20001906 PARAMETER Experiment Name: At_Drought_Reproduction_P Parameter: Organism Value: A. thaliana
  misc_feature: MA Experiment 20001906 PARAMETER Experiment Name: At_Drought_Reproduction_P Parameter: Plant Line Value: WS
  misc_feature: MA Experiment 20001906 PARAMETER Experiment Name: At_Drought_Reproduction_P Parameter: Timepoint (day) Value: 5
  misc_feature: MA Experiment 20001906 PARAMETER Experiment Name: At_Drought_Reproduction_P Parameter: Tissue Value: Siliques
  misc_feature: MA Experiment 20001906 PARAMETER Experiment Name: At_Drought_Reproduction_P Parameter: Treatment Value: Drought vs. No Drought
  misc_feature: MA Experiment ID: 20001908 Result: Down-regulated in Transcription
  misc_feature: MA Experiment 20001908 PARAMETER Experiment Name: At_Drought_Reproduction_P Parameter: Age (day) Value: 40
  misc_feature: MA Experiment 20001908 PARAMETER Experiment Name: At_Drought_Reproduction_P Parameter: Organism Value: A. thaliana
  misc_feature: MA Experiment 20001908 PARAMETER Experiment Name: At_Drought_Reproduction_P Parameter: Plant Line Value: WS
  misc_feature: MA Experiment 20001908 PARAMETER Experiment Name: At_Drought_Reproduction_P Parameter: Timepoint (day) Value: 10
  misc_feature: MA Experiment 20001908 PARAMETER Experiment Name: At_Drought_Reproduction_P Parameter: Tissue Value: Siliques
  misc_feature: MA Experiment 20001908 PARAMETER Experiment Name: At_Drought_Reproduction_P Parameter: Treatment Value: Drought vs. No Drought
  misc_feature: MA Experiment ID: 20001911 Result: Down-regulated in Transcription
  misc_feature: MA Experiment 20001911 PARAMETER Experiment Name: At_Drought_Reproduction_P Parameter: Age (day) Value: 40
  misc_feature: MA Experiment 20001911 PARAMETER Experiment Name: At_Drought_Reproduction_P Parameter: Organism Value: A. thaliana
  misc_feature: MA Experiment 20001911 PARAMETER Experiment Name: At_Drought_Reproduction_P Parameter: Plant Line Value: WS
  misc_feature: MA Experiment 20001911 PARAMETER Experiment Name: At_Drought_Reproduction_P Parameter: Timepoint (day) Value: 10
  misc_feature: MA Experiment 20001911 PARAMETER Experiment Name: At_Drought_Reproduction_P Parameter: Tissue Value: Flowers
  misc_feature: MA Experiment 20001911 PARAMETER Experiment Name: At_Drought_Reproduction_P Parameter: Treatment Value: Drought vs. No Drought
gaacaaacccaaaaagatacatatcaagagattaaaccttatccaactaagagaagccatttttattttttttgggtctctgagttgtgtattgagcttcatctccttcaaatggcttccttatcaaccacttccctaagcttcaaagctccgtccaccacaatttcacaggttttaaggaaagcctcaagttctcagtctgtgacctttggtcgtttcacgtcttcaacaaagagccttcgtcttcaaatcagttgtgccgcgaaagcagagacggtgcagaaagtgagtgacattgtaaaagaacaattggctttagctgctgatgttccgctcactgctgaatccaagttctctgctcttggtgccgattctctcgacaccgtggagatagtgatggcgttggaggaaaagtttaacataagtgtggaggaatctgatgctcaaaacattacgaccatccaagaggcggctgatttgatagaggaccttgttcaaaagaaacccgcggcggaaacttcctgaaccggctgtcttttctttcctgacctattcttgccttcagagcgttttattacggtatattagaccgtttgttatttttatttatttcggaagctaagattgggtgttgacaatgagacaactttggtacgttgagattgattctttgtggtgattggtcttatgacgaattcataattgtgtattgtttcaaaaaagctgagtatgtgtggtgatatagagtttgtgtggtgagagcaacaatggagtttgtgaagattgtgtagcttttgtactttacatcacggagaaacctctctagattttgattttgtgtagatttagtgcaaaacaacgacaaaagaggcggtgatgacgtgacacaactccataaatcgaaaaccagttctgattgatttcatcttcttcttgaatgaagcttttttgatttttttttgaatcactggtacagttctgatttacttatttttggccagttatatatgttagttatacaaaaaatgaattttgattgaattttttattggccaagttatatatgtgagcttgatcaaattcaatttgttatagtcatcgaagccaacaaaattcgaaagtgaaaacataataagaaagtttgtttcctttagttgccatttcaggcggtgagagagttagcacatcgtgttttgggttgatgtaggaagaacgaagagaaatctctggacttgaaaaatcatggaatctttgctttcacagccgatgctttgcgtttatactctaacgctttacaagtatccatccacaagtgaccatttcatgttgaacatatagttagagttatatggatcctttacatttttctattgacttaatcatatccaaaattgtttatggatgttgttggacgcacccgaccatttatagtcgtccatatggataaaccaatttgtaaaattacatatgaacacaagttatatgaagggaaactcaagttaacaccaaag

SEQ ID NO: 28707 - protein, 174 aa, Arabidopsis thaliana
  peptide (1)..(174): Ceres Seq. ID no. 12394382
  misc_feature (94)..(161): Pfam Name: Phosphopantetheine attachment site Pfam Description: Phosphopantetheine attachment site
  misc_feature (38)..(168): Homolog of NCBI NO: 113166 NR Description: Acyl carrier protein I, chloroplast precursor
  misc_feature (38)..(168): Homolog of NCBI NO: 72413 NR Description: acyl carrier protein I precursor - spinach
  misc_feature (81)..(170): Homolog of NCBI NO: 37515400 NR Description: acyl carrier protein 1 [Cicer arietinum]
  misc_feature (55)..(170): Homolog of NCBI NO: 2465010 NR Description: acyl carrier protein [Fragaria vesca]
  misc_feature (38)..(168): Homolog of NCBI NO: 20137323 NR Description: Acyl carrier protein 1, chloroplast precursor
  misc_feature (38)..(168): Homolog of NCBI NO: 4457219 NR Description: acyl carrier protein [Capsicum chinense]
  misc_feature (38)..(168): Homolog of NCBI NO: 5669599 NR Description: acyl carrier protein [Coriandrum sativum]
  misc_feature (38)..(168): Homolog of NCBI NO: 113170 NR Description: Acyl carrier protein II, chloroplast precursor
  misc_feature (38)..(168): Homolog of NCBI NO: 16518983 NR Description: acyl carrier protein [Olea europaea]
  misc_feature (38)..(174): Homolog of NCBI NO: 15234875 NR Description: acyl carrier - like protein
EQTQKDTYQEIKPYPTKRSHFYFFWVSELCIELHLLQMASLSTTSLSFKAPSTTISQVLRKASSSQSVTFGRFTSSTKSLRLQISCAAKAETVQKVSDIVKEQLALAADVPLTAESKFSALGADSLDTVEIVMALEEKFNISVEESDAQNITTIQEAADLIEDLVQKKPAAETS

SEQ ID NO: 28708 - protein, 137 aa, Arabidopsis thaliana
  peptide (1)..(137): Ceres Seq. ID no. 12394383
  misc_feature (57)..(124): Pfam Name: Phosphopantetheine attachment site Pfam Description: Phosphopantetheine attachment site
  misc_feature (1)..(131): Homolog of NCBI NO: 113166 NR Description: Acyl carrier protein I, chloroplast precursor
  misc_feature (1)..(131): Homolog of NCBI NO: 72413 NR Description: acyl carrier protein I precursor - spinach
  misc_feature (44)..(133): Homolog of NCBI NO: 37515400 NR Description: acyl carrier protein 1 [Cicer arietinum]
  misc_feature (18)..(133): Homolog of NCBI NO: 2465010 NR Description: acyl carrier protein [Fragaria vesca]
  misc_feature (1)..(131): Homolog of NCBI NO: 20137323 NR Description: Acyl carrier protein 1, chloroplast precursor
  misc_feature (1)..(131): Homolog of NCBI NO: 4457219 NR Description: acyl carrier protein [Capsicum chinense]
  misc_feature (1)..(131): Homolog of NCBI NO: 5669599 NR Description: acyl carrier protein [Coriandrum sativum]
  misc_feature (1)..(131): Homolog of NCBI NO: 113170 NR Description: Acyl carrier protein II, chloroplast precursor
  misc_feature (1)..(131): Homolog of NCBI NO: 16518983 NR Description: acyl carrier protein [Olea europaea]
  misc_feature (1)..(137): Homolog of NCBI NO: 15234875 NR Description: acyl carrier - like protein
MASLSTTSLSFKAPSTTISQVLRKASSSQSVTFGRFTSSTKSLRLQISCAAKAETVQKVSDIVKEQLALAADVPLTAESKFSALGADSLDTVEIVMALEEKFNISVEESDAQNITTIQEAADLIEDLVQKKPAAETS

SEQ ID NO: 28709 - DNA, 873 bp, Arabidopsis thaliana
  misc_feature (1)..(873): Ceres Seq. ID no. 12602545
  misc_feature: MA Experiment ID: 20000307 Result: Up-regulated in Transcription
  misc_feature: MA Experiment 20000307 PARAMETER Experiment Name: At_Germinating_Seeds_Sub_P Parameter: Age (hr) Value: 24 vs. 0
  misc_feature: MA Experiment 20000307 PARAMETER Experiment Name: At_Germinating_Seeds_Sub_P Parameter: Organism Value: A. thaliana
  misc_feature: MA Experiment 20000307 PARAMETER Experiment Name: At_Germinating_Seeds_Sub_P Parameter: Plant Line Value: WS
  misc_feature: MA Experiment 20000307 PARAMETER Experiment Name: At_Germinating_Seeds_Sub_P Parameter: Tissue Value: Germinating Seeds
  misc_feature: MA Experiment ID: 20000315 Result: Down-regulated in Transcription
  misc_feature: MA Experiment 20000315 PARAMETER Experiment Name: At_14day_Shoots-Roots_Sub_P Parameter: Age (day) Value: 14
  misc_feature: MA Experiment 20000315 PARAMETER Experiment Name: At_14day_Shoots-Roots_Sub_P Parameter: Organism Value: A. thaliana
  misc_feature: MA Experiment 20000315 PARAMETER Experiment Name: At_14day_Shoots-Roots_Sub_P Parameter: Plant Line Value: WS
  misc_feature: MA Experiment 20000315 PARAMETER Experiment Name: At_14day_Shoots-Roots_Sub_P Parameter: Tissue Value: Shoots vs. Whole Plant
aatacagtatatactttttctgtaaatcacacgaagaagaagaaccaaaagagagagattgtgaaagaagaaaacagagacagtttcttcgctgaaaagaaaaaccaaatcagctaaatccctaaaagtttccgtcaatgtcttctcgccggagagttcttctcaaggttatcattctcggtgatagcggtgttgggaagacttcgttgatgaatcagtttgtgaatcgaaagtttagtaatcagtataaagctacgattggagcagattttttgactaaagaggttcaaatagatgacagaatcttcactttacagatttgggatactgctggacaagaaagatttcaaagtttgggagttgcgttttaccgaggagcggattgttgtgttcttgtctatgatgtcaatgttatgaaatcttttgataatcttaataactggagggaagagttcttgattcaggctagtccttcagatcctgaaaactttccatttgttgtgttggggaacaagactgatgttgatggtggaaagagcagagtggtttctgagaaaaaggcaaaggcatggtgtgcatctaaaggaaacattccttactttgagacttccgccaaagaaggattcaatgtagatgcggctttcgaatgcattaccaaaaatgctttcaagaatgaacctgaagaagaaccgtaccttcccgacaccattgatgttgccggaggtcagcaacaaagatcaacagggtgtgaatgctaatcaagcaaaagtttgttgcagatacattgttttgtttggcacattttgattttgtaacaatatatttataacttccagaaatgtattttcagattcattttgagttacagattgt

SEQ ID NO: 28710 - protein, 206 aa, Arabidopsis thaliana
  peptide (1)..(206): Ceres Seq. ID no. 12602546
  misc_feature (10)..(178): Pfam Name: Ras family Pfam Description: Ras family
  misc_feature (1)..(204): Homolog of NCBI NO: 29293694 NR Description: small GTP binding protein [Oryza sativa (indica
  misc_feature (1)..(206): Homolog of NCBI NO: 1370186 NR Description: RAB7C [Lotus japonicus]
  misc_feature (1)..(206): Homolog of NCBI NO: 34484308 NR Description: putative GTP-binding protein [Cucumis sativus]
  misc_feature (1)..(204): Homolog of NCBI NO: 3914557 NR Description: RAS-RELATED PROTEIN RAB7 (POSSIBLE
  misc_feature (1)..(205): Homolog of NCBI NO: 7438407 NR Description: GTP-binding protein Rab7a - common tobacco
  misc_feature (1)..(206): Homolog of NCBI NO: 3914550 NR Description: RAS-RELATED PROTEIN RAB7
  misc_feature (1)..(206): Homolog of NCBI NO: 1370188 NR Description: RAB7D [Lotus japonicus]
  misc_feature (1)..(206): Homolog of NCBI NO: 7388049 NR Description: Ras-related protein Rab7
  misc_feature (1)..(206): Homolog of NCBI NO: 15233284 NR Description: GTP-binding protein, putative
  misc_feature (1)..(206): Homolog of NCBI NO: 15218194 NR Description: GTP-binding protein, putative
MSSRRRVLLKVIILGDSGVGKTSLMNQFVNRKFSNQYKATIGADFLTKEVQIDDRIFTLQIWDTAGQERFQSLGVAFYRGADCCVLVYDVNVMKSFDNLNNWREEFLIQASPSDPENFPFVVLGNKTDVDGGKSRVVSEKKAKAWCASKGNIPYFETSAKEGFNVDAAFECITKNAFKNEPEEEPYLPDTIDVAGGQQQRSTGCEC

SEQ ID NO: 28711 - protein, 182 aa, Arabidopsis thaliana
  peptide (1)..(182): Ceres Seq. ID no. 12602547
  misc_feature (1)..(154): Pfam Name: Ras family Pfam Description: Ras family
  misc_feature (1)..(180): Homolog of NCBI NO: 29293694 NR Description: small GTP binding protein [Oryza sativa (indica
  misc_feature (1)..(182): Homolog of NCBI NO: 1370186 NR Description: RAB7C [Lotus japonicus]
  misc_feature (1)..(182): Homolog of NCBI NO: 34484308 NR Description: putative GTP-binding protein [Cucumis sativus]
  misc_feature (1)..(180): Homolog of NCBI NO: 3914557 NR Description: RAS-RELATED PROTEIN RAB7 (POSSIBLE
  misc_feature (1)..(181): Homolog of NCBI NO: 7438407 NR Description: GTP-binding protein Rab7a - common tobacco
  misc_feature (1)..(182): Homolog of NCBI NO: 3914550 NR Description: RAS-RELATED PROTEIN RAB7
  misc_feature (1)..(182): Homolog of NCBI NO: 1370188 NR Description: RAB7D [Lotus japonicus]
  misc_feature (1)..(182): Homolog of NCBI NO: 7388049 NR Description: Ras-related protein Rab7
  misc_feature (1)..(182): Homolog of NCBI NO: 15233284 NR Description: GTP-binding protein, putative
  misc_feature (1)..(182): Homolog of NCBI NO: 15218194 NR Description: GTP-binding protein, putative
MNQFVNRKFSNQYKATIGADFLTKEVQIDDRIFTLQIWDTAGQERFQSLGVAFYRGADCCVLVYDVNVMKSFDNLNNWREEFLIQASPSDPENFPFVVLGNKTDVDGGKSRVVSEKKAKAWCASKGNIPYFETSAKEGFNVDAAFECITKNAFKNEPEEEPYLPDTIDVAGGQQQRSTGCEC

SEQ ID NO: 28712 - protein, 114 aa, Arabidopsis thaliana
  peptide (1)..(114): Ceres Seq. ID no. 12602548
  misc_feature (1)..(86): Pfam Name: Ras family Pfam Description: Ras family
  misc_feature (1)..(112): Homolog of NCBI NO: 29293694 NR Description: small GTP binding protein [Oryza sativa (indica
  misc_feature (1)..(114): Homolog of NCBI NO: 1370186 NR Description: RAB7C [Lotus japonicus]
  misc_feature (1)..(114): Homolog of NCBI NO: 34484308 NR Description: putative GTP-binding protein [Cucumis sativus]
  misc_feature (1)..(112): Homolog of NCBI NO: 3914557 NR Description: RAS-RELATED PROTEIN RAB7 (POSSIBLE
  misc_feature (1)..(113): Homolog of NCBI NO: 7438407 NR Description: GTP-binding protein Rab7a - common tobacco
  misc_feature (1)..(114): Homolog of NCBI NO: 3914550 NR Description: RAS-RELATED PROTEIN RAB7
  misc_feature (1)..(114): Homolog of NCBI NO: 1370188 NR Description: RAB7D [Lotus japonicus]
  misc_feature (1)..(114): Homolog of NCBI NO: 7388049 NR Description: Ras-related protein Rab7
  misc_feature (1)..(114): Homolog of NCBI NO: 15233284 NR Description: GTP-binding protein, putative
  misc_feature (1)..(114): Homolog of NCBI NO: 15218194 NR Description: GTP-binding protein, putative
MKSFDNLNNWREEFLIQASPSDPENFPFVVLGNKTDVDGGKSRVVSEKKAKAWCASKGNIPYFETSAKEGFNVDAAFECITKNAFKNEPEEEPYLPDTIDVAGGQQQRSTGCEC

SEQ ID NO: 28713 - DNA, 908 bp, Arabidopsis thaliana
  misc_feature (1)..(908): Ceres Seq. ID no. 12332602
  misc_feature: MA Experiment ID: 108435 Result: Down-regulated in Transcription
  misc_feature: MA Experiment 108435 PARAMETER Experiment Name: At_stm_Mutants_cDNA_P Parameter: Plant Line Value: wt Landsburg vs stm
  misc_feature: MA Experiment 108435 PARAMETER Experiment Name: At_stm_Mutants_cDNA_P Parameter: Tissue Value: Shoot Apical Meristem Region
  misc_feature: MA Experiment ID: 108461 Result: Up-regulated in Transcription
  misc_feature: MA Experiment 108461 PARAMETER Experiment Name: At_Germinating_Seeds_cDNA_P Parameter: Age (day) Value: 1 vs. 0
  misc_feature: MA Experiment 108461 PARAMETER Experiment Name: At_Germinating_Seeds_cDNA_P Parameter: Tissue Value: Germinating Seeds
  misc_feature: MA Experiment ID: 108462 Result: Up-regulated in Transcription
  misc_feature: MA Experiment 108462 PARAMETER Experiment Name: At_Germinating_Seeds_cDNA_P Parameter: Age (day) Value: 2 vs. 0
  misc_feature: MA Experiment 108462 PARAMETER Experiment Name: At_Germinating_Seeds_cDNA_P Parameter: Tissue Value: Germinating Seeds
  misc_feature: MA Experiment ID: 108463 Result: Up-regulated in Transcription
  misc_feature: MA Experiment 108463 PARAMETER Experiment Name: At_Germinating_Seeds_cDNA_P Parameter: Age (day) Value: 3 vs. 0
  misc_feature: MA Experiment 108463 PARAMETER Experiment Name: At_Germinating_Seeds_cDNA_P Parameter: Tissue Value: Germinating Seeds
  misc_feature: MA Experiment ID: 108464 Result: Up-regulated in Transcription
  misc_feature: MA Experiment 108464 PARAMETER Experiment Name: At_Germinating_Seeds_cDNA_P Parameter: Age (day) Value: 4 vs. 0
  misc_feature: MA Experiment 108464 PARAMETER Experiment Name: At_Germinating_Seeds_cDNA_P Parameter: Tissue Value: Germinating Seeds
  misc_feature: MA Experiment ID: 108594 Result: Up-regulated in Transcription
  misc_feature: MA Experiment 108594 PARAMETER Experiment Name: At_Ler-rhl_Root_cDNA_P Parameter: Plant Line Value: null
  misc_feature: MA Experiment ID: 20000180 Result: Up-regulated in Transcription
  misc_feature: MA Experiment 20000180 PARAMETER Experiment Name: At_Germinating_Seeds_P Parameter: Age (hr) Value: 24 vs. 0
  misc_feature: MA Experiment 20000180 PARAMETER Experiment Name: At_Germinating_Seeds_P Parameter: Tissue Value: Germinating Seeds
  misc_feature: MA Experiment ID: 20000264 Result: Down-regulated in Transcription
  misc_feature: MA Experiment 20000264 PARAMETER Experiment Name: At_Open_Flower_P Parameter: Age (day) Value: 21
  misc_feature: MA Experiment 20000264 PARAMETER Experiment Name: At_Open_Flower_P Parameter: Plant Line Value: WS
  misc_feature: MA Experiment 20000264 PARAMETER Experiment Name: At_Open_Flower_P Parameter: Tissue Value: Open Flower vs. Whole Plant
  misc_feature: MA Experiment ID: 20000265 Result: Down-regulated in Transcription
  misc_feature: MA Experiment 20000265 PARAMETER Experiment Name: At_Open_Flower_P Parameter: Age (day) Value: 21
  misc_feature: MA Experiment 20000265 PARAMETER Experiment Name: At_Open_Flower_P Parameter: Plant Line Value: WS
  misc_feature: MA Experiment 20000265 PARAMETER Experiment Name: At_Open_Flower_P Parameter: Tissue Value: Closed Flower vs. Whole Plant
agtccgcgaaaaaatggcgtttctctgttcgtctctcccaagttcatcctctatcgccattttcggcgacccaaacacagatggatcatcacgctcgtatctttcgattccttcattgaagttacggttccgtcccgtcgctgcttcctcacacatttgtgctccagcgatcgacaagtcgactttcgtcatatccgaatcggtgtcagaagatgagctttgggctgcagcttgtctccgcgtacgaaccttcaacgaactcaatccttctgcttacaatatccaagatcatagaagatacttggcagagcgtgaattcgaggcgcttaaggagagaacttcagggaagagggaagggtttacgcgggtcgcttgcataaatgctacccttccattgtcgcaattatcaagctcttttgaggatttatgctctgcatgtaagttctctgatggcatagaagacagagttgtggtgggaagccttgatcttaaccaatgtcgttggcttcctgatgaaattgctggaacaaaaccagaggggattggtgtggattttgctagagcatacttgagcaacgtctgtgttgcaaaagagctgcatcgtaatggagttggttacaaacttattgacaagtctaagagagttgctggagaatggggcataacggatatgtacgtgcatgtgacggtagacaatgaagcagcgaagagtctatacatgaaaagtgggtttgagcaagagaccgctgagccagcgtggcaagctcgatacctcaataggccacaacggctcctcctctggctcgcccttcctacctccccaatcatgtccatgtaattgtaaattttccaatatatccaatatgtcaacctgttcttggcaatcaataaaagctttataactctcg

SEQ ID NO: 28714 - protein, 278 aa, Arabidopsis thaliana
  peptide (1)..(278): Ceres Seq. ID no. 12332603
  misc_feature (150)..(245): Pfam Name: Acetyltransferase (GNAT) family Pfam Description: Acetyltransferase (GNAT) family
  misc_feature (106)..(266): Homolog of NCBI NO: 23041456 NR Description: hypothetical protein [Trichodesmium erythraeum
  misc_feature (172)..(276): Homolog of NCBI NO: 16329719 NR Description: unknown protein [Synechocystis sp. PCC 6803]
  misc_feature (62)..(245): Homolog of NCBI NO: 30678254 NR Description: GCN5-related N-acetyltransferase (GNAT) family
  misc_feature (189)..(266): Homolog of NCBI NO: 17232456 NR Description: hypothetical protein [Nostoc sp. PCC 7120]
  misc_feature (182)..(266): Homolog of NCBI NO: 23126552 NR Description: hypothetical protein [Nostoc punctiforme]
  misc_feature (5)..(97): Homolog of NCBI NO: 7486953 NR Description: hypothetical protein T13J8.140 - Arabidopsis
  misc_feature (64)..(270): Homolog of NCBI NO: 28812153 NR Description: B1015H11.33 [Oryza sativa (japonica
  misc_feature (5)..(278): Homolog of NCBI NO: 21536955 NR Description: unknown [Arabidopsis thaliana]
  misc_feature (5)..(278): Homolog of NCBI NO: 18417112 NR Description: putative protein
VREKMAFLCSSLPSSSSIAIFGDPNTDGSSRSYLSIPSLKLRFRPVAASSHICAPAIDKSTFVISESVSEDELWAAACLRVRTFNELNPSAYNIQDHRRYLAEREFEALKERTSGKREGFTRVACINATLPLSQLSSSFEDLCSACKFSDGIEDRVVVGSLDLNQCRWLPDEIAGTKPEGIGVDFARAYLSNVCVAKELHRNGVGYKLIDKSKRVAGEWGITDMYVHVTVDNEAAKSLYMKSGFEQETAEPAWQARYLNRPQRLLLWLALPTSPIMSM

SEQ ID NO: 28715 - protein, 274 aa, Arabidopsis thaliana
  peptide (1)..(274): Ceres Seq. ID no. 12332604
  misc_feature (146)..(241): Pfam Name: Acetyltransferase (GNAT) family Pfam Description: Acetyltransferase (GNAT) family
  misc_feature (102)..(262): Homolog of NCBI NO: 23041456 NR Description: hypothetical protein [Trichodesmium erythraeum
  misc_feature (168)..(272): Homolog of NCBI NO: 16329719 NR Description: unknown protein [Synechocystis sp. PCC 6803]
  misc_feature (58)..(241): Homolog of NCBI NO: 30678254 NR Description: GCN5-related N-acetyltransferase (GNAT) family
  misc_feature (185)..(262): Homolog of NCBI NO: 17232456 NR Description: hypothetical protein [Nostoc sp. PCC 7120]
  misc_feature (178)..(262): Homolog of NCBI NO: 23126552 NR Description: hypothetical protein [Nostoc punctiforme]
  misc_feature (1)..(93): Homolog of NCBI NO: 7486953 NR Description: hypothetical protein T13J8.140 - Arabidopsis
  misc_feature (60)..(266): Homolog of NCBI NO: 28812153 NR Description: B1015H11.33 [Oryza sativa (japonica
  misc_feature (1)..(274): Homolog of NCBI NO: 21536955 NR Description: unknown [Arabidopsis thaliana]
  misc_feature (1)..(274): Homolog of NCBI NO: 18417112 NR Description: putative protein
MAFLCSSLPSSSSIAIFGDPNTDGSSRSYLSIPSLKLRFRPVAASSHICAPAIDKSTFVISESVSEDELWAAACLRVRTFNELNPSAYNIQDHRRYLAEREFEALKERTSGKREGFTRVACINATLPLSQLSSSFEDLCSACKFSDGIEDRVVVGSLDLNQCRWLPDEIAGTKPEGIGVDFARAYLSNVCVAKELHRNGVGYKLIDKSKRVAGEWGITDMYVHVTVDNEAAKSLYMKSGFEQETAEPAWQARYLNRPQRLLLWLALPTSPIMSM

SEQ ID NO: 28716 - DNA, 933 bp, Arabidopsis thaliana
  misc_feature (1)..(933): Ceres Seq. ID no. 13487208
  misc_feature: MA Experiment ID: 108435 Result: Down-regulated in Transcription
  misc_feature: MA Experiment 108435 PARAMETER Experiment Name: At_stm_Mutants_cDNA_P Parameter: Plant Line Value: wt Landsburg vs stm
  misc_feature: MA Experiment 108435 PARAMETER Experiment Name: At_stm_Mutants_cDNA_P Parameter: Tissue Value: Shoot Apical Meristem Region
  misc_feature: MA Experiment ID: 108464 Result: Up-regulated in Transcription
  misc_feature: MA Experiment 108464 PARAMETER Experiment Name: At_Germinating_Seeds_cDNA_P Parameter: Age (day) Value: 4 vs. 0
  misc_feature: MA Experiment 108464 PARAMETER Experiment Name: At_Germinating_Seeds_cDNA_P Parameter: Tissue Value: Germinating Seeds
  misc_feature: MA Experiment ID: 108488 Result: Down-regulated in Transcription
  misc_feature: MA Experiment ID: 108572 Result: Down-regulated in Transcription
  misc_feature: MA Experiment 108572 PARAMETER Experiment Name: At_Drought_cDNA_P Parameter: Timepoint (hr) Value: 1
  misc_feature: MA Experiment 108572 PARAMETER Experiment Name: At_Drought_cDNA_P Parameter: Tissue Value: Aerial
  misc_feature: MA Experiment 108572 PARAMETER Experiment Name: At_Drought_cDNA_P Parameter: Treatment Value: Drought vs. No Drought
  misc_feature: MA Experiment ID: 108573 Result: Down-regulated in Transcription
  misc_feature: MA Experiment 108573 PARAMETER Experiment Name: At_Drought_cDNA_P Parameter: Timepoint (hr) Value: 6
  misc_feature: MA Experiment 108573 PARAMETER Experiment Name: At_Drought_cDNA_P Parameter: Tissue Value: Aerial
  misc_feature: MA Experiment 108573 PARAMETER Experiment Name: At_Drought_cDNA_P Parameter: Treatment Value: Drought vs. No Drought
  misc_feature: MA Experiment ID: 108574 Result: Down-regulated in Transcription
  misc_feature: MA Experiment 108574 PARAMETER Experiment Name: At_Wounding__cDNA_P Parameter: Timepoint (hr) Value: 1
  misc_feature: MA Experiment 108574 PARAMETER Experiment Name: At_Wounding__cDNA_P Parameter: Tissue Value: Aerial
  misc_feature: MA Experiment 108574 PARAMETER Experiment Name: At_Wounding__cDNA_P Parameter: Treatment Value: Wounding vs. No Wounding
  misc_feature: MA Experiment ID: 108576 Result: Down-regulated in Transcription
  misc_feature: MA Experiment 108576 PARAMETER Experiment Name: At_42deg_Heat_cDNA_P Parameter: Temperature (deg C) Value: 42 vs. 22
  misc_feature: MA Experiment 108576 PARAMETER Experiment Name: At_42deg_Heat_cDNA_P Parameter: Timepoint (hr) Value: 1
  misc_feature: MA Experiment 108576 PARAMETER Experiment Name: At_42deg_Heat_cDNA_P Parameter: Tissue Value: Aerial
  misc_feature: MA Experiment ID: 108577 Result: Down-regulated in Transcription
  misc_feature: MA Experiment 108577 PARAMETER Experiment Name: At_42deg_Heat_cDNA_P Parameter: Temperature (deg C) Value: 42 vs. 22
  misc_feature: MA Experiment 108577 PARAMETER Experiment Name: At_42deg_Heat_cDNA_P Parameter: Timepoint (hr) Value: 6
  misc_feature: MA Experiment 108577 PARAMETER Experiment Name: At_42deg_Heat_cDNA_P Parameter: Tissue Value: Aerial
  misc_feature: MA Experiment ID: 108595 Result: Up-regulated in Transcription
  misc_feature: MA Experiment 108595 PARAMETER Experiment Name: At_Ler-pi_Ovule_cDNA_P Parameter: Plant Line Value: null
  misc_feature: MA Experiment ID: 20000069 Result: Up-regulated in Transcription
  misc_feature: MA Experiment 20000069 PARAMETER Experiment Name: At_100uM_ABA_Mutants_cDNA_P Parameter: Plant Line Value: CS23
  misc_feature: MA Experiment 20000069 PARAMETER Experiment Name: At_100uM_ABA_Mutants_cDNA_P Parameter: Timepoint (hr) Value: 6
  misc_feature: MA Experiment 20000069 PARAMETER Experiment Name: At_100uM_ABA_Mutants_cDNA_P Parameter: Tissue Value: Aerial
  misc_feature: MA Experiment 20000069 PARAMETER Experiment Name: At_100uM_ABA_Mutants_cDNA_P Parameter: Treatment Value: 100uM ABA vs. No Treatment
  misc_feature: MA Experiment ID: 20000070 Result: Up-regulated in Transcription
  misc_feature: MA Experiment 20000070 PARAMETER Experiment Name: At_100uM_ABA_Mutants_cDNA_P Parameter: Plant Line Value: CS24
  misc_feature: MA Experiment 20000070 PARAMETER Experiment Name: At_100uM_ABA_Mutants_cDNA_P Parameter: Timepoint (hr) Value: 6
  misc_feature: MA Experiment 20000070 PARAMETER Experiment Name: At_100uM_ABA_Mutants_cDNA_P Parameter: Tissue Value: Aerial
  misc_feature: MA Experiment 20000070 PARAMETER Experiment Name: At_100uM_ABA_Mutants_cDNA_P Parameter: Treatment Value: 100uM ABA vs. No Treatment
  misc_feature: MA Experiment ID: 20000071 Result: Up-regulated in Transcription
  misc_feature: MA Experiment 20000071 PARAMETER Experiment Name: At_100uM_ABA_Mutants_cDNA_P Parameter: Plant Line Value: CS8104
  misc_feature: MA Experiment 20000071 PARAMETER Experiment Name: At_100uM_ABA_Mutants_cDNA_P Parameter: Timepoint (hr) Value: 6
  misc_feature: MA Experiment 20000071 PARAMETER Experiment Name: At_100uM_ABA_Mutants_cDNA_P Parameter: Tissue Value: Aerial
  misc_feature: MA Experiment 20000071 PARAMETER Experiment Name: At_100uM_ABA_Mutants_cDNA_P Parameter: Treatment Value: 100uM ABA vs. No Treatment
  misc_feature: MA Experiment ID: 20000086 Result: Up-regulated in Transcription
  misc_feature: MA Experiment 20000086 PARAMETER Experiment Name: At_100uM_ABA_Mutants_cDNA_P Parameter: Plant Line Value: CS22
  misc_feature: MA Experiment 20000086 PARAMETER Experiment Name: At_100uM_ABA_Mutants_cDNA_P Parameter: Timepoint (hr) Value: 6
  misc_feature: MA Experiment 20000086 PARAMETER Experiment Name: At_100uM_ABA_Mutants_cDNA_P Parameter: Tissue Value: Aerial
  misc_feature: MA Experiment 20000086 PARAMETER Experiment Name: At_100uM_ABA_Mutants_cDNA_P Parameter: Treatment Value: 100uM ABA vs. No Treatment
  misc_feature: MA Experiment ID: 20000087 Result: Up-regulated in Transcription
  misc_feature: MA Experiment 20000087 PARAMETER Experiment Name: At_100uM_ABA_Mutants_cDNA_P Parameter: Plant Line Value: WS
  misc_feature: MA Experiment 20000087 PARAMETER Experiment Name: At_100uM_ABA_Mutants_cDNA_P Parameter: Timepoint (hr) Value: 6
  misc_feature: MA Experiment 20000087 PARAMETER Experiment Name: At_100uM_ABA_Mutants_cDNA_P Parameter: Tissue Value: Aerial
  misc_feature: MA Experiment 20000087 PARAMETER Experiment Name: At_100uM_ABA_Mutants_cDNA_P Parameter: Treatment Value: 100uM ABA vs. No Treatment
  misc_feature: MA Experiment ID: 20000088 Result: Up-regulated in Transcription
  misc_feature: MA Experiment 20000088 PARAMETER Experiment Name: At_100uM_ABA_Mutants_cDNA_P Parameter: Plant Line Value: Landsberg
  misc_feature: MA Experiment 20000088 PARAMETER Experiment Name: At_100uM_ABA_Mutants_cDNA_P Parameter: Timepoint (hr) Value: 6
  misc_feature: MA Experiment 20000088 PARAMETER Experiment Name: At_100uM_ABA_Mutants_cDNA_P Parameter: Tissue Value: Aerial
  misc_feature: MA Experiment 20000088 PARAMETER Experiment Name: At_100uM_ABA_Mutants_cDNA_P Parameter: Treatment Value: 100uM ABA vs. No Treatment
  misc_feature: MA Experiment ID: 20000089 Result: Up-regulated in Transcription
  misc_feature: MA Experiment ID: 20000090 Result: Up-regulated in Transcription
  misc_feature: MA Experiment ID: 20000112 Result: Down-regulated in Transcription
  misc_feature: MA Experiment 20000112 PARAMETER Experiment Name: At_42deg_Heat_cDNA_P Parameter: Temperature (deg C) Value: 42 vs. 22
  misc_feature: MA Experiment 20000112 PARAMETER Experiment Name: At_42deg_Heat_cDNA_P Parameter: Timepoint (hr) Value: 2
  misc_feature: MA Experiment 20000112 PARAMETER Experiment Name: At_42deg_Heat_cDNA_P Parameter: Tissue Value: Aerial
  misc_feature: MA Experiment ID: 20000113 Result: Down-regulated in Transcription
  misc_feature: MA Experiment 20000113 PARAMETER Experiment Name: At_42deg_Heat_cDNA_P Parameter: Temperature (deg C) Value: 42 vs. 22
  misc_feature: MA Experiment 20000113 PARAMETER Experiment Name: At_42deg_Heat_cDNA_P Parameter: Timepoint (hr) Value: 8
  misc_feature: MA Experiment 20000113 PARAMETER Experiment Name: At_42deg_Heat_cDNA_P Parameter: Tissue Value: Aerial
  misc_feature: MA Experiment ID: 20000117 Result: Up-regulated in Transcription
  misc_feature: MA Experiment 20000117 PARAMETER Experiment Name: At_100uM_ABA_Mutants_cDNA_P Parameter: Plant Line Value: Columbia
  misc_feature: MA Experiment 20000117 PARAMETER Experiment Name: At_100uM_ABA_Mutants_cDNA_P Parameter: Timepoint (hr) Value: 6
  misc_feature: MA Experiment 20000117 PARAMETER Experiment Name: At_100uM_ABA_Mutants_cDNA_P Parameter: Tissue Value: Aerial
  misc_feature: MA Experiment 20000117 PARAMETER Experiment Name: At_100uM_ABA_Mutants_cDNA_P Parameter: Treatment Value: 100uM ABA vs. No Treatment
  misc_feature: MA Experiment ID: 20000144 Result: Down-regulated in Transcription
  misc_feature: MA Experiment 20000144 PARAMETER Experiment Name: At_42deg_Heat_cDNA_P Parameter: Temperature (deg C) Value: 42 vs. 22
  misc_feature: MA Experiment 20000144 PARAMETER Experiment Name: At_42deg_Heat_cDNA_P Parameter: Timepoint (hr) Value: 1
  misc_feature: MA Experiment 20000144 PARAMETER Experiment Name: At_42deg_Heat_cDNA_P Parameter: Tissue Value: Aerial
  misc_feature: MA Experiment ID: 20000173 Result: Down-regulated in Transcription
  misc_feature: MA Experiment 20000173 PARAMETER Experiment Name: At_42deg_Heat_P Parameter: Age (day) Value: 14
  misc_feature: MA Experiment 20000173 PARAMETER Experiment Name: At_42deg_Heat_P Parameter: Organism Value: A. thaliana
  misc_feature: MA Experiment 20000173 PARAMETER Experiment Name: At_42deg_Heat_P Parameter: Plant Line Value: WS
  misc_feature: MA Experiment 20000173 PARAMETER Experiment Name: At_42deg_Heat_P Parameter: Temperature (deg C) Value: 42 vs. 22
  misc_feature: MA Experiment 20000173 PARAMETER Experiment Name: At_42deg_Heat_P Parameter: Timepoint (hr) Value: 6
  misc_feature: MA Experiment 20000173 PARAMETER Experiment Name: At_42deg_Heat_P Parameter: Tissue Value: Aerial
  misc_feature: MA Experiment ID: 20000180 Result: Down-regulated in Transcription
  misc_feature: MA Experiment 20000180 PARAMETER Experiment Name: At_Germinating_Seeds_P Parameter: Age (hr) Value: 24 vs. 0
  misc_feature: MA Experiment 20000180 PARAMETER Experiment Name: At_Germinating_Seeds_P Parameter: Tissue Value: Germinating Seeds
  misc_feature: MA Experiment ID: 20000184 Result: Down-regulated in Transcription
  misc_feature: MA Experiment 20000184 PARAMETER Experiment Name: At_Shoots__P Parameter: Age (day) Value: 7
  misc_feature: MA Experiment 20000184 PARAMETER Experiment Name: At_Shoots__P Parameter: Tissue Value: Shoots vs. Whole Plant
  misc_feature: MA Experiment ID: 20000235 Result: Down-regulated in Transcription
  misc_feature: MA Experiment 20000235 PARAMETER Experiment Name: At_Siliques_P Parameter: Age (day) Value: 21
  misc_feature: MA Experiment 20000235 PARAMETER Experiment Name: At_Siliques_P Parameter: Organism Value: A. thaliana
  misc_feature: MA Experiment 20000235 PARAMETER Experiment Name: At_Siliques_P Parameter: Plant Line Value: WS
  misc_feature: MA Experiment 20000235 PARAMETER Experiment Name: At_Siliques_P Parameter: Tissue Value: 5-10mm Siliques vs. Whole Plant
  misc_feature: MA Experiment ID: 20000443 Result: Down-regulated in Transcription
  misc_feature: MA Experiment 20000443 PARAMETER Experiment Name: At_1uM_BR-BRZ__P Parameter: Tissue Value: Shoot Apices
  misc_feature: MA Experiment 20000443 PARAMETER Experiment Name: At_1uM_BR-BRZ__P Parameter: Treatment Value: 1uM BRZ vs. No Treatment
  misc_feature: MA Experiment ID: 20001248 Result: Up-regulated in Transcription
  misc_feature: MA Experiment 20001248 PARAMETER Experiment Name: At_Far-red-induction_P Parameter: Age (day) Value: 7
  misc_feature: MA Experiment 20001248 PARAMETER Experiment Name: At_Far-red-induction_P Parameter: Light Value: Far-red vs. White
  misc_feature: MA Experiment 20001248 PARAMETER Experiment Name: At_Far-red-induction_P Parameter: Organism Value: A. thaliana
  misc_feature: MA Experiment 20001248 PARAMETER Experiment Name: At_Far-red-induction_P Parameter: Plant Line Value: Columbia
  misc_feature: MA Experiment 20001248 PARAMETER Experiment Name: At_Far-red-induction_P Parameter: Timepoint (hr) Value: 4
  misc_feature: MA Experiment 20001248 PARAMETER Experiment Name: At_Far-red-induction_P Parameter: Tissue Value: Whole Plant
  misc_feature: MA Experiment ID: 20001450 Result: Up-regulated in Transcription
  misc_feature: MA Experiment 20001450 PARAMETER Experiment Name: At_Far-red-induction_P Parameter: Age (day) Value: 7
  misc_feature: MA Experiment 20001450 PARAMETER Experiment Name: At_Far-red-induction_P Parameter: Light Value: Far-red vs. White
  misc_feature: MA Experiment 20001450 PARAMETER Experiment Name: At_Far-red-induction_P Parameter: Organism Value: A. thaliana
  misc_feature: MA Experiment 20001450 PARAMETER Experiment Name: At_Far-red-induction_P Parameter: Plant Line Value: Columbia
  misc_feature: MA Experiment 20001450 PARAMETER Experiment Name: At_Far-red-induction_P Parameter: Timepoint (hr) Value: 8
  misc_feature: MA Experiment 20001450 PARAMETER Experiment Name: At_Far-red-induction_P Parameter: Tissue Value: Whole Plant
  misc_feature: MA Experiment ID: 20001451 Result: Up-regulated in Transcription
  misc_feature: MA Experiment 20001451 PARAMETER Experiment Name: At_Far-red-induction_P Parameter: Age (day) Value: 7
  misc_feature: MA Experiment 20001451 PARAMETER Experiment Name: At_Far-red-induction_P Parameter: Light Value: Far-red vs. White
  misc_feature: MA Experiment 20001451 PARAMETER Experiment Name: At_Far-red-induction_P Parameter: Organism Value: A. thaliana
  misc_feature: MA Experiment 20001451 PARAMETER Experiment Name: At_Far-red-induction_P Parameter: Plant Line Value: Columbia
  misc_feature: MA Experiment 20001451 PARAMETER Experiment Name: At_Far-red-induction_P Parameter: Timepoint (hr) Value: 24
  misc_feature: MA Experiment 20001451 PARAMETER Experiment Name: At_Far-red-induction_P Parameter: Tissue Value: Whole Plant
  misc_feature: MA Experiment ID: 20001560 Result: Down-regulated in Transcription
  misc_feature: MA Experiment 20001560 PARAMETER Experiment Name: At_Drought_Soil_Dry_P Parameter: Age (day) Value: 28
  misc_feature: MA Experiment 20001560 PARAMETER Experiment Name: At_Drought_Soil_Dry_P Parameter: Organism Value: A. thaliana
  misc_feature: MA Experiment 20001560 PARAMETER Experiment Name: At_Drought_Soil_Dry_P Parameter: Plant Line Value: WS
  misc_feature: MA Experiment 20001560 PARAMETER Experiment Name: At_Drought_Soil_Dry_P Parameter: Post Timepoint (hr) Value: None
  misc_feature: MA Experiment 20001560 PARAMETER Experiment Name: At_Drought_Soil_Dry_P Parameter: Post-Treatment Value: None
  misc_feature: MA Experiment 20001560 PARAMETER Experiment Name: At_Drought_Soil_Dry_P Parameter: Timepoint (day) Value: 14
  misc_feature: MA Experiment 20001560 PARAMETER Experiment Name: At_Drought_Soil_Dry_P Parameter: Treatment Value: Drought vs. No Drought
  misc_feature: MA Experiment ID: 20001905 Result: Down-regulated in Transcription
  misc_feature: MA Experiment 20001905 PARAMETER Experiment Name: At_Drought_Reproduction_P Parameter: Age (day) Value: 40
  misc_feature: MA Experiment 20001905 PARAMETER Experiment Name: At_Drought_Reproduction_P Parameter: Organism Value: A. thaliana
  misc_feature: MA Experiment 20001905 PARAMETER Experiment Name: At_Drought_Reproduction_P Parameter: Plant Line Value: WS
  misc_feature: MA Experiment 20001905 PARAMETER Experiment Name: At_Drought_Reproduction_P Parameter: Timepoint (day) Value: 10
  misc_feature: MA Experiment 20001905 PARAMETER Experiment Name: At_Drought_Reproduction_P Parameter: Tissue Value: Rosettes
  misc_feature: MA Experiment 20001905 PARAMETER Experiment Name: At_Drought_Reproduction_P Parameter: Treatment Value: Drought vs. No Drought
aacatttcgtgcgaaatttcaatttttttgcaatatcctttattgattgaccgaagatattttacaagcctttctccactaagcccttctctcttcttctcttggcctctcacttgaatctcccacaaagcgatcaatcacaaattccttcttctctctctctcttttcgtccctaagaatcaattatgaaaggagctaaatcaaagactgaaaccaggagctccaagctctctgtgaccaagaagccggctaaaggagcagggcgtggcaaagctgctgctaaggaccccaacaaaccaaagaggccagccagtgctttcttcgttttcatggaagatttccgtgagactttcaagaaggaaaaccccaagaacaagtctgtagctactgttggaaaagctgctggagacaagtggaagtccttgtctgattctgagaaagctccttatgttgctaaggctgagaaacgcaaggttgaatatgagaagaacattaaagcttacaacaagaaactggaggaaggtccaaaagaagatgaggaatctgacaagtcagtgtcagaggtcaatgacgaggatgatgctgaggatggtagtgaagaggaggaggacgatgactaagaagctgaatgttggtagcattagtatagatggctgcaaaaatctctctgtttttatctttacttgaaatgttaacggggctgattaaaatgggtctttctttttatctttttatatttccacaatctctcactaaagccctctgaatggagaaagtgaattgtagaatgtttagatggtgaaagagagacttgcagctctgtactctttgctttataaaacgatttagttttcttttctcagtttattatattgttgaattgatgatgatgttagctaaatctctttgtactttgtaaaagaaatggtccc

SEQ ID NO: 28717 - protein, 144 aa, Arabidopsis thaliana
  peptide (1)..(144): Ceres Seq. ID no. 13487209
  misc_feature (38)..(107): Pfam Name: HMG (high mobility group) box Pfam Description: HMG (high mobility group) box
  misc_feature (1)..(144): Homolog of NCBI NO: 18394900 NR Description: expressed protein [Arabidopsis thaliana]
  misc_feature (1)..(144): Homolog of NCBI NO: 25402921 NR Description: protein F2D10.18 [imported] - Arabidopsis
  misc_feature (1)..(139): Homolog of NCBI NO: 25402921 NR Description: protein F2D10.18 [imported] - Arabidopsis
  misc_feature (1)..(144): Homolog of NCBI NO: 18394898 NR Description: expressed protein [Arabidopsis thaliana]
MKGAKSKTETRSSKLSVTKKPAKGAGRGKAAAKDPNKPKRPASAFFVFMEDFRETFKKENPKNKSVATVGKAAGDKWKSLSDSEKAPYVAKAEKRKVEYEKNIKAYNKKLEEGPKEDEESDKSVSEVNDEDDAEDGSEEEEDDD

SEQ ID NO: 28718 - protein, 96 aa, Arabidopsis thaliana
  peptide (1)..(96): Ceres Seq. ID no. 13487210
  misc_feature (1)..(59): Pfam Name: HMG (high mobility group) box Pfam Description: HMG (high mobility group) box
  misc_feature (1)..(96): Homolog of NCBI NO: 18394900 NR Description: expressed protein [Arabidopsis thaliana]
  misc_feature (1)..(96): Homolog of NCBI NO: 25402921 NR Description: protein F2D10.18 [imported] - Arabidopsis
  misc_feature (1)..(91): Homolog of NCBI NO: 25402921 NR Description: protein F2D10.18 [imported] - Arabidopsis
  misc_feature (1)..(96): Homolog of NCBI NO: 18394898 NR Description: expressed protein [Arabidopsis thaliana]
MEDFRETFKKENPKNKSVATVGKAAGDKWKSLSDSEKAPYVAKAEKRKVEYEKNIKAYNKKLEEGPKEDEESDKSVSEVNDEDDAEDGSEEEEDDD

SEQ ID NO: 28719 - protein, 79 aa, Arabidopsis thaliana
  peptide (1)..(79): Ceres Seq. ID no. 13487211
MLLRLRNARLNMRRTLKLTTRNWRKVQKKMRNLTSQCQRSMTRMMLRMVVKRRRTMTKKLNVGSISIDGCKNLSVFIFT

SEQ ID NO: 28720 - DNA, 651 bp, Arabidopsis thaliana
  misc_feature (1)..(651): Ceres Seq. ID no. 12776716
  misc_feature: MA Experiment ID: 108461 Result: Up-regulated in Transcription
  misc_feature: MA Experiment 108461 PARAMETER Experiment Name: At_Germinating_Seeds_cDNA_P Parameter: Age (day) Value: 1 vs. 0
  misc_feature: MA Experiment 108461 PARAMETER Experiment Name: At_Germinating_Seeds_cDNA_P Parameter: Tissue Value: Germinating Seeds
  misc_feature: MA Experiment ID: 108462 Result: Up-regulated in Transcription
  misc_feature: MA Experiment 108462 PARAMETER Experiment Name: At_Germinating_Seeds_cDNA_P Parameter: Age (day) Value: 2 vs. 0
  misc_feature: MA Experiment 108462 PARAMETER Experiment Name: At_Germinating_Seeds_cDNA_P Parameter: Tissue Value: Germinating Seeds
  misc_feature: MA Experiment ID: 108464 Result: Up-regulated in Transcription
  misc_feature: MA Experiment 108464 PARAMETER Experiment Name: At_Germinating_Seeds_cDNA_P Parameter: Age (day) Value: 4 vs. 0
  misc_feature: MA Experiment 108464 PARAMETER Experiment Name: At_Germinating_Seeds_cDNA_P Parameter: Tissue Value: Germinating Seeds
  misc_feature: MA Experiment ID: 108561 Result: Down-regulated in Transcription
  misc_feature: MA Experiment 108561 PARAMETER Experiment Name: At_100uM_ABA_cDNA_P Parameter: Timepoint (hr) Value: 6
  misc_feature: MA Experiment 108561 PARAMETER Experiment Name: At_100uM_ABA_cDNA_P Parameter: Tissue Value: Aerial
  misc_feature: MA Experiment 108561 PARAMETER Experiment Name: At_100uM_ABA_cDNA_P Parameter: Treatment Value: 100uM ABA vs. No Treatment
  misc_feature: MA Experiment ID: 108572 Result: Down-regulated in Transcription
  misc_feature: MA Experiment 108572 PARAMETER Experiment Name: At_Drought_cDNA_P Parameter: Timepoint (hr) Value: 1
  misc_feature: MA Experiment 108572 PARAMETER Experiment Name: At_Drought_cDNA_P Parameter: Tissue Value: Aerial
  misc_feature: MA Experiment 108572 PARAMETER Experiment Name: At_Drought_cDNA_P Parameter: Treatment Value: Drought vs. No Drought
  misc_feature: MA Experiment ID: 108573 Result: Down-regulated in Transcription
  misc_feature: MA Experiment 108573 PARAMETER Experiment Name: At_Drought_cDNA_P Parameter: Timepoint (hr) Value: 6
  misc_feature: MA Experiment 108573 PARAMETER Experiment Name: At_Drought_cDNA_P Parameter: Tissue Value: Aerial
  misc_feature: MA Experiment 108573 PARAMETER Experiment Name: At_Drought_cDNA_P Parameter: Treatment Value: Drought vs. No Drought
  misc_feature: MA Experiment ID: 108585 Result: Down-regulated in Transcription
  misc_feature: MA Experiment 108585 PARAMETER Experiment Name: At_5mM_NaNP_cDNA_P Parameter: Timepoint (hr) Value: 6
  misc_feature: MA Experiment 108585 PARAMETER Experiment Name: At_5mM_NaNP_cDNA_P Parameter: Tissue Value: Aerial
  misc_feature: MA Experiment 108585 PARAMETER Experiment Name: At_5mM_NaNP_cDNA_P Parameter: Treatment Value: null
  misc_feature: MA Experiment ID: 108668 Result: Down-regulated in Transcription
  misc_feature: MA Experiment 108668 PARAMETER Experiment Name: At_2mM_SA_cDNA_P Parameter: Plant Line Value: WS
  misc_feature: MA Experiment 108668 PARAMETER Experiment Name: At_2mM_SA_cDNA_P Parameter: Timepoint (hr) Value: 6
  misc_feature: MA Experiment 108668 PARAMETER Experiment Name: At_2mM_SA_cDNA_P Parameter: Treatment Value: 2mM SA vs. No Treatment
  misc_feature: MA Experiment ID: 20000070 Result: Down-regulated in Transcription
  misc_feature: MA Experiment 20000070 PARAMETER Experiment Name: At_100uM_ABA_Mutants_cDNA_P Parameter: Plant Line Value: CS24
  misc_feature: MA Experiment 20000070 PARAMETER Experiment Name: At_100uM_ABA_Mutants_cDNA_P Parameter: Timepoint (hr) Value: 6
  misc_feature: MA Experiment 20000070 PARAMETER Experiment Name: At_100uM_ABA_Mutants_cDNA_P Parameter: Tissue Value: Aerial
  misc_feature: MA Experiment 20000070 PARAMETER Experiment Name: At_100uM_ABA_Mutants_cDNA_P Parameter: Treatment Value: 100uM ABA vs. No Treatment
  misc_feature: MA Experiment ID: 20000071 Result: Down-regulated in Transcription
  misc_feature: MA Experiment 20000071 PARAMETER Experiment Name: At_100uM_ABA_Mutants_cDNA_P Parameter: Plant Line Value: CS8104
  misc_feature: MA Experiment 20000071 PARAMETER Experiment Name: At_100uM_ABA_Mutants_cDNA_P Parameter: Timepoint (hr) Value: 6
  misc_feature: MA Experiment 20000071 PARAMETER Experiment Name: At_100uM_ABA_Mutants_cDNA_P Parameter: Tissue Value: Aerial
  misc_feature: MA Experiment 20000071 PARAMETER Experiment Name: At_100uM_ABA_Mutants_cDNA_P Parameter: Treatment Value: 100uM ABA vs. No Treatment
  misc_feature: MA Experiment ID: 20000072 Result: Down-regulated in Transcription
  misc_feature: MA Experiment 20000072 PARAMETER Experiment Name: At_100uM_ABA_Mutants_cDNA_P Parameter: Plant Line Value: CS8105
  misc_feature: MA Experiment 20000072 PARAMETER Experiment Name: At_100uM_ABA_Mutants_cDNA_P Parameter: Timepoint (hr) Value: 6
  misc_feature: MA Experiment 20000072 PARAMETER Experiment Name: At_100uM_ABA_Mutants_cDNA_P Parameter: Tissue Value: Aerial
  misc_feature: MA Experiment 20000072 PARAMETER Experiment Name: At_100uM_ABA_Mutants_cDNA_P Parameter: Treatment Value: 100uM ABA vs. No Treatment
  misc_feature: MA Experiment ID: 20000087 Result: Down-regulated in Transcription
  misc_feature: MA Experiment 20000087 PARAMETER Experiment Name: At_100uM_ABA_Mutants_cDNA_P Parameter: Plant Line Value: WS
  misc_feature: MA Experiment 20000087 PARAMETER Experiment Name: At_100uM_ABA_Mutants_cDNA_P Parameter: Timepoint (hr) Value: 6
  misc_feature: MA Experiment 20000087 PARAMETER Experiment Name: At_100uM_ABA_Mutants_cDNA_P Parameter: Tissue Value: Aerial
  misc_feature: MA Experiment 20000087 PARAMETER Experiment Name: At_100uM_ABA_Mutants_cDNA_P Parameter: Treatment Value: 100uM ABA vs. No Treatment
  misc_feature: MA Experiment ID: 20000088 Result: Down-regulated in Transcription
  misc_feature: MA Experiment 20000088 PARAMETER Experiment Name: At_100uM_ABA_Mutants_cDNA_P Parameter: Plant Line Value: Landsberg
  misc_feature: MA Experiment 20000088 PARAMETER Experiment Name: At_100uM_ABA_Mutants_cDNA_P Parameter: Timepoint (hr) Value: 6
  misc_feature: MA Experiment 20000088 PARAMETER Experiment Name: At_100uM_ABA_Mutants_cDNA_P Parameter: Tissue Value: Aerial
  misc_feature: MA Experiment 20000088 PARAMETER Experiment Name: At_100uM_ABA_Mutants_cDNA_P Parameter: Treatment Value: 100uM ABA vs. No Treatment
  misc_feature: MA Experiment ID: 20000090 Result: Down-regulated in Transcription
  misc_feature: MA Experiment ID: 20000117 Result: Down-regulated in Transcription
  misc_feature: MA Experiment 20000117 PARAMETER Experiment Name: At_100uM_ABA_Mutants_cDNA_P Parameter: Plant Line Value: Columbia
  misc_feature: MA Experiment 20000117 PARAMETER Experiment Name: At_100uM_ABA_Mutants_cDNA_P Parameter: Timepoint (hr) Value: 6
  misc_feature: MA Experiment 20000117 PARAMETER Experiment Name: At_100uM_ABA_Mutants_cDNA_P Parameter: Tissue Value: Aerial
  misc_feature: MA Experiment 20000117 PARAMETER Experiment Name: At_100uM_ABA_Mutants_cDNA_P Parameter: Treatment Value: 100uM ABA vs. No Treatment
  misc_feature: MA Experiment ID: 20000179 Result: Up-regulated in Transcription
  misc_feature: MA Experiment 20000179 PARAMETER Experiment Name: At_Germinating_Seeds_P Parameter: Age (hr) Value: 6 vs. 0
  misc_feature: MA Experiment 20000179 PARAMETER Experiment Name: At_Germinating_Seeds_P Parameter: Tissue Value: Germinating Seeds
  misc_feature: MA Experiment ID: 20000180 Result: Up-regulated in Transcription
  misc_feature: MA Experiment 20000180 PARAMETER Experiment Name: At_Germinating_Seeds_P Parameter: Age (hr) Value: 24 vs. 0
  misc_feature: MA Experiment 20000180 PARAMETER Experiment Name: At_Germinating_Seeds_P Parameter: Tissue Value: Germinating Seeds
  misc_feature: MA Experiment ID: 20000182 Result: Down-regulated in Transcription
  misc_feature: MA Experiment 20000182 PARAMETER Experiment Name: At_2mM_SA_P Parameter: Age (day) Value: 14
  misc_feature: MA Experiment 20000182 PARAMETER Experiment Name: At_2mM_SA_P Parameter: Organism Value: A. thaliana
  misc_feature: MA Experiment 20000182 PARAMETER Experiment Name: At_2mM_SA_P Parameter: Plant Line Value: WS
  misc_feature: MA Experiment 20000182 PARAMETER Experiment Name: At_2mM_SA_P Parameter: Timepoint (hr) Value: 6
  misc_feature: MA Experiment 20000182 PARAMETER Experiment Name: At_2mM_SA_P Parameter: Tissue Value: Aerial
  misc_feature: MA Experiment 20000182 PARAMETER Experiment Name: At_2mM_SA_P Parameter: Treatment Value: 2mM SA vs. No Treatment
  misc_feature: MA Experiment ID: 20000184 Result: Up-regulated in Transcription
  misc_feature: MA Experiment 20000184 PARAMETER Experiment Name: At_Shoots__P Parameter: Age (day) Value: 7
  misc_feature: MA Experiment 20000184 PARAMETER Experiment Name: At_Shoots__P Parameter: Tissue Value: Shoots vs. Whole Plant
  misc_feature: MA Experiment ID: 20000185 Result: Down-regulated in Transcription
  misc_feature: MA Experiment 20000185 PARAMETER Experiment Name: At_Roots__P Parameter: Age (day) Value: 7 vs. 21
  misc_feature: MA Experiment 20000185 PARAMETER Experiment Name: At_Roots__P Parameter: Organism Value: A. thaliana
  misc_feature: MA Experiment 20000185 PARAMETER Experiment Name: At_Roots__P Parameter: Tissue Value: Roots vs. Whole Plant
  misc_feature: MA Experiment ID: 20000227 Result: Up-regulated in Transcription
  misc_feature: MA Experiment 20000227 PARAMETER Experiment Name: At_Root-Tips-vs-Tops_P Parameter: Tissue Value: Root Tips vs. Root Tops
  misc_feature: MA Experiment ID: 20000437 Result: Down-regulated in Transcription
  misc_feature: MA Experiment 20000437 PARAMETER Experiment Name: At_Drought_P Parameter: Age (day) Value: 8
  misc_feature: MA Experiment 20000437 PARAMETER Experiment Name: At_Drought_P Parameter: Organism Value: A. thaliana
  misc_feature: MA Experiment 20000437 PARAMETER Experiment Name: At_Drought_P Parameter: Plant Line Value: WS
  misc_feature: MA Experiment 20000437 PARAMETER Experiment Name: At_Drought_P Parameter: Timepoint (hr) Value: 24
  misc_feature: MA Experiment 20000437 PARAMETER Experiment Name: At_Drought_P Parameter: Tissue Value: Whole Plant
  misc_feature: MA Experiment 20000437 PARAMETER Experiment Name: At_Drought_P Parameter: Treatment Value: Drought vs. No Drought
  misc_feature: MA Experiment ID: 20000439 Result: Down-regulated in Transcription
  misc_feature: MA Experiment 20000439 PARAMETER Experiment Name: At_Roots__P Parameter: Age (day) Value: 14 vs. 21
  misc_feature: MA Experiment 20000439 PARAMETER Experiment Name: At_Roots__P Parameter: Organism Value: A. thaliana
  misc_feature: MA Experiment 20000439 PARAMETER Experiment Name: At_Roots__P Parameter: Tissue Value: Roots vs. Whole Plant
  misc_feature: MA Experiment ID: 20000794 Result: Down-regulated in Transcription
  misc_feature: MA Experiment 20000794 PARAMETER Experiment Name: At_Petals_P Parameter: Age (day) Value: 23-25 days
  misc_feature: MA Experiment 20000794 PARAMETER Experiment Name: At_Petals_P Parameter: Plant Line Value: WS
  misc_feature: MA Experiment 20000794 PARAMETER Experiment Name: At_Petals_P Parameter: Tissue Value: Petals vs. Whole plant
  misc_feature: MA Experiment ID: 20001248 Result: Down-regulated in Transcription
  misc_feature: MA Experiment 20001248 PARAMETER Experiment Name: At_Far-red-induction_P Parameter: Age (day) Value: 7
  misc_feature: MA Experiment 20001248 PARAMETER Experiment Name: At_Far-red-induction_P Parameter: Light Value: Far-red vs. White
  misc_feature: MA Experiment 20001248 PARAMETER Experiment Name: At_Far-red-induction_P Parameter: Organism Value: A. thaliana
  misc_feature: MA Experiment 20001248 PARAMETER Experiment Name: At_Far-red-induction_P Parameter: Plant Line Value: Columbia
  misc_feature: MA Experiment 20001248 PARAMETER Experiment Name: At_Far-red-induction_P Parameter: Timepoint (hr) Value: 4
  misc_feature: MA Experiment 20001248 PARAMETER Experiment Name: At_Far-red-induction_P Parameter: Tissue Value: Whole Plant
  misc_feature: MA Experiment ID: 20001558 Result: Up-regulated in Transcription
  misc_feature: MA Experiment 20001558 PARAMETER Experiment Name: At_Drought_Soil_Dry_P Parameter: Age (day) Value: 27
  misc_feature: MA Experiment 20001558 PARAMETER Experiment Name: At_Drought_Soil_Dry_P Parameter: Organism Value: A. thaliana
  misc_feature: MA Experiment 20001558 PARAMETER Experiment Name: At_Drought_Soil_Dry_P Parameter: Plant Line Value: WS
  misc_feature: MA Experiment 20001558 PARAMETER Experiment Name: At_Drought_Soil_Dry_P Parameter: Post Timepoint (hr) Value: 6
  misc_feature: MA Experiment 20001558 PARAMETER Experiment Name: At_Drought_Soil_Dry_P Parameter: Post-Treatment Value: Re-Water vs. No Drought
  misc_feature: MA Experiment 20001558 PARAMETER Experiment Name: At_Drought_Soil_Dry_P Parameter: Timepoint (day) Value: 13
  misc_feature: MA Experiment 20001558 PARAMETER Experiment Name: At_Drought_Soil_Dry_P Parameter: Treatment Value: Drought vs. No Drought
  misc_feature: MA Experiment ID: 20001560 Result: Up-regulated in Transcription
  misc_feature: MA Experiment 20001560 PARAMETER Experiment Name: At_Drought_Soil_Dry_P Parameter: Age (day) Value: 28
  misc_feature: MA Experiment 20001560 PARAMETER Experiment Name: At_Drought_Soil_Dry_P Parameter: Organism Value: A. thaliana
  misc_feature: MA Experiment 20001560 PARAMETER Experiment Name: At_Drought_Soil_Dry_P Parameter: Plant Line Value: WS
  misc_feature: MA Experiment 20001560 PARAMETER Experiment Name: At_Drought_Soil_Dry_P Parameter: Post Timepoint (hr) Value: None
  misc_feature: MA Experiment 20001560 PARAMETER Experiment Name: At_Drought_Soil_Dry_P Parameter: Post-Treatment Value: None
  misc_feature: MA Experiment 20001560 PARAMETER Experiment Name: At_Drought_Soil_Dry_P Parameter: Timepoint (day) Value: 14
  misc_feature: MA Experiment 20001560 PARAMETER Experiment Name: At_Drought_Soil_Dry_P Parameter: Treatment Value: Drought vs. No Drought
  misc_feature: MA Experiment ID: 20001906 Result: Down-regulated in Transcription
  misc_feature: MA Experiment 20001906 PARAMETER Experiment Name: At_Drought_Reproduction_P Parameter: Age (day) Value: 35
  misc_feature: MA Experiment 20001906 PARAMETER Experiment Name: At_Drought_Reproduction_P Parameter: Organism Value: A. thaliana
  misc_feature: MA Experiment 20001906 PARAMETER Experiment Name: At_Drought_Reproduction_P Parameter: Plant Line Value: WS
  misc_feature: MA Experiment 20001906 PARAMETER Experiment Name: At_Drought_Reproduction_P Parameter: Timepoint (day) Value: 5
  misc_feature: MA Experiment 20001906 PARAMETER Experiment Name: At_Drought_Reproduction_P Parameter: Tissue Value: Siliques
  misc_feature: MA Experiment 20001906 PARAMETER Experiment Name: At_Drought_Reproduction_P Parameter: Treatment Value: Drought vs. No Drought
  misc_feature: MA Experiment ID: 20001908 Result: Down-regulated in Transcription
  misc_feature: MA Experiment 20001908 PARAMETER Experiment Name: At_Drought_Reproduction_P Parameter: Age (day) Value: 40
  misc_feature: MA Experiment 20001908 PARAMETER Experiment Name: At_Drought_Reproduction_P Parameter: Organism Value: A. thaliana
  misc_feature: MA Experiment 20001908 PARAMETER Experiment Name: At_Drought_Reproduction_P Parameter: Plant Line Value: WS
  misc_feature: MA Experiment 20001908 PARAMETER Experiment Name: At_Drought_Reproduction_P Parameter: Timepoint (day) Value: 10
  misc_feature: MA Experiment 20001908 PARAMETER Experiment Name: At_Drought_Reproduction_P Parameter: Tissue Value: Siliques
  misc_feature: MA Experiment 20001908 PARAMETER Experiment Name: At_Drought_Reproduction_P Parameter: Treatment Value: Drought vs. No Drought
aaaccgaccggtttaactcccaagagctacttggagttgtcgtaaacacagagatcacaaacttaccaaattttcacacaccgacatgtctagatccttagctctcgtttacttatccttactttgtcttcaaacccatctctcaatctccgtcacagttccgattccgtcggtaaacggcgaaatcgacgcaatgctgaaccggaacggcgtaatcggagaggaataaggagaggagatgatgccatcggagataagtcggagagtaatgatgatgcggaaacagtacataagctacgaaactttaaggagagatatggttccttgtcagaaaccaggtgcttcttattacgcttgtcgctctggtcaggctaatgcttacaacagaggatgtagtgtcattactaggtgtgctagagacactaacgacatcaagacttgaaaacattggggtctttaagtacatttgagttttaaactcagatgctctagaggcaagtgaaatcttattattcttgtcttttgttttgtaatgttgttgtttacattagatttcttaattattgatatgtaattttggctattaatgttcaagtaattgatatttatagtcttgaaagtgttgagtggagtaatagatggaagattgtg

SEQ ID NO: 28721 - protein, 67 aa, Arabidopsis thaliana
  peptide (1)..(67): Ceres Seq. ID no. 12776717
  misc_feature (1)..(60): Pfam Name: Rapid ALkalinization Factor (RALF) Pfam Description: Rapid ALkalinization Factor (RALF)
  misc_feature (1)..(58): Homolog of NCBI NO: 28628205 NR Description: rapid alkalinization factor 2 precursor
  misc_feature (1)..(63): Homolog of NCBI NO: 30685837 NR Description: expressed protein [Arabidopsis thaliana]
  misc_feature (1)..(58): Homolog of NCBI NO: 15218637 NR Description: hypothetical protein; protein id: At1g02900.1
  misc_feature (1)..(60): Homolog of NCBI NO: 18397246 NR Description: expressed protein
  misc_feature (1)..(60): Homolog of NCBI NO: 18414528 NR Description: Expressed protein
  misc_feature (1)..(60): Homolog of NCBI NO: 18401177 NR Description: expressed protein
  misc_feature (1)..(16): Homolog of NCBI NO: 7459901 NR Description: hypothetical protein DL3015C - Arabidopsis
  misc_feature (1)..(67): Homolog of NCBI NO: 18414108 NR Description: expressed protein
  misc_feature (1)..(67): Homolog of NCBI NO: 21553907 NR Description: unknown [Arabidopsis thaliana]
  misc_feature (1)..(67): Homolog of NCBI NO: 18403901 NR Description: Expressed protein
MMPSEISRRVMMMRKQYISYETLRRDMVPCQKPGASYYACRSGQANAYNRGCSVITRCARDTNDIKT

SEQ ID NO: 28722 - protein, 66 aa, Arabidopsis thaliana
  peptide (1)..(66): Ceres Seq. ID no. 12776718
  misc_feature (1)..(59): Pfam Name: Rapid ALkalinization Factor (RALF) Pfam Description: Rapid ALkalinization Factor (RALF)
  misc_feature (1)..(57): Homolog of NCBI NO: 28628205 NR Description: rapid alkalinization factor 2 precursor
  misc_feature (1)..(62): Homolog of NCBI NO: 30685837 NR Description: expressed protein [Arabidopsis thaliana]
  misc_feature (1)..(57): Homolog of NCBI NO: 15218637 NR Description: hypothetical protein; protein id: At1g02900.1
  misc_feature (1)..(59): Homolog of NCBI NO: 18397246 NR Description: expressed protein
  misc_feature (1)..(59): Homolog of NCBI NO: 18414528 NR Description: Expressed protein
  misc_feature (1)..(59): Homolog of NCBI NO: 18401177 NR Description: expressed protein
  misc_feature (1)..(15): Homolog of NCBI NO: 7459901 NR Description: hypothetical protein DL3015C - Arabidopsis
  misc_feature (1)..(66): Homolog of NCBI NO: 18414108 NR Description: expressed protein
  misc_feature (1)..(66): Homolog of NCBI NO: 21553907 NR Description: unknown [Arabidopsis thaliana]
  misc_feature (1)..(66): Homolog of NCBI NO: 18403901 NR Description: Expressed protein
MPSEISRRVMMMRKQYISYETLRRDMVPCQKPGASYYACRSGQANAYNRGCSVITRCARDTNDIKT

SEQ ID NO: 28723 - protein, 57 aa, Arabidopsis thaliana
  peptide (1)..(57): Ceres Seq. ID no. 12776719
  misc_feature (1)..(50): Pfam Name: Rapid ALkalinization Factor (RALF) Pfam Description: Rapid ALkalinization Factor (RALF)
  misc_feature (1)..(48): Homolog of NCBI NO: 34902918 NR Description: unnamed protein product [Oryza sativa (japonica
  misc_feature (1)..(48): Homolog of NCBI NO: 28628205 NR Description: rapid alkalinization factor 2 precursor
  misc_feature (1)..(53): Homolog of NCBI NO: 30685837 NR Description: expressed protein [Arabidopsis thaliana]
  misc_feature (1)..(48): Homolog of NCBI NO: 15218637 NR Description: hypothetical protein; protein id: At1g02900.1
  misc_feature (1)..(50): Homolog of NCBI NO: 18397246 NR Description: expressed protein
  misc_feature (1)..(50): Homolog of NCBI NO: 18414528 NR Description: Expressed protein
  misc_feature (1)..(50): Homolog of NCBI NO: 18401177 NR Description: expressed protein
  misc_feature (1)..(57): Homolog of NCBI NO: 18414108 NR Description: expressed protein
  misc_feature (1)..(57): Homolog of NCBI NO: 21553907 NR Description: unknown [Arabidopsis thaliana]
  misc_feature (1)..(57): Homolog of NCBI NO: 18403901 NR Description: Expressed protein
MMMRKQYISYETLRRDMVPCQKPGASYYACRSGQANAYNRGCSVITRCARDTNDIKT

SEQ ID NO: 28724 - DNA, 515 bp, Arabidopsis thaliana
  misc_feature (1)..(515): Ceres Seq. ID no. 12331831
  misc_feature: MA Experiment ID: 108434 Result: Up-regulated in Transcription
  misc_feature: MA Experiment 108434 PARAMETER Experiment Name: At_Root_Tips_cDNA_P Parameter: Tissue Value: Root Tips
  misc_feature: MA Experiment ID: 108462 Result: Down-regulated in Transcription
  misc_feature: MA Experiment 108462 PARAMETER Experiment Name: At_Germinating_Seeds_cDNA_P Parameter: Age (day) Value: 2 vs. 0
  misc_feature: MA Experiment 108462 PARAMETER Experiment Name: At_Germinating_Seeds_cDNA_P Parameter: Tissue Value: Germinating Seeds
  misc_feature: MA Experiment ID: 108463 Result: Down-regulated in Transcription
  misc_feature: MA Experiment 108463 PARAMETER Experiment Name: At_Germinating_Seeds_cDNA_P Parameter: Age (day) Value: 3 vs. 0
  misc_feature: MA Experiment 108463 PARAMETER Experiment Name: At_Germinating_Seeds_cDNA_P Parameter: Tissue Value: Germinating Seeds
  misc_feature: MA Experiment ID: 108464 Result: Down-regulated in Transcription
  misc_feature: MA Experiment 108464 PARAMETER Experiment Name: At_Germinating_Seeds_cDNA_P Parameter: Age (day) Value: 4 vs. 0
  misc_feature: MA Experiment 108464 PARAMETER Experiment Name: At_Germinating_Seeds_cDNA_P Parameter: Tissue Value: Germinating Seeds
  misc_feature: MA Experiment ID: 108595 Result: Up-regulated in Transcription
  misc_feature: MA Experiment 108595 PARAMETER Experiment Name: At_Ler-pi_Ovule_cDNA_P Parameter: Plant Line Value: null
  misc_feature: MA Experiment ID: 20000227 Result: Up-regulated in Transcription
  misc_feature: MA Experiment 20000227 PARAMETER Experiment Name: At_Root-Tips-vs-Tops_P Parameter: Tissue Value: Root Tips vs. Root Tops
  misc_feature: MA Experiment ID: 20000234 Result: Up-regulated in Transcription
  misc_feature: MA Experiment 20000234 PARAMETER Experiment Name: At_Siliques_P Parameter: Age (day) Value: 21
  misc_feature: MA Experiment 20000234 PARAMETER Experiment Name: At_Siliques_P Parameter: Organism Value: A. thaliana
  misc_feature: MA Experiment 20000234 PARAMETER Experiment Name: At_Siliques_P Parameter: Plant Line Value: WS
  misc_feature: MA Experiment 20000234 PARAMETER Experiment Name: At_Siliques_P Parameter: Tissue Value: Less Than 5mm Siliques vs. Whole Plant
  misc_feature: MA Experiment ID: 20000286 Result: Up-regulated in Transcription
  misc_feature: MA Experiment 20000286 PARAMETER Experiment Name: At_Open_Flower_P Parameter: Age (day) Value: 21
  misc_feature: MA Experiment 20000286 PARAMETER Experiment Name: At_Open_Flower_P Parameter: Plant Line Value: WS
  misc_feature: MA Experiment 20000286 PARAMETER Experiment Name: At_Open_Flower_P Parameter: Tissue Value: Half Open vs. Whole Plant
  misc_feature: MA Experiment ID: 20000495 Result: Up-regulated in Transcription
  misc_feature: MA Experiment 20000495 PARAMETER Experiment Name: At_Guard_Cells_P Parameter: Harvest Date Value: 8/2/2002
  misc_feature: MA Experiment 20000495 PARAMETER Experiment Name: At_Guard_Cells_P Parameter: Organism Value: A. thaliana
  misc_feature: MA Experiment 20000495 PARAMETER Experiment Name: At_Guard_Cells_P Parameter: Tissue Value: Guard Cells vs. Leaves
  misc_feature: MA Experiment ID: 20001558 Result: Up-regulated in Transcription
  misc_feature: MA Experiment 20001558 PARAMETER Experiment Name: At_Drought_Soil_Dry_P Parameter: Age (day) Value: 27
  misc_feature: MA Experiment 20001558 PARAMETER Experiment Name: At_Drought_Soil_Dry_P Parameter: Organism Value: A. thaliana
  misc_feature: MA Experiment 20001558 PARAMETER Experiment Name: At_Drought_Soil_Dry_P Parameter: Plant Line Value: WS
  misc_feature: MA Experiment 20001558 PARAMETER Experiment Name: At_Drought_Soil_Dry_P Parameter: Post Timepoint (hr) Value: 6
  misc_feature: MA Experiment 20001558 PARAMETER Experiment Name: At_Drought_Soil_Dry_P Parameter: Post-Treatment Value: Re-Water vs. No Drought
  misc_feature: MA Experiment 20001558 PARAMETER Experiment Name: At_Drought_Soil_Dry_P Parameter: Timepoint (day) Value: 13
  misc_feature: MA Experiment 20001558 PARAMETER Experiment Name: At_Drought_Soil_Dry_P Parameter: Treatment Value: Drought vs. No Drought
atttccgatctcaaatccttttgtcccacttgctataatggcgttcgtttccagctttcgccgtctcgttgccggatccagtagcctcttgtcttctccatccttgtgtgttcgccgctgctcaactcttacgtctccccggctcttcgttagcggtctctccagactcacaacaaatgaaaagcttcaggatgcatttgcttcttttggacagctcgtcgatgcgagagtgatcacagacagagattccgggagatcaaagggttttggttttgtgacatatgcaacaattgaagatgcagagaaagccaaggcagagatgaatgcaaagttcttggacggttgggtaatttttgttgatcctgcaagacctagagaaccaagacggcctctgcaacaggaaccgcttcggccttcctccgaatctggtttcacaaccaacaaaaccatcggatggtgtaaatgaacaaaatccaactacttatgctatgaaatgaaaataatttcttggagcc

SEQ ID NO: 28725 - protein, 154 aa, Arabidopsis thaliana
  peptide (1)..(154): Ceres Seq. ID no. 12331832
  misc_feature (48)..(119): Pfam Name: RNA recognition motif. (a.k.a. RRM, RBD, or RNP domain) Pfam Description: RNA recognition motif. (a.k.a. RRM, RBD, or RNP
  misc_feature (13)..(128): Homolog of NCBI NO: 7439994 NR Description: glycine-rich RNA-binding protein - garden pea
  misc_feature (26)..(126): Homolog of NCBI NO: 15239958 NR Description: RRM-containing protein
  misc_feature (20)..(128): Homolog of NCBI NO: 7489099 NR Description: RNA-binding protein RGP-3 - wood tobacco
  misc_feature (23)..(127): Homolog of NCBI NO: 34906972 NR Description: putative glycine-rich RNA-binding protein 2
  misc_feature (20)..(128): Homolog of NCBI NO: 7439995 NR Description: RNA binding protein 3 - wood tobacco
  misc_feature (10)..(128): Homolog of NCBI NO: 38344030 NR Description: OJ991214_12.1 [Oryza sativa (japonica
  misc_feature (10)..(132): Homolog of NCBI NO: 34898598 NR Description: P0534A03.25 [Oryza sativa (japonica
  misc_feature (6)..(134): Homolog of NCBI NO: 15239676 NR Description: RRM-containing protein
  misc_feature (17)..(143): Homolog of NCBI NO: 38636774 NR Description: putative RNA recognition motif (RRM)-containing
  misc_feature (13)..(154): Homolog of NCBI NO: 15224298 NR Description: RRM-containing protein
FPISNPFVPLAIMAFVSSFRRLVAGSSSLLSSPSLCVRRCSTLTSPRLFVSGLSRLTTNEKLQDAFASFGQLVDARVITDRDSGRSKGFGFVTYATIEDAEKAKAEMNAKFLDGWVIFVDPARPREPRRPLQQEPLRPSSESGFTTNKTIGWCK

SEQ ID NO: 28726 - protein, 142 aa, Arabidopsis thaliana
  peptide (1)..(142): Ceres Seq. ID no. 12331833
  misc_feature (36)..(107): Pfam Name: RNA recognition motif. (a.k.a. RRM, RBD, or RNP domain) Pfam Description: RNA recognition motif. (a.k.a. RRM, RBD, or RNP
  misc_feature (1)..(116): Homolog of NCBI NO: 7439994 NR Description: glycine-rich RNA-binding protein - garden pea
  misc_feature (14)..(114): Homolog of NCBI NO: 15239958 NR Description: RRM-containing protein
  misc_feature (8)..(116): Homolog of NCBI NO: 7489099 NR Description: RNA-binding protein RGP-3 - wood tobacco
  misc_feature (11)..(115): Homolog of NCBI NO: 34906972 NR Description: putative glycine-rich RNA-binding protein 2
  misc_feature (8)..(116): Homolog of NCBI NO: 7439995 NR Description: RNA binding protein 3 - wood tobacco
  misc_feature (1)..(116): Homolog of NCBI NO: 38344030 NR Description: OJ991214_12.1 [Oryza sativa (japonica
  misc_feature (1)..(120): Homolog of NCBI NO: 34898598 NR Description: P0534A03.25 [Oryza sativa (japonica
  misc_feature (1)..(122): Homolog of NCBI NO: 15239676 NR Description: RRM-containing protein
  misc_feature (5)..(131): Homolog of NCBI NO: 38636774 NR Description: putative RNA recognition motif (RRM)-containing
  misc_feature (1)..(142): Homolog of NCBI NO: 15224298 NR Description: RRM-containing protein
MAFVSSFRRLVAGSSSLLSSPSLCVRRCSTLTSPRLFVSGLSRLTTNEKLQDAFASFGQLVDARVITDRDSGRSKGFGFVTYATIEDAEKAKAEMNAKFLDGWVIFVDPARPREPRRPLQQEPLRPSSESGFTTNKTIGWCK

SEQ ID NO: 28727 - DNA, 1164 bp, Arabidopsis thaliana
  misc_feature (1)..(1164): Ceres Seq. ID no. 12420728
  misc_feature: MA Experiment ID: 108434 Result: Down-regulated in Transcription
  misc_feature: MA Experiment 108434 PARAMETER Experiment Name: At_Root_Tips_cDNA_P Parameter: Tissue Value: Root Tips
  misc_feature: MA Experiment ID: 108577 Result: Down-regulated in Transcription
  misc_feature: MA Experiment 108577 PARAMETER Experiment Name: At_42deg_Heat_cDNA_P Parameter: Temperature (deg C) Value: 42 vs. 22
  misc_feature: MA Experiment 108577 PARAMETER Experiment Name: At_42deg_Heat_cDNA_P Parameter: Timepoint (hr) Value: 6
  misc_feature: MA Experiment 108577 PARAMETER Experiment Name: At_42deg_Heat_cDNA_P Parameter: Tissue Value: Aerial
  misc_feature: MA Experiment ID: 108595 Result: Down-regulated in Transcription
  misc_feature: MA Experiment 108595 PARAMETER Experiment Name: At_Ler-pi_Ovule_cDNA_P Parameter: Plant Line Value: null
  misc_feature: MA Experiment ID: 20000111 Result: Down-regulated in Transcription
  misc_feature: MA Experiment 20000111 PARAMETER Experiment Name: At_42deg_Heat_cDNA_P Parameter: Temperature (deg C) Value: 42 vs. 22
  misc_feature: MA Experiment 20000111 PARAMETER Experiment Name: At_42deg_Heat_cDNA_P Parameter: Timepoint (hr) Value: 6
  misc_feature: MA Experiment 20000111 PARAMETER Experiment Name: At_42deg_Heat_cDNA_P Parameter: Tissue Value: Aerial
ccattaattactaaacccaaacccaaccaaagatcttcacaaagaaaaaaacaattggtggtatcaatggggaagaagaagatgaaactctcttctctgttcaaaggcggagccggaggattactagcggttcctctctgttacaatgccaaaactctttcgttccgagtcggcgacgacatgatcaagacggtgaactctgttttcttcgaccaccaccacaacaacaacaatggaggagatttgttggaagcggagacgcctgagtcatggtttactaactcgtccgagacagcgagtcactcaaccgagtcggatcaagaccttgacgctgagtccttagagatggtggttcgtggcgttgttagatcggagcggttattcttcgatccaggagttacgagttcgattctggaagagattgaagagaaatcgaaatcggatttgaaatcgaaggaaacggttgcggtgggagaagatcggagtacgccgattgaggagattagtgtcgcggtggcgatggaatccgaggatccgtacggtgatttccggcgatcgatggaggagatggtgacgagtcacggtgagttggctaaagattgggagagcttggaatcgatgctcgcttggtatttgaggatgaatgggaggaagagtcacggcgttatcgtcagtgcttttgttgatcttctctctggactctctgattccggcgccggaataacgtcggcttcggtatcggattcggctcgttattcaaccgccgtttcgtctttgccgtcgtcgccggtttattcgttatctcaaggtcagacggagattcaagaggaagagagacggagctgttaaaaataaaaaaaggcttaagattcggttttaaattttttaatctccggttttgtttagattaattaaccctttttggattttgtaaaaagtaattagtggttagaggaaaaagaaccattaaatatatatcaaaaatatttttagagccattattgttgatttatgtataacagtgccttttgtcataactcgaaagttacactatttttcccccaaaattcatgaaactcagcgaagtttatgccaacagattcagagaaattttgtataacagccccattttaaaaggaaatatacataagaataaattctgtg

SEQ ID NO: 28728 - protein, 282 aa, Arabidopsis thaliana
  peptide (1)..(282): Ceres Seq. ID no. 12420729
  misc_feature (176)..(237): Pfam Name: Protein of unknown function, DUF623 Pfam Description: Protein of unknown function, DUF623
  misc_feature (143)..(233): Homolog of NCBI NO: 34912272 NR Description: P0710A02.17 [Oryza sativa (japonica
  misc_feature (121)..(242): Homolog of NCBI NO: 15220029 NR Description: hypothetical protein; protein id: At1g79960.1
  misc_feature (162)..(245): Homolog of NCBI NO: 22331750 NR Description: similar to similar to unknown protein
  misc_feature (112)..(272): Homolog of NCBI NO: 26452010 NR Description: unknown protein [Arabidopsis thaliana]
  misc_feature (77)..(282): Homolog of NCBI NO: 21618162 NR Description: unknown [Arabidopsis thaliana]
  misc_feature (77)..(282): Homolog of NCBI NO: 18409629 NR Description: expressed protein
  misc_feature (112)..(272): Homolog of NCBI NO: 18404030 NR Description: expressed protein
  misc_feature (93)..(264): Homolog of NCBI NO: 38637034 NR Description: hypothetical protein [Oryza sativa (japonica
  misc_feature (86)..(262): Homolog of NCBI NO: 34908538 NR Description: P0423B08.18 [Oryza sativa (japonica
  misc_feature (23)..(282): Homolog of NCBI NO: 15238336 NR Description: putative protein
PLITKPKPNQRSSQRKKQLVVSMGKKKMKLSSLFKGGAGGLLAVPLCYNAKTLSFRVGDDMIKTVNSVFFDHHHNNNNGGDLLEAETPESWFTNSSETASHSTESDQDLDAESLEMVVRGVVRSERLFFDPGVTSSILEEIEEKSKSDLKSKETVAVGEDRSTPIEEISVAVAMESEDPYGDFRRSMEEMVTSHGELAKDWESLESMLAWYLRMNGRKSHGVIVSAFVDLLSGLSDSGAGITSASVSDSARYSTAVSSLPSSPVYSLSQGQTEIQEEERRSC

SEQ ID NO: 28729 - protein, 260 aa, Arabidopsis thaliana
  peptide (1)..(260): Ceres Seq. ID no. 12420730
  misc_feature (154)..(215): Pfam Name: Protein of unknown function, DUF623 Pfam Description: Protein of unknown function, DUF623
  misc_feature (121)..(211): Homolog of NCBI NO: 34912272 NR Description: P0710A02.17 [Oryza sativa (japonica
  misc_feature (99)..(220): Homolog of NCBI NO: 15220029 NR Description: hypothetical protein; protein id: At1g79960.1
  misc_feature (140)..(223): Homolog of NCBI NO: 22331750 NR Description: similar to similar to unknown protein
  misc_feature (90)..(250): Homolog of NCBI NO: 26452010 NR Description: unknown protein [Arabidopsis thaliana]
  misc_feature (55)..(260): Homolog of NCBI NO: 21618162 NR Description: unknown [Arabidopsis thaliana]
  misc_feature (55)..(260): Homolog of NCBI NO: 18409629 NR Description: expressed protein
  misc_feature (90)..(250): Homolog of NCBI NO: 18404030 NR Description: expressed protein
  misc_feature (71)..(242): Homolog of NCBI NO: 38637034 NR Description: hypothetical protein [Oryza sativa (japonica
  misc_feature (64)..(240): Homolog of NCBI NO: 34908538 NR Description: P0423B08.18 [Oryza sativa (japonica
  misc_feature (1)..(260): Homolog of NCBI NO: 15238336 NR Description: putative protein
MGKKKMKLSSLFKGGAGGLLAVPLCYNAKTLSFRVGDDMIKTVNSVFFDHHHNNNNGGDLLEAETPESWFTNSSETASHSTESDQDLDAESLEMVVRGVVRSERLFFDPGVTSSILEEIEEKSKSDLKSKETVAVGEDRSTPIEEISVAVAMESEDPYGDFRRSMEEMVTSHGELAKDWESLESMLAWYLRMNGRKSHGVIVSAFVDLLSGLSDSGAGITSASVSDSARYSTAVSSLPSSPVYSLSQGQTEIQEEERRSC

SEQ ID NO: 28730 - protein, 255 aa, Arabidopsis thaliana
  peptide (1)..(255): Ceres Seq. ID no. 12420731
  misc_feature (149)..(210): Pfam Name: Protein of unknown function, DUF623 Pfam Description: Protein of unknown function, DUF623
  misc_feature (116)..(206): Homolog of NCBI NO: 34912272 NR Description: P0710A02.17 [Oryza sativa (japonica
  misc_feature (94)..(215): Homolog of NCBI NO: 15220029 NR Description: hypothetical protein; protein id: At1g79960.1
  misc_feature (135)..(218): Homolog of NCBI NO: 22331750 NR Description: similar to similar to unknown protein
  misc_feature (85)..(245): Homolog of NCBI NO: 26452010 NR Description: unknown protein [Arabidopsis thaliana]
  misc_feature (50)..(255): Homolog of NCBI NO: 21618162 NR Description: unknown [Arabidopsis thaliana]
  misc_feature (50)..(255): Homolog of NCBI NO: 18409629 NR Description: expressed protein
  misc_feature (85)..(245): Homolog of NCBI NO: 18404030 NR Description: expressed protein
  misc_feature (66)..(237): Homolog of NCBI NO: 38637034 NR Description: hypothetical protein [Oryza sativa (japonica
  misc_feature (59)..(235): Homolog of NCBI NO: 34908538 NR Description: P0423B08.18 [Oryza sativa (japonica
  misc_feature (1)..(255): Homolog of NCBI NO: 15238336 NR Description: putative protein
MKLSSLFKGGAGGLLAVPLCYNAKTLSFRVGDDMIKTVNSVFFDHHHNNNNGGDLLEAETPESWFTNSSETASHSTESDQDLDAESLEMVVRGVVRSERLFFDPGVTSSILEEIEEKSKSDLKSKETVAVGEDRSTPIEEISVAVAMESEDPYGDFRRSMEEMVTSHGELAKDWESLESMLAWYLRMNGRKSHGVIVSAFVDLLSGLSDSGAGITSASVSDSARYSTAVSSLPSSPVYSLSQGQTEIQEEERRSC

SEQ ID NO: 28731 - DNA, 695 bp, Arabidopsis thaliana
  misc_feature (1)..(695): Ceres Seq. ID no. 12370089
  misc_feature: MA Experiment ID: 108473 Result: Down-regulated in Transcription
  misc_feature: MA Experiment 108473 PARAMETER Experiment Name: At_Drought_Flowers_cDNA_P Parameter: Timepoint (hr) Value: 7 d
  misc_feature: MA Experiment 108473 PARAMETER Experiment Name: At_Drought_Flowers_cDNA_P Parameter: Tissue Value: Flower
  misc_feature: MA Experiment 108473 PARAMETER Experiment Name: At_Drought_Flowers_cDNA_P Parameter: Treatment Value: Drought vs. No Drought
  misc_feature: MA Experiment ID: 108501 Result: Down-regulated in Transcription
  misc_feature: MA Experiment 108501 PARAMETER Experiment Name: At_ap2_floral_buds_cDNA_P Parameter: Plant Line Value: ap2 (Ler.)
  misc_feature: MA Experiment 108501 PARAMETER Experiment Name: At_ap2_floral_buds_cDNA_P Parameter: Tissue Value: Closed Flower
  misc_feature: MA Experiment ID: 108595 Result: Up-regulated in Transcription
  misc_feature: MA Experiment 108595 PARAMETER Experiment Name: At_Ler-pi_Ovule_cDNA_P Parameter: Plant Line Value: null
  misc_feature: MA Experiment ID: 20000184 Result: Down-regulated in Transcription
  misc_feature: MA Experiment 20000184 PARAMETER Experiment Name: At_Shoots__P Parameter: Age (day) Value: 7
  misc_feature: MA Experiment 20000184 PARAMETER Experiment Name: At_Shoots__P Parameter: Tissue Value: Shoots vs. Whole Plant
  misc_feature: MA Experiment ID: 20000185 Result: Down-regulated in Transcription
  misc_feature: MA Experiment 20000185 PARAMETER Experiment Name: At_Roots__P Parameter: Age (day) Value: 7 vs. 21
  misc_feature: MA Experiment 20000185 PARAMETER Experiment Name: At_Roots__P Parameter: Organism Value: A. thaliana
  misc_feature: MA Experiment 20000185 PARAMETER Experiment Name: At_Roots__P Parameter: Tissue Value: Roots vs. Whole Plant
  misc_feature: MA Experiment ID: 20000234 Result: Down-regulated in Transcription
  misc_feature: MA Experiment 20000234 PARAMETER Experiment Name: At_Siliques_P Parameter: Age (day) Value: 21
  misc_feature: MA Experiment 20000234 PARAMETER Experiment Name: At_Siliques_P Parameter: Organism Value: A. thaliana
  misc_feature: MA Experiment 20000234 PARAMETER Experiment Name: At_Siliques_P Parameter: Plant Line Value: WS
  misc_feature: MA Experiment 20000234 PARAMETER Experiment Name: At_Siliques_P Parameter: Tissue Value: Less Than 5mm Siliques vs. Whole Plant
  misc_feature: MA Experiment ID: 20000235 Result: Down-regulated in Transcription
  misc_feature: MA Experiment 20000235 PARAMETER Experiment Name: At_Siliques_P Parameter: Age (day) Value: 21
  misc_feature: MA Experiment 20000235 PARAMETER Experiment Name: At_Siliques_P Parameter: Organism Value: A. thaliana
  misc_feature: MA Experiment 20000235 PARAMETER Experiment Name: At_Siliques_P Parameter: Plant Line Value: WS
  misc_feature: MA Experiment 20000235 PARAMETER Experiment Name: At_Siliques_P Parameter: Tissue Value: 5-10mm Siliques vs. Whole Plant
  misc_feature: MA Experiment ID: 20000265 Result: Up-regulated in Transcription
  misc_feature: MA Experiment 20000265 PARAMETER Experiment Name: At_Open_Flower_P Parameter: Age (day) Value: 21
  misc_feature: MA Experiment 20000265 PARAMETER Experiment Name: At_Open_Flower_P Parameter: Plant Line Value: WS
  misc_feature: MA Experiment 20000265 PARAMETER Experiment Name: At_Open_Flower_P Parameter: Tissue Value: Closed Flower vs. Whole Plant
  misc_feature: MA Experiment ID: 20000286 Result: Up-regulated in Transcription
  misc_feature: MA Experiment 20000286 PARAMETER Experiment Name: At_Open_Flower_P Parameter: Age (day) Value: 21
  misc_feature: MA Experiment 20000286 PARAMETER Experiment Name: At_Open_Flower_P Parameter: Plant Line Value: WS
  misc_feature: MA Experiment 20000286 PARAMETER Experiment Name: At_Open_Flower_P Parameter: Tissue Value: Half Open vs. Whole Plant
  misc_feature: MA Experiment ID: 20000438 Result: Down-regulated in Transcription
  misc_feature: MA Experiment 20000438 PARAMETER Experiment Name: At_Shoots__P Parameter: Age (day) Value: 14
  misc_feature: MA Experiment 20000438 PARAMETER Experiment Name: At_Shoots__P Parameter: Tissue Value: Shoots vs. Whole Plant
  misc_feature: MA Experiment ID: 20000709 Result: Down-regulated in Transcription
  misc_feature: MA Experiment 20000709 PARAMETER Experiment Name: At_15mM_NH4NO3_L-to-H_P Parameter: Age (hr) Value: 14
  misc_feature: MA Experiment 20000709 PARAMETER Experiment Name: At_15mM_NH4NO3_L-to-H_P Parameter: Organism Value: A. thaliana
  misc_feature: MA Experiment 20000709 PARAMETER Experiment Name: At_15mM_NH4NO3_L-to-H_P Parameter: Plant Line Value: WS
  misc_feature: MA Experiment 20000709 PARAMETER Experiment Name: At_15mM_NH4NO3_L-to-H_P Parameter: Timepoint (hr) Value: 4
  misc_feature: MA Experiment 20000709 PARAMETER Experiment Name: At_15mM_NH4NO3_L-to-H_P Parameter: Tissue Value: Aerial
  misc_feature: MA Experiment 20000709 PARAMETER Experiment Name: At_15mM_NH4NO3_L-to-H_P Parameter: Treatment Value: 15mM NH4NO3 vs. 30mM Mannitol
  misc_feature: MA Experiment ID: 20000794 Result: Down-regulated in Transcription
  misc_feature: MA Experiment 20000794 PARAMETER Experiment Name: At_Petals_P Parameter: Age (day) Value: 23-25 days
  misc_feature: MA Experiment 20000794 PARAMETER Experiment Name: At_Petals_P Parameter: Plant Line Value: WS
  misc_feature: MA Experiment 20000794 PARAMETER Experiment Name: At_Petals_P Parameter: Tissue Value: Petals vs. Whole plant
  misc_feature: MA Experiment ID: 20001761 Result: Up-regulated in Transcription
  misc_feature: MA Experiment 20001761 PARAMETER Experiment Name: At_50mM_NH4NO3_L-to-H_P Parameter: Timepoint (hr) Value: 4
  misc_feature: MA Experiment 20001761 PARAMETER Experiment Name: At_50mM_NH4NO3_L-to-H_P Parameter: Tissue Value: Siliques
  misc_feature: MA Experiment 20001761 PARAMETER Experiment Name: At_50mM_NH4NO3_L-to-H_P Parameter: Treatment Value: 50mM NH4NO3 vs 100mM Mannitol
  misc_feature: MA Experiment ID: 20001773 Result: Up-regulated in Transcription
  misc_feature: MA Experiment 20001773 PARAMETER Experiment Name: At_Far-red-enriched-adult_P Parameter: Age (day) Value: 30
  misc_feature: MA Experiment 20001773 PARAMETER Experiment Name: At_Far-red-enriched-adult_P Parameter: Light Value: Far-red enriched vs. White
  misc_feature: MA Experiment 20001773 PARAMETER Experiment Name: At_Far-red-enriched-adult_P Parameter: Organism Value: A. thaliana
  misc_feature: MA Experiment 20001773 PARAMETER Experiment Name: At_Far-red-enriched-adult_P Parameter: Plant Line Value: Columbia
  misc_feature: MA Experiment 20001773 PARAMETER Experiment Name: At_Far-red-enriched-adult_P Parameter: Timepoint (hr) Value: 48
  misc_feature: MA Experiment 20001773 PARAMETER Experiment Name: At_Far-red-enriched-adult_P Parameter: Tissue Value: Aerial
  misc_feature: MA Experiment ID: 20001910 Result: Down-regulated in Transcription
  misc_feature: MA Experiment 20001910 PARAMETER Experiment Name: At_Drought_Reproduction_P Parameter: Age (day) Value: 37
  misc_feature: MA Experiment 20001910 PARAMETER Experiment Name: At_Drought_Reproduction_P Parameter: Organism Value: A. thaliana
  misc_feature: MA Experiment 20001910 PARAMETER Experiment Name: At_Drought_Reproduction_P Parameter: Plant Line Value: WS
  misc_feature: MA Experiment 20001910 PARAMETER Experiment Name: At_Drought_Reproduction_P Parameter: Timepoint (day) Value: 7
  misc_feature: MA Experiment 20001910 PARAMETER Experiment Name: At_Drought_Reproduction_P Parameter: Tissue Value: Flowers
  misc_feature: MA Experiment 20001910 PARAMETER Experiment Name: At_Drought_Reproduction_P Parameter: Treatment Value: Drought vs. No Drought
  misc_feature: MA Experiment ID: 20001911 Result: Down-regulated in Transcription
  misc_feature: MA Experiment 20001911 PARAMETER Experiment Name: At_Drought_Reproduction_P Parameter: Age (day) Value: 40
  misc_feature: MA Experiment 20001911 PARAMETER Experiment Name: At_Drought_Reproduction_P Parameter: Organism Value: A. thaliana
  misc_feature: MA Experiment 20001911 PARAMETER Experiment Name: At_Drought_Reproduction_P Parameter: Plant Line Value: WS
  misc_feature: MA Experiment 20001911 PARAMETER Experiment Name: At_Drought_Reproduction_P Parameter: Timepoint (day) Value: 10
  misc_feature: MA Experiment 20001911 PARAMETER Experiment Name: At_Drought_Reproduction_P Parameter: Tissue Value: Flowers
  misc_feature: MA Experiment 20001911 PARAMETER Experiment Name: At_Drought_Reproduction_P Parameter: Treatment Value: Drought vs. No Drought
aattccacaatcatccgatatcaaacaagctatggcgccctttccactctctttgatttttggaaagaaaaaacgtcgtcgcgacgacgagatacgaagacaaaagccgacgctcaagggtgttatgacggctttttttgccactgaagctgcaatatgcctcttgttgctggccggtatatctctaaccggcacagccgtggcactattcgcgtccatgccgctattcctcgtttttagccccgttcttgtacccgcgggtattgccaccactattcttgcttcaggtttaatggccggaggcacctctggtgtgtcgggtctcaccatcttaatgtggctctacaagaaatatacgggtagagactttccaattaaaattccaggtgctgccgcagcaggtggagctgccccagccgctcccgctgcccctgcccctgctgcacctgccgctaaaccagcagctaaaccgggcgcgtgaaaattagtcaaggacatagacaaggatgcatgacgatatggaaaaatttgctctataaccattgaaattccataaattaaagatatttatccacttcttttttttgctaagtactaattattacgtactgatgaaactaaatttctcaatcgtcattctattgatgtatgccgtgctacagaaacaataacatatatatgcatgtttattgttt

SEQ ID NO: 28732 - protein, 159 aa, Arabidopsis thaliana
  peptide (1)..(159): Ceres Seq. ID no. 12370090
  misc_feature (37)..(155): Pfam Name: Oleosin Pfam Description: Oleosin
  misc_feature (36)..(139): Homolog of NCBI NO: 7488469 NR Description: oleosin-like protein - rape
  misc_feature (41)..(145): Homolog of NCBI NO: 15240815 NR Description: glycine-rich protein GRP19
  misc_feature (19)..(159): Homolog of NCBI NO: 123952 NR Description: MICROSPORE-SPECIFIC PROTEIN I3
  misc_feature (26)..(159): Homolog of NCBI NO: 7488519 NR Description: anther-specific protein BNA237 - turnip
  misc_feature (19)..(159): Homolog of NCBI NO: 1076452 NR Description: oleosin - rape
  misc_feature (34)..(159): Homolog of NCBI NO: 1076453 NR Description: oleosin - rape
  misc_feature (11)..(159): Homolog of NCBI NO: 15081220 NR Description: glycine-rich protein GRP20 [Arabidopsis thaliana]
  misc_feature (11)..(159): Homolog of NCBI NO: 15081213 NR Description: glycine-rich protein GRP20 [Arabidopsis thaliana]
  misc_feature (11)..(159): Homolog of NCBI NO: 15240816 NR Description: glycine-rich protein GRP20; protein id:
  misc_feature (11)..(159): Homolog of NCBI NO: 15081227 NR Description: glycine-rich protein GRP20 [Arabidopsis thaliana]
IPQSSDIKQAMAPFPLSLIFGKKKRRRDDEIRRQKPTLKGVMTAFFATEAAICLLLLAGISLTGTAVALFASMPLFLVFSPVLVPAGIATTILASGLMAGGTSGVSGLTILMWLYKKYTGRDFPIKIPGAAAAGGAAPAAPAAPAPAAPAAKPAAKPGA

SEQ ID NO: 28733 - protein, 149 aa, Arabidopsis thaliana
  peptide (1)..(149): Ceres Seq. ID no. 12370091
  misc_feature (27)..(145): Pfam Name: Oleosin Pfam Description: Oleosin
  misc_feature (26)..(129): Homolog of NCBI NO: 7488469 NR Description: oleosin-like protein - rape
  misc_feature (31)..(135): Homolog of NCBI NO: 15240815 NR Description: glycine-rich protein GRP19
  misc_feature (9)..(149): Homolog of NCBI NO: 123952 NR Description: MICROSPORE-SPECIFIC PROTEIN I3
  misc_feature (16)..(149): Homolog of NCBI NO: 7488519 NR Description: anther-specific protein BNA237 - turnip
  misc_feature (9)..(149): Homolog of NCBI NO: 1076452 NR Description: oleosin - rape
  misc_feature (24)..(149): Homolog of NCBI NO: 1076453 NR Description: oleosin - rape
  misc_feature (1)..(149): Homolog of NCBI NO: 15081220 NR Description: glycine-rich protein GRP20 [Arabidopsis thaliana]
  misc_feature (1)..(149): Homolog of NCBI NO: 15081213 NR Description: glycine-rich protein GRP20 [Arabidopsis thaliana]
  misc_feature (1)..(149): Homolog of NCBI NO: 15240816 NR Description: glycine-rich protein GRP20; protein id:
  misc_feature (1)..(149): Homolog of NCBI NO: 15081227 NR Description: glycine-rich protein GRP20 [Arabidopsis thaliana]
MAPFPLSLIFGKKKRRRDDEIRRQKPTLKGVMTAFFATEAAICLLLLAGISLTGTAVALFASMPLFLVFSPVLVPAGIATTILASGLMAGGTSGVSGLTILMWLYKKYTGRDFPIKIPGAAAAGGAAPAAPAAPAPAAPAAKPAAKPGA

SEQ ID NO: 28734 - protein, 118 aa, Arabidopsis thaliana
  peptide (1)..(118): Ceres Seq. ID no. 12370092
  misc_feature (1)..(114): Pfam Name: Oleosin Pfam Description: Oleosin
  misc_feature (1)..(98): Homolog of NCBI NO: 7488469 NR Description: oleosin-like protein - rape
  misc_feature (1)..(104): Homolog of NCBI NO: 15240815 NR Description: glycine-rich protein GRP19
  misc_feature (1)..(118): Homolog of NCBI NO: 123952 NR Description: MICROSPORE-SPECIFIC PROTEIN I3
  misc_feature (1)..(118): Homolog of NCBI NO: 7488519 NR Description: anther-specific protein BNA237 - turnip
  misc_feature (1)..(118): Homolog of NCBI NO: 1076452 NR Description: oleosin - rape
  misc_feature (1)..(118): Homolog of NCBI NO: 1076453 NR Description: oleosin - rape
  misc_feature (1)..(118): Homolog of NCBI NO: 15081220 NR Description: glycine-rich protein GRP20 [Arabidopsis thaliana]
  misc_feature (1)..(118): Homolog of NCBI NO: 15081213 NR Description: glycine-rich protein GRP20 [Arabidopsis thaliana]
  misc_feature (1)..(118): Homolog of NCBI NO: 15240816 NR Description: glycine-rich protein GRP20; protein id:
  misc_feature (1)..(118): Homolog of NCBI NO: 15081227 NR Description: glycine-rich protein GRP20 [Arabidopsis thaliana]
MTAFFATEAAICLLLLAGISLTGTAVALFASMPLFLVFSPVLVPAGIATTILASGLMAGGTSGVSGLTILMWLYKKYTGRDFPIKIPGAAAAGGAAPAAPAAPAPAAPAAKPAAKPGA

SEQ ID NO: 28735 - DNA, 940 bp, Arabidopsis thaliana
  misc_feature (1)..(940): Ceres Seq. ID no. 12327087
  misc_feature: MA Experiment ID: 108577 Result: Up-regulated in Transcription
  misc_feature: MA Experiment 108577 PARAMETER Experiment Name: At_42deg_Heat_cDNA_P Parameter: Temperature (deg C) Value: 42 vs. 22
  misc_feature: MA Experiment 108577 PARAMETER Experiment Name: At_42deg_Heat_cDNA_P Parameter: Timepoint (hr) Value: 6
  misc_feature: MA Experiment 108577 PARAMETER Experiment Name: At_42deg_Heat_cDNA_P Parameter: Tissue Value: Aerial
  misc_feature: MA Experiment ID: 108595 Result: Down-regulated in Transcription
  misc_feature: MA Experiment 108595 PARAMETER Experiment Name: At_Ler-pi_Ovule_cDNA_P Parameter: Plant Line Value: null
  misc_feature: MA Experiment ID: 20000185 Result: Down-regulated in Transcription
  misc_feature: MA Experiment 20000185 PARAMETER Experiment Name: At_Roots__P Parameter: Age (day) Value: 7 vs. 21
  misc_feature: MA Experiment 20000185 PARAMETER Experiment Name: At_Roots__P Parameter: Organism Value: A. thaliana
  misc_feature: MA Experiment 20000185 PARAMETER Experiment Name: At_Roots__P Parameter: Tissue Value: Roots vs. Whole Plant
  misc_feature: MA Experiment ID: 20000438 Result: Up-regulated in Transcription
  misc_feature: MA Experiment 20000438 PARAMETER Experiment Name: At_Shoots__P Parameter: Age (day) Value: 14
  misc_feature: MA Experiment 20000438 PARAMETER Experiment Name: At_Shoots__P Parameter: Tissue Value: Shoots vs. Whole Plant
  misc_feature: MA Experiment ID: 20001247 Result: Up-regulated in Transcription
  misc_feature: MA Experiment 20001247 PARAMETER Experiment Name: At_Far-red-induction_P Parameter: Age (day) Value: 7
  misc_feature: MA Experiment 20001247 PARAMETER Experiment Name: At_Far-red-induction_P Parameter: Light Value: Far-red vs. White
  misc_feature: MA Experiment 20001247 PARAMETER Experiment Name: At_Far-red-induction_P Parameter: Organism Value: A. thaliana
  misc_feature: MA Experiment 20001247 PARAMETER Experiment Name: At_Far-red-induction_P Parameter: Plant Line Value: Columbia
  misc_feature: MA Experiment 20001247 PARAMETER Experiment Name: At_Far-red-induction_P Parameter: Timepoint (hr) Value: 1
  misc_feature: MA Experiment 20001247 PARAMETER Experiment Name: At_Far-red-induction_P Parameter: Tissue Value: Whole Plant
  misc_feature: MA Experiment ID: 20001248 Result: Down-regulated in Transcription
  misc_feature: MA Experiment 20001248 PARAMETER Experiment Name: At_Far-red-induction_P Parameter: Age (day) Value: 7
  misc_feature: MA Experiment 20001248 PARAMETER Experiment Name: At_Far-red-induction_P Parameter: Light Value: Far-red vs. White
  misc_feature: MA Experiment 20001248 PARAMETER Experiment Name: At_Far-red-induction_P Parameter: Organism Value: A. thaliana
  misc_feature: MA Experiment 20001248 PARAMETER Experiment Name: At_Far-red-induction_P Parameter: Plant Line Value: Columbia
  misc_feature: MA Experiment 20001248 PARAMETER Experiment Name: At_Far-red-induction_P Parameter: Timepoint (hr) Value: 4
  misc_feature: MA Experiment 20001248 PARAMETER Experiment Name: At_Far-red-induction_P Parameter: Tissue Value: Whole Plant
  misc_feature: MA Experiment ID: 20001557 Result: Down-regulated in Transcription
  misc_feature: MA Experiment 20001557 PARAMETER Experiment Name: At_Drought_Soil_Dry_P Parameter: Age (day) Value: 27
  misc_feature: MA Experiment 20001557 PARAMETER Experiment Name: At_Drought_Soil_Dry_P Parameter: Organism Value: A. thaliana
  misc_feature: MA Experiment 20001557 PARAMETER Experiment Name: At_Drought_Soil_Dry_P Parameter: Plant Line Value: WS
  misc_feature: MA Experiment 20001557 PARAMETER Experiment Name: At_Drought_Soil_Dry_P Parameter: Post Timepoint (hr) Value: 3
  misc_feature: MA Experiment 20001557 PARAMETER Experiment Name: At_Drought_Soil_Dry_P Parameter: Post-Treatment Value: Re-Water vs. No Drought
  misc_feature: MA Experiment 20001557 PARAMETER Experiment Name: At_Drought_Soil_Dry_P Parameter: Timepoint (day) Value: 13
  misc_feature: MA Experiment 20001557 PARAMETER Experiment Name: At_Drought_Soil_Dry_P Parameter: Treatment Value: Drought vs. No Drought
  misc_feature: MA Experiment ID: 20001560 Result: Down-regulated in Transcription
  misc_feature: MA Experiment 20001560 PARAMETER Experiment Name: At_Drought_Soil_Dry_P Parameter: Age (day) Value: 28
  misc_feature: MA Experiment 20001560 PARAMETER Experiment Name: At_Drought_Soil_Dry_P Parameter: Organism Value: A. thaliana
  misc_feature: MA Experiment 20001560 PARAMETER Experiment Name: At_Drought_Soil_Dry_P Parameter: Plant Line Value: WS
  misc_feature: MA Experiment 20001560 PARAMETER Experiment Name: At_Drought_Soil_Dry_P Parameter: Post Timepoint (hr) Value: None
  misc_feature: MA Experiment 20001560 PARAMETER Experiment Name: At_Drought_Soil_Dry_P Parameter: Post-Treatment Value: None
  misc_feature: MA Experiment 20001560 PARAMETER Experiment Name: At_Drought_Soil_Dry_P Parameter: Timepoint (day) Value: 14
  misc_feature: MA Experiment 20001560 PARAMETER Experiment Name: At_Drought_Soil_Dry_P Parameter: Treatment Value: Drought vs. No Drought
  misc_feature: MA Experiment ID: 20001905 Result: Down-regulated in Transcription
  misc_feature: MA Experiment 20001905 PARAMETER Experiment Name: At_Drought_Reproduction_P Parameter: Age (day) Value: 40
  misc_feature: MA Experiment 20001905 PARAMETER Experiment Name: At_Drought_Reproduction_P Parameter: Organism Value: A. thaliana
  misc_feature: MA Experiment 20001905 PARAMETER Experiment Name: At_Drought_Reproduction_P Parameter: Plant Line Value: WS
  misc_feature: MA Experiment 20001905 PARAMETER Experiment Name: At_Drought_Reproduction_P Parameter: Timepoint (day) Value: 10
  misc_feature: MA Experiment 20001905 PARAMETER Experiment Name: At_Drought_Reproduction_P Parameter: Tissue Value: Rosettes
  misc_feature: MA Experiment 20001905 PARAMETER Experiment Name: At_Drought_Reproduction_P Parameter: Treatment Value: Drought vs. No Drought
  misc_feature: MA Experiment ID: 20001911 Result: Up-regulated in Transcription
  misc_feature: MA Experiment 20001911 PARAMETER Experiment Name: At_Drought_Reproduction_P Parameter: Age (day) Value: 40
  misc_feature: MA Experiment 20001911 PARAMETER Experiment Name: At_Drought_Reproduction_P Parameter: Organism Value: A. thaliana
  misc_feature: MA Experiment 20001911 PARAMETER Experiment Name: At_Drought_Reproduction_P Parameter: Plant Line Value: WS
  misc_feature: MA Experiment 20001911 PARAMETER Experiment Name: At_Drought_Reproduction_P Parameter: Timepoint (day) Value: 10
  misc_feature: MA Experiment 20001911 PARAMETER Experiment Name: At_Drought_Reproduction_P Parameter: Tissue Value: Flowers
  misc_feature: MA Experiment 20001911 PARAMETER Experiment Name: At_Drought_Reproduction_P Parameter: Treatment Value: Drought vs. No Drought
aaaaaacattactcccgaagaagcccaaattgacgacaggcgttagtggcgattggcgatggcagctcctgcggtggaggcaaccgtcgcaagtgctctccgctctgtgattcttagagctcgtaaggcggcggagcaagtaggaagagatcccgagcgggtcagggtccttccagtctccaagactaaacccgtctcacttatccgccaaatctacgacgcaggtcaccgttgcttcggcgagaattacgttcaagaaatcatcgataaagctccacagcttccggaagatatagagtggcatttcgtggggcatttacagagcaacaaagccaaaacgctattgactggagtcccaaatttggcaatggttcatggtgtggatggagaaaaggtagcaaatcatctagatcgagctgtttcaaatcttgggagacatccactaaaggttttggtccaagtgaacacaagcggagaagtttctaaatctggaatcgaaccttctagcgttgtagagctagcaagacatgtgaaacatcactgtccaaatctggtattctccggattaatgactattgggatgcctgattatacgtctaccccagagaacttcaggacactttcaaactgtagagctgatgtatgcaaggcacttggaatggctgaggatcaatttgaactgtccatgggcatgtctggtgacttcgagctagcgattgagatgggaagcaccaatgtgagggttggttccaccattttcggaccaagagagtaccccaagaaaacaacttagctactatgctcaaacacttgttgtaaaattcatgtataatgttattttgtcgattattttaaacaattttattcttcattgataaacttaggtgtattcacaaagttactttatagaaaattagaaatcaatacattgttaagggcc

SEQ ID NO: 28736 - protein, 244 aa, Arabidopsis thaliana
  peptide (1)..(244): Ceres Seq. ID no. 12327088
  misc_feature (9)..(239): Pfam Name: Alanine racemase, N-terminal domain Pfam Description: Alanine racemase, N-terminal domain
  misc_feature (9)..(239): Pfam Name: Alanine racemase, N-terminal domain Pfam Description: Alanine racemase, N-terminal domain
  misc_feature (96)..(220): Homolog of NCBI NO: 19386824 NR Description: B1147A04.19 [Oryza sativa (japonica
  misc_feature (7)..(242): Homolog of NCBI NO: 16930823 NR Description: proline synthetase co-transcribed [Mus musculus]
  misc_feature (1)..(244): Homolog of NCBI NO: 6005842 NR Description: proline synthetase co-transcribed homolog
  misc_feature (25)..(242): Homolog of NCBI NO: 11359716 NR Description: conserved hypothetical protein [imported] -
  misc_feature (1)..(242): Homolog of NCBI NO: 18391333 NR Description: putative Proline synthetase associated protein
  misc_feature (96)..(220): Homolog of NCBI NO: 19386824 NR Description: B1147A04.19 [Oryza sativa (japonica
  misc_feature (1)..(244): Homolog of NCBI NO: 6005842 NR Description: proline synthetase co-transcribed homolog
  misc_feature (1)..(242): Homolog of NCBI NO: 18391333 NR Description: putative Proline synthetase associated protein
  misc_feature (1)..(244): Homolog of NCBI NO: 14030629 NR Description: AT4g26860/F10M23_200 [Arabidopsis thaliana]
  misc_feature (1)..(244): Homolog of NCBI NO: 18416879 NR Description: putative Proline synthetase associated protein
  misc_feature (1)..(186): Homolog of NCBI NO: 7445224 NR Description: hypothetical protein F10M23.200 - Arabidopsis
  misc_feature (192)..(244): Homolog of NCBI NO: 7445224 NR Description: hypothetical protein F10M23.200 - Arabidopsis
  misc_feature (1)..(242): Homolog of NCBI NO: 30682530 NR Description: Proline synthetase associated protein -related
  misc_feature (25)..(242): Homolog of NCBI NO: 11359716 NR Description: conserved hypothetical protein [imported] -
  misc_feature (7)..(242): Homolog of NCBI NO: 16930823 NR Description: proline synthetase co-transcribed [Mus musculus]
  misc_feature (1)..(242): Homolog of NCBI NO: 30682530 NR Description: Proline synthetase associated protein -related
  misc_feature (192)..(244): Homolog of NCBI NO: 7445224 NR Description: hypothetical protein F10M23.200 - Arabidopsis
  misc_feature (1)..(186): Homolog of NCBI NO: 7445224 NR Description: hypothetical protein F10M23.200 - Arabidopsis
  misc_feature (1)..(244): Homolog of NCBI NO: 18416879 NR Description: putative Proline synthetase associated protein
  misc_feature (1)..(244): Homolog of NCBI NO: 14030629 NR Description: AT4g26860/F10M23_200 [Arabidopsis thaliana]
MAAPAVEATVASALRSVILRARKAAEQVGRDPERVRVLPVSKTKPVSLIRQIYDAGHRCFGENYVQEIIDKAPQLPEDIEWHFVGHLQSNKAKTLLTGVPNLAMVHGVDGEKVANHLDRAVSNLGRHPLKVLVQVNTSGEVSKSGIEPSSVVELARHVKHHCPNLVFSGLMTIGMPDYTSTPENFRTLSNCRADVCKALGMAEDQFELSMGMSGDFELAIEMGSTNVRVGSTIFGPREYPKKTT

SEQ ID NO: 28737 - protein, 141 aa, Arabidopsis thaliana
  peptide (1)..(141): Ceres Seq. ID no. 12327089
  misc_feature (1)..(136): Pfam Name: Alanine racemase, N-terminal domain Pfam Description: Alanine racemase, N-terminal domain
  misc_feature (1)..(136): Pfam Name: Alanine racemase, N-terminal domain Pfam Description: Alanine racemase, N-terminal domain
  misc_feature (1)..(117): Homolog of NCBI NO: 19386824 NR Description: B1147A04.19 [Oryza sativa (japonica
  misc_feature (1)..(139): Homolog of NCBI NO: 16930823 NR Description: proline synthetase co-transcribed [Mus musculus]
  misc_feature (1)..(141): Homolog of NCBI NO: 6005842 NR Description: proline synthetase co-transcribed homolog
  misc_feature (1)..(139): Homolog of NCBI NO: 11359716 NR Description: conserved hypothetical protein [imported] -
  misc_feature (1)..(139): Homolog of NCBI NO: 18391333 NR Description: putative Proline synthetase associated protein
  misc_feature (1)..(117): Homolog of NCBI NO: 19386824 NR Description: B1147A04.19 [Oryza sativa (japonica
  misc_feature (1)..(141): Homolog of NCBI NO: 6005842 NR Description: proline synthetase co-transcribed homolog
  misc_feature (1)..(139): Homolog of NCBI NO: 18391333 NR Description: putative Proline synthetase associated protein
  misc_feature (1)..(141): Homolog of NCBI NO: 14030629 NR Description: AT4g26860/F10M23_200 [Arabidopsis thaliana]
  misc_feature (1)..(141): Homolog of NCBI NO: 18416879 NR Description: putative Proline synthetase associated protein
  misc_feature (1)..(83): Homolog of NCBI NO: 7445224 NR Description: hypothetical protein F10M23.200 - Arabidopsis
  misc_feature (89)..(141): Homolog of NCBI NO: 7445224 NR Description: hypothetical protein F10M23.200 - Arabidopsis
  misc_feature (1)..(139): Homolog of NCBI NO: 30682530 NR Description: Proline synthetase associated protein -related
  misc_feature (1)..(139): Homolog of NCBI NO: 11359716 NR Description: conserved hypothetical protein [imported] -
  misc_feature (1)..(139): Homolog of NCBI NO: 16930823 NR Description: proline synthetase co-transcribed [Mus musculus]
  misc_feature (1)..(139): Homolog of NCBI NO: 30682530 NR Description: Proline synthetase associated protein -related
  misc_feature (89)..(141): Homolog of NCBI NO: 7445224 NR Description: hypothetical protein F10M23.200 - Arabidopsis
  misc_feature (1)..(83): Homolog of NCBI NO: 7445224 NR Description: hypothetical protein F10M23.200 - Arabidopsis
  misc_feature (1)..(141): Homolog of NCBI NO: 18416879 NR Description: putative Proline synthetase associated protein
  misc_feature (1)..(141): Homolog of NCBI NO: 14030629 NR Description: AT4g26860/F10M23_200 [Arabidopsis thaliana]
MVHGVDGEKVANHLDRAVSNLGRHPLKVLVQVNTSGEVSKSGIEPSSVVELARHVKHHCPNLVFSGLMTIGMPDYTSTPENFRTLSNCRADVCKALGMAEDQFELSMGMSGDFELAIEMGSTNVRVGSTIFGPREYPKKTT

SEQ ID NO: 28738 - DNA, 840 bp, Arabidopsis thaliana
  misc_feature (1)..(840): Ceres Seq. ID no. 12332656
  misc_feature: MA Experiment ID: 108462 Result: Up-regulated in Transcription
  misc_feature: MA Experiment 108462 PARAMETER Experiment Name: At_Germinating_Seeds_cDNA_P Parameter: Age (day) Value: 2 vs. 0
  misc_feature: MA Experiment 108462 PARAMETER Experiment Name: At_Germinating_Seeds_cDNA_P Parameter: Tissue Value: Germinating Seeds
  misc_feature: MA Experiment ID: 108464 Result: Up-regulated in Transcription
  misc_feature: MA Experiment 108464 PARAMETER Experiment Name: At_Germinating_Seeds_cDNA_P Parameter: Age (day) Value: 4 vs. 0
  misc_feature: MA Experiment 108464 PARAMETER Experiment Name: At_Germinating_Seeds_cDNA_P Parameter: Tissue Value: Germinating Seeds
  misc_feature: MA Experiment ID: 108488 Result: Down-regulated in Transcription
  misc_feature: MA Experiment ID: 20000113 Result: Down-regulated in Transcription
  misc_feature: MA Experiment 20000113 PARAMETER Experiment Name: At_42deg_Heat_cDNA_P Parameter: Temperature (deg C) Value: 42 vs. 22
  misc_feature: MA Experiment 20000113 PARAMETER Experiment Name: At_42deg_Heat_cDNA_P Parameter: Timepoint (hr) Value: 8
  misc_feature: MA Experiment 20000113 PARAMETER Experiment Name: At_42deg_Heat_cDNA_P Parameter: Tissue Value: Aerial
  misc_feature: MA Experiment ID: 20001904 Result: Up-regulated in Transcription
  misc_feature: MA Experiment 20001904 PARAMETER Experiment Name: At_Drought_Reproduction_P Parameter: Age (day) Value: 37
  misc_feature: MA Experiment 20001904 PARAMETER Experiment Name: At_Drought_Reproduction_P Parameter: Organism Value: A. thaliana
  misc_feature: MA Experiment 20001904 PARAMETER Experiment Name: At_Drought_Reproduction_P Parameter: Plant Line Value: WS
  misc_feature: MA Experiment 20001904 PARAMETER Experiment Name: At_Drought_Reproduction_P Parameter: Timepoint (day) Value: 7
  misc_feature: MA Experiment 20001904 PARAMETER Experiment Name: At_Drought_Reproduction_P Parameter: Tissue Value: Rosettes
  misc_feature: MA Experiment 20001904 PARAMETER Experiment Name: At_Drought_Reproduction_P Parameter: Treatment Value: Drought vs. No Drought
  misc_feature: MA Experiment ID: 20001905 Result: Up-regulated in Transcription
  misc_feature: MA Experiment 20001905 PARAMETER Experiment Name: At_Drought_Reproduction_P Parameter: Age (day) Value: 40
  misc_feature: MA Experiment 20001905 PARAMETER Experiment Name: At_Drought_Reproduction_P Parameter: Organism Value: A. thaliana
  misc_feature: MA Experiment 20001905 PARAMETER Experiment Name: At_Drought_Reproduction_P Parameter: Plant Line Value: WS
  misc_feature: MA Experiment 20001905 PARAMETER Experiment Name: At_Drought_Reproduction_P Parameter: Timepoint (day) Value: 10
  misc_feature: MA Experiment 20001905 PARAMETER Experiment Name: At_Drought_Reproduction_P Parameter: Tissue Value: Rosettes
  misc_feature: MA Experiment 20001905 PARAMETER Experiment Name: At_Drought_Reproduction_P Parameter: Treatment Value: Drought vs. No Drought
  misc_feature: MA Experiment ID: 20001906 Result: Down-regulated in Transcription
  misc_feature: MA Experiment 20001906 PARAMETER Experiment Name: At_Drought_Reproduction_P Parameter: Age (day) Value: 35
  misc_feature: MA Experiment 20001906 PARAMETER Experiment Name: At_Drought_Reproduction_P Parameter: Organism Value: A. thaliana
  misc_feature: MA Experiment 20001906 PARAMETER Experiment Name: At_Drought_Reproduction_P Parameter: Plant Line Value: WS
  misc_feature: MA Experiment 20001906 PARAMETER Experiment Name: At_Drought_Reproduction_P Parameter: Timepoint (day) Value: 5
  misc_feature: MA Experiment 20001906 PARAMETER Experiment Name: At_Drought_Reproduction_P Parameter: Tissue Value: Siliques
  misc_feature: MA Experiment 20001906 PARAMETER Experiment Name: At_Drought_Reproduction_P Parameter: Treatment Value: Drought vs. No Drought
  misc_feature: MA Experiment ID: 20001911 Result: Down-regulated in Transcription
  misc_feature: MA Experiment 20001911 PARAMETER Experiment Name: At_Drought_Reproduction_P Parameter: Age (day) Value: 40
  misc_feature: MA Experiment 20001911 PARAMETER Experiment Name: At_Drought_Reproduction_P Parameter: Organism Value: A. thaliana
  misc_feature: MA Experiment 20001911 PARAMETER Experiment Name: At_Drought_Reproduction_P Parameter: Plant Line Value: WS
  misc_feature: MA Experiment 20001911 PARAMETER Experiment Name: At_Drought_Reproduction_P Parameter: Timepoint (day) Value: 10
  misc_feature: MA Experiment 20001911 PARAMETER Experiment Name: At_Drought_Reproduction_P Parameter: Tissue Value: Flowers
  misc_feature: MA Experiment 20001911 PARAMETER Experiment Name: At_Drought_Reproduction_P Parameter: Treatment Value: Drought vs. No Drought
aagaagaaagtaaagagagaagaagcaaaaagagtcatattcgttgaaaacatcattcactcttctctgcgtctccttctttcacccgaaattgtctctgacaccgttttgattcagccatggctaatgctgcgtcaggaatggcagtccatgatgactgcaagctaagatttctggaactgaaggcgaaaaggacacaccgtttcattgtctacaagattgaggagaagcagaagcaagtgattgttgagaaagttggtgaacctattctaacttacgaggactttgcagcaagtcttccagctgacgaatgccgatacgccatttatgatttcgactttgtcactgcagagaattgccagaagagcaagattttcttcattgcatggtgtcccgacgtagcaaaggtgagaagcaagatgatctatgcgagctctaaggacaggttcaagcgtgaacttgatggaattcaagtggagcttcaagcaactgatccaactgagatggatcttgatgttttgaaaagccgcgtcaactaaaagaaactctctttgataagcttccgattatattcgactattatgaaatggtgttttctattctcttacagtctcttgtgactgttagatacacttgacacccttcattctatctgtctggtctgttctctgtgtctatgttaccgtacagtgtctcatctatattcaaaattatcacaaggtttgtgctgtgtttgcttcctttgtttcaactctaccaaagcttaagattaagatttgggtaagatgattcttttaagcttccctttgttctctttgttacagagggtataaaaaatgc

SEQ ID NO: 28739 - protein, 139 aa, Arabidopsis thaliana
  peptide (1)..(139): Ceres Seq. ID no. 12332657
  misc_feature (12)..(139): Pfam Name: Cofilin/tropomyosin-type actin-binding protein Pfam Description: Cofilin/tropomyosin-type actin-binding protein
  misc_feature (8)..(139): Homolog of NCBI NO: 11276987 NR Description: actin depolymerizing factor 2 - Arabidopsis
  misc_feature (1)..(139): Homolog of NCBI NO: 38564721 NR Description: putative actin-depolymerizing factor 2
  misc_feature (1)..(139): Homolog of NCBI NO: 18408116 NR Description: actin depolymerizing factor 2 (ADF2)
  misc_feature (1)..(139): Homolog of NCBI NO: 30697295 NR Description: actin depolymerizing factor 3 - like protein
  misc_feature (1)..(137): Homolog of NCBI NO: 17366765 NR Description: Actin-depolymerizing factor 2 (ADF 2)
  misc_feature (1)..(139): Homolog of NCBI NO: 17366768 NR Description: Actin-depolymerizing factor 1 (ADF 1)
  misc_feature (8)..(139): Homolog of NCBI NO: 30697303 NR Description: actin depolymerizing factor 4 - like protein
  misc_feature (1)..(139): Homolog of NCBI NO: 15231309 NR Description: actin depolymerizing factor 1 (ADF1)
  misc_feature (1)..(139): Homolog of NCBI NO: 4185511 NR Description: actin depolymerizing factor 4 [Arabidopsis
  misc_feature (1)..(139): Homolog of NCBI NO: 30697300 NR Description: actin depolymerizing factor 4 - like protein
MANAASGMAVHDDCKLRFLELKAKRTHRFIVYKIEEKQKQVIVEKVGEPILTYEDFAASLPADECRYAIYDFDFVTAENCQKSKIFFIAWCPDVAKVRSKMIYASSKDRFKRELDGIQVELQATDPTEMDLDVLKSRVN

SEQ ID NO: 28740 - protein, 132 aa, Arabidopsis thaliana
  peptide (1)..(132): Ceres Seq. ID no. 12332658
  misc_feature (5)..(132): Pfam Name: Cofilin/tropomyosin-type actin-binding protein Pfam Description: Cofilin/tropomyosin-type actin-binding protein
  misc_feature (1)..(132): Homolog of NCBI NO: 11276987 NR Description: actin depolymerizing factor 2 - Arabidopsis
  misc_feature (1)..(132): Homolog of NCBI NO: 38564721 NR Description: putative actin-depolymerizing factor 2
  misc_feature (1)..(132): Homolog of NCBI NO: 18408116 NR Description: actin depolymerizing factor 2 (ADF2)
  misc_feature (1)..(132): Homolog of NCBI NO: 30697295 NR Description: actin depolymerizing factor 3 - like protein
  misc_feature (1)..(130): Homolog of NCBI NO: 17366765 NR Description: Actin-depolymerizing factor 2 (ADF 2)
  misc_feature (1)..(132): Homolog of NCBI NO: 17366768 NR Description: Actin-depolymerizing factor 1 (ADF 1)
  misc_feature (1)..(132): Homolog of NCBI NO: 30697303 NR Description: actin depolymerizing factor 4 - like protein
  misc_feature (1)..(132): Homolog of NCBI NO: 15231309 NR Description: actin depolymerizing factor 1 (ADF1)
  misc_feature (1)..(132): Homolog of NCBI NO: 4185511 NR Description: actin depolymerizing factor 4 [Arabidopsis
  misc_feature (1)..(132): Homolog of NCBI NO: 30697300 NR Description: actin depolymerizing factor 4 - like protein
MAVHDDCKLRFLELKAKRTHRFIVYKIEEKQKQVIVEKVGEPILTYEDFAASLPADECRYAIYDFDFVTAENCQKSKIFFIAWCPDVAKVRSKMIYASSKDRFKRELDGIQVELQATDPTEMDLDVLKSRVN

SEQ ID NO: 28741 - DNA, 586 bp, Arabidopsis thaliana
  misc_feature (1)..(586): Ceres Seq. ID no. 12332652
  misc_feature: MA Experiment ID: 108434 Result: Down-regulated in Transcription
  misc_feature: MA Experiment 108434 PARAMETER Experiment Name: At_Root_Tips_cDNA_P Parameter: Tissue Value: Root Tips
  misc_feature: MA Experiment ID: 108609 Result: Up-regulated in Transcription
  misc_feature: MA Experiment 108609 PARAMETER Experiment Name: At_100uM_ABA_cDNA_P Parameter: Timepoint (hr) Value: 24
  misc_feature: MA Experiment 108609 PARAMETER Experiment Name: At_100uM_ABA_cDNA_P Parameter: Tissue Value: Aerial
  misc_feature: MA Experiment 108609 PARAMETER Experiment Name: At_100uM_ABA_cDNA_P Parameter: Treatment Value: 100uM ABA vs. No Treatment
  misc_feature: MA Experiment ID: 20000227 Result: Down-regulated in Transcription
  misc_feature: MA Experiment 20000227 PARAMETER Experiment Name: At_Root-Tips-vs-Tops_P Parameter: Tissue Value: Root Tips vs. Root Tops
  misc_feature: MA Experiment ID: 20000234 Result: Down-regulated in Transcription
  misc_feature: MA Experiment 20000234 PARAMETER Experiment Name: At_Siliques_P Parameter: Age (day) Value: 21
  misc_feature: MA Experiment 20000234 PARAMETER Experiment Name: At_Siliques_P Parameter: Organism Value: A. thaliana
  misc_feature: MA Experiment 20000234 PARAMETER Experiment Name: At_Siliques_P Parameter: Plant Line Value: WS
  misc_feature: MA Experiment 20000234 PARAMETER Experiment Name: At_Siliques_P Parameter: Tissue Value: Less Than 5mm Siliques vs. Whole Plant
  misc_feature: MA Experiment ID: 20000264 Result: Down-regulated in Transcription
  misc_feature: MA Experiment 20000264 PARAMETER Experiment Name: At_Open_Flower_P Parameter: Age (day) Value: 21
  misc_feature: MA Experiment 20000264 PARAMETER Experiment Name: At_Open_Flower_P Parameter: Plant Line Value: WS
  misc_feature: MA Experiment 20000264 PARAMETER Experiment Name: At_Open_Flower_P Parameter: Tissue Value: Open Flower vs. Whole Plant
  misc_feature: MA Experiment ID: 20000265 Result: Down-regulated in Transcription
  misc_feature: MA Experiment 20000265 PARAMETER Experiment Name: At_Open_Flower_P Parameter: Age (day) Value: 21
  misc_feature: MA Experiment 20000265 PARAMETER Experiment Name: At_Open_Flower_P Parameter: Plant Line Value: WS
  misc_feature: MA Experiment 20000265 PARAMETER Experiment Name: At_Open_Flower_P Parameter: Tissue Value: Closed Flower vs. Whole Plant
  misc_feature: MA Experiment ID: 20000286 Result: Down-regulated in Transcription
  misc_feature: MA Experiment 20000286 PARAMETER Experiment Name: At_Open_Flower_P Parameter: Age (day) Value: 21
  misc_feature: MA Experiment 20000286 PARAMETER Experiment Name: At_Open_Flower_P Parameter: Plant Line Value: WS
  misc_feature: MA Experiment 20000286 PARAMETER Experiment Name: At_Open_Flower_P Parameter: Tissue Value: Half Open vs. Whole Plant
  misc_feature: MA Experiment ID: 20000794 Result: Down-regulated in Transcription
  misc_feature: MA Experiment 20000794 PARAMETER Experiment Name: At_Petals_P Parameter: Age (day) Value: 23-25 days
  misc_feature: MA Experiment 20000794 PARAMETER Experiment Name: At_Petals_P Parameter: Plant Line Value: WS
  misc_feature: MA Experiment 20000794 PARAMETER Experiment Name: At_Petals_P Parameter: Tissue Value: Petals vs. Whole plant
  misc_feature: MA Experiment ID: 20001451 Result: Up-regulated in Transcription
  misc_feature: MA Experiment 20001451 PARAMETER Experiment Name: At_Far-red-induction_P Parameter: Age (day) Value: 7
  misc_feature: MA Experiment 20001451 PARAMETER Experiment Name: At_Far-red-induction_P Parameter: Light Value: Far-red vs. White
  misc_feature: MA Experiment 20001451 PARAMETER Experiment Name: At_Far-red-induction_P Parameter: Organism Value: A. thaliana
  misc_feature: MA Experiment 20001451 PARAMETER Experiment Name: At_Far-red-induction_P Parameter: Plant Line Value: Columbia
  misc_feature: MA Experiment 20001451 PARAMETER Experiment Name: At_Far-red-induction_P Parameter: Timepoint (hr) Value: 24
  misc_feature: MA Experiment 20001451 PARAMETER Experiment Name: At_Far-red-induction_P Parameter: Tissue Value: Whole Plant
  misc_feature: MA Experiment ID: 20001557 Result: Down-regulated in Transcription
  misc_feature: MA Experiment 20001557 PARAMETER Experiment Name: At_Drought_Soil_Dry_P Parameter: Age (day) Value: 27
  misc_feature: MA Experiment 20001557 PARAMETER Experiment Name: At_Drought_Soil_Dry_P Parameter: Organism Value: A. thaliana
  misc_feature: MA Experiment 20001557 PARAMETER Experiment Name: At_Drought_Soil_Dry_P Parameter: Plant Line Value: WS
  misc_feature: MA Experiment 20001557 PARAMETER Experiment Name: At_Drought_Soil_Dry_P Parameter: Post Timepoint (hr) Value: 3
  misc_feature: MA Experiment 20001557 PARAMETER Experiment Name: At_Drought_Soil_Dry_P Parameter: Post-Treatment Value: Re-Water vs. No Drought
  misc_feature: MA Experiment 20001557 PARAMETER Experiment Name: At_Drought_Soil_Dry_P Parameter: Timepoint (day) Value: 13
  misc_feature: MA Experiment 20001557 PARAMETER Experiment Name: At_Drought_Soil_Dry_P Parameter: Treatment Value: Drought vs. No Drought
  misc_feature: MA Experiment ID: 20001558 Result: Down-regulated in Transcription
  misc_feature: MA Experiment 20001558 PARAMETER Experiment Name: At_Drought_Soil_Dry_P Parameter: Age (day) Value: 27
  misc_feature: MA Experiment 20001558 PARAMETER Experiment Name: At_Drought_Soil_Dry_P Parameter: Organism Value: A. thaliana
  misc_feature: MA Experiment 20001558 PARAMETER Experiment Name: At_Drought_Soil_Dry_P Parameter: Plant Line Value: WS
  misc_feature: MA Experiment 20001558 PARAMETER Experiment Name: At_Drought_Soil_Dry_P Parameter: Post Timepoint (hr) Value: 6
  misc_feature: MA Experiment 20001558 PARAMETER Experiment Name: At_Drought_Soil_Dry_P Parameter: Post-Treatment Value: Re-Water vs. No Drought
  misc_feature: MA Experiment 20001558 PARAMETER Experiment Name: At_Drought_Soil_Dry_P Parameter: Timepoint (day) Value: 13
  misc_feature: MA Experiment 20001558 PARAMETER Experiment Name: At_Drought_Soil_Dry_P Parameter: Treatment Value: Drought vs. No Drought
gtccagtcaaatataataataagccattgaaaaaaatggcggaggagagcagagtcccatcatcggtgtcggtaacagtcgcccacgaccttcttctagccggccaccgctatctagacgtcaggactccagaagagttcagccagggacatgcctgtggggcgatcaacgtgccttacatgaatcgaggagcatcagggatgtcaaagaaccccgacttcctggaacaagtctcctcccatttcggacaatccgataacatcattgttggctgccagagcggtggtagatctatcaaagccaccaccgatcttctccatgcaggtttcacgggagtcaaagatatcgtcggtggctatagtgcctgggccaagaatggccttcctacaaaggcttgatgactcaccattcaccaaacatctttccttatctcttcgtctccttcttcttcaataatgcatcctttccgcatgtaatcatcaataaatgaccctcctttctctttgctgtctgatgtgatagcttggagggaggggctcatcgcatctttttaaaatatataaaaatacgagtgtgtgttgattgc

SEQ ID NO: 28742 - protein, 131 aa, Arabidopsis thaliana
  peptide (1)..(131): Ceres Seq. ID no. 12332653
  misc_feature (24)..(125): Pfam Name: Rhodanese-like domain Pfam Description: Rhodanese-like domain
  misc_feature (67)..(131): Homolog of NCBI NO: 30698184 NR Description: senescence-associated protein [Arabidopsis
  misc_feature (6)..(128): Homolog of NCBI NO: 7340289 NR Description: OP1 [Cucumis sativus]
  misc_feature (16)..(130): Homolog of NCBI NO: 118636 NR Description: Senescence-associated protein DIN1
  misc_feature (13)..(130): Homolog of NCBI NO: 21537402 NR Description: senescence-associated protein sen1 [Arabidopsis
  misc_feature (13)..(130): Homolog of NCBI NO: 15233328 NR Description: senescence-associated protein sen1
  misc_feature (13)..(130): Homolog of NCBI NO: 1046268 NR Description: senescence-associated protein [Arabidopsis
  misc_feature (13)..(130): Homolog of NCBI NO: 7488606 NR Description: senescence-associated protein din1,
  misc_feature (16)..(129): Homolog of NCBI NO: 7594903 NR Description: Ntdin [Nicotiana tabacum]
  misc_feature (12)..(131): Homolog of NCBI NO: 30698182 NR Description: senescence-associated protein [Arabidopsis
  misc_feature (12)..(130): Homolog of NCBI NO: 2129628 NR Description: ketoconazole resistance protein - Arabidopsis
PVKYNNKPLKKMAEESRVPSSVSVTVAHDLLLAGHRYLDVRTPEEFSQGHACGAINVPYMNRGASGMSKNPDFLEQVSSHFGQSDNIIVGCQSGGRSIKATTDLLHAGFTGVKDIVGGYSAWAKNGLPTKA

SEQ ID NO: 28743 - protein, 120 aa, Arabidopsis thaliana
  peptide (1)..(120): Ceres Seq. ID no. 12332654
  misc_feature (13)..(114): Pfam Name: Rhodanese-like domain Pfam Description: Rhodanese-like domain
  misc_feature (56)..(120): Homolog of NCBI NO: 30698184 NR Description: senescence-associated protein [Arabidopsis
  misc_feature (1)..(117): Homolog of NCBI NO: 7340289 NR Description: OP1 [Cucumis sativus]
  misc_feature (5)..(119): Homolog of NCBI NO: 118636 NR Description: Senescence-associated protein DIN1
  misc_feature (2)..(119): Homolog of NCBI NO: 21537402 NR Description: senescence-associated protein sen1 [Arabidopsis
  misc_feature (2)..(119): Homolog of NCBI NO: 15233328 NR Description: senescence-associated protein sen1
  misc_feature (2)..(119): Homolog of NCBI NO: 1046268 NR Description: senescence-associated protein [Arabidopsis
  misc_feature (2)..(119): Homolog of NCBI NO: 7488606 NR Description: senescence-associated protein din1,
  misc_feature (5)..(118): Homolog of NCBI NO: 7594903 NR Description: Ntdin [Nicotiana tabacum]
  misc_feature (1)..(120): Homolog of NCBI NO: 30698182 NR Description: senescence-associated protein [Arabidopsis
  misc_feature (1)..(119): Homolog of NCBI NO: 2129628 NR Description: ketoconazole resistance protein - Arabidopsis
MAEESRVPSSVSVTVAHDLLLAGHRYLDVRTPEEFSQGHACGAINVPYMNRGASGMSKNPDFLEQVSSHFGQSDNIIVGCQSGGRSIKATTDLLHAGFTGVKDIVGGYSAWAKNGLPTKA

SEQ ID NO: 28744 - protein, 72 aa, Arabidopsis thaliana
  peptide (1)..(72): Ceres Seq. ID no. 12332655
  misc_feature (1)..(66): Pfam Name: Rhodanese-like domain Pfam Description: Rhodanese-like domain
  misc_feature (8)..(72): Homolog of NCBI NO: 30698184 NR Description: senescence-associated protein [Arabidopsis
  misc_feature (1)..(69): Homolog of NCBI NO: 7340289 NR Description: OP1 [Cucumis sativus]
  misc_feature (1)..(71): Homolog of NCBI NO: 118636 NR Description: Senescence-associated protein DIN1
  misc_feature (1)..(71): Homolog of NCBI NO: 21537402 NR Description: senescence-associated protein sen1 [Arabidopsis
  misc_feature (1)..(71): Homolog of NCBI NO: 15233328 NR Description: senescence-associated protein sen1
  misc_feature (1)..(71): Homolog of NCBI NO: 1046268 NR Description: senescence-associated protein [Arabidopsis
  misc_feature (1)..(71): Homolog of NCBI NO: 7488606 NR Description: senescence-associated protein din1,
  misc_feature (1)..(70): Homolog of NCBI NO: 7594903 NR Description: Ntdin [Nicotiana tabacum]
  misc_feature (1)..(72): Homolog of NCBI NO: 30698182 NR Description: senescence-associated protein [Arabidopsis
  misc_feature (1)..(71): Homolog of NCBI NO: 2129628 NR Description: ketoconazole resistance protein - Arabidopsis
MNRGASGMSKNPDFLEQVSSHFGQSDNIIVGCQSGGRSIKATTDLLHAGFTGVKDIVGGYSAWAKNGLPTKA

SEQ ID NO: 28745 - DNA, 589 bp, Arabidopsis thaliana
  misc_feature (1)..(589): Ceres Seq. ID no. 12384610
  misc_feature: MA Experiment ID: 108433 Result: Up-regulated in Transcription
  misc_feature: MA Experiment 108433 PARAMETER Experiment Name: At_rhl_Mutant2_cDNA_P Parameter: Age (day) Value: 7
  misc_feature: MA Experiment 108433 PARAMETER Experiment Name: At_rhl_Mutant2_cDNA_P Parameter: Organism Value: A. thaliana
  misc_feature: MA Experiment 108433 PARAMETER Experiment Name: At_rhl_Mutant2_cDNA_P Parameter: Plant Line Value: rhl Mutant vs. wt landsburg
  misc_feature: MA Experiment 108433 PARAMETER Experiment Name: At_rhl_Mutant2_cDNA_P Parameter: Tissue Value: Roots
  misc_feature: MA Experiment ID: 108434 Result: Down-regulated in Transcription
  misc_feature: MA Experiment 108434 PARAMETER Experiment Name: At_Root_Tips_cDNA_P Parameter: Tissue Value: Root Tips
  misc_feature: MA Experiment ID: 108435 Result: Down-regulated in Transcription
  misc_feature: MA Experiment 108435 PARAMETER Experiment Name: At_stm_Mutants_cDNA_P Parameter: Plant Line Value: wt Landsburg vs stm
  misc_feature: MA Experiment 108435 PARAMETER Experiment Name: At_stm_Mutants_cDNA_P Parameter: Tissue Value: Shoot Apical Meristem Region
  misc_feature: MA Experiment ID: 108462 Result: Up-regulated in Transcription
  misc_feature: MA Experiment 108462 PARAMETER Experiment Name: At_Germinating_Seeds_cDNA_P Parameter: Age (day) Value: 2 vs. 0
  misc_feature: MA Experiment 108462 PARAMETER Experiment Name: At_Germinating_Seeds_cDNA_P Parameter: Tissue Value: Germinating Seeds
  misc_feature: MA Experiment ID: 108464 Result: Up-regulated in Transcription
  misc_feature: MA Experiment 108464 PARAMETER Experiment Name: At_Germinating_Seeds_cDNA_P Parameter: Age (day) Value: 4 vs. 0
  misc_feature: MA Experiment 108464 PARAMETER Experiment Name: At_Germinating_Seeds_cDNA_P Parameter: Tissue Value: Germinating Seeds
  misc_feature: MA Experiment ID: 108488 Result: Down-regulated in Transcription
  misc_feature: MA Experiment ID: 108579 Result: Up-regulated in Transcription
  misc_feature: MA Experiment 108579 PARAMETER Experiment Name: At_4deg_Cold_cDNA_P Parameter: Temperature (deg C) Value: 4 vs. 22
  misc_feature: MA Experiment 108579 PARAMETER Experiment Name: At_4deg_Cold_cDNA_P Parameter: Timepoint (hr) Value: 6
  misc_feature: MA Experiment 108579 PARAMETER Experiment Name: At_4deg_Cold_cDNA_P Parameter: Tissue Value: Aerial
  misc_feature: MA Experiment ID: 108594 Result: Up-regulated in Transcription
  misc_feature: MA Experiment 108594 PARAMETER Experiment Name: At_Ler-rhl_Root_cDNA_P Parameter: Plant Line Value: null
  misc_feature: MA Experiment ID: 108595 Result: Down-regulated in Transcription
  misc_feature: MA Experiment 108595 PARAMETER Experiment Name: At_Ler-pi_Ovule_cDNA_P Parameter: Plant Line Value: null
  misc_feature: MA Experiment ID: 20000111 Result: Up-regulated in Transcription
  misc_feature: MA Experiment 20000111 PARAMETER Experiment Name: At_42deg_Heat_cDNA_P Parameter: Temperature (deg C) Value: 42 vs. 22
  misc_feature: MA Experiment 20000111 PARAMETER Experiment Name: At_42deg_Heat_cDNA_P Parameter: Timepoint (hr) Value: 6
  misc_feature: MA Experiment 20000111 PARAMETER Experiment Name: At_42deg_Heat_cDNA_P Parameter: Tissue Value: Aerial
  misc_feature: MA Experiment ID: 20000113 Result: Up-regulated in Transcription
  misc_feature: MA Experiment 20000113 PARAMETER Experiment Name: At_42deg_Heat_cDNA_P Parameter: Temperature (deg C) Value: 42 vs. 22
  misc_feature: MA Experiment 20000113 PARAMETER Experiment Name: At_42deg_Heat_cDNA_P Parameter: Timepoint (hr) Value: 8
  misc_feature: MA Experiment 20000113 PARAMETER Experiment Name: At_42deg_Heat_cDNA_P Parameter: Tissue Value: Aerial
  misc_feature: MA Experiment ID: 20000179 Result: Down-regulated in Transcription
  misc_feature: MA Experiment 20000179 PARAMETER Experiment Name: At_Germinating_Seeds_P Parameter: Age (hr) Value: 6 vs. 0
  misc_feature: MA Experiment 20000179 PARAMETER Experiment Name: At_Germinating_Seeds_P Parameter: Tissue Value: Germinating Seeds
  misc_feature: MA Experiment ID: 20000182 Result: Up-regulated in Transcription
  misc_feature: MA Experiment 20000182 PARAMETER Experiment Name: At_2mM_SA_P Parameter: Age (day) Value: 14
  misc_feature: MA Experiment 20000182 PARAMETER Experiment Name: At_2mM_SA_P Parameter: Organism Value: A. thaliana
  misc_feature: MA Experiment 20000182 PARAMETER Experiment Name: At_2mM_SA_P Parameter: Plant Line Value: WS
  misc_feature: MA Experiment 20000182 PARAMETER Experiment Name: At_2mM_SA_P Parameter: Timepoint (hr) Value: 6
  misc_feature: MA Experiment 20000182 PARAMETER Experiment Name: At_2mM_SA_P Parameter: Tissue Value: Aerial
  misc_feature: MA Experiment 20000182 PARAMETER Experiment Name: At_2mM_SA_P Parameter: Treatment Value: 2mM SA vs. No Treatment
  misc_feature: MA Experiment ID: 20000185 Result: Down-regulated in Transcription
  misc_feature: MA Experiment 20000185 PARAMETER Experiment Name: At_Roots__P Parameter: Age (day) Value: 7 vs. 21
  misc_feature: MA Experiment 20000185 PARAMETER Experiment Name: At_Roots__P Parameter: Organism Value: A. thaliana
  misc_feature: MA Experiment 20000185 PARAMETER Experiment Name: At_Roots__P Parameter: Tissue Value: Roots vs. Whole Plant
  misc_feature: MA Experiment ID: 20000286 Result: Down-regulated in Transcription
  misc_feature: MA Experiment 20000286 PARAMETER Experiment Name: At_Open_Flower_P Parameter: Age (day) Value: 21
  misc_feature: MA Experiment 20000286 PARAMETER Experiment Name: At_Open_Flower_P Parameter: Plant Line Value: WS
  misc_feature: MA Experiment 20000286 PARAMETER Experiment Name: At_Open_Flower_P Parameter: Tissue Value: Half Open vs. Whole Plant
  misc_feature: MA Experiment ID: 20000439 Result: Down-regulated in Transcription
  misc_feature: MA Experiment 20000439 PARAMETER Experiment Name: At_Roots__P Parameter: Age (day) Value: 14 vs. 21
  misc_feature: MA Experiment 20000439 PARAMETER Experiment Name: At_Roots__P Parameter: Organism Value: A. thaliana
  misc_feature: MA Experiment 20000439 PARAMETER Experiment Name: At_Roots__P Parameter: Tissue Value: Roots vs. Whole Plant
  misc_feature: MA Experiment ID: 20001450 Result: Up-regulated in Transcription
  misc_feature: MA Experiment 20001450 PARAMETER Experiment Name: At_Far-red-induction_P Parameter: Age (day) Value: 7
  misc_feature: MA Experiment 20001450 PARAMETER Experiment Name: At_Far-red-induction_P Parameter: Light Value: Far-red vs. White
  misc_feature: MA Experiment 20001450 PARAMETER Experiment Name: At_Far-red-induction_P Parameter: Organism Value: A. thaliana
  misc_feature: MA Experiment 20001450 PARAMETER Experiment Name: At_Far-red-induction_P Parameter: Plant Line Value: Columbia
  misc_feature: MA Experiment 20001450 PARAMETER Experiment Name: At_Far-red-induction_P Parameter: Timepoint (hr) Value: 8
  misc_feature: MA Experiment 20001450 PARAMETER Experiment Name: At_Far-red-induction_P Parameter: Tissue Value: Whole Plant
  misc_feature: MA Experiment ID: 20001557 Result: Down-regulated in Transcription
  misc_feature: MA Experiment 20001557 PARAMETER Experiment Name: At_Drought_Soil_Dry_P Parameter: Age (day) Value: 27
  misc_feature: MA Experiment 20001557 PARAMETER Experiment Name: At_Drought_Soil_Dry_P Parameter: Organism Value: A. thaliana
  misc_feature: MA Experiment 20001557 PARAMETER Experiment Name: At_Drought_Soil_Dry_P Parameter: Plant Line Value: WS
  misc_feature: MA Experiment 20001557 PARAMETER Experiment Name: At_Drought_Soil_Dry_P Parameter: Post Timepoint (hr) Value: 3
  misc_feature: MA Experiment 20001557 PARAMETER Experiment Name: At_Drought_Soil_Dry_P Parameter: Post-Treatment Value: Re-Water vs. No Drought
  misc_feature: MA Experiment 20001557 PARAMETER Experiment Name: At_Drought_Soil_Dry_P Parameter: Timepoint (day) Value: 13
  misc_feature: MA Experiment 20001557 PARAMETER Experiment Name: At_Drought_Soil_Dry_P Parameter: Treatment Value: Drought vs. No Drought
  misc_feature: MA Experiment ID: 20001558 Result: Down-regulated in Transcription
  misc_feature: MA Experiment 20001558 PARAMETER Experiment Name: At_Drought_Soil_Dry_P Parameter: Age (day) Value: 27
  misc_feature: MA Experiment 20001558 PARAMETER Experiment Name: At_Drought_Soil_Dry_P Parameter: Organism Value: A. thaliana
  misc_feature: MA Experiment 20001558 PARAMETER Experiment Name: At_Drought_Soil_Dry_P Parameter: Plant Line Value: WS
  misc_feature: MA Experiment 20001558 PARAMETER Experiment Name: At_Drought_Soil_Dry_P Parameter: Post Timepoint (hr) Value: 6
  misc_feature: MA Experiment 20001558 PARAMETER Experiment Name: At_Drought_Soil_Dry_P Parameter: Post-Treatment Value: Re-Water vs. No Drought
  misc_feature: MA Experiment 20001558 PARAMETER Experiment Name: At_Drought_Soil_Dry_P Parameter: Timepoint (day) Value: 13
  misc_feature: MA Experiment 20001558 PARAMETER Experiment Name: At_Drought_Soil_Dry_P Parameter: Treatment Value: Drought vs. No Drought
atggccaaaacctacgaatctgaaatttgaagaagcataagtttgtctattaaagatggaatcaaagacgttctggatcgttactcttcttctctgtggaacaattcaattagcgatttgcagatcagaagagaaaagcacagagaagacgatgatgctaggaggcgttcatgatctccgaggaaatcagaacagtggagagatcgagagtctcgctcgatttgccattcaagaacataacaaacaacagaacaaaattcttgagttcaagaagattgtcaaagcaagggagcaggtagttgcaggaacgatgtaccacttaaccctagaagcaaaagaaggtgatcagactaagaattttgaagccaaagtgtgggtgaagccatggatgaacttcaaacagttgcaggagttcaaggaatcatcttcttgaatttcacttgttcaagttaatgattacaaatgctctgagagtaattaattatatgtgtgtaaaatactttgctatatgcgaaacctaaaaagttaatgtaatcaagaaacttgttcttatgtcctgcaaatatctttgtatgtttgtttcctgttt

SEQ ID NO: 28746 - protein, 125 aa, Arabidopsis thaliana
  peptide (1)..(125): Ceres Seq. ID no. 12384611
  misc_feature (34)..(125): Homolog of NCBI NO: 2129783 NR Description: cystatin - field mustard
  misc_feature (34)..(124): Homolog of NCBI NO: 18158608 NR Description: cysteine protease inhibitor CPI-1 [Brassica
  misc_feature (34)..(124): Homolog of NCBI NO: 7488521 NR Description: cysteine proteinase inhibitor BCPI-2 - turnip
  misc_feature (30)..(125): Homolog of NCBI NO: 11139270 NR Description: PRLI-interacting factor M [Arabidopsis thaliana]
  misc_feature (34)..(125): Homolog of NCBI NO: 24899735 NR Description: cysteine proteinase inhibitor, putative 1
  misc_feature (34)..(125): Homolog of NCBI NO: 18399630 NR Description: cysteine proteinase inhibitor, putative; protein
  misc_feature (30)..(125): Homolog of NCBI NO: 12321971 NR Description: cysteine proteinase inhibitor, putative;
  misc_feature (34)..(125): Homolog of NCBI NO: 11127597 NR Description: cysteine proteinase inhibitor homolog
  misc_feature (10)..(125): Homolog of NCBI NO: 19347961 NR Description: putative cysteine proteinase inhibitor cystatin B
  misc_feature (1)..(125): Homolog of NCBI NO: 15226769 NR Description: putative cysteine proteinase inhibitor B
MESKTFWIVTLLLCGTIQLAICRSEEKSTEKTMMLGGVHDLRGNQNSGEIESLARFAIQEHNKQQNKILEFKKIVKAREQVVAGTMYHLTLEAKEGDQTKNFEAKVWVKPWMNFKQLQEFKESSS

SEQ ID NO: 28747 - protein, 93 aa, Arabidopsis thaliana
  peptide (1)..(93): Ceres Seq. ID no. 12384612
  misc_feature (2)..(93): Homolog of NCBI NO: 2129783 NR Description: cystatin - field mustard
  misc_feature (2)..(92): Homolog of NCBI NO: 18158608 NR Description: cysteine protease inhibitor CPI-1 [Brassica
  misc_feature (2)..(92): Homolog of NCBI NO: 7488521 NR Description: cysteine proteinase inhibitor BCPI-2 - turnip
  misc_feature (1)..(93): Homolog of NCBI NO: 11139270 NR Description: PRLI-interacting factor M [Arabidopsis thaliana]
  misc_feature (2)..(93): Homolog of NCBI NO: 24899735 NR Description: cysteine proteinase inhibitor, putative 1
  misc_feature (2)..(93): Homolog of NCBI NO: 18399630 NR Description: cysteine proteinase inhibitor, putative; protein
  misc_feature (1)..(93): Homolog of NCBI NO: 12321971 NR Description: cysteine proteinase inhibitor, putative;
  misc_feature (2)..(93): Homolog of NCBI NO: 11127597 NR Description: cysteine proteinase inhibitor homolog
  misc_feature (1)..(93): Homolog of NCBI NO: 19347961 NR Description: putative cysteine proteinase inhibitor cystatin B
  misc_feature (1)..(93): Homolog of NCBI NO: 15226769 NR Description: putative cysteine proteinase inhibitor B
MMLGGVHDLRGNQNSGEIESLARFAIQEHNKQQNKILEFKKIVKAREQVVAGTMYHLTLEAKEGDQTKNFEAKVWVKPWMNFKQLQEFKESSS

SEQ ID NO: 28748 - protein, 92 aa, Arabidopsis thaliana
  peptide (1)..(92): Ceres Seq. ID no. 12384613
  misc_feature (1)..(92): Homolog of NCBI NO: 2129783 NR Description: cystatin - field mustard
  misc_feature (1)..(91): Homolog of NCBI NO: 18158608 NR Description: cysteine protease inhibitor CPI-1 [Brassica
  misc_feature (1)..(91): Homolog of NCBI NO: 7488521 NR Description: cysteine proteinase inhibitor BCPI-2 - turnip
  misc_feature (1)..(92): Homolog of NCBI NO: 11139270 NR Description: PRLI-interacting factor M [Arabidopsis thaliana]
  misc_feature (1)..(92): Homolog of NCBI NO: 24899735 NR Description: cysteine proteinase inhibitor, putative 1
  misc_feature (1)..(92): Homolog of NCBI NO: 18399630 NR Description: cysteine proteinase inhibitor, putative; protein
  misc_feature (1)..(92): Homolog of NCBI NO: 12321971 NR Description: cysteine proteinase inhibitor, putative;
  misc_feature (1)..(92): Homolog of NCBI NO: 11127597 NR Description: cysteine proteinase inhibitor homolog
  misc_feature (1)..(92): Homolog of NCBI NO: 19347961 NR Description: putative cysteine proteinase inhibitor cystatin B
  misc_feature (1)..(92): Homolog of NCBI NO: 15226769 NR Description: putative cysteine proteinase inhibitor B
MLGGVHDLRGNQNSGEIESLARFAIQEHNKQQNKILEFKKIVKAREQVVAGTMYHLTLEAKEGDQTKNFEAKVWVKPWMNFKQLQEFKESSS

SEQ ID NO: 28749 - DNA, 608 bp, Arabidopsis thaliana
  misc_feature (1)..(608): Ceres Seq. ID no. 12393664
  misc_feature: MA Experiment ID: 108595 Result: Down-regulated in Transcription
  misc_feature: MA Experiment 108595 PARAMETER Experiment Name: At_Ler-pi_Ovule_cDNA_P Parameter: Plant Line Value: null
  misc_feature: MA Experiment ID: 20000224 Result: Down-regulated in Transcription
  misc_feature: MA Experiment ID: 20000437 Result: Down-regulated in Transcription
  misc_feature: MA Experiment 20000437 PARAMETER Experiment Name: At_Drought_P Parameter: Age (day) Value: 8
  misc_feature: MA Experiment 20000437 PARAMETER Experiment Name: At_Drought_P Parameter: Organism Value: A. thaliana
  misc_feature: MA Experiment 20000437 PARAMETER Experiment Name: At_Drought_P Parameter: Plant Line Value: WS
  misc_feature: MA Experiment 20000437 PARAMETER Experiment Name: At_Drought_P Parameter: Timepoint (hr) Value: 24
  misc_feature: MA Experiment 20000437 PARAMETER Experiment Name: At_Drought_P Parameter: Tissue Value: Whole Plant
  misc_feature: MA Experiment 20000437 PARAMETER Experiment Name: At_Drought_P Parameter: Treatment Value: Drought vs. No Drought
  misc_feature: MA Experiment ID: 20000452 Result: Down-regulated in Transcription
  misc_feature: MA Experiment 20000452 PARAMETER Experiment Name: At_CS6879_Shoots-Roots_P Parameter: Age (day) Value: 14
  misc_feature: MA Experiment 20000452 PARAMETER Experiment Name: At_CS6879_Shoots-Roots_P Parameter: Organism Value: A. thaliana
  misc_feature: MA Experiment 20000452 PARAMETER Experiment Name: At_CS6879_Shoots-Roots_P Parameter: Plant Line Value: CS6879 vs. WS
  misc_feature: MA Experiment 20000452 PARAMETER Experiment Name: At_CS6879_Shoots-Roots_P Parameter: Tissue Value: Shoots
  misc_feature: MA Experiment ID: 20001451 Result: Down-regulated in Transcription
  misc_feature: MA Experiment 20001451 PARAMETER Experiment Name: At_Far-red-induction_P Parameter: Age (day) Value: 7
  misc_feature: MA Experiment 20001451 PARAMETER Experiment Name: At_Far-red-induction_P Parameter: Light Value: Far-red vs. White
  misc_feature: MA Experiment 20001451 PARAMETER Experiment Name: At_Far-red-induction_P Parameter: Organism Value: A. thaliana
  misc_feature: MA Experiment 20001451 PARAMETER Experiment Name: At_Far-red-induction_P Parameter: Plant Line Value: Columbia
  misc_feature: MA Experiment 20001451 PARAMETER Experiment Name: At_Far-red-induction_P Parameter: Timepoint (hr) Value: 24
  misc_feature: MA Experiment 20001451 PARAMETER Experiment Name: At_Far-red-induction_P Parameter: Tissue Value: Whole Plant
ggaaacaaaagaaatcaaaaatccgatggggaggaagaagggattgccggagttcgaagagtcggcgccggatggattcgatcctgagaatccgtacaaggatccggttgcgatggtggagatgagagaacacattgttcgtgagaaatggatccatatcgagaaggctaagatcttacgtgagaaggtcaaatggtgttaccgcgtcgaaggcgttaaccattaccagaagtgtcgtcatcttgttcagcagtatctcgatgccactcgcggcgttggttggggcaaagaccaccgtcctatctctcttcacggtcctaagccagtagctgttgaagaagctgaatgatgttgtgtgcgtgattgatctttggtgagtgagagctttgattaccatacatgaatggagtctctgttgcaagttaatgctccacatcaaggttgttacttgatttatgcttttctgtttcgtaaaacatatattactaattggacttgggagttccaattggttaagctcagcttcgtttttcaaatgatttatatatatttttggcttgttgtacattgcgtccctgtttgtcgaaataatgaaattcccaagtacc

SEQ ID NO: 28750 - protein, 115 aa, Arabidopsis thaliana
  peptide (1)..(115): Ceres Seq. ID no. 12393665
  misc_feature (21)..(86): Homolog of NCBI NO: 32420171 NR Description: NADH-UBIQUINONE OXIDOREDUCTASE 12 KD SUBUNIT
  misc_feature (21)..(86): Homolog of NCBI NO: 400649 NR Description: NADH-ubiquinone oxidoreductase 12 kDa subunit,
  misc_feature (12)..(115): Homolog of NCBI NO: 37537116 NR Description: unknown protein [Oryza sativa (japonica
  misc_feature (9)..(105): Homolog of NCBI NO: 11994104 NR Description: gene_id:MYF24.13~similar to unknown
  misc_feature (9)..(112): Homolog of NCBI NO: 18401879 NR Description: expressed protein
  misc_feature (9)..(115): Homolog of NCBI NO: 18402495 NR Description: expressed protein
ETKEIKNPMGRKKGLPEFEESAPDGFDPENPYKDPVAMVEMREHIVREKWIHIEKAKILREKVKWCYRVEGVNHYQKCRHLVQQYLDATRGVGWGKDHRPISLHGPKPVAVEEAE

SEQ ID NO: 28751 - protein, 107 aa, Arabidopsis thaliana
  peptide (1)..(107): Ceres Seq. ID no. 12393666
  misc_feature (13)..(78): Homolog of NCBI NO: 32420171 NR Description: NADH-UBIQUINONE OXIDOREDUCTASE 12 KD SUBUNIT
  misc_feature (13)..(78): Homolog of NCBI NO: 400649 NR Description: NADH-ubiquinone oxidoreductase 12 kDa subunit,
  misc_feature (4)..(107): Homolog of NCBI NO: 37537116 NR Description: unknown protein [Oryza sativa (japonica
  misc_feature (1)..(97): Homolog of NCBI NO: 11994104 NR Description: gene_id:MYF24.13~similar to unknown
  misc_feature (1)..(104): Homolog of NCBI NO: 18401879 NR Description: expressed protein
  misc_feature (1)..(107): Homolog of NCBI NO: 18402495 NR Description: expressed protein
MGRKKGLPEFEESAPDGFDPENPYKDPVAMVEMREHIVREKWIHIEKAKILREKVKWCYRVEGVNHYQKCRHLVQQYLDATRGVGWGKDHRPISLHGPKPVAVEEAE

SEQ ID NO: 28752 - protein, 78 aa, Arabidopsis thaliana
  peptide (1)..(78): Ceres Seq. ID no. 12393667
  misc_feature (1)..(49): Homolog of NCBI NO: 32420171 NR Description: NADH-UBIQUINONE OXIDOREDUCTASE 12 KD SUBUNIT
  misc_feature (1)..(49): Homolog of NCBI NO: 400649 NR Description: NADH-ubiquinone oxidoreductase 12 kDa subunit,
  misc_feature (1)..(78): Homolog of NCBI NO: 37537116 NR Description: unknown protein [Oryza sativa (japonica
  misc_feature (1)..(68): Homolog of NCBI NO: 11994104 NR Description: gene_id:MYF24.13~similar to unknown
  misc_feature (1)..(75): Homolog of NCBI NO: 18401879 NR Description: expressed protein
  misc_feature (1)..(78): Homolog of NCBI NO: 18402495 NR Description: expressed protein
MVEMREHIVREKWIHIEKAKILREKVKWCYRVEGVNHYQKCRHLVQQYLDATRGVGWGKDHRPISLHGPKPVAVEEAE

SEQ ID NO: 28753 - DNA, 636 bp, Arabidopsis thaliana
  misc_feature (1)..(636): Ceres Seq. ID no. 13496892
  misc_feature: MA Experiment ID: 108434 Result: Up-regulated in Transcription
  misc_feature: MA Experiment 108434 PARAMETER Experiment Name: At_Root_Tips_cDNA_P Parameter: Tissue Value: Root Tips
  misc_feature: MA Experiment ID: 108595 Result: Up-regulated in Transcription
  misc_feature: MA Experiment 108595 PARAMETER Experiment Name: At_Ler-pi_Ovule_cDNA_P Parameter: Plant Line Value: null
aatcatcactttcacaatcttcttcatcgatttctctcttccaaatctcccaaaagatgtcgaaccctagagttttcttcgacatgagtctcagcggtactcccatcggacggatcgagatggagcttttcgctgatacaaccccaaacacggcggagaatttccgtgctctctgtaccggcgagaaaggaatgggaaagctaagttcaaggacgagaactttatcaagaagcatacaggagctgggattctctcaatggctaactctggtcctaacactaacggatctcagttcttcatctgtaccgataagacgtcgtggttagatggtaagcacgttgtgtttggacaagttgttaaaggcttggacgtcgtgaaggcgattgagaaagttggatctgattctggaaagacttccaaagtcgttaccatcactgattgtggtcagctttcttagatctaagtgagaaagtgagagactttgatctttatgagtaataatggtgtcttttgctttcggttgttcttcctcttaccttaatggattattctgtttagggtttgagttttcgtttcagagtttgtaacaaaacccttttgtgttttctggggtttgaaataattatgagcttactc

SEQ ID NO: 28754 - protein, 107 aa, Arabidopsis thaliana
  peptide (1)..(107): Ceres Seq. ID no. 13496893
  misc_feature (19)..(66): Homolog of NCBI NO: 11270318 NR Description: peptidylprolyl isomerase (EC 5.2.1.8) CYP18
  misc_feature (20)..(66): Homolog of NCBI NO: 15227259 NR Description: cytosolic cyclophilin (ROC3) [Arabidopsis
  misc_feature (19)..(63): Homolog of NCBI NO: 29124975 NR Description: cyclophilin [Populus tremuloides]
  misc_feature (19)..(66): Homolog of NCBI NO: 18146786 NR Description: CYP1 [Vigna radiata]
  misc_feature (19)..(67): Homolog of NCBI NO: 11270322 NR Description: peptidylprolyl isomerase (EC 5.2.1.8)
  misc_feature (20)..(66): Homolog of NCBI NO: 18076088 NR Description: cyclophilin [Ricinus communis]
  misc_feature (19)..(66): Homolog of NCBI NO: 11270316 NR Description: peptidylprolyl isomerase (EC 5.2.1.8)
  misc_feature (20)..(66): Homolog of NCBI NO: 21886603 NR Description: peptidylprolyl isomerase (cyclophilin) [Betula
  misc_feature (19)..(66): Homolog of NCBI NO: 3334157 NR Description: Peptidyl-prolyl cis-trans isomerase (PPIase)
  misc_feature (19)..(67): Homolog of NCBI NO: 15236211 NR Description: peptidylprolyl isomerase (cyclophilin)
SSLSQSSSSISLFQISQKMSNPRVFFDMSLSGTPIGRIEMELFADTTPNTAENFRALCTGEKGMGKLSSRTRTLSRSIQELGFSQWLTLVLTLTDLSSSSVPIRRRG

SEQ ID NO: 28755 - protein, 89 aa, Arabidopsis thaliana
  peptide (1)..(89): Ceres Seq. ID no. 13496894
  misc_feature (1)..(48): Homolog of NCBI NO: 11270318 NR Description: peptidylprolyl isomerase (EC 5.2.1.8) CYP18
  misc_feature (2)..(48): Homolog of NCBI NO: 15227259 NR Description: cytosolic cyclophilin (ROC3) [Arabidopsis
  misc_feature (1)..(45): Homolog of NCBI NO: 29124975 NR Description: cyclophilin [Populus tremuloides]
  misc_feature (1)..(48): Homolog of NCBI NO: 18146786 NR Description: CYP1 [Vigna radiata]
  misc_feature (1)..(49): Homolog of NCBI NO: 11270322 NR Description: peptidylprolyl isomerase (EC 5.2.1.8)
  misc_feature (2)..(48): Homolog of NCBI NO: 18076088 NR Description: cyclophilin [Ricinus communis]
  misc_feature (1)..(48): Homolog of NCBI NO: 11270316 NR Description: peptidylprolyl isomerase (EC 5.2.1.8)
  misc_feature (2)..(48): Homolog of NCBI NO: 21886603 NR Description: peptidylprolyl isomerase (cyclophilin) [Betula
  misc_feature (1)..(48): Homolog of NCBI NO: 3334157 NR Description: Peptidyl-prolyl cis-trans isomerase (PPIase)
  misc_feature (1)..(49): Homolog of NCBI NO: 15236211 NR Description: peptidylprolyl isomerase (cyclophilin)
MSNPRVFFDMSLSGTPIGRIEMELFADTTPNTAENFRALCTGEKGMGKLSSRTRTLSRSIQELGFSQWLTLVLTLTDLSSSSVPIRRRG

SEQ ID NO: 28756 - protein, 80 aa, Arabidopsis thaliana
  peptide (1)..(80): Ceres Seq. ID no. 13496895
  misc_feature (1)..(39): Homolog of NCBI NO: 11270318 NR Description: peptidylprolyl isomerase (EC 5.2.1.8) CYP18
  misc_feature (1)..(39): Homolog of NCBI NO: 15227259 NR Description: cytosolic cyclophilin (ROC3) [Arabidopsis
  misc_feature (1)..(36): Homolog of NCBI NO: 29124975 NR Description: cyclophilin [Populus tremuloides]
  misc_feature (1)..(39): Homolog of NCBI NO: 18146786 NR Description: CYP1 [Vigna radiata]
  misc_feature (1)..(40): Homolog of NCBI NO: 11270322 NR Description: peptidylprolyl isomerase (EC 5.2.1.8)
  misc_feature (1)..(39): Homolog of NCBI NO: 18076088 NR Description: cyclophilin [Ricinus communis]
  misc_feature (1)..(39): Homolog of NCBI NO: 11270316 NR Description: peptidylprolyl isomerase (EC 5.2.1.8)
  misc_feature (1)..(39): Homolog of NCBI NO: 21886603 NR Description: peptidylprolyl isomerase (cyclophilin) [Betula
  misc_feature (1)..(39): Homolog of NCBI NO: 3334157 NR Description: Peptidyl-prolyl cis-trans isomerase (PPIase)
  misc_feature (1)..(40): Homolog of NCBI NO: 15236211 NR Description: peptidylprolyl isomerase (cyclophilin)
MSLSGTPIGRIEMELFADTTPNTAENFRALCTGEKGMGKLSSRTRTLSRSIQELGFSQWLTLVLTLTDLSSSSVPIRRRG

SEQ ID NO: 28757 - DNA, 1000 bp, Arabidopsis thaliana
  misc_feature (1)..(1000): Ceres Seq. ID no. 13489993
  misc_feature: MA Experiment ID: 108434 Result: Up-regulated in Transcription
  misc_feature: MA Experiment 108434 PARAMETER Experiment Name: At_Root_Tips_cDNA_P Parameter: Tissue Value: Root Tips
  misc_feature: MA Experiment ID: 108488 Result: Down-regulated in Transcription
  misc_feature: MA Experiment ID: 20000185 Result: Up-regulated in Transcription
  misc_feature: MA Experiment 20000185 PARAMETER Experiment Name: At_Roots__P Parameter: Age (day) Value: 7 vs. 21
  misc_feature: MA Experiment 20000185 PARAMETER Experiment Name: At_Roots__P Parameter: Organism Value: A. thaliana
  misc_feature: MA Experiment 20000185 PARAMETER Experiment Name: At_Roots__P Parameter: Tissue Value: Roots vs. Whole Plant
gctctcgacaaagcagctgagcgacttttgcacatttctagggttccaatcaaaatctatctgcaacaaaaatggctaatcgtttcagatcagggatctccttcttcaagaccatcgccgtaacagattctgtctcctccgttagatccaagtcgcttttcccagcgttgagaacttatgcaactgcttctgctcaaacaaccgctaatgttaaggtgcctattgctttagttggtgaaaatgggaactttgcttcatggctatacattgcagctgtgaaaatgaattccttggaaaagattgagacggatctttctgagatgattgaggcaatgaagacagctcctatttttgctcagtttacaaaggatccctctgttcctagagggacaagattggctgctattagggatgcttgtgatcaagcaaagtttgccgaacccactaagaacttcctctctttgttagctgagaatggaaagctgaagaacctagatgccattgtgaagaaatttatgcagctgacaaacgcacataggggagatgtcaaagttttggttaccacagtcattccgcttccccctgctgaggagaaagaactgactgagacgcttcaggagatcattggagcagggaagaaaatcactgtggaacaaaagattgatccaagtatctacggtggactaatcgtagagttccaacaaaaggtgttggacatgtcaatcaggacaagggcacaacagatggagaggctcctccgtgaacctgttgacttcaacaacctctgaaaatcttgagagaaatttcccccaagaaaacatgcttgtgatgaatgccaccaattgacaaataaatatggaccctcctgggaaacaatataatagctggccacttctctccctttgaattttgtcatttgctttttacatattgttgtttgcttcgaaataaagcttttcgagacatcaaatttcaatgagattgtttttgtttagatttg

SEQ ID NO: 28758 - protein, 238 aa, Arabidopsis thaliana
  peptide (1)..(238): Ceres Seq. ID no. 13489994
  misc_feature (58)..(229): Pfam Name: ATP synthase delta (OSCP) subunit Pfam Description: ATP synthase delta (OSCP) subunit
  misc_feature (34)..(233): Homolog of NCBI NO: 31208781 NR Description: ENSANGP00000011882 [Anopheles gambiae]
  misc_feature (21)..(231): Homolog of NCBI NO: 27806307 NR Description: ATP synthase, H+ transporting, mitochondrial F1
  misc_feature (33)..(233): Homolog of NCBI NO: 4502303 NR Description: ATP synthase, H+ transporting, mitochondrial F1
  misc_feature (1)..(234): Homolog of NCBI NO: 23507248 NR Description: oligomycin sensitivity conferring protein [Silene
  misc_feature (1)..(234): Homolog of NCBI NO: 23507246 NR Description: oligomycin sensitivity conferring protein [Silene
  misc_feature (1)..(235): Homolog of NCBI NO: 4774163 NR Description: F1-ATP synthase delta subunit [Ipomoea batatas]
  misc_feature (1)..(235): Homolog of NCBI NO: 114682 NR Description: ATP synthase delta chain, mitochondrial precursor
  misc_feature (1)..(238): Homolog of NCBI NO: 1655482 NR Description: delta subunit of mitochondrial F1-ATPase
  misc_feature (1)..(238): Homolog of NCBI NO: 14190495 NR Description: AT5g13450/T22N19_100 [Arabidopsis thaliana]
  misc_feature (1)..(238): Homolog of NCBI NO: 15240628 NR Description: delta subunit of mitochondrial F1-ATPase
MANRFRSGISFFKTIAVTDSVSSVRSKSLFPALRTYATASAQTTANVKVPIALVGENGNFASWLYIAAVKMNSLEKIETDLSEMIEAMKTAPIFAQFTKDPSVPRGTRLAAIRDACDQAKFAEPTKNFLSLLAENGKLKNLDAIVKKFMQLTNAHRGDVKVLVTTVIPLPPAEEKELTETLQEIIGAGKKITVEQKIDPSIYGGLIVEFQQKVLDMSIRTRAQQMERLLREPVDFNNL

SEQ ID NO: 28759 - protein, 168 aa, Arabidopsis thaliana
  peptide (1)..(168): Ceres Seq. ID no. 13489995
  misc_feature (1)..(159): Pfam Name: ATP synthase delta (OSCP) subunit Pfam Description: ATP synthase delta (OSCP) subunit
  misc_feature (1)..(163): Homolog of NCBI NO: 31208781 NR Description: ENSANGP00000011882 [Anopheles gambiae]
  misc_feature (1)..(161): Homolog of NCBI NO: 27806307 NR Description: ATP synthase, H+ transporting, mitochondrial F1
  misc_feature (1)..(163): Homolog of NCBI NO: 4502303 NR Description: ATP synthase, H+ transporting, mitochondrial F1
  misc_feature (1)..(164): Homolog of NCBI NO: 23507248 NR Description: oligomycin sensitivity conferring protein [Silene
  misc_feature (1)..(164): Homolog of NCBI NO: 23507246 NR Description: oligomycin sensitivity conferring protein [Silene
  misc_feature (1)..(165): Homolog of NCBI NO: 4774163 NR Description: F1-ATP synthase delta subunit [Ipomoea batatas]
  misc_feature (1)..(165): Homolog of NCBI NO: 114682 NR Description: ATP synthase delta chain, mitochondrial precursor
  misc_feature (1)..(168): Homolog of NCBI NO: 1655482 NR Description: delta subunit of mitochondrial F1-ATPase
  misc_feature (1)..(168): Homolog of NCBI NO: 14190495 NR Description: AT5g13450/T22N19_100 [Arabidopsis thaliana]
  misc_feature (1)..(168): Homolog of NCBI NO: 15240628 NR Description: delta subunit of mitochondrial F1-ATPase
MNSLEKIETDLSEMIEAMKTAPIFAQFTKDPSVPRGTRLAAIRDACDQAKFAEPTKNFLSLLAENGKLKNLDAIVKKFMQLTNAHRGDVKVLVTTVIPLPPAEEKELTETLQEIIGAGKKITVEQKIDPSIYGGLIVEFQQKVLDMSIRTRAQQMERLLREPVDFNNL

SEQ ID NO: 28760 - protein, 155 aa, Arabidopsis thaliana
  peptide (1)..(155): Ceres Seq. ID no. 13489996
  misc_feature (1)..(146): Pfam Name: ATP synthase delta (OSCP) subunit Pfam Description: ATP synthase delta (OSCP) subunit
  misc_feature (1)..(150): Homolog of NCBI NO: 31208781 NR Description: ENSANGP00000011882 [Anopheles gambiae]
  misc_feature (1)..(148): Homolog of NCBI NO: 27806307 NR Description: ATP synthase, H+ transporting, mitochondrial F1
  misc_feature (1)..(150): Homolog of NCBI NO: 4502303 NR Description: ATP synthase, H+ transporting, mitochondrial F1
  misc_feature (1)..(151): Homolog of NCBI NO: 23507248 NR Description: oligomycin sensitivity conferring protein [Silene
  misc_feature (1)..(151): Homolog of NCBI NO: 23507246 NR Description: oligomycin sensitivity conferring protein [Silene
  misc_feature (1)..(152): Homolog of NCBI NO: 4774163 NR Description: F1-ATP synthase delta subunit [Ipomoea batatas]
  misc_feature (1)..(152): Homolog of NCBI NO: 114682 NR Description: ATP synthase delta chain, mitochondrial precursor
  misc_feature (1)..(155): Homolog of NCBI NO: 1655482 NR Description: delta subunit of mitochondrial F1-ATPase
  misc_feature (1)..(155): Homolog of NCBI NO: 14190495 NR Description: AT5g13450/T22N19_100 [Arabidopsis thaliana]
  misc_feature (1)..(155): Homolog of NCBI NO: 15240628 NR Description: delta subunit of mitochondrial F1-ATPase
MIEAMKTAPIFAQFTKDPSVPRGTRLAAIRDACDQAKFAEPTKNFLSLLAENGKLKNLDAIVKKFMQLTNAHRGDVKVLVTTVIPLPPAEEKELTETLQEIIGAGKKITVEQKIDPSIYGGLIVEFQQKVLDMSIRTRAQQMERLLREPVDFNNL

SEQ ID NO: 28761 - DNA, 1067 bp, Arabidopsis thaliana
  misc_feature (1)..(1067): Ceres Seq. ID no. 12327360
  misc_feature: MA Experiment ID: 108585 Result: Up-regulated in Transcription
  misc_feature: MA Experiment 108585 PARAMETER Experiment Name: At_5mM_NaNP_cDNA_P Parameter: Timepoint (hr) Value: 6
  misc_feature: MA Experiment 108585 PARAMETER Experiment Name: At_5mM_NaNP_cDNA_P Parameter: Tissue Value: Aerial
  misc_feature: MA Experiment 108585 PARAMETER Experiment Name: At_5mM_NaNP_cDNA_P Parameter: Treatment Value: null
  misc_feature: MA Experiment ID: 20000315 Result: Down-regulated in Transcription
  misc_feature: MA Experiment 20000315 PARAMETER Experiment Name: At_14day_Shoots-Roots_Sub_P Parameter: Age (day) Value: 14
  misc_feature: MA Experiment 20000315 PARAMETER Experiment Name: At_14day_Shoots-Roots_Sub_P Parameter: Organism Value: A. thaliana
  misc_feature: MA Experiment 20000315 PARAMETER Experiment Name: At_14day_Shoots-Roots_Sub_P Parameter: Plant Line Value: WS
  misc_feature: MA Experiment 20000315 PARAMETER Experiment Name: At_14day_Shoots-Roots_Sub_P Parameter: Tissue Value: Shoots vs. Whole Plant
  misc_feature: MA Experiment ID: 20000327 Result: Down-regulated in Transcription
  misc_feature: MA Experiment 20000327 PARAMETER Experiment Name: At_42deg_Heat_Sub_P Parameter: Age (day) Value: 14
  misc_feature: MA Experiment 20000327 PARAMETER Experiment Name: At_42deg_Heat_Sub_P Parameter: Organism Value: A. thaliana
  misc_feature: MA Experiment 20000327 PARAMETER Experiment Name: At_42deg_Heat_Sub_P Parameter: Plant Line Value: WS
  misc_feature: MA Experiment 20000327 PARAMETER Experiment Name: At_42deg_Heat_Sub_P Parameter: Temperature (deg C) Value: 42 vs. 22
  misc_feature: MA Experiment 20000327 PARAMETER Experiment Name: At_42deg_Heat_Sub_P Parameter: Timepoint (hr) Value: 1
  misc_feature: MA Experiment 20000327 PARAMETER Experiment Name: At_42deg_Heat_Sub_P Parameter: Tissue Value: Aerial
  misc_feature: MA Experiment ID: 20000355 Result: Down-regulated in Transcription
  misc_feature: MA Experiment 20000355 PARAMETER Experiment Name: At_Siliques_Sub_P Parameter: Age (day) Value: 21
  misc_feature: MA Experiment 20000355 PARAMETER Experiment Name: At_Siliques_Sub_P Parameter: Organism Value: A. thaliana
  misc_feature: MA Experiment 20000355 PARAMETER Experiment Name: At_Siliques_Sub_P Parameter: Plant Line Value: WS
  misc_feature: MA Experiment 20000355 PARAMETER Experiment Name: At_Siliques_Sub_P Parameter: Tissue Value: Less Than 5mm Siliques vs. Whole Plant
aggaatctttgcttctcagacaatggcggcttctacattgtacaaatcctgtcttcttcaacccaagtctggctccaccactcgccgcctaaacccttctctcgttaaccctcttacgaatcccacaagagtttccgttttggggaagagtcgtagagatgtctttgcgaaagcttcgattgaaatggcggaatcgaattcgataccttccgttgttgtcaattcctctaagcagcatggtccaatcatcgtgattgataattacgacagcttcacatacaatctctgccagtatatgggagagctaggatgccattttgaagtttaccgcaatgatgaacttacagtagaagagctgaaaaaaaaaaatccaagaggggtgttgatttctccagggcctggtacccctcaagactctgggatttccttgcaaactgttttggaactcggaccacttgttcctttatttggagtatgtatgggtttgcagtgtataggagaagcatttggaggaaagattgtgcggtcaccatttggtgttatgcatgggaaaagctcaatggttcactatgatgagaaaggagaagaaggcttgttctctggattatcaaaccctttcattgtaggtagatatcacagtctcgtgatcgaaaaagatacatttcctagtgatgaactcgaggttacagcatggacagaagatggtctggtaatggctgcccgtcacagaaagtacaagcatatacagggagtccaatttcatccggagagtattataacaactgagggcaagacaattgtccgcaatttcatcaaaatagtagagaaaaaggagtccgagaagctgacatagactagcctgaatgagaaaatcagctgtgttcgaatagtgcctccctgtaataatatttgccaatgcaaaatgttccttgccatcttcccattgtttctatcataaaaattcgacttgttcctccacttttacttaatttgtgaaaagtggaaagcagaaagctatggttatttaagcatgcctagcgacaaaaatggccgagggcctttcagtt

SEQ ID NO: 28762 - protein, 283 aa, Arabidopsis thaliana
  peptide (1)..(283): Ceres Seq. ID no. 12327361
  misc_feature (83)..(273): Pfam Name: Glutamine amidotransferase class-I Pfam Description: Glutamine amidotransferase class-I
  misc_feature (82)..(271): Homolog of NCBI NO: 11467408 NR Description: anthranilate synthase component II [Cyanophora
  misc_feature (82)..(272): Homolog of NCBI NO: 37520452 NR Description: anthranilate synthase component II [Gloeobacter
  misc_feature (49)..(281): Homolog of NCBI NO: 21741992 NR Description: OSJNBa0060P14.13 [Oryza sativa (japonica
  misc_feature (51)..(279): Homolog of NCBI NO: 28301926 NR Description: putative anthranilate synthase beta subunit
  misc_feature (62)..(283): Homolog of NCBI NO: 15221810 NR Description: F5A9.17; protein id: At1g24807.1 [Arabidopsis
  misc_feature (62)..(283): Homolog of NCBI NO: 15221840 NR Description: F5A9.7; protein id: At1g25083.1 [Arabidopsis
  misc_feature (51)..(283): Homolog of NCBI NO: 25403004 NR Description: probable anthranilate synthase beta subunit
  misc_feature (8)..(282): Homolog of NCBI NO: 15242893 NR Description: anthranilate synthase beta chain
  misc_feature (8)..(282): Homolog of NCBI NO: 21594026 NR Description: anthranilate synthase beta chain [Arabidopsis
  misc_feature (8)..(283): Homolog of NCBI NO: 15222532 NR Description: anthranilate synthase beta subunit
GIFASQTMAASTLYKSCLLQPKSGSTTRRLNPSLVNPLTNPTRVSVLGKSRRDVFAKASIEMAESNSIPSVVVNSSKQHGPIIVIDNYDSFTYNLCQYMGELGCHFEVYRNDELTVEELKKKNPRGVLISPGPGTPQDSGISLQTVLELGPLVPLFGVCMGLQCIGEAFGGKIVRSPFGVMHGKSSMVHYDEKGEEGLFSGLSNPFIVGRYHSLVIEKDTFPSDELEVTAWTEDGLVMAARHRKYKHIQGVQFHPESIITTEGKTIVRNFIKIVEKKESEKLT

SEQ ID NO: 28763 - protein, 276 aa, Arabidopsis thaliana
  peptide (1)..(276): Ceres Seq. ID no. 12327362
  misc_feature (76)..(266): Pfam Name: Glutamine amidotransferase class-I Pfam Description: Glutamine amidotransferase class-I
  misc_feature (75)..(264): Homolog of NCBI NO: 11467408 NR Description: anthranilate synthase component II [Cyanophora
  misc_feature (75)..(265): Homolog of NCBI NO: 37520452 NR Description: anthranilate synthase component II [Gloeobacter
  misc_feature (42)..(274): Homolog of NCBI NO: 21741992 NR Description: OSJNBa0060P14.13 [Oryza sativa (japonica
  misc_feature (44)..(272): Homolog of NCBI NO: 28301926 NR Description: putative anthranilate synthase beta subunit
  misc_feature (55)..(276): Homolog of NCBI NO: 15221810 NR Description: F5A9.17; protein id: At1g24807.1 [Arabidopsis
  misc_feature (55)..(276): Homolog of NCBI NO: 15221840 NR Description: F5A9.7; protein id: At1g25083.1 [Arabidopsis
  misc_feature (44)..(276): Homolog of NCBI NO: 25403004 NR Description: probable anthranilate synthase beta subunit
  misc_feature (1)..(275): Homolog of NCBI NO: 15242893 NR Description: anthranilate synthase beta chain
  misc_feature (1)..(275): Homolog of NCBI NO: 21594026 NR Description: anthranilate synthase beta chain [Arabidopsis
  misc_feature (1)..(276): Homolog of NCBI NO: 15222532 NR Description: anthranilate synthase beta subunit
MAASTLYKSCLLQPKSGSTTRRLNPSLVNPLTNPTRVSVLGKSRRDVFAKASIEMAESNSIPSVVVNSSKQHGPIIVIDNYDSFTYNLCQYMGELGCHFEVYRNDELTVEELKKKNPRGVLISPGPGTPQDSGISLQTVLELGPLVPLFGVCMGLQCIGEAFGGKIVRSPFGVMHGKSSMVHYDEKGEEGLFSGLSNPFIVGRYHSLVIEKDTFPSDELEVTAWTEDGLVMAARHRKYKHIQGVQFHPESIITTEGKTIVRNFIKIVEKKESEKLT

SEQ ID NO: 28764 - protein, 222 aa, Arabidopsis thaliana
  peptide (1)..(222): Ceres Seq. ID no. 12327363
  misc_feature (22)..(212): Pfam Name: Glutamine amidotransferase class-I Pfam Description: Glutamine amidotransferase class-I
  misc_feature (21)..(210): Homolog of NCBI NO: 11467408 NR Description: anthranilate synthase component II [Cyanophora
  misc_feature (21)..(211): Homolog of NCBI NO: 37520452 NR Description: anthranilate synthase component II [Gloeobacter
  misc_feature (1)..(220): Homolog of NCBI NO: 21741992 NR Description: OSJNBa0060P14.13 [Oryza sativa (japonica
  misc_feature (1)..(218): Homolog of NCBI NO: 28301926 NR Description: putative anthranilate synthase beta subunit
  misc_feature (1)..(222): Homolog of NCBI NO: 15221810 NR Description: F5A9.17; protein id: At1g24807.1 [Arabidopsis
  misc_feature (1)..(222): Homolog of NCBI NO: 15221840 NR Description: F5A9.7; protein id: At1g25083.1 [Arabidopsis
  misc_feature (1)..(222): Homolog of NCBI NO: 25403004 NR Description: probable anthranilate synthase beta subunit
  misc_feature (1)..(221): Homolog of NCBI NO: 15242893 NR Description: anthranilate synthase beta chain
  misc_feature (1)..(221): Homolog of NCBI NO: 21594026 NR Description: anthranilate synthase beta chain [Arabidopsis
  misc_feature (1)..(222): Homolog of NCBI NO: 15222532 NR Description: anthranilate synthase beta subunit
MAESNSIPSVVVNSSKQHGPIIVIDNYDSFTYNLCQYMGELGCHFEVYRNDELTVEELKKKNPRGVLISPGPGTPQDSGISLQTVLELGPLVPLFGVCMGLQCIGEAFGGKIVRSPFGVMHGKSSMVHYDEKGEEGLFSGLSNPFIVGRYHSLVIEKDTFPSDELEVTAWTEDGLVMAARHRKYKHIQGVQFHPESIITTEGKTIVRNFIKIVEKKESEKLT

SEQ ID NO: 28765 - DNA, 524 bp, Arabidopsis thaliana
  misc_feature (1)..(524): Ceres Seq. ID no. 12385784
  misc_feature: MA Experiment ID: 108434 Result: Up-regulated in Transcription
  misc_feature: MA Experiment 108434 PARAMETER Experiment Name: At_Root_Tips_cDNA_P Parameter: Tissue Value: Root Tips
  misc_feature: MA Experiment ID: 108461 Result: Down-regulated in Transcription
  misc_feature: MA Experiment 108461 PARAMETER Experiment Name: At_Germinating_Seeds_cDNA_P Parameter: Age (day) Value: 1 vs. 0
  misc_feature: MA Experiment 108461 PARAMETER Experiment Name: At_Germinating_Seeds_cDNA_P Parameter: Tissue Value: Germinating Seeds
  misc_feature: MA Experiment ID: 108462 Result: Down-regulated in Transcription
  misc_feature: MA Experiment 108462 PARAMETER Experiment Name: At_Germinating_Seeds_cDNA_P Parameter: Age (day) Value: 2 vs. 0
  misc_feature: MA Experiment 108462 PARAMETER Experiment Name: At_Germinating_Seeds_cDNA_P Parameter: Tissue Value: Germinating Seeds
  misc_feature: MA Experiment ID: 108463 Result: Down-regulated in Transcription
  misc_feature: MA Experiment 108463 PARAMETER Experiment Name: At_Germinating_Seeds_cDNA_P Parameter: Age (day) Value: 3 vs. 0
  misc_feature: MA Experiment 108463 PARAMETER Experiment Name: At_Germinating_Seeds_cDNA_P Parameter: Tissue Value: Germinating Seeds
  misc_feature: MA Experiment ID: 108464 Result: Down-regulated in Transcription
  misc_feature: MA Experiment 108464 PARAMETER Experiment Name: At_Germinating_Seeds_cDNA_P Parameter: Age (day) Value: 4 vs. 0
  misc_feature: MA Experiment 108464 PARAMETER Experiment Name: At_Germinating_Seeds_cDNA_P Parameter: Tissue Value: Germinating Seeds
  misc_feature: MA Experiment ID: 108572 Result: Down-regulated in Transcription
  misc_feature: MA Experiment 108572 PARAMETER Experiment Name: At_Drought_cDNA_P Parameter: Timepoint (hr) Value: 1
  misc_feature: MA Experiment 108572 PARAMETER Experiment Name: At_Drought_cDNA_P Parameter: Tissue Value: Aerial
  misc_feature: MA Experiment 108572 PARAMETER Experiment Name: At_Drought_cDNA_P Parameter: Treatment Value: Drought vs. No Drought
  misc_feature: MA Experiment ID: 108573 Result: Down-regulated in Transcription
  misc_feature: MA Experiment 108573 PARAMETER Experiment Name: At_Drought_cDNA_P Parameter: Timepoint (hr) Value: 6
  misc_feature: MA Experiment 108573 PARAMETER Experiment Name: At_Drought_cDNA_P Parameter: Tissue Value: Aerial
  misc_feature: MA Experiment 108573 PARAMETER Experiment Name: At_Drought_cDNA_P Parameter: Treatment Value: Drought vs. No Drought
  misc_feature: MA Experiment ID: 20000113 Result: Up-regulated in Transcription
  misc_feature: MA Experiment 20000113 PARAMETER Experiment Name: At_42deg_Heat_cDNA_P Parameter: Temperature (deg C) Value: 42 vs. 22
  misc_feature: MA Experiment 20000113 PARAMETER Experiment Name: At_42deg_Heat_cDNA_P Parameter: Timepoint (hr) Value: 8
  misc_feature: MA Experiment 20000113 PARAMETER Experiment Name: At_42deg_Heat_cDNA_P Parameter: Tissue Value: Aerial
  misc_feature: MA Experiment ID: 20000180 Result: Down-regulated in Transcription
  misc_feature: MA Experiment 20000180 PARAMETER Experiment Name: At_Germinating_Seeds_P Parameter: Age (hr) Value: 24 vs. 0
  misc_feature: MA Experiment 20000180 PARAMETER Experiment Name: At_Germinating_Seeds_P Parameter: Tissue Value: Germinating Seeds
  misc_feature: MA Experiment ID: 20000184 Result: Up-regulated in Transcription
  misc_feature: MA Experiment 20000184 PARAMETER Experiment Name: At_Shoots__P Parameter: Age (day) Value: 7
  misc_feature: MA Experiment 20000184 PARAMETER Experiment Name: At_Shoots__P Parameter: Tissue Value: Shoots vs. Whole Plant
  misc_feature: MA Experiment ID: 20000794 Result: Down-regulated in Transcription
  misc_feature: MA Experiment 20000794 PARAMETER Experiment Name: At_Petals_P Parameter: Age (day) Value: 23-25 days
  misc_feature: MA Experiment 20000794 PARAMETER Experiment Name: At_Petals_P Parameter: Plant Line Value: WS
  misc_feature: MA Experiment 20000794 PARAMETER Experiment Name: At_Petals_P Parameter: Tissue Value: Petals vs. Whole plant
  misc_feature: MA Experiment ID: 20001451 Result: Up-regulated in Transcription
  misc_feature: MA Experiment 20001451 PARAMETER Experiment Name: At_Far-red-induction_P Parameter: Age (day) Value: 7
  misc_feature: MA Experiment 20001451 PARAMETER Experiment Name: At_Far-red-induction_P Parameter: Light Value: Far-red vs. White
  misc_feature: MA Experiment 20001451 PARAMETER Experiment Name: At_Far-red-induction_P Parameter: Organism Value: A. thaliana
  misc_feature: MA Experiment 20001451 PARAMETER Experiment Name: At_Far-red-induction_P Parameter: Plant Line Value: Columbia
  misc_feature: MA Experiment 20001451 PARAMETER Experiment Name: At_Far-red-induction_P Parameter: Timepoint (hr) Value: 24
  misc_feature: MA Experiment 20001451 PARAMETER Experiment Name: At_Far-red-induction_P Parameter: Tissue Value: Whole Plant
  misc_feature: MA Experiment ID: 20001558 Result: Up-regulated in Transcription
  misc_feature: MA Experiment 20001558 PARAMETER Experiment Name: At_Drought_Soil_Dry_P Parameter: Age (day) Value: 27
  misc_feature: MA Experiment 20001558 PARAMETER Experiment Name: At_Drought_Soil_Dry_P Parameter: Organism Value: A. thaliana
  misc_feature: MA Experiment 20001558 PARAMETER Experiment Name: At_Drought_Soil_Dry_P Parameter: Plant Line Value: WS
  misc_feature: MA Experiment 20001558 PARAMETER Experiment Name: At_Drought_Soil_Dry_P Parameter: Post Timepoint (hr) Value: 6
  misc_feature: MA Experiment 20001558 PARAMETER Experiment Name: At_Drought_Soil_Dry_P Parameter: Post-Treatment Value: Re-Water vs. No Drought
  misc_feature: MA Experiment 20001558 PARAMETER Experiment Name: At_Drought_Soil_Dry_P Parameter: Timepoint (day) Value: 13
  misc_feature: MA Experiment 20001558 PARAMETER Experiment Name: At_Drought_Soil_Dry_P Parameter: Treatment Value: Drought vs. No Drought
  misc_feature: MA Experiment ID: 20001757 Result: Up-regulated in Transcription
  misc_feature: MA Experiment 20001757 PARAMETER Experiment Name: At_50mM_NH4NO3_L-to-H_P Parameter: Timepoint (hr) Value: 6
  misc_feature: MA Experiment 20001757 PARAMETER Experiment Name: At_50mM_NH4NO3_L-to-H_P Parameter: Tissue Value: Leaf
  misc_feature: MA Experiment 20001757 PARAMETER Experiment Name: At_50mM_NH4NO3_L-to-H_P Parameter: Treatment Value: 50mM NH4NO3 vs 100mM Mannitol
  misc_feature: MA Experiment ID: 20001911 Result: Down-regulated in Transcription
  misc_feature: MA Experiment 20001911 PARAMETER Experiment Name: At_Drought_Reproduction_P Parameter: Age (day) Value: 40
  misc_feature: MA Experiment 20001911 PARAMETER Experiment Name: At_Drought_Reproduction_P Parameter: Organism Value: A. thaliana
  misc_feature: MA Experiment 20001911 PARAMETER Experiment Name: At_Drought_Reproduction_P Parameter: Plant Line Value: WS
  misc_feature: MA Experiment 20001911 PARAMETER Experiment Name: At_Drought_Reproduction_P Parameter: Timepoint (day) Value: 10
  misc_feature: MA Experiment 20001911 PARAMETER Experiment Name: At_Drought_Reproduction_P Parameter: Tissue Value: Flowers
  misc_feature: MA Experiment 20001911 PARAMETER Experiment Name: At_Drought_Reproduction_P Parameter: Treatment Value: Drought vs. No Drought
  misc_feature: Phenotype: WHOLE PLANT Size-Small
  misc_feature: Phenotype: WHOLE PLANT Size-Small
  misc_feature: Phenotype: WHOLE PLANT Size-Small
  misc_feature: Phenotype: WHOLE PLANT Size-Small
  misc_feature: Phenotype: WHOLE PLANT Size-Small
  misc_feature: Phenotype: WHOLE PLANT Size-Small
gtcttctttcttcttcacttctgcctcttagggttaagcaagagagaaactagagatgaggttgataacgcacaacatgctttcctgcaacatcaaaggagtcaccagtggatttcctctacggatcgaagctgggaacgtgattgagaaggaagtcgatttcaatcccgattttatcaggcacatgttcgcgaagattgagtggaaagctctggtggaaggtgcgcgttccatgggatacgctgagttaccggaggaatctccggacgccgcggtgctgaaatcagatgagcccttccttaagaaactccaccacgcgttgctcgagctccaccttgaggaaggcgcgcttgtttgccctgagactggacggaagtttccggttaataaaggaatcccaaatatgcttctccatgaagacgaggtttaattgattgtgagatttttccttgtaagtttcaatctatgatgtttctgatgatgtgaaccttttagtgagatatgcaattgaatgattccatttg

SEQ ID NO: 28766 - protein, 124 aa, Arabidopsis thaliana
  peptide (1)..(124): Ceres Seq. ID no. 12385785
  misc_feature (1)..(123): Homolog of NCBI NO: 7705477 NR Description: hypothetical protein HSPC152 [Homo sapiens]
  misc_feature (1)..(123): Homolog of NCBI NO: 12833869 NR Description: unnamed protein product [Mus musculus]
  misc_feature (1)..(122): Homolog of NCBI NO: 16740612 NR Description: RIKEN cDNA 0610038D11 gene [Mus musculus]
  misc_feature (1)..(123): Homolog of NCBI NO: 13385802 NR Description: RIKEN cDNA 0610038D11 [Mus musculus]
  misc_feature (1)..(124): Homolog of NCBI NO: 22535669 NR Description: contains ESTs
  misc_feature (1)..(123): Homolog of NCBI NO: 27661288 NR Description: similar to RIKEN cDNA 0610038D11
  misc_feature (8)..(124): Homolog of NCBI NO: 30725332 NR Description: At1g78190 [Arabidopsis thaliana]
  misc_feature (1)..(124): Homolog of NCBI NO: 15218237 NR Description: unknown protein; protein id: At1g78190.1
  misc_feature (1)..(124): Homolog of NCBI NO: 25518574 NR Description: hypothetical protein T16E15.11 - Arabidopsis
  misc_feature (1)..(124): Homolog of NCBI NO: 18395095 NR Description: Expressed protein
MRLITHNMLSCNIKGVTSGFPLRIEAGNVIEKEVDFNPDFIRHMFAKIEWKALVEGARSMGYAELPEESPDAAVLKSDEPFLKKLHHALLELHLEEGALVCPETGRKFPVNKGIPNMLLHEDEV

SEQ ID NO: 28767 - protein, 117 aa, Arabidopsis thaliana
  peptide (1)..(117): Ceres Seq. ID no. 12385786
  misc_feature (1)..(116): Homolog of NCBI NO: 7705477 NR Description: hypothetical protein HSPC152 [Homo sapiens]
  misc_feature (1)..(116): Homolog of NCBI NO: 12833869 NR Description: unnamed protein product [Mus musculus]
  misc_feature (1)..(115): Homolog of NCBI NO: 16740612 NR Description: RIKEN cDNA 0610038D11 gene [Mus musculus]
  misc_feature (1)..(116): Homolog of NCBI NO: 13385802 NR Description: RIKEN cDNA 0610038D11 [Mus musculus]
  misc_feature (1)..(117): Homolog of NCBI NO: 22535669 NR Description: contains ESTs
  misc_feature (1)..(116): Homolog of NCBI NO: 27661288 NR Description: similar to RIKEN cDNA 0610038D11
  misc_feature (1)..(117): Homolog of NCBI NO: 30725332 NR Description: At1g78190 [Arabidopsis thaliana]
  misc_feature (1)..(117): Homolog of NCBI NO: 15218237 NR Description: unknown protein; protein id: At1g78190.1
  misc_feature (1)..(117): Homolog of NCBI NO: 25518574 NR Description: hypothetical protein T16E15.11 - Arabidopsis
  misc_feature (1)..(117): Homolog of NCBI NO: 18395095 NR Description: Expressed protein
MLSCNIKGVTSGFPLRIEAGNVIEKEVDFNPDFIRHMFAKIEWKALVEGARSMGYAELPEESPDAAVLKSDEPFLKKLHHALLELHLEEGALVCPETGRKFPVNKGIPNMLLHEDEV

SEQ ID NO: 28768 - protein, 81 aa, Arabidopsis thaliana
  peptide (1)..(81): Ceres Seq. ID no. 12385787
  misc_feature (1)..(80): Homolog of NCBI NO: 7705477 NR Description: hypothetical protein HSPC152 [Homo sapiens]
  misc_feature (1)..(80): Homolog of NCBI NO: 12833869 NR Description: unnamed protein product [Mus musculus]
  misc_feature (1)..(79): Homolog of NCBI NO: 16740612 NR Description: RIKEN cDNA 0610038D11 gene [Mus musculus]
  misc_feature (1)..(80): Homolog of NCBI NO: 13385802 NR Description: RIKEN cDNA 0610038D11 [Mus musculus]
  misc_feature (1)..(81): Homolog of NCBI NO: 22535669 NR Description: contains ESTs
  misc_feature (1)..(80): Homolog of NCBI NO: 27661288 NR Description: similar to RIKEN cDNA 0610038D11
  misc_feature (1)..(81): Homolog of NCBI NO: 30725332 NR Description: At1g78190 [Arabidopsis thaliana]
  misc_feature (1)..(81): Homolog of NCBI NO: 15218237 NR Description: unknown protein; protein id: At1g78190.1
  misc_feature (1)..(81): Homolog of NCBI NO: 25518574 NR Description: hypothetical protein T16E15.11 - Arabidopsis
  misc_feature (1)..(81): Homolog of NCBI NO: 18395095 NR Description: Expressed protein
MFAKIEWKALVEGARSMGYAELPEESPDAAVLKSDEPFLKKLHHALLELHLEEGALVCPETGRKFPVNKGIPNMLLHEDEV

SEQ ID NO: 28769 - DNA, 503 bp, Arabidopsis thaliana
  misc_feature (1)..(503): Ceres Seq. ID no. 12322297
  misc_feature: MA Experiment ID: 108434 Result: Up-regulated in Transcription
  misc_feature: MA Experiment 108434 PARAMETER Experiment Name: At_Root_Tips_cDNA_P Parameter: Tissue Value: Root Tips
  misc_feature: MA Experiment ID: 108461 Result: Down-regulated in Transcription
  misc_feature: MA Experiment 108461 PARAMETER Experiment Name: At_Germinating_Seeds_cDNA_P Parameter: Age (day) Value: 1 vs. 0
  misc_feature: MA Experiment 108461 PARAMETER Experiment Name: At_Germinating_Seeds_cDNA_P Parameter: Tissue Value: Germinating Seeds
  misc_feature: MA Experiment ID: 108462 Result: Down-regulated in Transcription
  misc_feature: MA Experiment 108462 PARAMETER Experiment Name: At_Germinating_Seeds_cDNA_P Parameter: Age (day) Value: 2 vs. 0
  misc_feature: MA Experiment 108462 PARAMETER Experiment Name: At_Germinating_Seeds_cDNA_P Parameter: Tissue Value: Germinating Seeds
  misc_feature: MA Experiment ID: 108463 Result: Down-regulated in Transcription
  misc_feature: MA Experiment 108463 PARAMETER Experiment Name: At_Germinating_Seeds_cDNA_P Parameter: Age (day) Value: 3 vs. 0
  misc_feature: MA Experiment 108463 PARAMETER Experiment Name: At_Germinating_Seeds_cDNA_P Parameter: Tissue Value: Germinating Seeds
  misc_feature: MA Experiment ID: 108464 Result: Down-regulated in Transcription
  misc_feature: MA Experiment 108464 PARAMETER Experiment Name: At_Germinating_Seeds_cDNA_P Parameter: Age (day) Value: 4 vs. 0
  misc_feature: MA Experiment 108464 PARAMETER Experiment Name: At_Germinating_Seeds_cDNA_P Parameter: Tissue Value: Germinating Seeds
  misc_feature: MA Experiment ID: 108569 Result: Down-regulated in Transcription
  misc_feature: MA Experiment 108569 PARAMETER Experiment Name: At_0.001%_MeJA__cDNA_P Parameter: Timepoint (hr) Value: 6
  misc_feature: MA Experiment 108569 PARAMETER Experiment Name: At_0.001%_MeJA__cDNA_P Parameter: Tissue Value: Aerial
  misc_feature: MA Experiment 108569 PARAMETER Experiment Name: At_0.001%_MeJA__cDNA_P Parameter: Treatment Value: 0.001% MeJA vs. No Treatment
  misc_feature: MA Experiment ID: 108573 Result: Down-regulated in Transcription
  misc_feature: MA Experiment 108573 PARAMETER Experiment Name: At_Drought_cDNA_P Parameter: Timepoint (hr) Value: 6
  misc_feature: MA Experiment 108573 PARAMETER Experiment Name: At_Drought_cDNA_P Parameter: Tissue Value: Aerial
  misc_feature: MA Experiment 108573 PARAMETER Experiment Name: At_Drought_cDNA_P Parameter: Treatment Value: Drought vs. No Drought
  misc_feature: MA Experiment ID: 108577 Result: Down-regulated in Transcription
  misc_feature: MA Experiment 108577 PARAMETER Experiment Name: At_42deg_Heat_cDNA_P Parameter: Temperature (deg C) Value: 42 vs. 22
  misc_feature: MA Experiment 108577 PARAMETER Experiment Name: At_42deg_Heat_cDNA_P Parameter: Timepoint (hr) Value: 6
  misc_feature: MA Experiment 108577 PARAMETER Experiment Name: At_42deg_Heat_cDNA_P Parameter: Tissue Value: Aerial
  misc_feature: MA Experiment ID: 20000180 Result: Down-regulated in Transcription
  misc_feature: MA Experiment 20000180 PARAMETER Experiment Name: At_Germinating_Seeds_P Parameter: Age (hr) Value: 24 vs. 0
  misc_feature: MA Experiment 20000180 PARAMETER Experiment Name: At_Germinating_Seeds_P Parameter: Tissue Value: Germinating Seeds
  misc_feature: MA Experiment ID: 20000224 Result: Down-regulated in Transcription
  misc_feature: MA Experiment ID: 20000437 Result: Down-regulated in Transcription
  misc_feature: MA Experiment 20000437 PARAMETER Experiment Name: At_Drought_P Parameter: Age (day) Value: 8
  misc_feature: MA Experiment 20000437 PARAMETER Experiment Name: At_Drought_P Parameter: Organism Value: A. thaliana
  misc_feature: MA Experiment 20000437 PARAMETER Experiment Name: At_Drought_P Parameter: Plant Line Value: WS
  misc_feature: MA Experiment 20000437 PARAMETER Experiment Name: At_Drought_P Parameter: Timepoint (hr) Value: 24
  misc_feature: MA Experiment 20000437 PARAMETER Experiment Name: At_Drought_P Parameter: Tissue Value: Whole Plant
  misc_feature: MA Experiment 20000437 PARAMETER Experiment Name: At_Drought_P Parameter: Treatment Value: Drought vs. No Drought
  misc_feature: MA Experiment ID: 20000794 Result: Down-regulated in Transcription
  misc_feature: MA Experiment 20000794 PARAMETER Experiment Name: At_Petals_P Parameter: Age (day) Value: 23-25 days
  misc_feature: MA Experiment 20000794 PARAMETER Experiment Name: At_Petals_P Parameter: Plant Line Value: WS
  misc_feature: MA Experiment 20000794 PARAMETER Experiment Name: At_Petals_P Parameter: Tissue Value: Petals vs. Whole plant
  misc_feature: MA Experiment ID: 20001458 Result: Up-regulated in Transcription
  misc_feature: MA Experiment 20001458 PARAMETER Experiment Name: At_50mM_NH4NO3_L-to-H_P Parameter: Age (day) Value: Undefined
  misc_feature: MA Experiment 20001458 PARAMETER Experiment Name: At_50mM_NH4NO3_L-to-H_P Parameter: Organism Value: Undefined
  misc_feature: MA Experiment 20001458 PARAMETER Experiment Name: At_50mM_NH4NO3_L-to-H_P Parameter: Plant Line Value: Undefined
  misc_feature: MA Experiment 20001458 PARAMETER Experiment Name: At_50mM_NH4NO3_L-to-H_P Parameter: Timepoint (hr) Value: 2
  misc_feature: MA Experiment 20001458 PARAMETER Experiment Name: At_50mM_NH4NO3_L-to-H_P Parameter: Tissue Value: Siliques
  misc_feature: MA Experiment 20001458 PARAMETER Experiment Name: At_50mM_NH4NO3_L-to-H_P Parameter: Treatment Value: 50mM NH4NO3 vs. 100mM Manitol
  misc_feature: MA Experiment ID: 20001556 Result: Up-regulated in Transcription
  misc_feature: MA Experiment 20001556 PARAMETER Experiment Name: At_Drought_Soil_Dry_P Parameter: Age (day) Value: 26
  misc_feature: MA Experiment 20001556 PARAMETER Experiment Name: At_Drought_Soil_Dry_P Parameter: Organism Value: A. thaliana
  misc_feature: MA Experiment 20001556 PARAMETER Experiment Name: At_Drought_Soil_Dry_P Parameter: Plant Line Value: WS
  misc_feature: MA Experiment 20001556 PARAMETER Experiment Name: At_Drought_Soil_Dry_P Parameter: Post Timepoint (hr) Value: None
  misc_feature: MA Experiment 20001556 PARAMETER Experiment Name: At_Drought_Soil_Dry_P Parameter: Post-Treatment Value: None
  misc_feature: MA Experiment 20001556 PARAMETER Experiment Name: At_Drought_Soil_Dry_P Parameter: Timepoint (day) Value: 12
  misc_feature: MA Experiment 20001556 PARAMETER Experiment Name: At_Drought_Soil_Dry_P Parameter: Treatment Value: Drought vs. No Drought
  misc_feature: MA Experiment ID: 20001560 Result: Up-regulated in Transcription
  misc_feature: MA Experiment 20001560 PARAMETER Experiment Name: At_Drought_Soil_Dry_P Parameter: Age (day) Value: 28
  misc_feature: MA Experiment 20001560 PARAMETER Experiment Name: At_Drought_Soil_Dry_P Parameter: Organism Value: A. thaliana
  misc_feature: MA Experiment 20001560 PARAMETER Experiment Name: At_Drought_Soil_Dry_P Parameter: Plant Line Value: WS
  misc_feature: MA Experiment 20001560 PARAMETER Experiment Name: At_Drought_Soil_Dry_P Parameter: Post Timepoint (hr) Value: None
  misc_feature: MA Experiment 20001560 PARAMETER Experiment Name: At_Drought_Soil_Dry_P Parameter: Post-Treatment Value: None
  misc_feature: MA Experiment 20001560 PARAMETER Experiment Name: At_Drought_Soil_Dry_P Parameter: Timepoint (day) Value: 14
  misc_feature: MA Experiment 20001560 PARAMETER Experiment Name: At_Drought_Soil_Dry_P Parameter: Treatment Value: Drought vs. No Drought
  misc_feature: MA Experiment ID: 20001757 Result: Up-regulated in Transcription
  misc_feature: MA Experiment 20001757 PARAMETER Experiment Name: At_50mM_NH4NO3_L-to-H_P Parameter: Timepoint (hr) Value: 6
  misc_feature: MA Experiment 20001757 PARAMETER Experiment Name: At_50mM_NH4NO3_L-to-H_P Parameter: Tissue Value: Leaf
  misc_feature: MA Experiment 20001757 PARAMETER Experiment Name: At_50mM_NH4NO3_L-to-H_P Parameter: Treatment Value: 50mM NH4NO3 vs 100mM Mannitol
aaaggacgctacacagtcgtcttctcggagccgcaaagatttctgtagagcaaactttgatcatcccctgcatctgcggcaatgggtaaaggaacagggagctttggtaagaggaggaacaagtcacacacgctctgtgtgagatgtggtcgccggagctttcacatccagaagagtcgttgctcggcatgtgcttatccagctgccagaaagaggacatataactggagtgtgaaggcaataagaagaaagacaacaggaactggtaggatgaggtatctccgtaatgtccctcgaaggttcaagacttgctttagagaaggtacgcaagccaccccaagaaacaaagctgcagcttcgtcttcctaggcattgttcagtttgcgttttgccatctctttcttgctatgtagcttttttttttaattcgtttgtttatcttttttgctcttgtacttcctttactgtgcaatcctatttctgatagtgtgatcactcatcaa

SEQ ID NO: 28770 - protein, 95 aa, Arabidopsis thaliana [sequence omitted]

SEQ ID NO: 28771 - protein, 65 aa, Arabidopsis thaliana
  peptide (1)..(65): Ceres Seq. ID no. 12322299
MSLEGSRLALEKVRKPPQETKLQLRLPRHCSVCVLPSLSCYVAFFFNSFVYLFCSCTSFTVQSYF

SEQ ID NO: 28772 - DNA, 1029 bp, Arabidopsis thaliana
  misc_feature (1)..(1029): Ceres Seq. ID no. 13486649
  misc_feature: MA Experiment ID: 108501 Result: Down-regulated in Transcription
  misc_feature: MA Experiment 108501 PARAMETER Experiment Name: At_ap2_floral_buds_cDNA_P Parameter: Plant Line Value: ap2 (Ler.)
  misc_feature: MA Experiment 108501 PARAMETER Experiment Name: At_ap2_floral_buds_cDNA_P Parameter: Tissue Value: Closed Flower
  misc_feature: MA Experiment ID: 108595 Result: Up-regulated in Transcription
  misc_feature: MA Experiment 108595 PARAMETER Experiment Name: At_Ler-pi_Ovule_cDNA_P Parameter: Plant Line Value: null
  misc_feature: MA Experiment ID: 20000171 Result: Up-regulated in Transcription
  misc_feature: MA Experiment 20000171 PARAMETER Experiment Name: At_42deg_Heat_P Parameter: Age (day) Value: 14
  misc_feature: MA Experiment 20000171 PARAMETER Experiment Name: At_42deg_Heat_P Parameter: Organism Value: A. thaliana
  misc_feature: MA Experiment 20000171 PARAMETER Experiment Name: At_42deg_Heat_P Parameter: Plant Line Value: WS
  misc_feature: MA Experiment 20000171 PARAMETER Experiment Name: At_42deg_Heat_P Parameter: Temperature (deg C) Value: 42 vs. 22
  misc_feature: MA Experiment 20000171 PARAMETER Experiment Name: At_42deg_Heat_P Parameter: Timepoint (hr) Value: 1
  misc_feature: MA Experiment 20000171 PARAMETER Experiment Name: At_42deg_Heat_P Parameter: Tissue Value: Aerial
aattaggttttcttctacacttgttcttcttcatttgctctcttcttcatcaatctctctctttttgtaaacggcgattttaaaatggttgatgcaaaacaagttcgtttcatcatcggagttatcggaaatgttatctcctttggtctctttgccgcaccagcgaagactttctggaggatcttcaagaagaaatcagtggaagagttttcgtatgtgccgtacgtagcaacggtgatgaattgtatgttgtgggtgttttacggtctccctgtggttcacaaagacagtattctagtttcaaccattaatggtgttgggttagttatcgaacttttctacgttggtgtctacttgatgtactgtggtcacaagaagaaccatcgaaggaacattttgggattcttagctcttgaagttattttggtggtggctatcattcttattacgctctttgcgcttaagggtgattttgttaagcaaacatttgttggtgtgatttgcgatgtcttcaacattgctatgtatggagctccttcattggccattattaaagtggtaaaaacaaagagtgttgaatacatgccattcttgttgtctttggtctgtttcgttaatgctggaatttggactacttactcgctcatcttcaagatcgattactacgtcctcgcaagtaatgggattggaacctttttggcactttctcagttgatagtgtacttcatgtactataagtcaactccaaaggagaagacggtgaagccatcagaagttgagatttctgctacggagagggtttaggagaattgtgctttggattctatcttcttacgtacattttacatacacaatttgtgtgtatgtttaggcttttgggtttttatgtttggtagaattttccaatcgtttagtttctggattttgaggattcgtcttggttcattttcttaatacattttttatggtgtgaaacgctttgacggaaatcatcaagttttggatttattctatttatgttttagatac

SEQ ID NO: 28773 - protein, 239 aa, Arabidopsis thaliana
  peptide (1)..(239): Ceres Seq. ID no. 13486650
  misc_feature (9)..(98): Pfam Name: MtN3/saliva family Pfam Description: MtN3/saliva family
  misc_feature (1)..(210): Homolog of NCBI NO: 10177463 NR Description: contains similarity to MtN3
  misc_feature (29)..(235): Homolog of NCBI NO: 7486148 NR Description: hypothetical protein F25I24.60 - Arabidopsis
  misc_feature (7)..(220): Homolog of NCBI NO: 15219732 NR Description: nodulin MtN3 family protein [Arabidopsis
  misc_feature (1)..(234): Homolog of NCBI NO: 21592355 NR Description: contains similarity to nodulin MtN3 protein
  misc_feature (1)..(234): Homolog of NCBI NO: 18405611 NR Description: nodulin MtN3 family protein [Arabidopsis
  misc_feature (7)..(235): Homolog of NCBI NO: 18413388 NR Description: nodulin MtN3 family protein [Arabidopsis
  misc_feature (1)..(233): Homolog of NCBI NO: 34912462 NR Description: MtN3-like protein [Oryza sativa (japonica
  misc_feature (1)..(233): Homolog of NCBI NO: 34912454 NR Description: P0681B11.31 [Oryza sativa (japonica
  misc_feature (28)..(239): Homolog of NCBI NO: 10177513 NR Description: contains similarity to MtN3~gene_id:MSN9.17
  misc_feature (1)..(239): Homolog of NCBI NO: 18421965 NR Description: nodulin MtN3 family protein [Arabidopsis
MVDAKQVRFIIGVIGNVISFGLFAAPAKTFWRIFKKKSVEEFSYVPYVATVMNCMLWVFYGLPVVHKDSILVSTINGVGLVIELFYVGVYLMYCGHKKNHRRNILGFLALEVILVVAIILITLFALKGDFVKQTFVGVICDVFNIAMYGAPSLAIIKVVKTKSVEYMPFLLSLVCFVNAGIWTTYSLIFKIDYYVLASNGIGTFLALSQLIVYFMYYKSTPKEKTVKPSEVEISATERV

SEQ ID NO: 28774 - protein, 188 aa, Arabidopsis thaliana
  peptide (1)..(188): Ceres Seq. ID no. 13486651
  misc_feature (1)..(159): Homolog of NCBI NO: 10177463 NR Description: contains similarity to MtN3
  misc_feature (1)..(184): Homolog of NCBI NO: 7486148 NR Description: hypothetical protein F25I24.60 - Arabidopsis
  misc_feature (1)..(169): Homolog of NCBI NO: 15219732 NR Description: nodulin MtN3 family protein [Arabidopsis
  misc_feature (1)..(183): Homolog of NCBI NO: 21592355 NR Description: contains similarity to nodulin MtN3 protein
  misc_feature (1)..(183): Homolog of NCBI NO: 18405611 NR Description: nodulin MtN3 family protein [Arabidopsis
  misc_feature (1)..(184): Homolog of NCBI NO: 18413388 NR Description: nodulin MtN3 family protein [Arabidopsis
  misc_feature (1)..(182): Homolog of NCBI NO: 34912462 NR Description: MtN3-like protein [Oryza sativa (japonica
  misc_feature (1)..(182): Homolog of NCBI NO: 34912454 NR Description: P0681B11.31 [Oryza sativa (japonica
  misc_feature (1)..(188): Homolog of NCBI NO: 10177513 NR Description: contains similarity to MtN3~gene_id:MSN9.17
  misc_feature (1)..(188): Homolog of NCBI NO: 18421965 NR Description: nodulin MtN3 family protein [Arabidopsis
MNCMLWVFYGLPVVHKDSILVSTINGVGLVIELFYVGVYLMYCGHKKNHRRNILGFLALEVILVVAIILITLFALKGDFVKQTFVGVICDVFNIAMYGAPSLAIIKVVKTKSVEYMPFLLSLVCFVNAGIWTTYSLIFKIDYYVLASNGIGTFLALSQLIVYFMYYKSTPKEKTVKPSEVEISATERV

SEQ ID NO: 28775 - protein, 185 aa, Arabidopsis thaliana
  peptide (1)..(185): Ceres Seq. ID no. 13486652
  misc_feature (1)..(156): Homolog of NCBI NO: 10177463 NR Description: contains similarity to MtN3
  misc_feature (1)..(181): Homolog of NCBI NO: 7486148 NR Description: hypothetical protein F25I24.60 - Arabidopsis
  misc_feature (1)..(166): Homolog of NCBI NO: 15219732 NR Description: nodulin MtN3 family protein [Arabidopsis
  misc_feature (1)..(180): Homolog of NCBI NO: 21592355 NR Description: contains similarity to nodulin MtN3 protein
  misc_feature (1)..(180): Homolog of NCBI NO: 18405611 NR Description: nodulin MtN3 family protein [Arabidopsis
  misc_feature (1)..(181): Homolog of NCBI NO: 18413388 NR Description: nodulin MtN3 family protein [Arabidopsis
  misc_feature (1)..(179): Homolog of NCBI NO: 34912462 NR Description: MtN3-like protein [Oryza sativa (japonica
  misc_feature (1)..(179): Homolog of NCBI NO: 34912454 NR Description: P0681B11.31 [Oryza sativa (japonica
  misc_feature (1)..(185): Homolog of NCBI NO: 10177513 NR Description: contains similarity to MtN3~gene_id:MSN9.17
  misc_feature (1)..(185): Homolog of NCBI NO: 18421965 NR Description: nodulin MtN3 family protein [Arabidopsis
MLWVFYGLPVVHKDSILVSTINGVGLVIELFYVGVYLMYCGHKKNHRRNILGFLALEVILVVAIILITLFALKGDFVKQTFVGVICDVFNIAMYGAPSLAIIKVVKTKSVEYMPFLLSLVCFVNAGIWTTYSLIFKIDYYVLASNGIGTFLALSQLIVYFMYYKSTPKEKTVKPSEVEISATERV

SEQ ID NO: 28776 - DNA, 1221 bp, Arabidopsis thaliana
  misc_feature (1)..(1221): Ceres Seq. ID no. 12396606
  misc_feature: MA Experiment ID: 108434 Result: Down-regulated in Transcription
  misc_feature: MA Experiment 108434 PARAMETER Experiment Name: At_Root_Tips_cDNA_P Parameter: Tissue Value: Root Tips
  misc_feature: MA Experiment ID: 108569 Result: Up-regulated in Transcription
  misc_feature: MA Experiment 108569 PARAMETER Experiment Name: At_0.001%_MeJA__cDNA_P Parameter: Timepoint (hr) Value: 6
  misc_feature: MA Experiment 108569 PARAMETER Experiment Name: At_0.001%_MeJA__cDNA_P Parameter: Tissue Value: Aerial
  misc_feature: MA Experiment 108569 PARAMETER Experiment Name: At_0.001%_MeJA__cDNA_P Parameter: Treatment Value: 0.001% MeJA vs. No Treatment
  misc_feature: MA Experiment ID: 108572 Result: Up-regulated in Transcription
  misc_feature: MA Experiment 108572 PARAMETER Experiment Name: At_Drought_cDNA_P Parameter: Timepoint (hr) Value: 1
  misc_feature: MA Experiment 108572 PARAMETER Experiment Name: At_Drought_cDNA_P Parameter: Tissue Value: Aerial
  misc_feature: MA Experiment 108572 PARAMETER Experiment Name: At_Drought_cDNA_P Parameter: Treatment Value: Drought vs. No Drought
  misc_feature: MA Experiment ID: 108573 Result: Up-regulated in Transcription
  misc_feature: MA Experiment 108573 PARAMETER Experiment Name: At_Drought_cDNA_P Parameter: Timepoint (hr) Value: 6
  misc_feature: MA Experiment 108573 PARAMETER Experiment Name: At_Drought_cDNA_P Parameter: Tissue Value: Aerial
  misc_feature: MA Experiment 108573 PARAMETER Experiment Name: At_Drought_cDNA_P Parameter: Treatment Value: Drought vs. No Drought
  misc_feature: MA Experiment ID: 108576 Result: Up-regulated in Transcription
  misc_feature: MA Experiment 108576 PARAMETER Experiment Name: At_42deg_Heat_cDNA_P Parameter: Temperature (deg C) Value: 42 vs. 22
  misc_feature: MA Experiment 108576 PARAMETER Experiment Name: At_42deg_Heat_cDNA_P Parameter: Timepoint (hr) Value: 1
  misc_feature: MA Experiment 108576 PARAMETER Experiment Name: At_42deg_Heat_cDNA_P Parameter: Tissue Value: Aerial
  misc_feature: MA Experiment ID: 108577 Result: Up-regulated in Transcription
  misc_feature: MA Experiment 108577 PARAMETER Experiment Name: At_42deg_Heat_cDNA_P Parameter: Temperature (deg C) Value: 42 vs. 22
  misc_feature: MA Experiment 108577 PARAMETER Experiment Name: At_42deg_Heat_cDNA_P Parameter: Timepoint (hr) Value: 6
  misc_feature: MA Experiment 108577 PARAMETER Experiment Name: At_42deg_Heat_cDNA_P Parameter: Tissue Value: Aerial
  misc_feature: MA Experiment ID: 108585 Result: Up-regulated in Transcription
  misc_feature: MA Experiment 108585 PARAMETER Experiment Name: At_5mM_NaNP_cDNA_P Parameter: Timepoint (hr) Value: 6
  misc_feature: MA Experiment 108585 PARAMETER Experiment Name: At_5mM_NaNP_cDNA_P Parameter: Tissue Value: Aerial
  misc_feature: MA Experiment 108585 PARAMETER Experiment Name: At_5mM_NaNP_cDNA_P Parameter: Treatment Value: null
  misc_feature: MA Experiment ID: 108595 Result: Up-regulated in Transcription
  misc_feature: MA Experiment 108595 PARAMETER Experiment Name: At_Ler-pi_Ovule_cDNA_P Parameter: Plant Line Value: null
  misc_feature: MA Experiment ID: 20000072 Result: Down-regulated in Transcription
  misc_feature: MA Experiment 20000072 PARAMETER Experiment Name: At_100uM_ABA_Mutants_cDNA_P Parameter: Plant Line Value: CS8105
  misc_feature: MA Experiment 20000072 PARAMETER Experiment Name: At_100uM_ABA_Mutants_cDNA_P Parameter: Timepoint (hr) Value: 6
  misc_feature: MA Experiment 20000072 PARAMETER Experiment Name: At_100uM_ABA_Mutants_cDNA_P Parameter: Tissue Value: Aerial
  misc_feature: MA Experiment 20000072 PARAMETER Experiment Name: At_100uM_ABA_Mutants_cDNA_P Parameter: Treatment Value: 100uM ABA vs. No Treatment
  misc_feature: MA Experiment ID: 20000087 Result: Down-regulated in Transcription
  misc_feature: MA Experiment 20000087 PARAMETER Experiment Name: At_100uM_ABA_Mutants_cDNA_P Parameter: Plant Line Value: WS
  misc_feature: MA Experiment 20000087 PARAMETER Experiment Name: At_100uM_ABA_Mutants_cDNA_P Parameter: Timepoint (hr) Value: 6
  misc_feature: MA Experiment 20000087 PARAMETER Experiment Name: At_100uM_ABA_Mutants_cDNA_P Parameter: Tissue Value: Aerial
  misc_feature: MA Experiment 20000087 PARAMETER Experiment Name: At_100uM_ABA_Mutants_cDNA_P Parameter: Treatment Value: 100uM ABA vs. No Treatment
  misc_feature: MA Experiment ID: 20000090 Result: Down-regulated in Transcription
  misc_feature: MA Experiment ID: 20000111 Result: Up-regulated in Transcription
  misc_feature: MA Experiment 20000111 PARAMETER Experiment Name: At_42deg_Heat_cDNA_P Parameter: Temperature (deg C) Value: 42 vs. 22
  misc_feature: MA Experiment 20000111 PARAMETER Experiment Name: At_42deg_Heat_cDNA_P Parameter: Timepoint (hr) Value: 6
  misc_feature: MA Experiment 20000111 PARAMETER Experiment Name: At_42deg_Heat_cDNA_P Parameter: Tissue Value: Aerial
  misc_feature: MA Experiment ID: 20000113 Result: Up-regulated in Transcription
  misc_feature: MA Experiment 20000113 PARAMETER Experiment Name: At_42deg_Heat_cDNA_P Parameter: Temperature (deg C) Value: 42 vs. 22
  misc_feature: MA Experiment 20000113 PARAMETER Experiment Name: At_42deg_Heat_cDNA_P Parameter: Timepoint (hr) Value: 8
  misc_feature: MA Experiment 20000113 PARAMETER Experiment Name: At_42deg_Heat_cDNA_P Parameter: Tissue Value: Aerial
  misc_feature: MA Experiment ID: 20000173 Result: Up-regulated in Transcription
  misc_feature: MA Experiment 20000173 PARAMETER Experiment Name: At_42deg_Heat_P Parameter: Age (day) Value: 14
  misc_feature: MA Experiment 20000173 PARAMETER Experiment Name: At_42deg_Heat_P Parameter: Organism Value: A. thaliana
  misc_feature: MA Experiment 20000173 PARAMETER Experiment Name: At_42deg_Heat_P Parameter: Plant Line Value: WS
  misc_feature: MA Experiment 20000173 PARAMETER Experiment Name: At_42deg_Heat_P Parameter: Temperature (deg C) Value: 42 vs. 22
  misc_feature: MA Experiment 20000173 PARAMETER Experiment Name: At_42deg_Heat_P Parameter: Timepoint (hr) Value: 6
  misc_feature: MA Experiment 20000173 PARAMETER Experiment Name: At_42deg_Heat_P Parameter: Tissue Value: Aerial
  misc_feature: MA Experiment ID: 20000184 Result: Up-regulated in Transcription
  misc_feature: MA Experiment 20000184 PARAMETER Experiment Name: At_Shoots__P Parameter: Age (day) Value: 7
  misc_feature: MA Experiment 20000184 PARAMETER Experiment Name: At_Shoots__P Parameter: Tissue Value: Shoots vs. Whole Plant
  misc_feature: MA Experiment ID: 20000185 Result: Down-regulated in Transcription
  misc_feature: MA Experiment 20000185 PARAMETER Experiment Name: At_Roots__P Parameter: Age (day) Value: 7 vs. 21
  misc_feature: MA Experiment 20000185 PARAMETER Experiment Name: At_Roots__P Parameter: Organism Value: A. thaliana
  misc_feature: MA Experiment 20000185 PARAMETER Experiment Name: At_Roots__P Parameter: Tissue Value: Roots vs. Whole Plant
  misc_feature: MA Experiment ID: 20000234 Result: Up-regulated in Transcription
  misc_feature: MA Experiment 20000234 PARAMETER Experiment Name: At_Siliques_P Parameter: Age (day) Value: 21
  misc_feature: MA Experiment 20000234 PARAMETER Experiment Name: At_Siliques_P Parameter: Organism Value: A. thaliana
  misc_feature: MA Experiment 20000234 PARAMETER Experiment Name: At_Siliques_P Parameter: Plant Line Value: WS
  misc_feature: MA Experiment 20000234 PARAMETER Experiment Name: At_Siliques_P Parameter: Tissue Value: Less Than 5mm Siliques vs. Whole Plant
  misc_feature: MA Experiment ID: 20000264 Result: Up-regulated in Transcription
  misc_feature: MA Experiment 20000264 PARAMETER Experiment Name: At_Open_Flower_P Parameter: Age (day) Value: 21
  misc_feature: MA Experiment 20000264 PARAMETER Experiment Name: At_Open_Flower_P Parameter: Plant Line Value: WS
  misc_feature: MA Experiment 20000264 PARAMETER Experiment Name: At_Open_Flower_P Parameter: Tissue Value: Open Flower vs. Whole Plant
  misc_feature: MA Experiment ID: 20000265 Result: Up-regulated in Transcription
  misc_feature: MA Experiment 20000265 PARAMETER Experiment Name: At_Open_Flower_P Parameter: Age (day) Value: 21
  misc_feature: MA Experiment 20000265 PARAMETER Experiment Name: At_Open_Flower_P Parameter: Plant Line Value: WS
  misc_feature: MA Experiment 20000265 PARAMETER Experiment Name: At_Open_Flower_P Parameter: Tissue Value: Closed Flower vs. Whole Plant
  misc_feature: MA Experiment ID: 20000267 Result: Up-regulated in Transcription
  misc_feature: MA Experiment 20000267 PARAMETER Experiment Name: At_Drought_P Parameter: Age (day) Value: 7
  misc_feature: MA Experiment 20000267 PARAMETER Experiment Name: At_Drought_P Parameter: Organism Value: A. thaliana
  misc_feature: MA Experiment 20000267 PARAMETER Experiment Name: At_Drought_P Parameter: Plant Line Value: WS
  misc_feature: MA Experiment 20000267 PARAMETER Experiment Name: At_Drought_P Parameter: Timepoint (hr) Value: 6
  misc_feature: MA Experiment 20000267 PARAMETER Experiment Name: At_Drought_P Parameter: Tissue Value: Whole Plant
  misc_feature: MA Experiment 20000267 PARAMETER Experiment Name: At_Drought_P Parameter: Treatment Value: Drought vs. No Drought
  misc_feature: MA Experiment ID: 20000286 Result: Up-regulated in Transcription
  misc_feature: MA Experiment 20000286 PARAMETER Experiment Name: At_Open_Flower_P Parameter: Age (day) Value: 21
  misc_feature: MA Experiment 20000286 PARAMETER Experiment Name: At_Open_Flower_P Parameter: Plant Line Value: WS
  misc_feature: MA Experiment 20000286 PARAMETER Experiment Name: At_Open_Flower_P Parameter: Tissue Value: Half Open vs. Whole Plant
  misc_feature: MA Experiment ID: 20000436 Result: Up-regulated in Transcription
  misc_feature: MA Experiment 20000436 PARAMETER Experiment Name: At_Drought_P Parameter: Age (day) Value: 7
  misc_feature: MA Experiment 20000436 PARAMETER Experiment Name: At_Drought_P Parameter: Organism Value: A. thaliana
  misc_feature: MA Experiment 20000436 PARAMETER Experiment Name: At_Drought_P Parameter: Plant Line Value: WS
  misc_feature: MA Experiment 20000436 PARAMETER Experiment Name: At_Drought_P Parameter: Timepoint (hr) Value: 12
  misc_feature: MA Experiment 20000436 PARAMETER Experiment Name: At_Drought_P Parameter: Tissue Value: Whole Plant
  misc_feature: MA Experiment 20000436 PARAMETER Experiment Name: At_Drought_P Parameter: Treatment Value: Drought vs. No Drought
  misc_feature: MA Experiment ID: 20000437 Result: Up-regulated in Transcription
  misc_feature: MA Experiment 20000437 PARAMETER Experiment Name: At_Drought_P Parameter: Age (day) Value: 8
  misc_feature: MA Experiment 20000437 PARAMETER Experiment Name: At_Drought_P Parameter: Organism Value: A. thaliana
  misc_feature: MA Experiment 20000437 PARAMETER Experiment Name: At_Drought_P Parameter: Plant Line Value: WS
  misc_feature: MA Experiment 20000437 PARAMETER Experiment Name: At_Drought_P Parameter: Timepoint (hr) Value: 24
  misc_feature: MA Experiment 20000437 PARAMETER Experiment Name: At_Drought_P Parameter: Tissue Value: Whole Plant
  misc_feature: MA Experiment 20000437 PARAMETER Experiment Name: At_Drought_P Parameter: Treatment Value: Drought vs. No Drought
  misc_feature: MA Experiment ID: 20000451 Result: Up-regulated in Transcription
  misc_feature: MA Experiment 20000451 PARAMETER Experiment Name: At_CS6879_Shoots-Roots_P Parameter: Age (day) Value: 14
  misc_feature: MA Experiment 20000451 PARAMETER Experiment Name: At_CS6879_Shoots-Roots_P Parameter: Organism Value: A. thaliana
  misc_feature: MA Experiment 20000451 PARAMETER Experiment Name: At_CS6879_Shoots-Roots_P Parameter: Plant Line Value: CS6879 vs. WS
  misc_feature: MA Experiment 20000451 PARAMETER Experiment Name: At_CS6879_Shoots-Roots_P Parameter: Tissue Value: Roots
  misc_feature: MA Experiment ID: 20000495 Result: Up-regulated in Transcription
  misc_feature: MA Experiment 20000495 PARAMETER Experiment Name: At_Guard_Cells_P Parameter: Harvest Date Value: 8/2/2002
  misc_feature: MA Experiment 20000495 PARAMETER Experiment Name: At_Guard_Cells_P Parameter: Organism Value: A. thaliana
  misc_feature: MA Experiment 20000495 PARAMETER Experiment Name: At_Guard_Cells_P Parameter: Tissue Value: Guard Cells vs. Leaves
  misc_feature: MA Experiment ID: 20000496 Result: Up-regulated in Transcription
  misc_feature: MA Experiment 20000496 PARAMETER Experiment Name: At_Guard_Cells_P Parameter: Harvest Date Value: 7/19/2002
  misc_feature: MA Experiment 20000496 PARAMETER Experiment Name: At_Guard_Cells_P Parameter: Organism Value: Canola
  misc_feature: MA Experiment 20000496 PARAMETER Experiment Name: At_Guard_Cells_P Parameter: Tissue Value: Guard Cells vs. Leaves
  misc_feature: MA Experiment ID: 20001248 Result: Down-regulated in Transcription
  misc_feature: MA Experiment 20001248 PARAMETER Experiment Name: At_Far-red-induction_P Parameter: Age (day) Value: 7
  misc_feature: MA Experiment 20001248 PARAMETER Experiment Name: At_Far-red-induction_P Parameter: Light Value: Far-red vs. White
  misc_feature: MA Experiment 20001248 PARAMETER Experiment Name: At_Far-red-induction_P Parameter: Organism Value: A. thaliana
  misc_feature: MA Experiment 20001248 PARAMETER Experiment Name: At_Far-red-induction_P Parameter: Plant Line Value: Columbia
  misc_feature: MA Experiment 20001248 PARAMETER Experiment Name: At_Far-red-induction_P Parameter: Timepoint (hr) Value: 4
  misc_feature: MA Experiment 20001248 PARAMETER Experiment Name: At_Far-red-induction_P Parameter: Tissue Value: Whole Plant
  misc_feature: MA Experiment ID: 20001554 Result: Up-regulated in Transcription
  misc_feature: MA Experiment 20001554 PARAMETER Experiment Name: At_Drought_Soil_Dry_P Parameter: Age (day) Value: 21
  misc_feature: MA Experiment 20001554 PARAMETER Experiment Name: At_Drought_Soil_Dry_P Parameter: Organism Value: A. thaliana
  misc_feature: MA Experiment 20001554 PARAMETER Experiment Name: At_Drought_Soil_Dry_P Parameter: Plant Line Value: WS
  misc_feature: MA Experiment 20001554 PARAMETER Experiment Name: At_Drought_Soil_Dry_P Parameter: Post Timepoint (hr) Value: None
  misc_feature: MA Experiment 20001554 PARAMETER Experiment Name: At_Drought_Soil_Dry_P Parameter: Post-Treatment Value: None
  misc_feature: MA Experiment 20001554 PARAMETER Experiment Name: At_Drought_Soil_Dry_P Parameter: Timepoint (day) Value: 7
  misc_feature: MA Experiment 20001554 PARAMETER Experiment Name: At_Drought_Soil_Dry_P Parameter: Treatment Value: Drought vs. No Drought
  misc_feature: MA Experiment ID: 20001555 Result: Up-regulated in Transcription
  misc_feature: MA Experiment 20001555 PARAMETER Experiment Name: At_Drought_Soil_Dry_P Parameter: Age (day) Value: 24
  misc_feature: MA Experiment 20001555 PARAMETER Experiment Name: At_Drought_Soil_Dry_P Parameter: Organism Value: A. thaliana
  misc_feature: MA Experiment 20001555 PARAMETER Experiment Name: At_Drought_Soil_Dry_P Parameter: Plant Line Value: WS
  misc_feature: MA Experiment 20001555 PARAMETER Experiment Name: At_Drought_Soil_Dry_P Parameter: Post Timepoint (hr) Value: None
  misc_feature: MA Experiment 20001555 PARAMETER Experiment Name: At_Drought_Soil_Dry_P Parameter: Post-Treatment Value: None
  misc_feature: MA Experiment 20001555 PARAMETER Experiment Name: At_Drought_Soil_Dry_P Parameter: Timepoint (day) Value: 10
  misc_feature: MA Experiment 20001555 PARAMETER Experiment Name: At_Drought_Soil_Dry_P Parameter: Treatment Value: Drought vs. No Drought
  misc_feature: MA Experiment ID: 20001556 Result: Up-regulated in Transcription
  misc_feature: MA Experiment 20001556 PARAMETER Experiment Name: At_Drought_Soil_Dry_P Parameter: Age (day) Value: 26
  misc_feature: MA Experiment 20001556 PARAMETER Experiment Name: At_Drought_Soil_Dry_P Parameter: Organism Value: A. thaliana
  misc_feature: MA Experiment 20001556 PARAMETER Experiment Name: At_Drought_Soil_Dry_P Parameter: Plant Line Value: WS
  misc_feature: MA Experiment 20001556 PARAMETER Experiment Name: At_Drought_Soil_Dry_P Parameter: Post Timepoint (hr) Value: None
  misc_feature: MA Experiment 20001556 PARAMETER Experiment Name: At_Drought_Soil_Dry_P Parameter: Post-Treatment Value: None
  misc_feature: MA Experiment 20001556 PARAMETER Experiment Name: At_Drought_Soil_Dry_P Parameter: Timepoint (day) Value: 12
  misc_feature: MA Experiment 20001556 PARAMETER Experiment Name: At_Drought_Soil_Dry_P Parameter: Treatment Value: Drought vs. No Drought
  misc_feature: MA Experiment ID: 20001559 Result: Up-regulated in Transcription
  misc_feature: MA Experiment 20001559 PARAMETER Experiment Name: At_Drought_Soil_Dry_P Parameter: Age (day) Value: 28
  misc_feature: MA Experiment 20001559 PARAMETER Experiment Name: At_Drought_Soil_Dry_P Parameter: Organism Value: A. thaliana
  misc_feature: MA Experiment 20001559 PARAMETER Experiment Name: At_Drought_Soil_Dry_P Parameter: Plant Line Value: WS
  misc_feature: MA Experiment 20001559 PARAMETER Experiment Name: At_Drought_Soil_Dry_P Parameter: Post Timepoint (hr) Value: 29
  misc_feature: MA Experiment 20001559 PARAMETER Experiment Name: At_Drought_Soil_Dry_P Parameter: Post-Treatment Value: Re-Water vs. No Drought
  misc_feature: MA Experiment 20001559 PARAMETER Experiment Name: At_Drought_Soil_Dry_P Parameter: Timepoint (day) Value: 14
  misc_feature: MA Experiment 20001559 PARAMETER Experiment Name: At_Drought_Soil_Dry_P Parameter: Treatment Value: Drought vs. No Drought
  misc_feature: MA Experiment ID: 20001560 Result: Up-regulated in Transcription
  misc_feature: MA Experiment 20001560 PARAMETER Experiment Name: At_Drought_Soil_Dry_P Parameter: Age (day) Value: 28
  misc_feature: MA Experiment 20001560 PARAMETER Experiment Name: At_Drought_Soil_Dry_P Parameter: Organism Value: A. thaliana
  misc_feature: MA Experiment 20001560 PARAMETER Experiment Name: At_Drought_Soil_Dry_P Parameter: Plant Line Value: WS
  misc_feature: MA Experiment 20001560 PARAMETER Experiment Name: At_Drought_Soil_Dry_P Parameter: Post Timepoint (hr) Value: None
  misc_feature: MA Experiment 20001560 PARAMETER Experiment Name: At_Drought_Soil_Dry_P Parameter: Post-Treatment Value: None
  misc_feature: MA Experiment 20001560 PARAMETER Experiment Name: At_Drought_Soil_Dry_P Parameter: Timepoint (day) Value: 14
  misc_feature: MA Experiment 20001560 PARAMETER Experiment Name: At_Drought_Soil_Dry_P Parameter: Treatment Value: Drought vs. No Drought
  misc_feature: MA Experiment ID: 20001904 Result: Up-regulated in Transcription
  misc_feature: MA Experiment 20001904 PARAMETER Experiment Name: At_Drought_Reproduction_P Parameter: Age (day) Value: 37
  misc_feature: MA Experiment 20001904 PARAMETER Experiment Name: At_Drought_Reproduction_P Parameter: Organism Value: A. thaliana
  misc_feature: MA Experiment 20001904 PARAMETER Experiment Name: At_Drought_Reproduction_P Parameter: Plant Line Value: WS
  misc_feature: MA Experiment 20001904 PARAMETER Experiment Name: At_Drought_Reproduction_P Parameter: Timepoint (day) Value: 7
  misc_feature: MA Experiment 20001904 PARAMETER Experiment Name: At_Drought_Reproduction_P Parameter: Tissue Value: Rosettes
  misc_feature: MA Experiment 20001904 PARAMETER Experiment Name: At_Drought_Reproduction_P Parameter: Treatment Value: Drought vs. No Drought
  misc_feature: MA Experiment ID: 20001905 Result: Up-regulated in Transcription
  misc_feature: MA Experiment 20001905 PARAMETER Experiment Name: At_Drought_Reproduction_P Parameter: Age (day) Value: 40
  misc_feature: MA Experiment 20001905 PARAMETER Experiment Name: At_Drought_Reproduction_P Parameter: Organism Value: A. thaliana
  misc_feature: MA Experiment 20001905 PARAMETER Experiment Name: At_Drought_Reproduction_P Parameter: Plant Line Value: WS
  misc_feature: MA Experiment 20001905 PARAMETER Experiment Name: At_Drought_Reproduction_P Parameter: Timepoint (day) Value: 10
  misc_feature: MA Experiment 20001905 PARAMETER Experiment Name: At_Drought_Reproduction_P Parameter: Tissue Value: Rosettes
  misc_feature: MA Experiment 20001905 PARAMETER Experiment Name: At_Drought_Reproduction_P Parameter: Treatment Value: Drought vs. No Drought
  misc_feature: Phenotype: ROSETTE LEAVES Other
  misc_feature: Phenotype: ROSETTE LEAVES Curled-Curled 2
  misc_feature: Phenotype: ROSETTE LEAVES Curled-Curled 2
accacatcaattctctcatatctctctctcactttcgaatatatcttaagataacagagacacatactcttaagtttggtgaagaataagaagacaatgacgaaggaagtggttggtgataagagatctttctccgggaaagactatcaagacccaccacctgaacctctattcgacgctactgagcttgggaagtggtctttctacagagctctcatcgctgagttcatagccactctccttttcctctatgtcactattatgactgtcatcggttacaagagccagaccgatccagccctgaatcctgaccagtgtacaggcgttggcgtccttggtatcgcatgggcctttggtggcatgatcttcatcctcgtctactgcaccgccggcatctctggtgggcatattaatccggcagtgacttttgggctgttgttggctcggaaagtgacgttggtgagagcagtgatgtacatggtggctcagtgcctcggtgccatttgtggtgtggctttggtcaaggccttccagtctgcttacttcacccgctacggtggtggcgcaaatggtctctctgacggttacagcatcggcaccggtgttgcagccgagatcattggtacattcgtcttagtctacaccgtcttctctgccactgatcccaagaggagtgcgcgtgactctcacgttcctgtattggctccattgccaattggatttgcagtgttcatcgttcacttagctacaatcccaatcacgggcactggtatcaaccctgcaagaagtctcggagctgcaatcatctacaacaaggacaaagcttgggaccatcattggatattctgggtgggtccgtttgctggtgcagccatcgcagctttctaccatcagtttgtgttgagggctggtgcgattaaggcgctcgggtctttcaggagccagcctcacgtttaactttgatatgctcttccctgagtacatcaaagagagaaaaagagaagataataagagaggcttgtaattttatcttgtgtagacggttggagccaagtgacgtgtagtactagtatctaatttctagctttggtgaggagagatattttgaagtgtcgcttgcgggccaactttgaattgctacttctatgattaaatctatgtctctactccttgactattaagattgctctatttattagtactaaatattccttatatatg

SEQ ID NO: 28777 - protein, 286 aa, Arabidopsis thaliana
  peptide (1)..(286): Ceres Seq. ID no. 12396607
  misc_feature (30)..(265): Pfam Name: Major intrinsic protein Pfam Description: Major intrinsic protein
  misc_feature (1)..(282): Homolog of NCBI NO: 28395418 NR Description: plasma intrinsic protein 2,1 [Juglans regia]
  misc_feature (1)..(286): Homolog of NCBI NO: 5081421 NR Description: plasma membrane intrinsic protein 1 [Brassica
  misc_feature (1)..(286): Homolog of NCBI NO: 28395420 NR Description: plasma intrinsic protein 2,2 [Juglans regia]
  misc_feature (1)..(282): Homolog of NCBI NO: 13486938 NR Description: plasma membrane intrinsic protein 2-1 [Pyrus
  misc_feature (1)..(282): Homolog of NCBI NO: 7441275 NR Description: mipC protein - common ice plant
  misc_feature (1)..(282): Homolog of NCBI NO: 17940746 NR Description: aquaporin-like protein [Petunia x hybrida]
  misc_feature (1)..(286): Homolog of NCBI NO: 8071620 NR Description: putative aquaporin PIP2-1 [Vitis berlandieri x
  misc_feature (1)..(286): Homolog of NCBI NO: 3158476 NR Description: aquaporin 2 [Samanea saman]
  misc_feature (1)..(286): Homolog of NCBI NO: 13486942 NR Description: plasma membrane intrinsic protein 2-2 [Pyrus
  misc_feature (1)..(286): Homolog of NCBI NO: 15233102 NR Description: aquaporin/MIP - like protein
MTKEVVGDKRSFSGKDYQDPPPEPLFDATELGKWSFYRALIAEFIATLLFLYVTIMTVIGYKSQTDPALNPDQCTGVGVLGIAWAFGGMIFILVYCTAGISGGHINPAVTFGLLLARKVTLVRAVMYMVAQCLGAICGVALVKAFQSAYFTRYGGGANGLSDGYSIGTGVAAEIIGTFVLVYTVFSATDPKRSARDSHVPVLAPLPIGFAVFIVHLATIPITGTGINPARSLGAAIIYNKDKAWDHHWIFWVGPFAGAAIAAFYHQFVLRAGAIKALGSFRSQPHV

SEQ ID NO: 28778 - protein, 231 aa, Arabidopsis thaliana
  peptide (1)..(231): Ceres Seq. ID no. 12396608
  misc_feature (1)..(210): Pfam Name: Major intrinsic protein Pfam Description: Major intrinsic protein
  misc_feature (1)..(227): Homolog of NCBI NO: 28395418 NR Description: plasma intrinsic protein 2,1 [Juglans regia]
  misc_feature (1)..(231): Homolog of NCBI NO: 5081421 NR Description: plasma membrane intrinsic protein 1 [Brassica
  misc_feature (1)..(231): Homolog of NCBI NO: 28395420 NR Description: plasma intrinsic protein 2,2 [Juglans regia]
  misc_feature (1)..(227): Homolog of NCBI NO: 13486938 NR Description: plasma membrane intrinsic protein 2-1 [Pyrus
  misc_feature (1)..(227): Homolog of NCBI NO: 7441275 NR Description: mipC protein - common ice plant
  misc_feature (1)..(227): Homolog of NCBI NO: 17940746 NR Description: aquaporin-like protein [Petunia x hybrida]
  misc_feature (1)..(231): Homolog of NCBI NO: 8071620 NR Description: putative aquaporin PIP2-1 [Vitis berlandieri x
  misc_feature (1)..(231): Homolog of NCBI NO: 3158476 NR Description: aquaporin 2 [Samanea saman]
  misc_feature (1)..(231): Homolog of NCBI NO: 13486942 NR Description: plasma membrane intrinsic protein 2-2 [Pyrus
  misc_feature (1)..(231): Homolog of NCBI NO: 15233102 NR Description: aquaporin/MIP - like protein
MTVIGYKSQTDPALNPDQCTGVGVLGIAWAFGGMIFILVYCTAGISGGHINPAVTFGLLLARKVTLVRAVMYMVAQCLGAICGVALVKAFQSAYFTRYGGGANGLSDGYSIGTGVAAEIIGTFVLVYTVFSATDPKRSARDSHVPVLAPLPIGFAVFIVHLATIPITGTGINPARSLGAAIIYNKDKAWDHHWIFWVGPFAGAAIAAFYHQFVLRAGAIKALGSFRSQPHV

SEQ ID NO: 28779 - protein, 198 aa, Arabidopsis thaliana
  peptide (1)..(198): Ceres Seq. ID no. 12396609
  misc_feature (1)..(177): Pfam Name: Major intrinsic protein Pfam Description: Major intrinsic protein
  misc_feature (1)..(194): Homolog of NCBI NO: 28395418 NR Description: plasma intrinsic protein 2,1 [Juglans regia]
  misc_feature (1)..(198): Homolog of NCBI NO: 5081421 NR Description: plasma membrane intrinsic protein 1 [Brassica
  misc_feature (1)..(198): Homolog of NCBI NO: 28395420 NR Description: plasma intrinsic protein 2,2 [Juglans regia]
  misc_feature (1)..(194): Homolog of NCBI NO: 13486938 NR Description: plasma membrane intrinsic protein 2-1 [Pyrus
  misc_feature (1)..(194): Homolog of NCBI NO: 7441275 NR Description: mipC protein - common ice plant
  misc_feature (1)..(194): Homolog of NCBI NO: 17940746 NR Description: aquaporin-like protein [Petunia x hybrida]
  misc_feature (1)..(198): Homolog of NCBI NO: 8071620 NR Description: putative aquaporin PIP2-1 [Vitis berlandieri x
  misc_feature (1)..(198): Homolog of NCBI NO: 3158476 NR Description: aquaporin 2 [Samanea saman]
  misc_feature (1)..(198): Homolog of NCBI NO: 13486942 NR Description: plasma membrane intrinsic protein 2-2 [Pyrus
  misc_feature (1)..(198): Homolog of NCBI NO: 15233102 NR Description: aquaporin/MIP - like protein
MIFILVYCTAGISGGHINPAVTFGLLLARKVTLVRAVMYMVAQCLGAICGVALVKAFQSAYFTRYGGGANGLSDGYSIGTGVAAEIIGTFVLVYTVFSATDPKRSARDSHVPVLAPLPIGFAVFIVHLATIPITGTGINPARSLGAAIIYNKDKAWDHHWIFWVGPFAGAAIAAFYHQFVLRAGAIKALGSFRSQPHV

SEQ ID NO: 28780 - DNA, 821 bp, Arabidopsis thaliana
  misc_feature (1)..(821): Ceres Seq. ID no. 12322096
  misc_feature: MA Experiment ID: 108464 Result: Up-regulated in Transcription
  misc_feature: MA Experiment 108464 PARAMETER Experiment Name: At_Germinating_Seeds_cDNA_P Parameter: Age (day) Value: 4 vs. 0
  misc_feature: MA Experiment 108464 PARAMETER Experiment Name: At_Germinating_Seeds_cDNA_P Parameter: Tissue Value: Germinating Seeds
  misc_feature: MA Experiment ID: 108488 Result: Down-regulated in Transcription
  misc_feature: MA Experiment ID: 108573 Result: Down-regulated in Transcription
  misc_feature: MA Experiment 108573 PARAMETER Experiment Name: At_Drought_cDNA_P Parameter: Timepoint (hr) Value: 6
  misc_feature: MA Experiment 108573 PARAMETER Experiment Name: At_Drought_cDNA_P Parameter: Tissue Value: Aerial
  misc_feature: MA Experiment 108573 PARAMETER Experiment Name: At_Drought_cDNA_P Parameter: Treatment Value: Drought vs. No Drought
  misc_feature: MA Experiment ID: 108595 Result: Up-regulated in Transcription
  misc_feature: MA Experiment 108595 PARAMETER Experiment Name: At_Ler-pi_Ovule_cDNA_P Parameter: Plant Line Value: null
  misc_feature: MA Experiment ID: 20000069 Result: Up-regulated in Transcription
  misc_feature: MA Experiment 20000069 PARAMETER Experiment Name: At_100uM_ABA_Mutants_cDNA_P Parameter: Plant Line Value: CS23
  misc_feature: MA Experiment 20000069 PARAMETER Experiment Name: At_100uM_ABA_Mutants_cDNA_P Parameter: Timepoint (hr) Value: 6
  misc_feature: MA Experiment 20000069 PARAMETER Experiment Name: At_100uM_ABA_Mutants_cDNA_P Parameter: Tissue Value: Aerial
  misc_feature: MA Experiment 20000069 PARAMETER Experiment Name: At_100uM_ABA_Mutants_cDNA_P Parameter: Treatment Value: 100uM ABA vs. No Treatment
  misc_feature: MA Experiment ID: 20000070 Result: Up-regulated in Transcription
  misc_feature: MA Experiment 20000070 PARAMETER Experiment Name: At_100uM_ABA_Mutants_cDNA_P Parameter: Plant Line Value: CS24
  misc_feature: MA Experiment 20000070 PARAMETER Experiment Name: At_100uM_ABA_Mutants_cDNA_P Parameter: Timepoint (hr) Value: 6
  misc_feature: MA Experiment 20000070 PARAMETER Experiment Name: At_100uM_ABA_Mutants_cDNA_P Parameter: Tissue Value: Aerial
  misc_feature: MA Experiment 20000070 PARAMETER Experiment Name: At_100uM_ABA_Mutants_cDNA_P Parameter: Treatment Value: 100uM ABA vs. No Treatment
  misc_feature: MA Experiment ID: 20000071 Result: Up-regulated in Transcription
  misc_feature: MA Experiment 20000071 PARAMETER Experiment Name: At_100uM_ABA_Mutants_cDNA_P Parameter: Plant Line Value: CS8104
  misc_feature: MA Experiment 20000071 PARAMETER Experiment Name: At_100uM_ABA_Mutants_cDNA_P Parameter: Timepoint (hr) Value: 6
  misc_feature: MA Experiment 20000071 PARAMETER Experiment Name: At_100uM_ABA_Mutants_cDNA_P Parameter: Tissue Value: Aerial
  misc_feature: MA Experiment 20000071 PARAMETER Experiment Name: At_100uM_ABA_Mutants_cDNA_P Parameter: Treatment Value: 100uM ABA vs. No Treatment
  misc_feature: MA Experiment ID: 20000072 Result: Up-regulated in Transcription
  misc_feature: MA Experiment 20000072 PARAMETER Experiment Name: At_100uM_ABA_Mutants_cDNA_P Parameter: Plant Line Value: CS8105
  misc_feature: MA Experiment 20000072 PARAMETER Experiment Name: At_100uM_ABA_Mutants_cDNA_P Parameter: Timepoint (hr) Value: 6
  misc_feature: MA Experiment 20000072 PARAMETER Experiment Name: At_100uM_ABA_Mutants_cDNA_P Parameter: Tissue Value: Aerial
  misc_feature: MA Experiment 20000072 PARAMETER Experiment Name: At_100uM_ABA_Mutants_cDNA_P Parameter: Treatment Value: 100uM ABA vs. No Treatment
  misc_feature: MA Experiment ID: 20000087 Result: Up-regulated in Transcription
  misc_feature: MA Experiment 20000087 PARAMETER Experiment Name: At_100uM_ABA_Mutants_cDNA_P Parameter: Plant Line Value: WS
  misc_feature: MA Experiment 20000087 PARAMETER Experiment Name: At_100uM_ABA_Mutants_cDNA_P Parameter: Timepoint (hr) Value: 6
  misc_feature: MA Experiment 20000087 PARAMETER Experiment Name: At_100uM_ABA_Mutants_cDNA_P Parameter: Tissue Value: Aerial
  misc_feature: MA Experiment 20000087 PARAMETER Experiment Name: At_100uM_ABA_Mutants_cDNA_P Parameter: Treatment Value: 100uM ABA vs. No Treatment
  misc_feature: MA Experiment ID: 20000088 Result: Up-regulated in Transcription
  misc_feature: MA Experiment 20000088 PARAMETER Experiment Name: At_100uM_ABA_Mutants_cDNA_P Parameter: Plant Line Value: Landsberg
  misc_feature: MA Experiment 20000088 PARAMETER Experiment Name: At_100uM_ABA_Mutants_cDNA_P Parameter: Timepoint (hr) Value: 6
  misc_feature: MA Experiment 20000088 PARAMETER Experiment Name: At_100uM_ABA_Mutants_cDNA_P Parameter: Tissue Value: Aerial
  misc_feature: MA Experiment 20000088 PARAMETER Experiment Name: At_100uM_ABA_Mutants_cDNA_P Parameter: Treatment Value: 100uM ABA vs. No Treatment
  misc_feature: MA Experiment ID: 20000089 Result: Up-regulated in Transcription
  misc_feature: MA Experiment ID: 20000090 Result: Up-regulated in Transcription
  misc_feature: MA Experiment ID: 20000111 Result: Down-regulated in Transcription
  misc_feature: MA Experiment 20000111 PARAMETER Experiment Name: At_42deg_Heat_cDNA_P Parameter: Temperature (deg C) Value: 42 vs. 22
  misc_feature: MA Experiment 20000111 PARAMETER Experiment Name: At_42deg_Heat_cDNA_P Parameter: Timepoint (hr) Value: 6
  misc_feature: MA Experiment 20000111 PARAMETER Experiment Name: At_42deg_Heat_cDNA_P Parameter: Tissue Value: Aerial
  misc_feature: MA Experiment ID: 20000113 Result: Down-regulated in Transcription
  misc_feature: MA Experiment 20000113 PARAMETER Experiment Name: At_42deg_Heat_cDNA_P Parameter: Temperature (deg C) Value: 42 vs. 22
  misc_feature: MA Experiment 20000113 PARAMETER Experiment Name: At_42deg_Heat_cDNA_P Parameter: Timepoint (hr) Value: 8
  misc_feature: MA Experiment 20000113 PARAMETER Experiment Name: At_42deg_Heat_cDNA_P Parameter: Tissue Value: Aerial
  misc_feature: MA Experiment ID: 20000117 Result: Up-regulated in Transcription
  misc_feature: MA Experiment 20000117 PARAMETER Experiment Name: At_100uM_ABA_Mutants_cDNA_P Parameter: Plant Line Value: Columbia
  misc_feature: MA Experiment 20000117 PARAMETER Experiment Name: At_100uM_ABA_Mutants_cDNA_P Parameter: Timepoint (hr) Value: 6
  misc_feature: MA Experiment 20000117 PARAMETER Experiment Name: At_100uM_ABA_Mutants_cDNA_P Parameter: Tissue Value: Aerial
  misc_feature: MA Experiment 20000117 PARAMETER Experiment Name: At_100uM_ABA_Mutants_cDNA_P Parameter: Treatment Value: 100uM ABA vs. No Treatment
  misc_feature: MA Experiment ID: 20000173 Result: Down-regulated in Transcription
  misc_feature: MA Experiment 20000173 PARAMETER Experiment Name: At_42deg_Heat_P Parameter: Age (day) Value: 14
  misc_feature: MA Experiment 20000173 PARAMETER Experiment Name: At_42deg_Heat_P Parameter: Organism Value: A. thaliana
  misc_feature: MA Experiment 20000173 PARAMETER Experiment Name: At_42deg_Heat_P Parameter: Plant Line Value: WS
  misc_feature: MA Experiment 20000173 PARAMETER Experiment Name: At_42deg_Heat_P Parameter: Temperature (deg C) Value: 42 vs. 22
  misc_feature: MA Experiment 20000173 PARAMETER Experiment Name: At_42deg_Heat_P Parameter: Timepoint (hr) Value: 6
  misc_feature: MA Experiment 20000173 PARAMETER Experiment Name: At_42deg_Heat_P Parameter: Tissue Value: Aerial
  misc_feature: MA Experiment ID: 20000235 Result: Down-regulated in Transcription
  misc_feature: MA Experiment 20000235 PARAMETER Experiment Name: At_Siliques_P Parameter: Age (day) Value: 21
  misc_feature: MA Experiment 20000235 PARAMETER Experiment Name: At_Siliques_P Parameter: Organism Value: A. thaliana
  misc_feature: MA Experiment 20000235 PARAMETER Experiment Name: At_Siliques_P Parameter: Plant Line Value: WS
  misc_feature: MA Experiment 20000235 PARAMETER Experiment Name: At_Siliques_P Parameter: Tissue Value: 5-10mm Siliques vs. Whole Plant
  misc_feature: MA Experiment ID: 20000437 Result: Up-regulated in Transcription
  misc_feature: MA Experiment 20000437 PARAMETER Experiment Name: At_Drought_P Parameter: Age (day) Value: 8
  misc_feature: MA Experiment 20000437 PARAMETER Experiment Name: At_Drought_P Parameter: Organism Value: A. thaliana
  misc_feature: MA Experiment 20000437 PARAMETER Experiment Name: At_Drought_P Parameter: Plant Line Value: WS
  misc_feature: MA Experiment 20000437 PARAMETER Experiment Name: At_Drought_P Parameter: Timepoint (hr) Value: 24
  misc_feature: MA Experiment 20000437 PARAMETER Experiment Name: At_Drought_P Parameter: Tissue Value: Whole Plant
  misc_feature: MA Experiment 20000437 PARAMETER Experiment Name: At_Drought_P Parameter: Treatment Value: Drought vs. No Drought
  misc_feature: MA Experiment ID: 20001248 Result: Up-regulated in Transcription
  misc_feature: MA Experiment 20001248 PARAMETER Experiment Name: At_Far-red-induction_P Parameter: Age (day) Value: 7
  misc_feature: MA Experiment 20001248 PARAMETER Experiment Name: At_Far-red-induction_P Parameter: Light Value: Far-red vs. White
  misc_feature: MA Experiment 20001248 PARAMETER Experiment Name: At_Far-red-induction_P Parameter: Organism Value: A. thaliana
  misc_feature: MA Experiment 20001248 PARAMETER Experiment Name: At_Far-red-induction_P Parameter: Plant Line Value: Columbia
  misc_feature: MA Experiment 20001248 PARAMETER Experiment Name: At_Far-red-induction_P Parameter: Timepoint (hr) Value: 4
  misc_feature: MA Experiment 20001248 PARAMETER Experiment Name: At_Far-red-induction_P Parameter: Tissue Value: Whole Plant
  misc_feature: MA Experiment ID: 20001451 Result: Up-regulated in Transcription
  misc_feature: MA Experiment 20001451 PARAMETER Experiment Name: At_Far-red-induction_P Parameter: Age (day) Value: 7
  misc_feature: MA Experiment 20001451 PARAMETER Experiment Name: At_Far-red-induction_P Parameter: Light Value: Far-red vs. White
  misc_feature: MA Experiment 20001451 PARAMETER Experiment Name: At_Far-red-induction_P Parameter: Organism Value: A. thaliana
  misc_feature: MA Experiment 20001451 PARAMETER Experiment Name: At_Far-red-induction_P Parameter: Plant Line Value: Columbia
  misc_feature: MA Experiment 20001451 PARAMETER Experiment Name: At_Far-red-induction_P Parameter: Timepoint (hr) Value: 24
  misc_feature: MA Experiment 20001451 PARAMETER Experiment Name: At_Far-red-induction_P Parameter: Tissue Value: Whole Plant
  misc_feature: MA Experiment ID: 20001558 Result: Down-regulated in Transcription
  misc_feature: MA Experiment 20001558 PARAMETER Experiment Name: At_Drought_Soil_Dry_P Parameter: Age (day) Value: 27
  misc_feature: MA Experiment 20001558 PARAMETER Experiment Name: At_Drought_Soil_Dry_P Parameter: Organism Value: A. thaliana
  misc_feature: MA Experiment 20001558 PARAMETER Experiment Name: At_Drought_Soil_Dry_P Parameter: Plant Line Value: WS
  misc_feature: MA Experiment 20001558 PARAMETER Experiment Name: At_Drought_Soil_Dry_P Parameter: Post Timepoint (hr) Value: 6
  misc_feature: MA Experiment 20001558 PARAMETER Experiment Name: At_Drought_Soil_Dry_P Parameter: Post-Treatment Value: Re-Water vs. No Drought
  misc_feature: MA Experiment 20001558 PARAMETER Experiment Name: At_Drought_Soil_Dry_P Parameter: Timepoint (day) Value: 13
  misc_feature: MA Experiment 20001558 PARAMETER Experiment Name: At_Drought_Soil_Dry_P Parameter: Treatment Value: Drought vs. No Drought
atcccccacttaaccctctcatctctcggcctctcactcgaatctccttcacaaagcgtacaaatcacaaacacgtagttattctctctttactctctctatttctctctcttcaaaccctacgaagatcttcttcttcttcttcaagaatcgatcatgaaaggagctaaatctaaggctgaaaccaggagcacaaagctctctgtgactaagaagcctgctaagggagccaaaggtgctgctaaagatccaaacaaacctaagaggccttccagtgccttcttcgttttcatggaagatttccgtgtgacgtacaaggaggagcaccctaagaacaagtctgttgctgctgttggcaaagctggtggtgaaaagtggaaatccttgtctgactctgagaaggctccttatgtggctaaggctgacaagcgcaaggttgagtatgagaagaacatgaaagcctacaacaagaaattggaggaaggccctaaggaagatgaggaatctgacaagtcagtttcagaggttaacgatgaggatgatgctgaggatggcagtgaagaggaggaagacgatgattaagaagttgaagttgtggtagcgtaatatagaaggctgcaaggaatctctcggatgtttttatctcttctcttaaaatgttaattcggctggttaaagtggtttttttttttttttctttttctttttcttactgatgtttcgttttagtaaactattacctatctcccactgattctacgggtaatggaaaaagtgaatgtagaatgtttagatggtgaaatgagagatttgtagctctg

SEQ ID NO: 28781 - protein, 141 aa, Arabidopsis thaliana
  peptide (1)..(141): Ceres Seq. ID no. 12322097
  misc_feature (35)..(104): Pfam Name: HMG (high mobility group) box Pfam Description: HMG (high mobility group) box
  misc_feature (1)..(140): Homolog of NCBI NO: 7446212 NR Description: high mobility group protein - potato
  misc_feature (1)..(136): Homolog of NCBI NO: 25402921 NR Description: protein F2D10.18 [imported] - Arabidopsis
  misc_feature (1)..(141): Homolog of NCBI NO: 18394898 NR Description: Expressed protein
  misc_feature (1)..(141): Homolog of NCBI NO: 18394900 NR Description: Expressed protein
  misc_feature (1)..(141): Homolog of NCBI NO: 25402921 NR Description: protein F2D10.18 [imported] - Arabidopsis
MKGAKSKAETRSTKLSVTKKPAKGAKGAAKDPNKPKRPSSAFFVFMEDFRVTYKEEHPKNKSVAAVGKAGGEKWKSLSDSEKAPYVAKADKRKVEYEKNMKAYNKKLEEGPKEDEESDKSVSEVNDEDDAEDGSEEEEDDD

SEQ ID NO: 28782 - protein, 96 aa, Arabidopsis thaliana
  peptide (1)..(96): Ceres Seq. ID no. 12322098
  misc_feature (1)..(59): Pfam Name: HMG (high mobility group) box Pfam Description: HMG (high mobility group) box
  misc_feature (1)..(95): Homolog of NCBI NO: 7446212 NR Description: high mobility group protein - potato
  misc_feature (1)..(91): Homolog of NCBI NO: 25402921 NR Description: protein F2D10.18 [imported] - Arabidopsis
  misc_feature (1)..(96): Homolog of NCBI NO: 18394898 NR Description: Expressed protein
  misc_feature (1)..(96): Homolog of NCBI NO: 18394900 NR Description: Expressed protein
  misc_feature (1)..(96): Homolog of NCBI NO: 25402921 NR Description: protein F2D10.18 [imported] - Arabidopsis
MEDFRVTYKEEHPKNKSVAAVGKAGGEKWKSLSDSEKAPYVAKADKRKVEYEKNMKAYNKKLEEGPKEDEESDKSVSEVNDEDDAEDGSEEEEDDD

SEQ ID NO: 28783 - DNA, 1186 bp, Arabidopsis thaliana
  misc_feature (1)..(1186): Ceres Seq. ID no. 12422578
  misc_feature: MA Experiment ID: 108434 Result: Down-regulated in Transcription
  misc_feature: MA Experiment 108434 PARAMETER Experiment Name: At_Root_Tips_cDNA_P Parameter: Tissue Value: Root Tips
  misc_feature: MA Experiment ID: 108461 Result: Up-regulated in Transcription
  misc_feature: MA Experiment 108461 PARAMETER Experiment Name: At_Germinating_Seeds_cDNA_P Parameter: Age (day) Value: 1 vs. 0
  misc_feature: MA Experiment 108461 PARAMETER Experiment Name: At_Germinating_Seeds_cDNA_P Parameter: Tissue Value: Germinating Seeds
  misc_feature: MA Experiment ID: 108462 Result: Up-regulated in Transcription
  misc_feature: MA Experiment 108462 PARAMETER Experiment Name: At_Germinating_Seeds_cDNA_P Parameter: Age (day) Value: 2 vs. 0
  misc_feature: MA Experiment 108462 PARAMETER Experiment Name: At_Germinating_Seeds_cDNA_P Parameter: Tissue Value: Germinating Seeds
  misc_feature: MA Experiment ID: 108463 Result: Up-regulated in Transcription
  misc_feature: MA Experiment 108463 PARAMETER Experiment Name: At_Germinating_Seeds_cDNA_P Parameter: Age (day) Value: 3 vs. 0
  misc_feature: MA Experiment 108463 PARAMETER Experiment Name: At_Germinating_Seeds_cDNA_P Parameter: Tissue Value: Germinating Seeds
  misc_feature: MA Experiment ID: 108464 Result: Up-regulated in Transcription
  misc_feature: MA Experiment 108464 PARAMETER Experiment Name: At_Germinating_Seeds_cDNA_P Parameter: Age (day) Value: 4 vs. 0
  misc_feature: MA Experiment 108464 PARAMETER Experiment Name: At_Germinating_Seeds_cDNA_P Parameter: Tissue Value: Germinating Seeds
  misc_feature: MA Experiment ID: 108489 Result: Down-regulated in Transcription
  misc_feature: MA Experiment ID: 108573 Result: Down-regulated in Transcription
  misc_feature: MA Experiment 108573 PARAMETER Experiment Name: At_Drought_cDNA_P Parameter: Timepoint (hr) Value: 6
  misc_feature: MA Experiment 108573 PARAMETER Experiment Name: At_Drought_cDNA_P Parameter: Tissue Value: Aerial
  misc_feature: MA Experiment 108573 PARAMETER Experiment Name: At_Drought_cDNA_P Parameter: Treatment Value: Drought vs. No Drought
  misc_feature: MA Experiment ID: 108594 Result: Down-regulated in Transcription
  misc_feature: MA Experiment 108594 PARAMETER Experiment Name: At_Ler-rhl_Root_cDNA_P Parameter: Plant Line Value: null
  misc_feature: MA Experiment ID: 20000071 Result: Down-regulated in Transcription
  misc_feature: MA Experiment 20000071 PARAMETER Experiment Name: At_100uM_ABA_Mutants_cDNA_P Parameter: Plant Line Value: CS8104
  misc_feature: MA Experiment 20000071 PARAMETER Experiment Name: At_100uM_ABA_Mutants_cDNA_P Parameter: Timepoint (hr) Value: 6
  misc_feature: MA Experiment 20000071 PARAMETER Experiment Name: At_100uM_ABA_Mutants_cDNA_P Parameter: Tissue Value: Aerial
  misc_feature: MA Experiment 20000071 PARAMETER Experiment Name: At_100uM_ABA_Mutants_cDNA_P Parameter: Treatment Value: 100uM ABA vs. No Treatment
  misc_feature: MA Experiment ID: 20000072 Result: Down-regulated in Transcription
  misc_feature: MA Experiment 20000072 PARAMETER Experiment Name: At_100uM_ABA_Mutants_cDNA_P Parameter: Plant Line Value: CS8105
  misc_feature: MA Experiment 20000072 PARAMETER Experiment Name: At_100uM_ABA_Mutants_cDNA_P Parameter: Timepoint (hr) Value: 6
  misc_feature: MA Experiment 20000072 PARAMETER Experiment Name: At_100uM_ABA_Mutants_cDNA_P Parameter: Tissue Value: Aerial
  misc_feature: MA Experiment 20000072 PARAMETER Experiment Name: At_100uM_ABA_Mutants_cDNA_P Parameter: Treatment Value: 100uM ABA vs. No Treatment
  misc_feature: MA Experiment ID: 20000087 Result: Down-regulated in Transcription
  misc_feature: MA Experiment 20000087 PARAMETER Experiment Name: At_100uM_ABA_Mutants_cDNA_P Parameter: Plant Line Value: WS
  misc_feature: MA Experiment 20000087 PARAMETER Experiment Name: At_100uM_ABA_Mutants_cDNA_P Parameter: Timepoint (hr) Value: 6
  misc_feature: MA Experiment 20000087 PARAMETER Experiment Name: At_100uM_ABA_Mutants_cDNA_P Parameter: Tissue Value: Aerial
  misc_feature: MA Experiment 20000087 PARAMETER Experiment Name: At_100uM_ABA_Mutants_cDNA_P Parameter: Treatment Value: 100uM ABA vs. No Treatment
  misc_feature: MA Experiment ID: 20000088 Result: Down-regulated in Transcription
  misc_feature: MA Experiment 20000088 PARAMETER Experiment Name: At_100uM_ABA_Mutants_cDNA_P Parameter: Plant Line Value: Landsberg
  misc_feature: MA Experiment 20000088 PARAMETER Experiment Name: At_100uM_ABA_Mutants_cDNA_P Parameter: Timepoint (hr) Value: 6
  misc_feature: MA Experiment 20000088 PARAMETER Experiment Name: At_100uM_ABA_Mutants_cDNA_P Parameter: Tissue Value: Aerial
  misc_feature: MA Experiment 20000088 PARAMETER Experiment Name: At_100uM_ABA_Mutants_cDNA_P Parameter: Treatment Value: 100uM ABA vs. No Treatment
  misc_feature: MA Experiment ID: 20000090 Result: Down-regulated in Transcription
  misc_feature: MA Experiment ID: 20000111 Result: Up-regulated in Transcription
  misc_feature: MA Experiment 20000111 PARAMETER Experiment Name: At_42deg_Heat_cDNA_P Parameter: Temperature (deg C) Value: 42 vs. 22
  misc_feature: MA Experiment 20000111 PARAMETER Experiment Name: At_42deg_Heat_cDNA_P Parameter: Timepoint (hr) Value: 6
  misc_feature: MA Experiment 20000111 PARAMETER Experiment Name: At_42deg_Heat_cDNA_P Parameter: Tissue Value: Aerial
  misc_feature: MA Experiment ID: 20000117 Result: Down-regulated in Transcription
  misc_feature: MA Experiment 20000117 PARAMETER Experiment Name: At_100uM_ABA_Mutants_cDNA_P Parameter: Plant Line Value: Columbia
  misc_feature: MA Experiment 20000117 PARAMETER Experiment Name: At_100uM_ABA_Mutants_cDNA_P Parameter: Timepoint (hr) Value: 6
  misc_feature: MA Experiment 20000117 PARAMETER Experiment Name: At_100uM_ABA_Mutants_cDNA_P Parameter: Tissue Value: Aerial
  misc_feature: MA Experiment 20000117 PARAMETER Experiment Name: At_100uM_ABA_Mutants_cDNA_P Parameter: Treatment Value: 100uM ABA vs. No Treatment
  misc_feature: MA Experiment ID: 20000180 Result: Up-regulated in Transcription
  misc_feature: MA Experiment 20000180 PARAMETER Experiment Name: At_Germinating_Seeds_P Parameter: Age (hr) Value: 24 vs. 0
  misc_feature: MA Experiment 20000180 PARAMETER Experiment Name: At_Germinating_Seeds_P Parameter: Tissue Value: Germinating Seeds
  misc_feature: MA Experiment ID: 20000496 Result: Up-regulated in Transcription
  misc_feature: MA Experiment 20000496 PARAMETER Experiment Name: At_Guard_Cells_P Parameter: Harvest Date Value: 7/19/2002
  misc_feature: MA Experiment 20000496 PARAMETER Experiment Name: At_Guard_Cells_P Parameter: Organism Value: Canola
  misc_feature: MA Experiment 20000496 PARAMETER Experiment Name: At_Guard_Cells_P Parameter: Tissue Value: Guard Cells vs. Leaves
  misc_feature: MA Experiment ID: 20000527 Result: Down-regulated in Transcription
  misc_feature: MA Experiment 20000527 PARAMETER Experiment Name: At_10percent_PEG_P Parameter: Age (day) Value: 20
  misc_feature: MA Experiment 20000527 PARAMETER Experiment Name: At_10percent_PEG_P Parameter: Organism Value: A. thaliana
  misc_feature: MA Experiment 20000527 PARAMETER Experiment Name: At_10percent_PEG_P Parameter: Plant Line Value: WS
  misc_feature: MA Experiment 20000527 PARAMETER Experiment Name: At_10percent_PEG_P Parameter: Timepoint (day) Value: 20
  misc_feature: MA Experiment 20000527 PARAMETER Experiment Name: At_10percent_PEG_P Parameter: Tissue Value: Whole Plant
  misc_feature: MA Experiment 20000527 PARAMETER Experiment Name: At_10percent_PEG_P Parameter: Treatment Value: 10percent PEG vs. No Treatment
  misc_feature: MA Experiment ID: 20001248 Result: Down-regulated in Transcription
  misc_feature: MA Experiment 20001248 PARAMETER Experiment Name: At_Far-red-induction_P Parameter: Age (day) Value: 7
  misc_feature: MA Experiment 20001248 PARAMETER Experiment Name: At_Far-red-induction_P Parameter: Light Value: Far-red vs. White
  misc_feature: MA Experiment 20001248 PARAMETER Experiment Name: At_Far-red-induction_P Parameter: Organism Value: A. thaliana
  misc_feature: MA Experiment 20001248 PARAMETER Experiment Name: At_Far-red-induction_P Parameter: Plant Line Value: Columbia
  misc_feature: MA Experiment 20001248 PARAMETER Experiment Name: At_Far-red-induction_P Parameter: Timepoint (hr) Value: 4
  misc_feature: MA Experiment 20001248 PARAMETER Experiment Name: At_Far-red-induction_P Parameter: Tissue Value: Whole Plant
  misc_feature: MA Experiment ID: 20001450 Result: Down-regulated in Transcription
  misc_feature: MA Experiment 20001450 PARAMETER Experiment Name: At_Far-red-induction_P Parameter: Age (day) Value: 7
  misc_feature: MA Experiment 20001450 PARAMETER Experiment Name: At_Far-red-induction_P Parameter: Light Value: Far-red vs. White
  misc_feature: MA Experiment 20001450 PARAMETER Experiment Name: At_Far-red-induction_P Parameter: Organism Value: A. thaliana
  misc_feature: MA Experiment 20001450 PARAMETER Experiment Name: At_Far-red-induction_P Parameter: Plant Line Value: Columbia
  misc_feature: MA Experiment 20001450 PARAMETER Experiment Name: At_Far-red-induction_P Parameter: Timepoint (hr) Value: 8
  misc_feature: MA Experiment 20001450 PARAMETER Experiment Name: At_Far-red-induction_P Parameter: Tissue Value: Whole Plant
  misc_feature: MA Experiment ID: 20001558 Result: Down-regulated in Transcription
  misc_feature: MA Experiment 20001558 PARAMETER Experiment Name: At_Drought_Soil_Dry_P Parameter: Age (day) Value: 27
  misc_feature: MA Experiment 20001558 PARAMETER Experiment Name: At_Drought_Soil_Dry_P Parameter: Organism Value: A. thaliana
  misc_feature: MA Experiment 20001558 PARAMETER Experiment Name: At_Drought_Soil_Dry_P Parameter: Plant Line Value: WS
  misc_feature: MA Experiment 20001558 PARAMETER Experiment Name: At_Drought_Soil_Dry_P Parameter: Post Timepoint (hr) Value: 6
  misc_feature: MA Experiment 20001558 PARAMETER Experiment Name: At_Drought_Soil_Dry_P Parameter: Post-Treatment Value: Re-Water vs. No Drought
  misc_feature: MA Experiment 20001558 PARAMETER Experiment Name: At_Drought_Soil_Dry_P Parameter: Timepoint (day) Value: 13
  misc_feature: MA Experiment 20001558 PARAMETER Experiment Name: At_Drought_Soil_Dry_P Parameter: Treatment Value: Drought vs. No Drought
  misc_feature: MA Experiment ID: 20001908 Result: Down-regulated in Transcription
  misc_feature: MA Experiment 20001908 PARAMETER Experiment Name: At_Drought_Reproduction_P Parameter: Age (day) Value: 40
  misc_feature: MA Experiment 20001908 PARAMETER Experiment Name: At_Drought_Reproduction_P Parameter: Organism Value: A. thaliana
  misc_feature: MA Experiment 20001908 PARAMETER Experiment Name: At_Drought_Reproduction_P Parameter: Plant Line Value: WS
  misc_feature: MA Experiment 20001908 PARAMETER Experiment Name: At_Drought_Reproduction_P Parameter: Timepoint (day) Value: 10
  misc_feature: MA Experiment 20001908 PARAMETER Experiment Name: At_Drought_Reproduction_P Parameter: Tissue Value: Siliques
  misc_feature: MA Experiment 20001908 PARAMETER Experiment Name: At_Drought_Reproduction_P Parameter: Treatment Value: Drought vs. No Drought
  misc_feature: MA Experiment ID: 20001911 Result: Down-regulated in Transcription
  misc_feature: MA Experiment 20001911 PARAMETER Experiment Name: At_Drought_Reproduction_P Parameter: Age (day) Value: 40
  misc_feature: MA Experiment 20001911 PARAMETER Experiment Name: At_Drought_Reproduction_P Parameter: Organism Value: A. thaliana
  misc_feature: MA Experiment 20001911 PARAMETER Experiment Name: At_Drought_Reproduction_P Parameter: Plant Line Value: WS
  misc_feature: MA Experiment 20001911 PARAMETER Experiment Name: At_Drought_Reproduction_P Parameter: Timepoint (day) Value: 10
  misc_feature: MA Experiment 20001911 PARAMETER Experiment Name: At_Drought_Reproduction_P Parameter: Tissue Value: Flowers
  misc_feature: MA Experiment 20001911 PARAMETER Experiment Name: At_Drought_Reproduction_P Parameter: Treatment Value: Drought vs. No Drought
aagcacattccaaatcattttcttaccactcaaagagtgcgcactcattatcatcgtttgaaactaaacatggcgacggagaaaagcaagattctggtgatcggaggaactggttacatcgggaaattcctagtagaagcgagcgccaaagctggccactccacattcgctctcgttagagaagcaactctatccgatcctgtcaagggcaaaaccgtccagagtttcaaagatctcggcgtcacaatactacacggagatttgaatgatcacgagagcttagtgaaggctattaaacaggttgatgtggtgatatctaccgttgggagcatgcaaatcttggatcaaaccaagatcatttccgccatcaaagaagccggtaatgtcaagagattcttgccgtctgagtttggggtggatgtggataggacgagtgcggttgagccagctaaatcggcttttgcagggaagatacagatcaggagaaccatcgaagcggaaggaataccatacacttacgctgttaccggttgctttggtggttactacttgccaacattggttcagttcgagcctggtctcacttctcctcctagagacaaagtcaccattcttggcgatggaaatgccaaagctgtgatcaacaaagaggaagatattgctgcttacacgatcaaggcggtggatgatcctaggactctgaacaaaatcctatacattaagccttctaacaacactttatcgatgaacgaaatagtcaccttgtgggagaaaaagattggcaagtctcttgagaagactcacctcccagaggaacaactacttaaaagcatccaagagtctccgattcccatcaatgttgttctgtcgataaaccacgcggtgtttgtgaatggagataccaatatcagtatagagccttcctttggtgtggaagcctctgagctttaccctgatgtcaagtacacaagtgttgacgagtatctcagttatttcgcttgatgaacttcattataaacgtaatttaccaccatgacgcgctagtttcatgttctgtatcaataaaagaatggttcttgtaatggtgaatgtgtgtgtgtatgtgtgactaatcagtaatcacagtgctttacctctgtttccgagcttcccaagaaatatgaattagtaatatataattcatacc

SEQ ID NO: 28784 - protein, 333 aa, Arabidopsis thaliana
  peptide (1)..(333): Ceres Seq. ID no. 12422579
  misc_feature (26)..(333): Pfam Name: Isoflavone reductase Pfam Description: Isoflavone reductase
  misc_feature (27)..(332): Homolog of NCBI NO: 7578895 NR Description: phenylcoumaran benzylic ether reductase homolog
  misc_feature (28)..(325): Homolog of NCBI NO: 4731376 NR Description: isoflavone reductase homolog Bet v 6.0101 [Betula
  misc_feature (27)..(332): Homolog of NCBI NO: 3114899 NR Description: phenylcoumaran benzylic ether reductase
  misc_feature (27)..(332): Homolog of NCBI NO: 3114903 NR Description: phenylcoumaran benzylic ether reductase
  misc_feature (27)..(332): Homolog of NCBI NO: 3114901 NR Description: phenylcoumaran benzylic ether reductase
  misc_feature (28)..(332): Homolog of NCBI NO: 10764491 NR Description: allergenic isoflavone reductase-like protein Bet
  misc_feature (24)..(332): Homolog of NCBI NO: 15222191 NR Description: isoflavone reductase homolog P3, putative
  misc_feature (24)..(333): Homolog of NCBI NO: 15222190 NR Description: isoflavone reductase homolog P3, putative
  misc_feature (24)..(333): Homolog of NCBI NO: 25344798 NR Description: probable NADPH oxidoreductase, 14094-12769
  misc_feature (24)..(333): Homolog of NCBI NO: 18410820 NR Description: isoflavone reductase homolog P3
KHIPNHFLTTQRVRTHYHRLKLNMATEKSKILVIGGTGYIGKFLVEASAKAGHSTFALVREATLSDPVKGKTVQSFKDLGVTILHGDLNDHESLVKAIKQVDVVISTVGSMQILDQTKIISAIKEAGNVKRFLPSEFGVDVDRTSAVEPAKSAFAGKIQIRRTIEAEGIPYTYAVTGCFGGYYLPTLVQFEPGLTSPPRDKVTILGDGNAKAVINKEEDIAAYTIKAVDDPRTLNKILYIKPSNNTLSMNEIVTLWEKKIGKSLEKTHLPEEQLLKSIQESPIPINVVLSINHAVFVNGDTNISIEPSFGVEASELYPDVKYTSVDEYLSYFA

SEQ ID NO: 28785 - protein, 310 aa, Arabidopsis thaliana
  peptide (1)..(310): Ceres Seq. ID no. 12422580
  misc_feature (3)..(310): Pfam Name: Isoflavone reductase Pfam Description: Isoflavone reductase
  misc_feature (4)..(309): Homolog of NCBI NO: 7578895 NR Description: phenylcoumaran benzylic ether reductase homolog
  misc_feature (5)..(302): Homolog of NCBI NO: 4731376 NR Description: isoflavone reductase homolog Bet v 6.0101 [Betula
  misc_feature (4)..(309): Homolog of NCBI NO: 3114899 NR Description: phenylcoumaran benzylic ether reductase
  misc_feature (4)..(309): Homolog of NCBI NO: 3114903 NR Description: phenylcoumaran benzylic ether reductase
  misc_feature (4)..(309): Homolog of NCBI NO: 3114901 NR Description: phenylcoumaran benzylic ether reductase
  misc_feature (5)..(309): Homolog of NCBI NO: 10764491 NR Description: allergenic isoflavone reductase-like protein Bet
  misc_feature (1)..(309): Homolog of NCBI NO: 15222191 NR Description: isoflavone reductase homolog P3, putative
  misc_feature (1)..(310): Homolog of NCBI NO: 15222190 NR Description: isoflavone reductase homolog P3, putative
  misc_feature (1)..(310): Homolog of NCBI NO: 25344798 NR Description: probable NADPH oxidoreductase, 14094-12769
  misc_feature (1)..(310): Homolog of NCBI NO: 18410820 NR Description: isoflavone reductase homolog P3
MATEKSKILVIGGTGYIGKFLVEASAKAGHSTFALVREATLSDPVKGKTVQSFKDLGVTILHGDLNDHESLVKAIKQVDVVISTVGSMQILDQTKIISAIKEAGNVKRFLPSEFGVDVDRTSAVEPAKSAFAGKIQIRRTIEAEGIPYTYAVTGCFGGYYLPTLVQFEPGLTSPPRDKVTILGDGNAKAVINKEEDIAAYTIKAVDDPRTLNKILYIKPSNNTLSMNEIVTLWEKKIGKSLEKTHLPEEQLLKSIQESPIPINVVLSINHAVFVNGDTNISIEPSFGVEASELYPDVKYTSVDEYLSYFA

SEQ ID NO: 28786 - protein, 223 aa, Arabidopsis thaliana
  peptide (1)..(223): Ceres Seq. ID no. 12422581
  misc_feature (1)..(223): Pfam Name: Isoflavone reductase Pfam Description: Isoflavone reductase
  misc_feature (1)..(222): Homolog of NCBI NO: 7578895 NR Description: phenylcoumaran benzylic ether reductase homolog
  misc_feature (1)..(215): Homolog of NCBI NO: 4731376 NR Description: isoflavone reductase homolog Bet v 6.0101 [Betula
  misc_feature (1)..(222): Homolog of NCBI NO: 3114899 NR Description: phenylcoumaran benzylic ether reductase
  misc_feature (1)..(222): Homolog of NCBI NO: 3114903 NR Description: phenylcoumaran benzylic ether reductase
  misc_feature (1)..(222): Homolog of NCBI NO: 3114901 NR Description: phenylcoumaran benzylic ether reductase
  misc_feature (1)..(222): Homolog of NCBI NO: 10764491 NR Description: allergenic isoflavone reductase-like protein Bet
  misc_feature (1)..(222): Homolog of NCBI NO: 15222191 NR Description: isoflavone reductase homolog P3, putative
  misc_feature (1)..(223): Homolog of NCBI NO: 15222190 NR Description: isoflavone reductase homolog P3, putative
  misc_feature (1)..(223): Homolog of NCBI NO: 25344798 NR Description: probable NADPH oxidoreductase, 14094-12769
  misc_feature (1)..(223): Homolog of NCBI NO: 18410820 NR Description: isoflavone reductase homolog P3
MQILDQTKIISAIKEAGNVKRFLPSEFGVDVDRTSAVEPAKSAFAGKIQIRRTIEAEGIPYTYAVTGCFGGYYLPTLVQFEPGLTSPPRDKVTILGDGNAKAVINKEEDIAAYTIKAVDDPRTLNKILYIKPSNNTLSMNEIVTLWEKKIGKSLEKTHLPEEQLLKSIQESPIPINVVLSINHAVFVNGDTNISIEPSFGVEASELYPDVKYTSVDEYLSYFA

SEQ ID NO: 28787 - DNA, 1078 bp, Arabidopsis thaliana
  misc_feature (1)..(1078): Ceres Seq. ID no. 12334300
  misc_feature: MA Experiment ID: 20000166 Result: Up-regulated in Transcription
  misc_feature: MA Experiment 20000166 PARAMETER Experiment Name: At_100uM_ABA_P Parameter: Age (day) Value: 14
  misc_feature: MA Experiment 20000166 PARAMETER Experiment Name: At_100uM_ABA_P Parameter: Organism Value: A. thaliana
  misc_feature: MA Experiment 20000166 PARAMETER Experiment Name: At_100uM_ABA_P Parameter: Plant Line Value: WS
  misc_feature: MA Experiment 20000166 PARAMETER Experiment Name: At_100uM_ABA_P Parameter: Timepoint (hr) Value: 1
  misc_feature: MA Experiment 20000166 PARAMETER Experiment Name: At_100uM_ABA_P Parameter: Tissue Value: Aerial
  misc_feature: MA Experiment 20000166 PARAMETER Experiment Name: At_100uM_ABA_P Parameter: Treatment Value: 100uM ABA vs. No Treatment
  misc_feature: MA Experiment ID: 20000169 Result: Up-regulated in Transcription
  misc_feature: MA Experiment 20000169 PARAMETER Experiment Name: At_100uM_ABA_P Parameter: Age (day) Value: 14
  misc_feature: MA Experiment 20000169 PARAMETER Experiment Name: At_100uM_ABA_P Parameter: Organism Value: A. thaliana
  misc_feature: MA Experiment 20000169 PARAMETER Experiment Name: At_100uM_ABA_P Parameter: Plant Line Value: WS
  misc_feature: MA Experiment 20000169 PARAMETER Experiment Name: At_100uM_ABA_P Parameter: Timepoint (hr) Value: 6
  misc_feature: MA Experiment 20000169 PARAMETER Experiment Name: At_100uM_ABA_P Parameter: Tissue Value: Aerial
  misc_feature: MA Experiment 20000169 PARAMETER Experiment Name: At_100uM_ABA_P Parameter: Treatment Value: 100uM ABA vs. No Treatment
  misc_feature: MA Experiment ID: 20000184 Result: Down-regulated in Transcription
  misc_feature: MA Experiment 20000184 PARAMETER Experiment Name: At_Shoots__P Parameter: Age (day) Value: 7
  misc_feature: MA Experiment 20000184 PARAMETER Experiment Name: At_Shoots__P Parameter: Tissue Value: Shoots vs. Whole Plant
  misc_feature: MA Experiment ID: 20000214 Result: Down-regulated in Transcription
  misc_feature: MA Experiment 20000214 PARAMETER Experiment Name: At_4deg_Cold_P Parameter: Timepoint (hr) Value: 6
  misc_feature: MA Experiment ID: 20000234 Result: Down-regulated in Transcription
  misc_feature: MA Experiment 20000234 PARAMETER Experiment Name: At_Siliques_P Parameter: Age (day) Value: 21
  misc_feature: MA Experiment 20000234 PARAMETER Experiment Name: At_Siliques_P Parameter: Organism Value: A. thaliana
  misc_feature: MA Experiment 20000234 PARAMETER Experiment Name: At_Siliques_P Parameter: Plant Line Value: WS
  misc_feature: MA Experiment 20000234 PARAMETER Experiment Name: At_Siliques_P Parameter: Tissue Value: Less Than 5mm Siliques vs. Whole Plant
  misc_feature: MA Experiment ID: 20000235 Result: Down-regulated in Transcription
  misc_feature: MA Experiment 20000235 PARAMETER Experiment Name: At_Siliques_P Parameter: Age (day) Value: 21
  misc_feature: MA Experiment 20000235 PARAMETER Experiment Name: At_Siliques_P Parameter: Organism Value: A. thaliana
  misc_feature: MA Experiment 20000235 PARAMETER Experiment Name: At_Siliques_P Parameter: Plant Line Value: WS
  misc_feature: MA Experiment 20000235 PARAMETER Experiment Name: At_Siliques_P Parameter: Tissue Value: 5-10mm Siliques vs. Whole Plant
  misc_feature: MA Experiment ID: 20000265 Result: Down-regulated in Transcription
  misc_feature: MA Experiment 20000265 PARAMETER Experiment Name: At_Open_Flower_P Parameter: Age (day) Value: 21
  misc_feature: MA Experiment 20000265 PARAMETER Experiment Name: At_Open_Flower_P Parameter: Plant Line Value: WS
  misc_feature: MA Experiment 20000265 PARAMETER Experiment Name: At_Open_Flower_P Parameter: Tissue Value: Closed Flower vs. Whole Plant
  misc_feature: MA Experiment ID: 20000286 Result: Down-regulated in Transcription
  misc_feature: MA Experiment 20000286 PARAMETER Experiment Name: At_Open_Flower_P Parameter: Age (day) Value: 21
  misc_feature: MA Experiment 20000286 PARAMETER Experiment Name: At_Open_Flower_P Parameter: Plant Line Value: WS
  misc_feature: MA Experiment 20000286 PARAMETER Experiment Name: At_Open_Flower_P Parameter: Tissue Value: Half Open vs. Whole Plant
  misc_feature: MA Experiment ID: 20000436 Result: Up-regulated in Transcription
  misc_feature: MA Experiment 20000436 PARAMETER Experiment Name: At_Drought_P Parameter: Age (day) Value: 7
  misc_feature: MA Experiment 20000436 PARAMETER Experiment Name: At_Drought_P Parameter: Organism Value: A. thaliana
  misc_feature: MA Experiment 20000436 PARAMETER Experiment Name: At_Drought_P Parameter: Plant Line Value: WS
  misc_feature: MA Experiment 20000436 PARAMETER Experiment Name: At_Drought_P Parameter: Timepoint (hr) Value: 12
  misc_feature: MA Experiment 20000436 PARAMETER Experiment Name: At_Drought_P Parameter: Tissue Value: Whole Plant
  misc_feature: MA Experiment 20000436 PARAMETER Experiment Name: At_Drought_P Parameter: Treatment Value: Drought vs. No Drought
  misc_feature: MA Experiment ID: 20000437 Result: Up-regulated in Transcription
  misc_feature: MA Experiment 20000437 PARAMETER Experiment Name: At_Drought_P Parameter: Age (day) Value: 8
  misc_feature: MA Experiment 20000437 PARAMETER Experiment Name: At_Drought_P Parameter: Organism Value: A. thaliana
  misc_feature: MA Experiment 20000437 PARAMETER Experiment Name: At_Drought_P Parameter: Plant Line Value: WS
  misc_feature: MA Experiment 20000437 PARAMETER Experiment Name: At_Drought_P Parameter: Timepoint (hr) Value: 24
  misc_feature: MA Experiment 20000437 PARAMETER Experiment Name: At_Drought_P Parameter: Tissue Value: Whole Plant
  misc_feature: MA Experiment 20000437 PARAMETER Experiment Name: At_Drought_P Parameter: Treatment Value: Drought vs. No Drought
  misc_feature: MA Experiment ID: 20000453 Result: Up-regulated in Transcription
  misc_feature: MA Experiment 20000453 PARAMETER Experiment Name: At_100uM_ABA_P Parameter: Age (day) Value: 15
  misc_feature: MA Experiment 20000453 PARAMETER Experiment Name: At_100uM_ABA_P Parameter: Organism Value: A. thaliana
  misc_feature: MA Experiment 20000453 PARAMETER Experiment Name: At_100uM_ABA_P Parameter: Plant Line Value: WS
  misc_feature: MA Experiment 20000453 PARAMETER Experiment Name: At_100uM_ABA_P Parameter: Timepoint (hr) Value: 24
  misc_feature: MA Experiment 20000453 PARAMETER Experiment Name: At_100uM_ABA_P Parameter: Tissue Value: Aerial
  misc_feature: MA Experiment 20000453 PARAMETER Experiment Name: At_100uM_ABA_P Parameter: Treatment Value: 100uM ABA vs. No Treatment
  misc_feature: MA Experiment ID: 20000794 Result: Up-regulated in Transcription
  misc_feature: MA Experiment 20000794 PARAMETER Experiment Name: At_Petals_P Parameter: Age (day) Value: 23-25 days
  misc_feature: MA Experiment 20000794 PARAMETER Experiment Name: At_Petals_P Parameter: Plant Line Value: WS
  misc_feature: MA Experiment 20000794 PARAMETER Experiment Name: At_Petals_P Parameter: Tissue Value: Petals vs. Whole plant
  misc_feature: MA Experiment ID: 20001450 Result: Up-regulated in Transcription
  misc_feature: MA Experiment 20001450 PARAMETER Experiment Name: At_Far-red-induction_P Parameter: Age (day) Value: 7
  misc_feature: MA Experiment 20001450 PARAMETER Experiment Name: At_Far-red-induction_P Parameter: Light Value: Far-red vs. White
  misc_feature: MA Experiment 20001450 PARAMETER Experiment Name: At_Far-red-induction_P Parameter: Organism Value: A. thaliana
  misc_feature: MA Experiment 20001450 PARAMETER Experiment Name: At_Far-red-induction_P Parameter: Plant Line Value: Columbia
  misc_feature: MA Experiment 20001450 PARAMETER Experiment Name: At_Far-red-induction_P Parameter: Timepoint (hr) Value: 8
  misc_feature: MA Experiment 20001450 PARAMETER Experiment Name: At_Far-red-induction_P Parameter: Tissue Value: Whole Plant
  misc_feature: MA Experiment ID: 20001451 Result: Up-regulated in Transcription
  misc_feature: MA Experiment 20001451 PARAMETER Experiment Name: At_Far-red-induction_P Parameter: Age (day) Value: 7
  misc_feature: MA Experiment 20001451 PARAMETER Experiment Name: At_Far-red-induction_P Parameter: Light Value: Far-red vs. White
  misc_feature: MA Experiment 20001451 PARAMETER Experiment Name: At_Far-red-induction_P Parameter: Organism Value: A. thaliana
  misc_feature: MA Experiment 20001451 PARAMETER Experiment Name: At_Far-red-induction_P Parameter: Plant Line Value: Columbia
  misc_feature: MA Experiment 20001451 PARAMETER Experiment Name: At_Far-red-induction_P Parameter: Timepoint (hr) Value: 24
  misc_feature: MA Experiment 20001451 PARAMETER Experiment Name: At_Far-red-induction_P Parameter: Tissue Value: Whole Plant
  misc_feature: MA Experiment ID: 20001554 Result: Up-regulated in Transcription
  misc_feature: MA Experiment 20001554 PARAMETER Experiment Name: At_Drought_Soil_Dry_P Parameter: Age (day) Value: 21
  misc_feature: MA Experiment 20001554 PARAMETER Experiment Name: At_Drought_Soil_Dry_P Parameter: Organism Value: A. thaliana
  misc_feature: MA Experiment 20001554 PARAMETER Experiment Name: At_Drought_Soil_Dry_P Parameter: Plant Line Value: WS
  misc_feature: MA Experiment 20001554 PARAMETER Experiment Name: At_Drought_Soil_Dry_P Parameter: Post Timepoint (hr) Value: None
  misc_feature: MA Experiment 20001554 PARAMETER Experiment Name: At_Drought_Soil_Dry_P Parameter: Post-Treatment Value: None
  misc_feature: MA Experiment 20001554 PARAMETER Experiment Name: At_Drought_Soil_Dry_P Parameter: Timepoint (day) Value: 7
  misc_feature: MA Experiment 20001554 PARAMETER Experiment Name: At_Drought_Soil_Dry_P Parameter: Treatment Value: Drought vs. No Drought
  misc_feature: MA Experiment ID: 20001555 Result: Up-regulated in Transcription
  misc_feature: MA Experiment 20001555 PARAMETER Experiment Name: At_Drought_Soil_Dry_P Parameter: Age (day) Value: 24
  misc_feature: MA Experiment 20001555 PARAMETER Experiment Name: At_Drought_Soil_Dry_P Parameter: Organism Value: A. thaliana
  misc_feature: MA Experiment 20001555 PARAMETER Experiment Name: At_Drought_Soil_Dry_P Parameter: Plant Line Value: WS
  misc_feature: MA Experiment 20001555 PARAMETER Experiment Name: At_Drought_Soil_Dry_P Parameter: Post Timepoint (hr) Value: None
  misc_feature: MA Experiment 20001555 PARAMETER Experiment Name: At_Drought_Soil_Dry_P Parameter: Post-Treatment Value: None
  misc_feature: MA Experiment 20001555 PARAMETER Experiment Name: At_Drought_Soil_Dry_P Parameter: Timepoint (day) Value: 10
  misc_feature: MA Experiment 20001555 PARAMETER Experiment Name: At_Drought_Soil_Dry_P Parameter: Treatment Value: Drought vs. No Drought
  misc_feature: MA Experiment ID: 20001559 Result: Up-regulated in Transcription
  misc_feature: MA Experiment 20001559 PARAMETER Experiment Name: At_Drought_Soil_Dry_P Parameter: Age (day) Value: 28
  misc_feature: MA Experiment 20001559 PARAMETER Experiment Name: At_Drought_Soil_Dry_P Parameter: Organism Value: A. thaliana
  misc_feature: MA Experiment 20001559 PARAMETER Experiment Name: At_Drought_Soil_Dry_P Parameter: Plant Line Value: WS
  misc_feature: MA Experiment 20001559 PARAMETER Experiment Name: At_Drought_Soil_Dry_P Parameter: Post Timepoint (hr) Value: 29
  misc_feature: MA Experiment 20001559 PARAMETER Experiment Name: At_Drought_Soil_Dry_P Parameter: Post-Treatment Value: Re-Water vs. No Drought
  misc_feature: MA Experiment 20001559 PARAMETER Experiment Name: At_Drought_Soil_Dry_P Parameter: Timepoint (day) Value: 14
  misc_feature: MA Experiment 20001559 PARAMETER Experiment Name: At_Drought_Soil_Dry_P Parameter: Treatment Value: Drought vs. No Drought
  misc_feature: MA Experiment ID: 20001904 Result: Up-regulated in Transcription
  misc_feature: MA Experiment 20001904 PARAMETER Experiment Name: At_Drought_Reproduction_P Parameter: Age (day) Value: 37
  misc_feature: MA Experiment 20001904 PARAMETER Experiment Name: At_Drought_Reproduction_P Parameter: Organism Value: A. thaliana
  misc_feature: MA Experiment 20001904 PARAMETER Experiment Name: At_Drought_Reproduction_P Parameter: Plant Line Value: WS
  misc_feature: MA Experiment 20001904 PARAMETER Experiment Name: At_Drought_Reproduction_P Parameter: Timepoint (day) Value: 7
  misc_feature: MA Experiment 20001904 PARAMETER Experiment Name: At_Drought_Reproduction_P Parameter: Tissue Value: Rosettes
  misc_feature: MA Experiment 20001904 PARAMETER Experiment Name: At_Drought_Reproduction_P Parameter: Treatment Value: Drought vs. No Drought
  misc_feature: MA Experiment ID: 20001905 Result: Up-regulated in Transcription
  misc_feature: MA Experiment 20001905 PARAMETER Experiment Name: At_Drought_Reproduction_P Parameter: Age (day) Value: 40
  misc_feature: MA Experiment 20001905 PARAMETER Experiment Name: At_Drought_Reproduction_P Parameter: Organism Value: A. thaliana
  misc_feature: MA Experiment 20001905 PARAMETER Experiment Name: At_Drought_Reproduction_P Parameter: Plant Line Value: WS
  misc_feature: MA Experiment 20001905 PARAMETER Experiment Name: At_Drought_Reproduction_P Parameter: Timepoint (day) Value: 10
  misc_feature: MA Experiment 20001905 PARAMETER Experiment Name: At_Drought_Reproduction_P Parameter: Tissue Value: Rosettes
  misc_feature: MA Experiment 20001905 PARAMETER Experiment Name: At_Drought_Reproduction_P Parameter: Treatment Value: Drought vs. No Drought
  misc_feature: MA Experiment ID: 20001911 Result: Up-regulated in Transcription
  misc_feature: MA Experiment 20001911 PARAMETER Experiment Name: At_Drought_Reproduction_P Parameter: Age (day) Value: 40
  misc_feature: MA Experiment 20001911 PARAMETER Experiment Name: At_Drought_Reproduction_P Parameter: Organism Value: A. thaliana
  misc_feature: MA Experiment 20001911 PARAMETER Experiment Name: At_Drought_Reproduction_P Parameter: Plant Line Value: WS
  misc_feature: MA Experiment 20001911 PARAMETER Experiment Name: At_Drought_Reproduction_P Parameter: Timepoint (day) Value: 10
  misc_feature: MA Experiment 20001911 PARAMETER Experiment Name: At_Drought_Reproduction_P Parameter: Tissue Value: Flowers
  misc_feature: MA Experiment 20001911 PARAMETER Experiment Name: At_Drought_Reproduction_P Parameter: Treatment Value: Drought vs. No Drought
atggtgatgacacatttttcacgtctccgacaacttcttcttctccaacccaaattcctctcttctcaacctcgtcctctccgttctcctcctccaacatttctccgatcagtgatgggttcgtcttcttctttctcctcttcttcctcgaagcttctctttcgtcaactctttgagaacgaatcttccacctttacttatcttctcgccgacgtttctcatcctgataaacctgctttgttgattgatccggtggacaagactgtggatagagacttgaaactgattgatgagttaggactaaagcttatctatgctatgaacactcatgttcatgctgatcatgtcactggtactggacttcttaagacgaagctcccgggtgtgaaatccgttatttcgaaagcaagtggttccaaagctgatttgtttcttgaacctggtgacaaagtatctattggtgatatataccttgaggttcgtgctacacctggacacactgcaggatgtgttacatatgtgactggtgaaggagctgatcagccccaaccaagaatggcttttaccggggatgctgtactcatccgtggttgtgggaggactgactttcaggaaggaagctcagatcaactctacgagtctgtacattcacagatatttacattgccaaaggacacattgatctatcctgctcacgactacaaaggtttcgaggtaagtacagttggagaagagatgcaacacaacccgcgtctaactaaagataaagaaacattcaaaaccattatgtcaaatctgaatctgtcgtatccgaagatgattgatgttgcagtaccagcaaatatggtctgtgggttacaagatgtgccttctcaagccaactaaaaaaaactcttacatataatgtttgtctttttatcgatgtcattctatatttaccaaagccaataaaaactcttgagagtaatttctacaataagatttgcttccgttgtagataagttcattagaaaattgtgtaaattagattgaacatgtggaatttgttatgaagatgaagacagtatttgcgtgttcg

SEQ ID NO: 28788 - protein, 294 aa, Arabidopsis thaliana
  peptide (1)..(294): Ceres Seq. ID no. 12334301
  misc_feature (63)..(232): Pfam Name: Metallo-beta-lactamase superfamily Pfam Description: Metallo-beta-lactamase superfamily
  misc_feature (43)..(291): Homolog of NCBI NO: 27676450 NR Description: similar to HSCO protein [Mus musculus] [Rattus
  misc_feature (43)..(291): Homolog of NCBI NO: 12963539 NR Description: HSCO protein [Mus musculus]
  misc_feature (35)..(287): Homolog of NCBI NO: 14198377 NR Description: Similar to RIKEN cDNA 0610025L15 gene [Homo
  misc_feature (36)..(288): Homolog of NCBI NO: 27371293 NR Description: Similar to RIKEN cDNA 0610025L15 gene [Xenopus
  misc_feature (32)..(290): Homolog of NCBI NO: 34910930 NR Description: putative glyoxalase II [Oryza sativa (japonica
  misc_feature (39)..(294): Homolog of NCBI NO: 1644427 NR Description: glyoxalase II [Arabidopsis thaliana]
  misc_feature (39)..(294): Homolog of NCBI NO: 18404530 NR Description: glyoxalase II, putative (hydroxyacylglutathione
  misc_feature (238)..(294): Homolog of NCBI NO: 8671869 NR Description: Contains similarity to an unknown glyoxalase II Arabidopsis thaliana gb|U74610 and contains a PF|00753 domain. ESTs gb|AI999524, gb|AI100252, gb|AI099807,
  misc_feature (3)..(239): Homolog of NCBI NO: 8671869 NR Description: Contains similarity to an unknown glyoxalase II Arabidopsis thaliana gb|U74610 and contains a PF|00753 domain. ESTs gb|AI999524, gb|AI100252, gb|AI099807,
  misc_feature (3)..(294): Homolog of NCBI NO: 25405648 NR Description: probable glyoxalase II, 78941-80643
MVMTHFSRLRQLLLLQPKFLSSQPRPLRSPPPTFLRSVMGSSSSFSSSSSKLLFRQLFENESSTFTYLLADVSHPDKPALLIDPVDKTVDRDLKLIDELGLKLIYAMNTHVHADHVTGTGLLKTKLPGVKSVISKASGSKADLFLEPGDKVSIGDIYLEVRATPGHTAGCVTYVTGEGADQPQPRMAFTGDAVLIRGCGRTDFQEGSSDQLYESVHSQIFTLPKDTLIYPAHDYKGFEVSTVGEEMQHNPRLTKDKETFKTIMSNLNLSYPKMIDVAVPANMVCGLQDVPSQAN

SEQ ID NO: 28789 - protein, 292 aa, Arabidopsis thaliana
  peptide (1)..(292): Ceres Seq. ID no. 12334302
  misc_feature (61)..(230): Pfam Name: Metallo-beta-lactamase superfamily Pfam Description: Metallo-beta-lactamase superfamily
  misc_feature (41)..(289): Homolog of NCBI NO: 27676450 NR Description: similar to HSCO protein [Mus musculus] [Rattus
  misc_feature (41)..(289): Homolog of NCBI NO: 12963539 NR Description: HSCO protein [Mus musculus]
  misc_feature (33)..(285): Homolog of NCBI NO: 14198377 NR Description: Similar to RIKEN cDNA 0610025L15 gene [Homo
  misc_feature (34)..(286): Homolog of NCBI NO: 27371293 NR Description: Similar to RIKEN cDNA 0610025L15 gene [Xenopus
  misc_feature (30)..(288): Homolog of NCBI NO: 34910930 NR Description: putative glyoxalase II [Oryza sativa (japonica
  misc_feature (37)..(292): Homolog of NCBI NO: 1644427 NR Description: glyoxalase II [Arabidopsis thaliana]
  misc_feature (37)..(292): Homolog of NCBI NO: 18404530 NR Description: glyoxalase II, putative (hydroxyacylglutathione
  misc_feature (236)..(292): Homolog of NCBI NO: 8671869 NR Description: Contains similarity to an unknown glyoxalase II Arabidopsis thaliana gb|U74610 and contains a PF|00753 domain. ESTs gb|AI999524, gb|AI100252, gb|AI099807,
  misc_feature (1)..(237): Homolog of NCBI NO: 8671869 NR Description: Contains similarity to an unknown glyoxalase II Arabidopsis thaliana gb|U74610 and contains a PF|00753 domain. ESTs gb|AI999524, gb|AI100252, gb|AI099807,
  misc_feature (1)..(292): Homolog of NCBI NO: 25405648 NR Description: probable glyoxalase II, 78941-80643
MTHFSRLRQLLLLQPKFLSSQPRPLRSPPPTFLRSVMGSSSSFSSSSSKLLFRQLFENESSTFTYLLADVSHPDKPALLIDPVDKTVDRDLKLIDELGLKLIYAMNTHVHADHVTGTGLLKTKLPGVKSVISKASGSKADLFLEPGDKVSIGDIYLEVRATPGHTAGCVTYVTGEGADQPQPRMAFTGDAVLIRGCGRTDFQEGSSDQLYESVHSQIFTLPKDTLIYPAHDYKGFEVSTVGEEMQHNPRLTKDKETFKTIMSNLNLSYPKMIDVAVPANMVCGLQDVPSQAN

SEQ ID NO: 28790 - protein, 256 aa, Arabidopsis thaliana
  peptide (1)..(256): Ceres Seq. ID no. 12334303
  misc_feature (25)..(194): Pfam Name: Metallo-beta-lactamase superfamily Pfam Description: Metallo-beta-lactamase superfamily
  misc_feature (5)..(253): Homolog of NCBI NO: 27676450 NR Description: similar to HSCO protein [Mus musculus] [Rattus
  misc_feature (5)..(253): Homolog of NCBI NO: 12963539 NR Description: HSCO protein [Mus musculus]
  misc_feature (1)..(249): Homolog of NCBI NO: 14198377 NR Description: Similar to RIKEN cDNA 0610025L15 gene [Homo
  misc_feature (1)..(250): Homolog of NCBI NO: 27371293 NR Description: Similar to RIKEN cDNA 0610025L15 gene [Xenopus
  misc_feature (1)..(252): Homolog of NCBI NO: 34910930 NR Description: putative glyoxalase II [Oryza sativa (japonica
  misc_feature (1)..(256): Homolog of NCBI NO: 1644427 NR Description: glyoxalase II [Arabidopsis thaliana]
  misc_feature (1)..(256): Homolog of NCBI NO: 18404530 NR Description: glyoxalase II, putative (hydroxyacylglutathione
  misc_feature (200)..(256): Homolog of NCBI NO: 8671869 NR Description: Contains similarity to an unknown glyoxalase II Arabidopsis thaliana gb|U74610 and contains a PF|00753 domain. ESTs gb|AI999524, gb|AI100252, gb|AI099807,
  misc_feature (1)..(201): Homolog of NCBI NO: 8671869 NR Description: Contains similarity to an unknown glyoxalase II Arabidopsis thaliana gb|U74610 and contains a PF|00753 domain. ESTs gb|AI999524, gb|AI100252, gb|AI099807,
  misc_feature (1)..(256): Homolog of NCBI NO: 25405648 NR Description: probable glyoxalase II, 78941-80643
MGSSSSFSSSSSKLLFRQLFENESSTFTYLLADVSHPDKPALLIDPVDKTVDRDLKLIDELGLKLIYAMNTHVHADHVTGTGLLKTKLPGVKSVISKASGSKADLFLEPGDKVSIGDIYLEVRATPGHTAGCVTYVTGEGADQPQPRMAFTGDAVLIRGCGRTDFQEGSSDQLYESVHSQIFTLPKDTLIYPAHDYKGFEVSTVGEEMQHNPRLTKDKETFKTIMSNLNLSYPKMIDVAVPANMVCGLQDVPSQAN

SEQ ID NO: 28791 - DNA, 1155 bp, Arabidopsis thaliana
  misc_feature (1)..(1155): Ceres Seq. ID no. 12371691
  misc_feature: MA Experiment ID: 108434 Result: Down-regulated in Transcription
  misc_feature: MA Experiment 108434 PARAMETER Experiment Name: At_Root_Tips_cDNA_P Parameter: Tissue Value: Root Tips
  misc_feature: MA Experiment ID: 108573 Result: Up-regulated in Transcription
  misc_feature: MA Experiment 108573 PARAMETER Experiment Name: At_Drought_cDNA_P Parameter: Timepoint (hr) Value: 6
  misc_feature: MA Experiment 108573 PARAMETER Experiment Name: At_Drought_cDNA_P Parameter: Tissue Value: Aerial
  misc_feature: MA Experiment 108573 PARAMETER Experiment Name: At_Drought_cDNA_P Parameter: Treatment Value: Drought vs. No Drought
  misc_feature: MA Experiment ID: 108574 Result: Up-regulated in Transcription
  misc_feature: MA Experiment 108574 PARAMETER Experiment Name: At_Wounding__cDNA_P Parameter: Timepoint (hr) Value: 1
  misc_feature: MA Experiment 108574 PARAMETER Experiment Name: At_Wounding__cDNA_P Parameter: Tissue Value: Aerial
  misc_feature: MA Experiment 108574 PARAMETER Experiment Name: At_Wounding__cDNA_P Parameter: Treatment Value: Wounding vs. No Wounding
  misc_feature: MA Experiment ID: 108579 Result: Up-regulated in Transcription
  misc_feature: MA Experiment 108579 PARAMETER Experiment Name: At_4deg_Cold_cDNA_P Parameter: Temperature (deg C) Value: 4 vs. 22
  misc_feature: MA Experiment 108579 PARAMETER Experiment Name: At_4deg_Cold_cDNA_P Parameter: Timepoint (hr) Value: 6
  misc_feature: MA Experiment 108579 PARAMETER Experiment Name: At_4deg_Cold_cDNA_P Parameter: Tissue Value: Aerial
  misc_feature: MA Experiment ID: 108594 Result: Down-regulated in Transcription
  misc_feature: MA Experiment 108594 PARAMETER Experiment Name: At_Ler-rhl_Root_cDNA_P Parameter: Plant Line Value: null
  misc_feature: MA Experiment ID: 108605 Result: Up-regulated in Transcription
  misc_feature: MA Experiment 108605 PARAMETER Experiment Name: At_100uM_ABA_cDNA_P Parameter: Timepoint (hr) Value: 6
  misc_feature: MA Experiment 108605 PARAMETER Experiment Name: At_100uM_ABA_cDNA_P Parameter: Tissue Value: Aerial
  misc_feature: MA Experiment 108605 PARAMETER Experiment Name: At_100uM_ABA_cDNA_P Parameter: Treatment Value: 100uM ABA vs. No Treatment
  misc_feature: MA Experiment ID: 108607 Result: Up-regulated in Transcription
  misc_feature: MA Experiment 108607 PARAMETER Experiment Name: At_100uM_ABA_cDNA_P Parameter: Timepoint (hr) Value: 4
  misc_feature: MA Experiment 108607 PARAMETER Experiment Name: At_100uM_ABA_cDNA_P Parameter: Tissue Value: Aerial
  misc_feature: MA Experiment 108607 PARAMETER Experiment Name: At_100uM_ABA_cDNA_P Parameter: Treatment Value: 100uM ABA vs. No Treatment
  misc_feature: MA Experiment ID: 20000069 Result: Up-regulated in Transcription
  misc_feature: MA Experiment 20000069 PARAMETER Experiment Name: At_100uM_ABA_Mutants_cDNA_P Parameter: Plant Line Value: CS23
  misc_feature: MA Experiment 20000069 PARAMETER Experiment Name: At_100uM_ABA_Mutants_cDNA_P Parameter: Timepoint (hr) Value: 6
  misc_feature: MA Experiment 20000069 PARAMETER Experiment Name: At_100uM_ABA_Mutants_cDNA_P Parameter: Tissue Value: Aerial
  misc_feature: MA Experiment 20000069 PARAMETER Experiment Name: At_100uM_ABA_Mutants_cDNA_P Parameter: Treatment Value: 100uM ABA vs. No Treatment
  misc_feature: MA Experiment ID: 20000070 Result: Up-regulated in Transcription
  misc_feature: MA Experiment 20000070 PARAMETER Experiment Name: At_100uM_ABA_Mutants_cDNA_P Parameter: Plant Line Value: CS24
  misc_feature: MA Experiment 20000070 PARAMETER Experiment Name: At_100uM_ABA_Mutants_cDNA_P Parameter: Timepoint (hr) Value: 6
  misc_feature: MA Experiment 20000070 PARAMETER Experiment Name: At_100uM_ABA_Mutants_cDNA_P Parameter: Tissue Value: Aerial
  misc_feature: MA Experiment 20000070 PARAMETER Experiment Name: At_100uM_ABA_Mutants_cDNA_P Parameter: Treatment Value: 100uM ABA vs. No Treatment
  misc_feature: MA Experiment ID: 20000071 Result: Up-regulated in Transcription
  misc_feature: MA Experiment 20000071 PARAMETER Experiment Name: At_100uM_ABA_Mutants_cDNA_P Parameter: Plant Line Value: CS8104
  misc_feature: MA Experiment 20000071 PARAMETER Experiment Name: At_100uM_ABA_Mutants_cDNA_P Parameter: Timepoint (hr) Value: 6
  misc_feature: MA Experiment 20000071 PARAMETER Experiment Name: At_100uM_ABA_Mutants_cDNA_P Parameter: Tissue Value: Aerial
  misc_feature: MA Experiment 20000071 PARAMETER Experiment Name: At_100uM_ABA_Mutants_cDNA_P Parameter: Treatment Value: 100uM ABA vs. No Treatment
  misc_feature: MA Experiment ID: 20000072 Result: Up-regulated in Transcription
  misc_feature: MA Experiment 20000072 PARAMETER Experiment Name: At_100uM_ABA_Mutants_cDNA_P Parameter: Plant Line Value: CS8105
  misc_feature: MA Experiment 20000072 PARAMETER Experiment Name: At_100uM_ABA_Mutants_cDNA_P Parameter: Timepoint (hr) Value: 6
  misc_feature: MA Experiment 20000072 PARAMETER Experiment Name: At_100uM_ABA_Mutants_cDNA_P Parameter: Tissue Value: Aerial
  misc_feature: MA Experiment 20000072 PARAMETER Experiment Name: At_100uM_ABA_Mutants_cDNA_P Parameter: Treatment Value: 100uM ABA vs. No Treatment
  misc_feature: MA Experiment ID: 20000086 Result: Up-regulated in Transcription
  misc_feature: MA Experiment 20000086 PARAMETER Experiment Name: At_100uM_ABA_Mutants_cDNA_P Parameter: Plant Line Value: CS22
  misc_feature: MA Experiment 20000086 PARAMETER Experiment Name: At_100uM_ABA_Mutants_cDNA_P Parameter: Timepoint (hr) Value: 6
  misc_feature: MA Experiment 20000086 PARAMETER Experiment Name: At_100uM_ABA_Mutants_cDNA_P Parameter: Tissue Value: Aerial
  misc_feature: MA Experiment 20000086 PARAMETER Experiment Name: At_100uM_ABA_Mutants_cDNA_P Parameter: Treatment Value: 100uM ABA vs. No Treatment
  misc_feature: MA Experiment ID: 20000087 Result: Up-regulated in Transcription
  misc_feature: MA Experiment 20000087 PARAMETER Experiment Name: At_100uM_ABA_Mutants_cDNA_P Parameter: Plant Line Value: WS
  misc_feature: MA Experiment 20000087 PARAMETER Experiment Name: At_100uM_ABA_Mutants_cDNA_P Parameter: Timepoint (hr) Value: 6
  misc_feature: MA Experiment 20000087 PARAMETER Experiment Name: At_100uM_ABA_Mutants_cDNA_P Parameter: Tissue Value: Aerial
  misc_feature: MA Experiment 20000087 PARAMETER Experiment Name: At_100uM_ABA_Mutants_cDNA_P Parameter: Treatment Value: 100uM ABA vs. No Treatment
  misc_feature: MA Experiment ID: 20000088 Result: Up-regulated in Transcription
  misc_feature: MA Experiment 20000088 PARAMETER Experiment Name: At_100uM_ABA_Mutants_cDNA_P Parameter: Plant Line Value: Landsberg
  misc_feature: MA Experiment 20000088 PARAMETER Experiment Name: At_100uM_ABA_Mutants_cDNA_P Parameter: Timepoint (hr) Value: 6
  misc_feature: MA Experiment 20000088 PARAMETER Experiment Name: At_100uM_ABA_Mutants_cDNA_P Parameter: Tissue Value: Aerial
  misc_feature: MA Experiment 20000088 PARAMETER Experiment Name: At_100uM_ABA_Mutants_cDNA_P Parameter: Treatment Value: 100uM ABA vs. No Treatment
  misc_feature: MA Experiment ID: 20000111 Result: Down-regulated in Transcription
  misc_feature: MA Experiment 20000111 PARAMETER Experiment Name: At_42deg_Heat_cDNA_P Parameter: Temperature (deg C) Value: 42 vs. 22
  misc_feature: MA Experiment 20000111 PARAMETER Experiment Name: At_42deg_Heat_cDNA_P Parameter: Timepoint (hr) Value: 6
  misc_feature: MA Experiment 20000111 PARAMETER Experiment Name: At_42deg_Heat_cDNA_P Parameter: Tissue Value: Aerial
  misc_feature: MA Experiment ID: 20000113 Result: Down-regulated in Transcription
  misc_feature: MA Experiment 20000113 PARAMETER Experiment Name: At_42deg_Heat_cDNA_P Parameter: Temperature (deg C) Value: 42 vs. 22
  misc_feature: MA Experiment 20000113 PARAMETER Experiment Name: At_42deg_Heat_cDNA_P Parameter: Timepoint (hr) Value: 8
  misc_feature: MA Experiment 20000113 PARAMETER Experiment Name: At_42deg_Heat_cDNA_P Parameter: Tissue Value: Aerial
  misc_feature: MA Experiment ID: 20000117 Result: Up-regulated in Transcription
  misc_feature: MA Experiment 20000117 PARAMETER Experiment Name: At_100uM_ABA_Mutants_cDNA_P Parameter: Plant Line Value: Columbia
  misc_feature: MA Experiment 20000117 PARAMETER Experiment Name: At_100uM_ABA_Mutants_cDNA_P Parameter: Timepoint (hr) Value: 6
  misc_feature: MA Experiment 20000117 PARAMETER Experiment Name: At_100uM_ABA_Mutants_cDNA_P Parameter: Tissue Value: Aerial
  misc_feature: MA Experiment 20000117 PARAMETER Experiment Name: At_100uM_ABA_Mutants_cDNA_P Parameter: Treatment Value: 100uM ABA vs. No Treatment
  misc_feature: MA Experiment ID: 20000169 Result: Up-regulated in Transcription
  misc_feature: MA Experiment 20000169 PARAMETER Experiment Name: At_100uM_ABA_P Parameter: Age (day) Value: 14
  misc_feature: MA Experiment 20000169 PARAMETER Experiment Name: At_100uM_ABA_P Parameter: Organism Value: A. thaliana
  misc_feature: MA Experiment 20000169 PARAMETER Experiment Name: At_100uM_ABA_P Parameter: Plant Line Value: WS
  misc_feature: MA Experiment 20000169 PARAMETER Experiment Name: At_100uM_ABA_P Parameter: Timepoint (hr) Value: 6
  misc_feature: MA Experiment 20000169 PARAMETER Experiment Name: At_100uM_ABA_P Parameter: Tissue Value: Aerial
  misc_feature: MA Experiment 20000169 PARAMETER Experiment Name: At_100uM_ABA_P Parameter: Treatment Value: 100uM ABA vs. No Treatment
  misc_feature: MA Experiment ID: 20000173 Result: Down-regulated in Transcription
  misc_feature: MA Experiment 20000173 PARAMETER Experiment Name: At_42deg_Heat_P Parameter: Age (day) Value: 14
  misc_feature: MA Experiment 20000173 PARAMETER Experiment Name: At_42deg_Heat_P Parameter: Organism Value: A. thaliana
  misc_feature: MA Experiment 20000173 PARAMETER Experiment Name: At_42deg_Heat_P Parameter: Plant Line Value: WS
  misc_feature: MA Experiment 20000173 PARAMETER Experiment Name: At_42deg_Heat_P Parameter: Temperature (deg C) Value: 42 vs. 22
  misc_feature: MA Experiment 20000173 PARAMETER Experiment Name: At_42deg_Heat_P Parameter: Timepoint (hr) Value: 6
  misc_feature: MA Experiment 20000173 PARAMETER Experiment Name: At_42deg_Heat_P Parameter: Tissue Value: Aerial
  misc_feature: MA Experiment ID: 20000184 Result: Down-regulated in Transcription
  misc_feature: MA Experiment 20000184 PARAMETER Experiment Name: At_Shoots__P Parameter: Age (day) Value: 7
  misc_feature: MA Experiment 20000184 PARAMETER Experiment Name: At_Shoots__P Parameter: Tissue Value: Shoots vs. Whole Plant
  misc_feature: MA Experiment ID: 20000227 Result: Down-regulated in Transcription
  misc_feature: MA Experiment 20000227 PARAMETER Experiment Name: At_Root-Tips-vs-Tops_P Parameter: Tissue Value: Root Tips vs. Root Tops
  misc_feature: MA Experiment ID: 20000234 Result: Down-regulated in Transcription
  misc_feature: MA Experiment 20000234 PARAMETER Experiment Name: At_Siliques_P Parameter: Age (day) Value: 21
  misc_feature: MA Experiment 20000234 PARAMETER Experiment Name: At_Siliques_P Parameter: Organism Value: A. thaliana
  misc_feature: MA Experiment 20000234 PARAMETER Experiment Name: At_Siliques_P Parameter: Plant Line Value: WS
  misc_feature: MA Experiment 20000234 PARAMETER Experiment Name: At_Siliques_P Parameter: Tissue Value: Less Than 5mm Siliques vs. Whole Plant
  misc_feature: MA Experiment ID: 20000265 Result: Down-regulated in Transcription
  misc_feature: MA Experiment 20000265 PARAMETER Experiment Name: At_Open_Flower_P Parameter: Age (day) Value: 21
  misc_feature: MA Experiment 20000265 PARAMETER Experiment Name: At_Open_Flower_P Parameter: Plant Line Value: WS
  misc_feature: MA Experiment 20000265 PARAMETER Experiment Name: At_Open_Flower_P Parameter: Tissue Value: Closed Flower vs. Whole Plant
  misc_feature: MA Experiment ID: 20000437 Result: Up-regulated in Transcription
  misc_feature: MA Experiment 20000437 PARAMETER Experiment Name: At_Drought_P Parameter: Age (day) Value: 8
  misc_feature: MA Experiment 20000437 PARAMETER Experiment Name: At_Drought_P Parameter: Organism Value: A. thaliana
  misc_feature: MA Experiment 20000437 PARAMETER Experiment Name: At_Drought_P Parameter: Plant Line Value: WS
  misc_feature: MA Experiment 20000437 PARAMETER Experiment Name: At_Drought_P Parameter: Timepoint (hr) Value: 24
  misc_feature: MA Experiment 20000437 PARAMETER Experiment Name: At_Drought_P Parameter: Tissue Value: Whole Plant
  misc_feature: MA Experiment 20000437 PARAMETER Experiment Name: At_Drought_P Parameter: Treatment Value: Drought vs. No Drought
  misc_feature: MA Experiment ID: 20000460 Result: Up-regulated in Transcription
  misc_feature: MA Experiment 20000460 PARAMETER Experiment Name: At_10percent_PEG_P Parameter: Age (day) Value: 12
  misc_feature: MA Experiment 20000460 PARAMETER Experiment Name: At_10percent_PEG_P Parameter: Organism Value: A. thaliana
  misc_feature: MA Experiment 20000460 PARAMETER Experiment Name: At_10percent_PEG_P Parameter: Plant Line Value: WS
  misc_feature: MA Experiment 20000460 PARAMETER Experiment Name: At_10percent_PEG_P Parameter: Timepoint (day) Value: 12
  misc_feature: MA Experiment 20000460 PARAMETER Experiment Name: At_10percent_PEG_P Parameter: Tissue Value: Whole Plant
  misc_feature: MA Experiment 20000460 PARAMETER Experiment Name: At_10percent_PEG_P Parameter: Treatment Value: 10percent PEG vs. No Treatment
  misc_feature: MA Experiment ID: 20000495 Result: Down-regulated in Transcription
  misc_feature: MA Experiment 20000495 PARAMETER Experiment Name: At_Guard_Cells_P Parameter: Harvest Date Value: 8/2/2002
  misc_feature: MA Experiment 20000495 PARAMETER Experiment Name: At_Guard_Cells_P Parameter: Organism Value: A. thaliana
  misc_feature: MA Experiment 20000495 PARAMETER Experiment Name: At_Guard_Cells_P Parameter: Tissue Value: Guard Cells vs. Leaves
  misc_feature: MA Experiment ID: 20000496 Result: Down-regulated in Transcription
  misc_feature: MA Experiment 20000496 PARAMETER Experiment Name: At_Guard_Cells_P Parameter: Harvest Date Value: 7/19/2002
  misc_feature: MA Experiment 20000496 PARAMETER Experiment Name: At_Guard_Cells_P Parameter: Organism Value: Canola
  misc_feature: MA Experiment 20000496 PARAMETER Experiment Name: At_Guard_Cells_P Parameter: Tissue Value: Guard Cells vs. Leaves
  misc_feature: MA Experiment ID: 20001911 Result: Up-regulated in Transcription
  misc_feature: MA Experiment 20001911 PARAMETER Experiment Name: At_Drought_Reproduction_P Parameter: Age (day) Value: 40
  misc_feature: MA Experiment 20001911 PARAMETER Experiment Name: At_Drought_Reproduction_P Parameter: Organism Value: A. thaliana
  misc_feature: MA Experiment 20001911 PARAMETER Experiment Name: At_Drought_Reproduction_P Parameter: Plant Line Value: WS
  misc_feature: MA Experiment 20001911 PARAMETER Experiment Name: At_Drought_Reproduction_P Parameter: Timepoint (day) Value: 10
  misc_feature: MA Experiment 20001911 PARAMETER Experiment Name: At_Drought_Reproduction_P Parameter: Tissue Value: Flowers
  misc_feature: MA Experiment 20001911 PARAMETER Experiment Name: At_Drought_Reproduction_P Parameter: Treatment Value: Drought vs. No Drought
atcacaaccatttctctctctcgtcttcgtcttcgtcttcttcttcttcaacgttcctctccaaaatcctcagaccaagaaatcatcatggccgtcgatctaatgcgtttccctaagatagatgatcaaacggctattcaggaagctgcatcgcaaggtttacaaagtatggaacatctgatccgtgtcctctctaaccgtcccgaacaacaacacaacgttgactgctccgagatcactgacttcaccgtttctaaattcaaaaccgtcatttctctccttaaccgtactggtcacgctcggttcagacgcggaccggttcactccacttcctctgccgcatctcagaaactacagagtcagatcgttaaaaatactcaacctgaggctccgatagtgagaacaactacgaatcaccctcaaatcgttcctccaccgtctagtgtaacactcgatttctctaaaccaagcatcttcggcaccaaagctaagagcgccgagctggaattctccaaagaaaacttcagtgtttctttaaactcctcattcatgtcgtcggcgataaccggagacggcagcgtctccaatggaaaaatcttccttgcttctgctccgttgcagcctgttaactcttccggaaaaccaccgttggctggtcatccttacagaaagagatgtctcgagcatgagcactcagagagtttctccggaaaagtctccggctccgcctacggaaagtgccattgcaagaaaagcaggaaaaatcggatgaagagaaccgtgagagtaccggcgataagtgcaaagatcgccgatattccaccggacgaatattcgtggaggaagtacggacaaaaaccgatcaagggctcaccacacccacgtggttactacaagtgcagtacattcagaggatgtccagcgaggaaacacgtggaacgagcattagatgatccagcgatgcttattgtgacatacgaaggagagcaccgtcataaccaatccgcgatgcaggagaatatttcttcttcaggcattaatgatttagtgtttgcctcggcttgacttttttttgtactatttgttttttgattttttgagtactttagatggattgaaatttgtaaatttttttattaagaaatcaatttaaat

SEQ ID NO: 28792 - protein, 354 aa, Arabidopsis thaliana
  peptide (1)..(354): Ceres Seq. ID no. 12371692
  misc_feature (274)..(334): Pfam Name: WRKY DNA -binding domain Pfam Description: WRKY DNA -binding domain
  misc_feature (149)..(332): Homolog of NCBI NO: 4894963 NR Description: DNA-binding protein WRKY3 [Avena sativa]
  misc_feature (30)..(346): Homolog of NCBI NO: 7488950 NR Description: DNA-binding protein WRKY3 - parsley
  misc_feature (32)..(336): Homolog of NCBI NO: 38568048 NR Description: OSJNBa0065J03.18 [Oryza sativa (japonica
  misc_feature (30)..(340): Homolog of NCBI NO: 4760596 NR Description: DNA-binding protein NtWRKY3 [Nicotiana tabacum]
  misc_feature (30)..(349): Homolog of NCBI NO: 25348152 NR Description: probable WRKY-type DNA binding protein
  misc_feature (30)..(354): Homolog of NCBI NO: 18400580 NR Description: WRKY family transcription factor
  misc_feature (30)..(354): Homolog of NCBI NO: 22329054 NR Description: WRKY family transcription factor
  misc_feature (30)..(354): Homolog of NCBI NO: 21537078 NR Description: putaive DNA-binding protein [Arabidopsis thaliana]
  misc_feature (30)..(354): Homolog of NCBI NO: 16604573 NR Description: putative putaive DNA-binding protein [Arabidopsis
  misc_feature (30)..(354): Homolog of NCBI NO: 30689072 NR Description: WRKY family transcription factor [Arabidopsis
ITTISLSRLRLRLLLLQRSSPKSSDQEIIMAVDLMRFPKIDDQTAIQEAASQGLQSMEHLIRVLSNRPEQQHNVDCSEITDFTVSKFKTVISLLNRTGHARFRRGPVHSTSSAASQKLQSQIVKNTQPEAPIVRTTTNHPQIVPPPSSVTLDFSKPSIFGTKAKSAELEFSKENFSVSLNSSFMSSAITGDGSVSNGKIFLASAPLQPVNSSGKPPLAGHPYRKRCLEHEHSESFSGKVSGSAYGKCHCKKSRKNRMKRTVRVPAISAKIADIPPDEYSWRKYGQKPIKGSPHPRGYYKCSTFRGCPARKHVERALDDPAMLIVTYEGEHRHNQSAMQENISSSGINDLVFASA

SEQ ID NO: 28793 - protein, 325 aa, Arabidopsis thaliana
  peptide (1)..(325): Ceres Seq. ID no. 12371693
  misc_feature (245)..(305): Pfam Name: WRKY DNA -binding domain Pfam Description: WRKY DNA -binding domain
  misc_feature (120)..(303): Homolog of NCBI NO: 4894963 NR Description: DNA-binding protein WRKY3 [Avena sativa]
  misc_feature (1)..(317): Homolog of NCBI NO: 7488950 NR Description: DNA-binding protein WRKY3 - parsley
  misc_feature (3)..(307): Homolog of NCBI NO: 38568048 NR Description: OSJNBa0065J03.18 [Oryza sativa (japonica
  misc_feature (1)..(311): Homolog of NCBI NO: 4760596 NR Description: DNA-binding protein NtWRKY3 [Nicotiana tabacum]
  misc_feature (1)..(320): Homolog of NCBI NO: 25348152 NR Description: probable WRKY-type DNA binding protein
  misc_feature (1)..(325): Homolog of NCBI NO: 18400580 NR Description: WRKY family transcription factor
  misc_feature (1)..(325): Homolog of NCBI NO: 22329054 NR Description: WRKY family transcription factor
  misc_feature (1)..(325): Homolog of NCBI NO: 21537078 NR Description: putaive DNA-binding protein [Arabidopsis thaliana]
  misc_feature (1)..(325): Homolog of NCBI NO: 16604573 NR Description: putative putaive DNA-binding protein [Arabidopsis
  misc_feature (1)..(325): Homolog of NCBI NO: 30689072 NR Description: WRKY family transcription factor [Arabidopsis
MAVDLMRFPKIDDQTAIQEAASQGLQSMEHLIRVLSNRPEQQHNVDCSEITDFTVSKFKTVISLLNRTGHARFRRGPVHSTSSAASQKLQSQIVKNTQPEAPIVRTTTNHPQIVPPPSSVTLDFSKPSIFGTKAKSAELEFSKENFSVSLNSSFMSSAITGDGSVSNGKIFLASAPLQPVNSSGKPPLAGHPYRKRCLEHEHSESFSGKVSGSAYGKCHCKKSRKNRMKRTVRVPAISAKIADIPPDEYSWRKYGQKPIKGSPHPRGYYKCSTFRGCPARKHVERALDDPAMLIVTYEGEHRHNQSAMQENISSSGINDLVFASA

SEQ ID NO: 28794 - protein, 320 aa, Arabidopsis thaliana
  peptide (1)..(320): Ceres Seq. ID no. 12371694
  misc_feature (240)..(300): Pfam Name: WRKY DNA -binding domain Pfam Description: WRKY DNA -binding domain
  misc_feature (115)..(298): Homolog of NCBI NO: 4894963 NR Description: DNA-binding protein WRKY3 [Avena sativa]
  misc_feature (1)..(312): Homolog of NCBI NO: 7488950 NR Description: DNA-binding protein WRKY3 - parsley
  misc_feature (1)..(302): Homolog of NCBI NO: 38568048 NR Description: OSJNBa0065J03.18 [Oryza sativa (japonica
  misc_feature (1)..(306): Homolog of NCBI NO: 4760596 NR Description: DNA-binding protein NtWRKY3 [Nicotiana tabacum]
  misc_feature (1)..(315): Homolog of NCBI NO: 25348152 NR Description: probable WRKY-type DNA binding protein
  misc_feature (1)..(320): Homolog of NCBI NO: 18400580 NR Description: WRKY family transcription factor
  misc_feature (1)..(320): Homolog of NCBI NO: 22329054 NR Description: WRKY family transcription factor
  misc_feature (1)..(320): Homolog of NCBI NO: 21537078 NR Description: putaive DNA-binding protein [Arabidopsis thaliana]
  misc_feature (1)..(320): Homolog of NCBI NO: 16604573 NR Description: putative putaive DNA-binding protein [Arabidopsis
  misc_feature (1)..(320): Homolog of NCBI NO: 30689072 NR Description: WRKY family transcription factor [Arabidopsis
MRFPKIDDQTAIQEAASQGLQSMEHLIRVLSNRPEQQHNVDCSEITDFTVSKFKTVISLLNRTGHARFRRGPVHSTSSAASQKLQSQIVKNTQPEAPIVRTTTNHPQIVPPPSSVTLDFSKPSIFGTKAKSAELEFSKENFSVSLNSSFMSSAITGDGSVSNGKIFLASAPLQPVNSSGKPPLAGHPYRKRCLEHEHSESFSGKVSGSAYGKCHCKKSRKNRMKRTVRVPAISAKIADIPPDEYSWRKYGQKPIKGSPHPRGYYKCSTFRGCPARKHVERALDDPAMLIVTYEGEHRHNQSAMQENISSSGINDLVFASA

SEQ ID NO: 28795 - DNA, 1043 bp, Arabidopsis thaliana
  misc_feature (1)..(1043): Ceres Seq. ID no. 12333847
  misc_feature: MA Experiment ID: 108434 Result: Down-regulated in Transcription
  misc_feature: MA Experiment 108434 PARAMETER Experiment Name: At_Root_Tips_cDNA_P Parameter: Tissue Value: Root Tips
  misc_feature: MA Experiment ID: 108435 Result: Down-regulated in Transcription
  misc_feature: MA Experiment 108435 PARAMETER Experiment Name: At_stm_Mutants_cDNA_P Parameter: Plant Line Value: wt Landsburg vs stm
  misc_feature: MA Experiment 108435 PARAMETER Experiment Name: At_stm_Mutants_cDNA_P Parameter: Tissue Value: Shoot Apical Meristem Region
  misc_feature: MA Experiment ID: 108461 Result: Down-regulated in Transcription
  misc_feature: MA Experiment 108461 PARAMETER Experiment Name: At_Germinating_Seeds_cDNA_P Parameter: Age (day) Value: 1 vs. 0
  misc_feature: MA Experiment 108461 PARAMETER Experiment Name: At_Germinating_Seeds_cDNA_P Parameter: Tissue Value: Germinating Seeds
  misc_feature: MA Experiment ID: 108462 Result: Down-regulated in Transcription
  misc_feature: MA Experiment 108462 PARAMETER Experiment Name: At_Germinating_Seeds_cDNA_P Parameter: Age (day) Value: 2 vs. 0
  misc_feature: MA Experiment 108462 PARAMETER Experiment Name: At_Germinating_Seeds_cDNA_P Parameter: Tissue Value: Germinating Seeds
  misc_feature: MA Experiment ID: 108473 Result: Up-regulated in Transcription
  misc_feature: MA Experiment 108473 PARAMETER Experiment Name: At_Drought_Flowers_cDNA_P Parameter: Timepoint (hr) Value: 7 d
  misc_feature: MA Experiment 108473 PARAMETER Experiment Name: At_Drought_Flowers_cDNA_P Parameter: Tissue Value: Flower
  misc_feature: MA Experiment 108473 PARAMETER Experiment Name: At_Drought_Flowers_cDNA_P Parameter: Treatment Value: Drought vs. No Drought
  misc_feature: MA Experiment ID: 108488 Result: Down-regulated in Transcription
  misc_feature: MA Experiment ID: 108501 Result: Down-regulated in Transcription
  misc_feature: MA Experiment 108501 PARAMETER Experiment Name: At_ap2_floral_buds_cDNA_P Parameter: Plant Line Value: ap2 (Ler.)
  misc_feature: MA Experiment 108501 PARAMETER Experiment Name: At_ap2_floral_buds_cDNA_P Parameter: Tissue Value: Closed Flower
  misc_feature: MA Experiment ID: 108561 Result: Up-regulated in Transcription
  misc_feature: MA Experiment 108561 PARAMETER Experiment Name: At_100uM_ABA_cDNA_P Parameter: Timepoint (hr) Value: 6
  misc_feature: MA Experiment 108561 PARAMETER Experiment Name: At_100uM_ABA_cDNA_P Parameter: Tissue Value: Aerial
  misc_feature: MA Experiment 108561 PARAMETER Experiment Name: At_100uM_ABA_cDNA_P Parameter: Treatment Value: 100uM ABA vs. No Treatment
  misc_feature: MA Experiment ID: 108572 Result: Up-regulated in Transcription
  misc_feature: MA Experiment 108572 PARAMETER Experiment Name: At_Drought_cDNA_P Parameter: Timepoint (hr) Value: 1
  misc_feature: MA Experiment 108572 PARAMETER Experiment Name: At_Drought_cDNA_P Parameter: Tissue Value: Aerial
  misc_feature: MA Experiment 108572 PARAMETER Experiment Name: At_Drought_cDNA_P Parameter: Treatment Value: Drought vs. No Drought
  misc_feature: MA Experiment ID: 108573 Result: Up-regulated in Transcription
  misc_feature: MA Experiment 108573 PARAMETER Experiment Name: At_Drought_cDNA_P Parameter: Timepoint (hr) Value: 6
  misc_feature: MA Experiment 108573 PARAMETER Experiment Name: At_Drought_cDNA_P Parameter: Tissue Value: Aerial
  misc_feature: MA Experiment 108573 PARAMETER Experiment Name: At_Drought_cDNA_P Parameter: Treatment Value: Drought vs. No Drought
  misc_feature: MA Experiment ID: 108574 Result: Down-regulated in Transcription
  misc_feature: MA Experiment 108574 PARAMETER Experiment Name: At_Wounding__cDNA_P Parameter: Timepoint (hr) Value: 1
  misc_feature: MA Experiment 108574 PARAMETER Experiment Name: At_Wounding__cDNA_P Parameter: Tissue Value: Aerial
  misc_feature: MA Experiment 108574 PARAMETER Experiment Name: At_Wounding__cDNA_P Parameter: Treatment Value: Wounding vs. No Wounding
  misc_feature: MA Experiment ID: 108576 Result: Down-regulated in Transcription
  misc_feature: MA Experiment 108576 PARAMETER Experiment Name: At_42deg_Heat_cDNA_P Parameter: Temperature (deg C) Value: 42 vs. 22
  misc_feature: MA Experiment 108576 PARAMETER Experiment Name: At_42deg_Heat_cDNA_P Parameter: Timepoint (hr) Value: 1
  misc_feature: MA Experiment 108576 PARAMETER Experiment Name: At_42deg_Heat_cDNA_P Parameter: Tissue Value: Aerial
  misc_feature: MA Experiment ID: 108585 Result: Up-regulated in Transcription
  misc_feature: MA Experiment 108585 PARAMETER Experiment Name: At_5mM_NaNP_cDNA_P Parameter: Timepoint (hr) Value: 6
  misc_feature: MA Experiment 108585 PARAMETER Experiment Name: At_5mM_NaNP_cDNA_P Parameter: Tissue Value: Aerial
  misc_feature: MA Experiment 108585 PARAMETER Experiment Name: At_5mM_NaNP_cDNA_P Parameter: Treatment Value: null
  misc_feature: MA Experiment ID: 108594 Result: Up-regulated in Transcription
  misc_feature: MA Experiment 108594 PARAMETER Experiment Name: At_Ler-rhl_Root_cDNA_P Parameter: Plant Line Value: null
  misc_feature: MA Experiment ID: 108595 Result: Up-regulated in Transcription
  misc_feature: MA Experiment 108595 PARAMETER Experiment Name: At_Ler-pi_Ovule_cDNA_P Parameter: Plant Line Value: null
  misc_feature: MA Experiment ID: 108609 Result: Up-regulated in Transcription
  misc_feature: MA Experiment 108609 PARAMETER Experiment Name: At_100uM_ABA_cDNA_P Parameter: Timepoint (hr) Value: 24
  misc_feature: MA Experiment 108609 PARAMETER Experiment Name: At_100uM_ABA_cDNA_P Parameter: Tissue Value: Aerial
  misc_feature: MA Experiment 108609 PARAMETER Experiment Name: At_100uM_ABA_cDNA_P Parameter: Treatment Value: 100uM ABA vs. No Treatment
  misc_feature: MA Experiment ID: 20000068 Result: Down-regulated in Transcription
  misc_feature: MA Experiment ID: 20000069 Result: Up-regulated in Transcription
  misc_feature: MA Experiment 20000069 PARAMETER Experiment Name: At_100uM_ABA_Mutants_cDNA_P Parameter: Plant Line Value: CS23
  misc_feature: MA Experiment 20000069 PARAMETER Experiment Name: At_100uM_ABA_Mutants_cDNA_P Parameter: Timepoint (hr) Value: 6
  misc_feature: MA Experiment 20000069 PARAMETER Experiment Name: At_100uM_ABA_Mutants_cDNA_P Parameter: Tissue Value: Aerial
  misc_feature: MA Experiment 20000069 PARAMETER Experiment Name: At_100uM_ABA_Mutants_cDNA_P Parameter: Treatment Value: 100uM ABA vs. No Treatment
  misc_feature: MA Experiment ID: 20000070 Result: Up-regulated in Transcription
  misc_feature: MA Experiment 20000070 PARAMETER Experiment Name: At_100uM_ABA_Mutants_cDNA_P Parameter: Plant Line Value: CS24
  misc_feature: MA Experiment 20000070 PARAMETER Experiment Name: At_100uM_ABA_Mutants_cDNA_P Parameter: Timepoint (hr) Value: 6
  misc_feature: MA Experiment 20000070 PARAMETER Experiment Name: At_100uM_ABA_Mutants_cDNA_P Parameter: Tissue Value: Aerial
  misc_feature: MA Experiment 20000070 PARAMETER Experiment Name: At_100uM_ABA_Mutants_cDNA_P Parameter: Treatment Value: 100uM ABA vs. No Treatment
  misc_feature: MA Experiment ID: 20000071 Result: Up-regulated in Transcription
  misc_feature: MA Experiment 20000071 PARAMETER Experiment Name: At_100uM_ABA_Mutants_cDNA_P Parameter: Plant Line Value: CS8104
  misc_feature: MA Experiment 20000071 PARAMETER Experiment Name: At_100uM_ABA_Mutants_cDNA_P Parameter: Timepoint (hr) Value: 6
  misc_feature: MA Experiment 20000071 PARAMETER Experiment Name: At_100uM_ABA_Mutants_cDNA_P Parameter: Tissue Value: Aerial
  misc_feature: MA Experiment 20000071 PARAMETER Experiment Name: At_100uM_ABA_Mutants_cDNA_P Parameter: Treatment Value: 100uM ABA vs. No Treatment
  misc_feature: MA Experiment ID: 20000072 Result: Up-regulated in Transcription
  misc_feature: MA Experiment 20000072 PARAMETER Experiment Name: At_100uM_ABA_Mutants_cDNA_P Parameter: Plant Line Value: CS8105
  misc_feature: MA Experiment 20000072 PARAMETER Experiment Name: At_100uM_ABA_Mutants_cDNA_P Parameter: Timepoint (hr) Value: 6
  misc_feature: MA Experiment 20000072 PARAMETER Experiment Name: At_100uM_ABA_Mutants_cDNA_P Parameter: Tissue Value: Aerial
  misc_feature: MA Experiment 20000072 PARAMETER Experiment Name: At_100uM_ABA_Mutants_cDNA_P Parameter: Treatment Value: 100uM ABA vs. No Treatment
  misc_feature: MA Experiment ID: 20000087 Result: Up-regulated in Transcription
  misc_feature: MA Experiment 20000087 PARAMETER Experiment Name: At_100uM_ABA_Mutants_cDNA_P Parameter: Plant Line Value: WS
  misc_feature: MA Experiment 20000087 PARAMETER Experiment Name: At_100uM_ABA_Mutants_cDNA_P Parameter: Timepoint (hr) Value: 6
  misc_feature: MA Experiment 20000087 PARAMETER Experiment Name: At_100uM_ABA_Mutants_cDNA_P Parameter: Tissue Value: Aerial
  misc_feature: MA Experiment 20000087 PARAMETER Experiment Name: At_100uM_ABA_Mutants_cDNA_P Parameter: Treatment Value: 100uM ABA vs. No Treatment
  misc_feature: MA Experiment ID: 20000179 Result: Down-regulated in Transcription
  misc_feature: MA Experiment 20000179 PARAMETER Experiment Name: At_Germinating_Seeds_P Parameter: Age (hr) Value: 6 vs. 0
  misc_feature: MA Experiment 20000179 PARAMETER Experiment Name: At_Germinating_Seeds_P Parameter: Tissue Value: Germinating Seeds
  misc_feature: MA Experiment ID: 20000180 Result: Down-regulated in Transcription
  misc_feature: MA Experiment 20000180 PARAMETER Experiment Name: At_Germinating_Seeds_P Parameter: Age (hr) Value: 24 vs. 0
  misc_feature: MA Experiment 20000180 PARAMETER Experiment Name: At_Germinating_Seeds_P Parameter: Tissue Value: Germinating Seeds
  misc_feature: MA Experiment ID: 20000224 Result: Down-regulated in Transcription
  misc_feature: MA Experiment ID: 20000438 Result: Down-regulated in Transcription
  misc_feature: MA Experiment 20000438 PARAMETER Experiment Name: At_Shoots__P Parameter: Age (day) Value: 14
  misc_feature: MA Experiment 20000438 PARAMETER Experiment Name: At_Shoots__P Parameter: Tissue Value: Shoots vs. Whole Plant
  misc_feature: MA Experiment ID: 20000439 Result: Down-regulated in Transcription
  misc_feature: MA Experiment 20000439 PARAMETER Experiment Name: At_Roots__P Parameter: Age (day) Value: 14 vs. 21
  misc_feature: MA Experiment 20000439 PARAMETER Experiment Name: At_Roots__P Parameter: Organism Value: A. thaliana
  misc_feature: MA Experiment 20000439 PARAMETER Experiment Name: At_Roots__P Parameter: Tissue Value: Roots vs. Whole Plant
  misc_feature: MA Experiment ID: 20000495 Result: Down-regulated in Transcription
  misc_feature: MA Experiment 20000495 PARAMETER Experiment Name: At_Guard_Cells_P Parameter: Harvest Date Value: 8/2/2002
  misc_feature: MA Experiment 20000495 PARAMETER Experiment Name: At_Guard_Cells_P Parameter: Organism Value: A. thaliana
  misc_feature: MA Experiment 20000495 PARAMETER Experiment Name: At_Guard_Cells_P Parameter: Tissue Value: Guard Cells vs. Leaves
  misc_feature: MA Experiment ID: 20001904 Result: Up-regulated in Transcription
  misc_feature: MA Experiment 20001904 PARAMETER Experiment Name: At_Drought_Reproduction_P Parameter: Age (day) Value: 37
  misc_feature: MA Experiment 20001904 PARAMETER Experiment Name: At_Drought_Reproduction_P Parameter: Organism Value: A. thaliana
  misc_feature: MA Experiment 20001904 PARAMETER Experiment Name: At_Drought_Reproduction_P Parameter: Plant Line Value: WS
  misc_feature: MA Experiment 20001904 PARAMETER Experiment Name: At_Drought_Reproduction_P Parameter: Timepoint (day) Value: 7
  misc_feature: MA Experiment 20001904 PARAMETER Experiment Name: At_Drought_Reproduction_P Parameter: Tissue Value: Rosettes
  misc_feature: MA Experiment 20001904 PARAMETER Experiment Name: At_Drought_Reproduction_P Parameter: Treatment Value: Drought vs. No Drought
aatctttccctctcctcctcgaacaaaagcaacaaacgcagagaaactcaaaactcaaaaacgacaacgtttcatatagcaacgatgctttcttcatctccaacttcctttactcatccatttctctcttcttctccgcctctatctccgatatctccgccgtctcgcacggctcggatctctccacctctcgtctccgcctcttgctcatacacctacacggaagattcgccgagactgcatcagatcccgcggcgattgacgacggtgccagcttcgctttacgatgttcttgaggttcctttaggcgcgacgagtcaggatatcaaatcggcttaccggagattagccaggatctgccatccagacgtggcgggaactgatcggacttcttcttcatcggcggatgaattcatgaagatccatgccgcttactgtacgctttctgatcctgagaaacgctccgtttatgatcggaggatgttgcgacggagccgtcctttgaccgtcggaacttccgggttgggaaggtacgtcggacggaactgggaaaccgatcagtgttggtagtgagttaactcggtgaccgagttagtagaacgagttaattagtgtaaatacgaagccataaaatccttgtaatttaatcatagtaagctaacatggacgggaactagtgtgctaacatacgccatgtgcttaccgtacgctccctcccccacgagcgatcggtgccgtttgtatccgtgtttacgtaggatctacgcgttttttttaccttgtgaatcctattagtttaaataatcaatgaaaatcatatgaaaaaaatattttcttttcattatggtttggtttctttccctaaggtaagctcactaagcactgattttgagcacttctttattgttgttgatattacttgttcaaaataaccgagtgtaataaaataaacaaatctaatagtatggttttattttagttgcaatcaattacgtttaggtttatagccaagttaatgctaaaacgcgggtattctgtgttcc

SEQ ID NO: 28796 - protein, 189 aa, Arabidopsis thaliana
  peptide (1)..(189): Ceres Seq. ID no. 12333848
  misc_feature (93)..(161): Pfam Name: DnaJ domain Pfam Description: DnaJ domain
  misc_feature (78)..(159): Homolog of NCBI NO: 34863272 NR Description: similar to hypothetical protein FLJ40417 [Rattus
  misc_feature (40)..(189): Homolog of NCBI NO: 34894012 NR Description: P0672D08.16 [Oryza sativa (japonica
  misc_feature (31)..(159): Homolog of NCBI NO: 30682610 NR Description: DnaJ protein family [Arabidopsis thaliana]
  misc_feature (31)..(159): Homolog of NCBI NO: 15236355 NR Description: DnaJ-like protein
  misc_feature (31)..(159): Homolog of NCBI NO: 6691127 NR Description: DnaJ-like protein [Arabidopsis thaliana]
  misc_feature (55)..(189): Homolog of NCBI NO: 15231204 NR Description: DnaJ protein, putative
  misc_feature (44)..(189): Homolog of NCBI NO: 7488763 NR Description: DnaJ protein homolog - kidney bean (fragment)
  misc_feature (29)..(189): Homolog of NCBI NO: 15227919 NR Description: putative DnaJ protein
  misc_feature (29)..(189): Homolog of NCBI NO: 15233446 NR Description: DnaJ-like protein; protein id: At4g36040.1
  misc_feature (29)..(189): Homolog of NCBI NO: 9843641 NR Description: J11 protein [Arabidopsis thaliana]
NLSLSSSNKSNKRRETQNSKTTTFHIATMLSSSPTSFTHPFLSSSPPLSPISPPSRTARISPPLVSASCSYTYTEDSPRLHQIPRRLTTVPASLYDVLEVPLGATSQDIKSAYRRLARICHPDVAGTDRTSSSSADEFMKIHAAYCTLSDPEKRSVYDRRMLRRSRPLTVGTSGLGRYVGRNWETDQCW

SEQ ID NO: 28797 - protein, 161 aa, Arabidopsis thaliana
  peptide (1)..(161): Ceres Seq. ID no. 12333849
  misc_feature (65)..(133): Pfam Name: DnaJ domain Pfam Description: DnaJ domain
  misc_feature (50)..(131): Homolog of NCBI NO: 34863272 NR Description: similar to hypothetical protein FLJ40417 [Rattus
  misc_feature (12)..(161): Homolog of NCBI NO: 34894012 NR Description: P0672D08.16 [Oryza sativa (japonica
  misc_feature (3)..(131): Homolog of NCBI NO: 30682610 NR Description: DnaJ protein family [Arabidopsis thaliana]
  misc_feature (3)..(131): Homolog of NCBI NO: 15236355 NR Description: DnaJ-like protein
  misc_feature (3)..(131): Homolog of NCBI NO: 6691127 NR Description: DnaJ-like protein [Arabidopsis thaliana]
  misc_feature (27)..(161): Homolog of NCBI NO: 15231204 NR Description: DnaJ protein, putative
  misc_feature (16)..(161): Homolog of NCBI NO: 7488763 NR Description: DnaJ protein homolog - kidney bean (fragment)
  misc_feature (1)..(161): Homolog of NCBI NO: 15227919 NR Description: putative DnaJ protein
  misc_feature (1)..(161): Homolog of NCBI NO: 15233446 NR Description: DnaJ-like protein; protein id: At4g36040.1
  misc_feature (1)..(161): Homolog of NCBI NO: 9843641 NR Description: J11 protein [Arabidopsis thaliana]
MLSSSPTSFTHPFLSSSPPLSPISPPSRTARISPPLVSASCSYTYTEDSPRLHQIPRRLTTVPASLYDVLEVPLGATSQDIKSAYRRLARICHPDVAGTDRTSSSSADEFMKIHAAYCTLSDPEKRSVYDRRMLRRSRPLTVGTSGLGRYVGRNWETDQCW

SEQ ID NO: 28798 - protein, 97 aa, Arabidopsis thaliana
  peptide (1)..(97): Ceres Seq. ID no. 12333850
SFPLLLEQKQQTQRNSKLKNDNVSYSNDAFFISNFLYSSISLFFSASISDISAVSHGSDLSTSRLRLLLIHLHGRFAETASDPAAIDDGASFALRCS

SEQ ID NO: 28799 - DNA, 1017 bp, Arabidopsis thaliana
  misc_feature (1)..(1017): Ceres Seq. ID no. 12422208
  misc_feature: MA Experiment ID: 108434 Result: Up-regulated in Transcription
  misc_feature: MA Experiment 108434 PARAMETER Experiment Name: At_Root_Tips_cDNA_P Parameter: Tissue Value: Root Tips
  misc_feature: MA Experiment ID: 108462 Result: Down-regulated in Transcription
  misc_feature: MA Experiment 108462 PARAMETER Experiment Name: At_Germinating_Seeds_cDNA_P Parameter: Age (day) Value: 2 vs. 0
  misc_feature: MA Experiment 108462 PARAMETER Experiment Name: At_Germinating_Seeds_cDNA_P Parameter: Tissue Value: Germinating Seeds
  misc_feature: MA Experiment ID: 108463 Result: Down-regulated in Transcription
  misc_feature: MA Experiment 108463 PARAMETER Experiment Name: At_Germinating_Seeds_cDNA_P Parameter: Age (day) Value: 3 vs. 0
  misc_feature: MA Experiment 108463 PARAMETER Experiment Name: At_Germinating_Seeds_cDNA_P Parameter: Tissue Value: Germinating Seeds
  misc_feature: MA Experiment ID: 108464 Result: Down-regulated in Transcription
  misc_feature: MA Experiment 108464 PARAMETER Experiment Name: At_Germinating_Seeds_cDNA_P Parameter: Age (day) Value: 4 vs. 0
  misc_feature: MA Experiment 108464 PARAMETER Experiment Name: At_Germinating_Seeds_cDNA_P Parameter: Tissue Value: Germinating Seeds
  misc_feature: MA Experiment ID: 20000180 Result: Down-regulated in Transcription
  misc_feature: MA Experiment 20000180 PARAMETER Experiment Name: At_Germinating_Seeds_P Parameter: Age (hr) Value: 24 vs. 0
  misc_feature: MA Experiment 20000180 PARAMETER Experiment Name: At_Germinating_Seeds_P Parameter: Tissue Value: Germinating Seeds
  misc_feature: MA Experiment ID: 20000265 Result: Up-regulated in Transcription
  misc_feature: MA Experiment 20000265 PARAMETER Experiment Name: At_Open_Flower_P Parameter: Age (day) Value: 21
  misc_feature: MA Experiment 20000265 PARAMETER Experiment Name: At_Open_Flower_P Parameter: Plant Line Value: WS
  misc_feature: MA Experiment 20000265 PARAMETER Experiment Name: At_Open_Flower_P Parameter: Tissue Value: Closed Flower vs. Whole Plant
  misc_feature: MA Experiment ID: 20000794 Result: Down-regulated in Transcription
  misc_feature: MA Experiment 20000794 PARAMETER Experiment Name: At_Petals_P Parameter: Age (day) Value: 23-25 days
  misc_feature: MA Experiment 20000794 PARAMETER Experiment Name: At_Petals_P Parameter: Plant Line Value: WS
  misc_feature: MA Experiment 20000794 PARAMETER Experiment Name: At_Petals_P Parameter: Tissue Value: Petals vs. Whole plant
  misc_feature: MA Experiment ID: 20001905 Result: Down-regulated in Transcription
  misc_feature: MA Experiment 20001905 PARAMETER Experiment Name: At_Drought_Reproduction_P Parameter: Age (day) Value: 40
  misc_feature: MA Experiment 20001905 PARAMETER Experiment Name: At_Drought_Reproduction_P Parameter: Organism Value: A. thaliana
  misc_feature: MA Experiment 20001905 PARAMETER Experiment Name: At_Drought_Reproduction_P Parameter: Plant Line Value: WS
  misc_feature: MA Experiment 20001905 PARAMETER Experiment Name: At_Drought_Reproduction_P Parameter: Timepoint (day) Value: 10
  misc_feature: MA Experiment 20001905 PARAMETER Experiment Name: At_Drought_Reproduction_P Parameter: Tissue Value: Rosettes
  misc_feature: MA Experiment 20001905 PARAMETER Experiment Name: At_Drought_Reproduction_P Parameter: Treatment Value: Drought vs. No Drought
gaccatcgaccatcgtcgtcttcgcggagctcagttgaaagatgttaacggctgatataccaccaaatcagtcaatctacataaaacatatcaatgagaagatcaagaaagaagagctgaagaggtctctttactgtttgttctctcagtttggaagattacttgatgtggttgcgttaaagactcctaagctccggggacaagcatgggttgtttttactgaagtcaccgctgctagcaacgctgtccgtcagatgcagaactttcctttctatgataagcctatgcggatacaatatgcaaaatcaaagtcagattatgttactaaagccgaagggtcttttgttccaaaagaaaagaagatgaagcaagaagagaaagttgaaaggaagcgacatgctgaagaaactcaacaaccaagcatgcctaatggcgcaactactcagaacggaatgcctgtggcaatttctctttctcgcatcattccaacaatacaatattatcttctgacagacgtcattatcgcaacttagtctgtaaattcttgtttcctaatacccgtctctgtaatttcacagcctcctttccagccgagtgggcaagacacgatgccaccaaacaacatactcttcattcataatcttcccattgagacgaatagtatgatgcttcagctgctctttgagcaatacccaggattcaaagagataagaatgatcgaagcaaaacccggaattgcgtttgtggagtatgaagacgatgttcagtcttccatggccatgcaggctcttcagggtttcaagatcactccgcagaatccaatggtcgtctcttttgccaagaagtgaaaaccagagttttgttatgcggatgaatggtaatgatatactaattagtagctgtttaaaagcaaactgtcttattttatttggttcgtttccgattagtggtgtgaatgaccccgaagctttagaccagaatgtaatgagatcgaagaattgagagtgatttggttgg

SEQ ID NO: 28800 - protein, 163 aa, Arabidopsis thaliana
  peptide (1)..(163): Ceres Seq. ID no. 12422209
  misc_feature (12)..(84): Pfam Name: RNA recognition motif. (a.k.a. RRM, RBD, or RNP domain) Pfam Description: RNA recognition motif. (a.k.a. RRM, RBD, or RNP
  misc_feature (4)..(147): Homolog of NCBI NO: 15226631 NR Description: small nuclear ribonucleoprotein U1A
  misc_feature (7)..(161): Homolog of NCBI NO: 34897622 NR Description: putative small nuclear ribonucleoprotein U1A
  misc_feature (5)..(128): Homolog of NCBI NO: 2119045 NR Description: small nuclear ribonucleoprotein U1A - potato
  misc_feature (1)..(143): Homolog of NCBI NO: 421960 NR Description: small nuclear ribonucleoprotein U2B'' - potato
  misc_feature (1)..(139): Homolog of NCBI NO: 21593001 NR Description: putative small nuclear ribonucleoprotein U2B
  misc_feature (1)..(139): Homolog of NCBI NO: 15227729 NR Description: small nuclear ribonucleoprotein U2B, putative
  misc_feature (1)..(139): Homolog of NCBI NO: 19347861 NR Description: putative spliceosomal protein (U2B) [Arabidopsis
  misc_feature (1)..(139): Homolog of NCBI NO: 30679897 NR Description: small nuclear ribonucleoprotein U2B (spliceosomal
  misc_feature (1)..(140): Homolog of NCBI NO: 30679892 NR Description: small nuclear ribonucleoprotein U2B (spliceosomal
  misc_feature (1)..(158): Homolog of NCBI NO: 25294325 NR Description: hypothetical protein [imported] - Arabidopsis
MLTADIPPNQSIYIKHINEKIKKEELKRSLYCLFSQFGRLLDVVALKTPKLRGQAWVVFTEVTAASNAVRQMQNFPFYDKPMRIQYAKSKSDYVTKAEGSFVPKEKKMKQEEKVERKRHAEETQQPSMPNGATTQNGMPVAISLSRIIPTIQYYLLTDVIIAT

SEQ ID NO: 28801 - protein, 92 aa, Arabidopsis thaliana
  peptide (1)..(92): Ceres Seq. ID no. 12422210
  misc_feature (1)..(76): Homolog of NCBI NO: 15226631 NR Description: small nuclear ribonucleoprotein U1A
  misc_feature (1)..(90): Homolog of NCBI NO: 34897622 NR Description: putative small nuclear ribonucleoprotein U1A
  misc_feature (1)..(57): Homolog of NCBI NO: 2119045 NR Description: small nuclear ribonucleoprotein U1A - potato
  misc_feature (1)..(72): Homolog of NCBI NO: 421960 NR Description: small nuclear ribonucleoprotein U2B'' - potato
  misc_feature (1)..(68): Homolog of NCBI NO: 21593001 NR Description: putative small nuclear ribonucleoprotein U2B
  misc_feature (1)..(68): Homolog of NCBI NO: 15227729 NR Description: small nuclear ribonucleoprotein U2B, putative
  misc_feature (1)..(68): Homolog of NCBI NO: 19347861 NR Description: putative spliceosomal protein (U2B) [Arabidopsis
  misc_feature (1)..(68): Homolog of NCBI NO: 30679897 NR Description: small nuclear ribonucleoprotein U2B (spliceosomal
  misc_feature (1)..(69): Homolog of NCBI NO: 30679892 NR Description: small nuclear ribonucleoprotein U2B (spliceosomal
  misc_feature (1)..(87): Homolog of NCBI NO: 25294325 NR Description: hypothetical protein [imported] - Arabidopsis
MQNFPFYDKPMRIQYAKSKSDYVTKAEGSFVPKEKKMKQEEKVERKRHAEETQQPSMPNGATTQNGMPVAISLSRIIPTIQYYLLTDVIIAT

SEQ ID NO: 28802 - protein, 83 aa, Arabidopsis thaliana
  peptide (1)..(83): Ceres Seq. ID no. 12422211
MKTMFSLPWPCRLFRVSRSLRRIQWSSLLPRSENQSFVMRMNGNDILISSCLKANCLILFGSFPISGVNDPEALDQNVMRSKN

SEQ ID NO: 28803 - DNA, 938 bp, Arabidopsis thaliana
  misc_feature (1)..(938): Ceres Seq. ID no. 13491243
  misc_feature: MA Experiment ID: 108462 Result: Up-regulated in Transcription
  misc_feature: MA Experiment 108462 PARAMETER Experiment Name: At_Germinating_Seeds_cDNA_P Parameter: Age (day) Value: 2 vs. 0
  misc_feature: MA Experiment 108462 PARAMETER Experiment Name: At_Germinating_Seeds_cDNA_P Parameter: Tissue Value: Germinating Seeds
  misc_feature: MA Experiment ID: 108463 Result: Up-regulated in Transcription
  misc_feature: MA Experiment 108463 PARAMETER Experiment Name: At_Germinating_Seeds_cDNA_P Parameter: Age (day) Value: 3 vs. 0
  misc_feature: MA Experiment 108463 PARAMETER Experiment Name: At_Germinating_Seeds_cDNA_P Parameter: Tissue Value: Germinating Seeds
  misc_feature: MA Experiment ID: 108488 Result: Down-regulated in Transcription
  misc_feature: MA Experiment ID: 108501 Result: Up-regulated in Transcription
  misc_feature: MA Experiment 108501 PARAMETER Experiment Name: At_ap2_floral_buds_cDNA_P Parameter: Plant Line Value: ap2 (Ler.)
  misc_feature: MA Experiment 108501 PARAMETER Experiment Name: At_ap2_floral_buds_cDNA_P Parameter: Tissue Value: Closed Flower
  misc_feature: MA Experiment ID: 108561 Result: Up-regulated in Transcription
  misc_feature: MA Experiment 108561 PARAMETER Experiment Name: At_100uM_ABA_cDNA_P Parameter: Timepoint (hr) Value: 6
  misc_feature: MA Experiment 108561 PARAMETER Experiment Name: At_100uM_ABA_cDNA_P Parameter: Tissue Value: Aerial
  misc_feature: MA Experiment 108561 PARAMETER Experiment Name: At_100uM_ABA_cDNA_P Parameter: Treatment Value: 100uM ABA vs. No Treatment
  misc_feature: MA Experiment ID: 108572 Result: Up-regulated in Transcription
  misc_feature: MA Experiment 108572 PARAMETER Experiment Name: At_Drought_cDNA_P Parameter: Timepoint (hr) Value: 1
  misc_feature: MA Experiment 108572 PARAMETER Experiment Name: At_Drought_cDNA_P Parameter: Tissue Value: Aerial
  misc_feature: MA Experiment 108572 PARAMETER Experiment Name: At_Drought_cDNA_P Parameter: Treatment Value: Drought vs. No Drought
  misc_feature: MA Experiment ID: 108579 Result: Down-regulated in Transcription
  misc_feature: MA Experiment 108579 PARAMETER Experiment Name: At_4deg_Cold_cDNA_P Parameter: Temperature (deg C) Value: 4 vs. 22
  misc_feature: MA Experiment 108579 PARAMETER Experiment Name: At_4deg_Cold_cDNA_P Parameter: Timepoint (hr) Value: 6
  misc_feature: MA Experiment 108579 PARAMETER Experiment Name: At_4deg_Cold_cDNA_P Parameter: Tissue Value: Aerial
  misc_feature: MA Experiment ID: 108595 Result: Down-regulated in Transcription
  misc_feature: MA Experiment 108595 PARAMETER Experiment Name: At_Ler-pi_Ovule_cDNA_P Parameter: Plant Line Value: null
  misc_feature: MA Experiment ID: 108605 Result: Up-regulated in Transcription
  misc_feature: MA Experiment 108605 PARAMETER Experiment Name: At_100uM_ABA_cDNA_P Parameter: Timepoint (hr) Value: 6
  misc_feature: MA Experiment 108605 PARAMETER Experiment Name: At_100uM_ABA_cDNA_P Parameter: Tissue Value: Aerial
  misc_feature: MA Experiment 108605 PARAMETER Experiment Name: At_100uM_ABA_cDNA_P Parameter: Treatment Value: 100uM ABA vs. No Treatment
  misc_feature: MA Experiment ID: 108607 Result: Up-regulated in Transcription
  misc_feature: MA Experiment 108607 PARAMETER Experiment Name: At_100uM_ABA_cDNA_P Parameter: Timepoint (hr) Value: 4
  misc_feature: MA Experiment 108607 PARAMETER Experiment Name: At_100uM_ABA_cDNA_P Parameter: Tissue Value: Aerial
  misc_feature: MA Experiment 108607 PARAMETER Experiment Name: At_100uM_ABA_cDNA_P Parameter: Treatment Value: 100uM ABA vs. No Treatment
  misc_feature: MA Experiment ID: 108608 Result: Up-regulated in Transcription
  misc_feature: MA Experiment 108608 PARAMETER Experiment Name: At_100uM_ABA_cDNA_P Parameter: Timepoint (hr) Value: 1
  misc_feature: MA Experiment 108608 PARAMETER Experiment Name: At_100uM_ABA_cDNA_P Parameter: Tissue Value: Aerial
  misc_feature: MA Experiment 108608 PARAMETER Experiment Name: At_100uM_ABA_cDNA_P Parameter: Treatment Value: 100uM ABA vs. No Treatment
  misc_feature: MA Experiment ID: 108668 Result: Up-regulated in Transcription
  misc_feature: MA Experiment 108668 PARAMETER Experiment Name: At_2mM_SA_cDNA_P Parameter: Plant Line Value: WS
  misc_feature: MA Experiment 108668 PARAMETER Experiment Name: At_2mM_SA_cDNA_P Parameter: Timepoint (hr) Value: 6
  misc_feature: MA Experiment 108668 PARAMETER Experiment Name: At_2mM_SA_cDNA_P Parameter: Treatment Value: 2mM SA vs. No Treatment
  misc_feature: MA Experiment ID: 20000068 Result: Up-regulated in Transcription
  misc_feature: MA Experiment ID: 20000090 Result: Down-regulated in Transcription
  misc_feature: MA Experiment ID: 20000169 Result: Up-regulated in Transcription
  misc_feature: MA Experiment 20000169 PARAMETER Experiment Name: At_100uM_ABA_P Parameter: Age (day) Value: 14
  misc_feature: MA Experiment 20000169 PARAMETER Experiment Name: At_100uM_ABA_P Parameter: Organism Value: A. thaliana
  misc_feature: MA Experiment 20000169 PARAMETER Experiment Name: At_100uM_ABA_P Parameter: Plant Line Value: WS
  misc_feature: MA Experiment 20000169 PARAMETER Experiment Name: At_100uM_ABA_P Parameter: Timepoint (hr) Value: 6
  misc_feature: MA Experiment 20000169 PARAMETER Experiment Name: At_100uM_ABA_P Parameter: Tissue Value: Aerial
  misc_feature: MA Experiment 20000169 PARAMETER Experiment Name: At_100uM_ABA_P Parameter: Treatment Value: 100uM ABA vs. No Treatment
  misc_feature: MA Experiment ID: 20000179 Result: Up-regulated in Transcription
  misc_feature: MA Experiment 20000179 PARAMETER Experiment Name: At_Germinating_Seeds_P Parameter: Age (hr) Value: 6 vs. 0
  misc_feature: MA Experiment 20000179 PARAMETER Experiment Name: At_Germinating_Seeds_P Parameter: Tissue Value: Germinating Seeds
  misc_feature: MA Experiment ID: 20000182 Result: Up-regulated in Transcription
  misc_feature: MA Experiment 20000182 PARAMETER Experiment Name: At_2mM_SA_P Parameter: Age (day) Value: 14
  misc_feature: MA Experiment 20000182 PARAMETER Experiment Name: At_2mM_SA_P Parameter: Organism Value: A. thaliana
  misc_feature: MA Experiment 20000182 PARAMETER Experiment Name: At_2mM_SA_P Parameter: Plant Line Value: WS
  misc_feature: MA Experiment 20000182 PARAMETER Experiment Name: At_2mM_SA_P Parameter: Timepoint (hr) Value: 6
  misc_feature: MA Experiment 20000182 PARAMETER Experiment Name: At_2mM_SA_P Parameter: Tissue Value: Aerial
  misc_feature: MA Experiment 20000182 PARAMETER Experiment Name: At_2mM_SA_P Parameter: Treatment Value: 2mM SA vs. No Treatment
  misc_feature: MA Experiment ID: 20000185 Result: Down-regulated in Transcription
  misc_feature: MA Experiment 20000185 PARAMETER Experiment Name: At_Roots__P Parameter: Age (day) Value: 7 vs. 21
  misc_feature: MA Experiment 20000185 PARAMETER Experiment Name: At_Roots__P Parameter: Organism Value: A. thaliana
  misc_feature: MA Experiment 20000185 PARAMETER Experiment Name: At_Roots__P Parameter: Tissue Value: Roots vs. Whole Plant
  misc_feature: MA Experiment ID: 20000234 Result: Down-regulated in Transcription
  misc_feature: MA Experiment 20000234 PARAMETER Experiment Name: At_Siliques_P Parameter: Age (day) Value: 21
  misc_feature: MA Experiment 20000234 PARAMETER Experiment Name: At_Siliques_P Parameter: Organism Value: A. thaliana
  misc_feature: MA Experiment 20000234 PARAMETER Experiment Name: At_Siliques_P Parameter: Plant Line Value: WS
  misc_feature: MA Experiment 20000234 PARAMETER Experiment Name: At_Siliques_P Parameter: Tissue Value: Less Than 5mm Siliques vs. Whole Plant
  misc_feature: MA Experiment ID: 20000268 Result: Up-regulated in Transcription
  misc_feature: MA Experiment 20000268 PARAMETER Experiment Name: At_100mM_NaCl__P Parameter: Age (day) Value: 14
  misc_feature: MA Experiment 20000268 PARAMETER Experiment Name: At_100mM_NaCl__P Parameter: Organism Value: A. thaliana
  misc_feature: MA Experiment 20000268 PARAMETER Experiment Name: At_100mM_NaCl__P Parameter: Plant Line Value: WS
  misc_feature: MA Experiment 20000268 PARAMETER Experiment Name: At_100mM_NaCl__P Parameter: Timepoint (hr) Value: 6
  misc_feature: MA Experiment 20000268 PARAMETER Experiment Name: At_100mM_NaCl__P Parameter: Tissue Value: Whole Plant
  misc_feature: MA Experiment 20000268 PARAMETER Experiment Name: At_100mM_NaCl__P Parameter: Treatment Value: 100mM NaCl vs. No Treatment
  misc_feature: MA Experiment ID: 20000439 Result: Down-regulated in Transcription
  misc_feature: MA Experiment 20000439 PARAMETER Experiment Name: At_Roots__P Parameter: Age (day) Value: 14 vs. 21
  misc_feature: MA Experiment 20000439 PARAMETER Experiment Name: At_Roots__P Parameter: Organism Value: A. thaliana
  misc_feature: MA Experiment 20000439 PARAMETER Experiment Name: At_Roots__P Parameter: Tissue Value: Roots vs. Whole Plant
  misc_feature: MA Experiment ID: 20000495 Result: Down-regulated in Transcription
  misc_feature: MA Experiment 20000495 PARAMETER Experiment Name: At_Guard_Cells_P Parameter: Harvest Date Value: 8/2/2002
  misc_feature: MA Experiment 20000495 PARAMETER Experiment Name: At_Guard_Cells_P Parameter: Organism Value: A. thaliana
  misc_feature: MA Experiment 20000495 PARAMETER Experiment Name: At_Guard_Cells_P Parameter: Tissue Value: Guard Cells vs. Leaves
  misc_feature: MA Experiment ID: 20000573 Result: Down-regulated in Transcription
  misc_feature: MA Experiment 20000573 PARAMETER Experiment Name: At_100uM_ABA_Mutants__P Parameter: Organism Value: A. thaliana
  misc_feature: MA Experiment 20000573 PARAMETER Experiment Name: At_100uM_ABA_Mutants__P Parameter: Plant Line Value: CS22 vs. Ler wt
  misc_feature: MA Experiment 20000573 PARAMETER Experiment Name: At_100uM_ABA_Mutants__P Parameter: Timepoint (hr) Value: N/A
  misc_feature: MA Experiment 20000573 PARAMETER Experiment Name: At_100uM_ABA_Mutants__P Parameter: Tissue Value: Whole Plant
  misc_feature: MA Experiment 20000573 PARAMETER Experiment Name: At_100uM_ABA_Mutants__P Parameter: Treatment Value: None
  misc_feature: MA Experiment ID: 20000574 Result: Down-regulated in Transcription
  misc_feature: MA Experiment 20000574 PARAMETER Experiment Name: At_100uM_ABA_Mutants__P Parameter: Organism Value: A. thaliana
  misc_feature: MA Experiment 20000574 PARAMETER Experiment Name: At_100uM_ABA_Mutants__P Parameter: Plant Line Value: CS23 vs. Ler wt
  misc_feature: MA Experiment 20000574 PARAMETER Experiment Name: At_100uM_ABA_Mutants__P Parameter: Timepoint (hr) Value: N/A
  misc_feature: MA Experiment 20000574 PARAMETER Experiment Name: At_100uM_ABA_Mutants__P Parameter: Tissue Value: Whole Plant
  misc_feature: MA Experiment 20000574 PARAMETER Experiment Name: At_100uM_ABA_Mutants__P Parameter: Treatment Value: None
  misc_feature: MA Experiment ID: 20000794 Result: Up-regulated in Transcription
  misc_feature: MA Experiment 20000794 PARAMETER Experiment Name: At_Petals_P Parameter: Age (day) Value: 23-25 days
  misc_feature: MA Experiment 20000794 PARAMETER Experiment Name: At_Petals_P Parameter: Plant Line Value: WS
  misc_feature: MA Experiment 20000794 PARAMETER Experiment Name: At_Petals_P Parameter: Tissue Value: Petals vs. Whole plant
  misc_feature: MA Experiment ID: 20001248 Result: Down-regulated in Transcription
  misc_feature: MA Experiment 20001248 PARAMETER Experiment Name: At_Far-red-induction_P Parameter: Age (day) Value: 7
  misc_feature: MA Experiment 20001248 PARAMETER Experiment Name: At_Far-red-induction_P Parameter: Light Value: Far-red vs. White
  misc_feature: MA Experiment 20001248 PARAMETER Experiment Name: At_Far-red-induction_P Parameter: Organism Value: A. thaliana
  misc_feature: MA Experiment 20001248 PARAMETER Experiment Name: At_Far-red-induction_P Parameter: Plant Line Value: Columbia
  misc_feature: MA Experiment 20001248 PARAMETER Experiment Name: At_Far-red-induction_P Parameter: Timepoint (hr) Value: 4
  misc_feature: MA Experiment 20001248 PARAMETER Experiment Name: At_Far-red-induction_P Parameter: Tissue Value: Whole Plant
  misc_feature: MA Experiment ID: 20001911 Result: Up-regulated in Transcription
  misc_feature: MA Experiment 20001911 PARAMETER Experiment Name: At_Drought_Reproduction_P Parameter: Age (day) Value: 40
  misc_feature: MA Experiment 20001911 PARAMETER Experiment Name: At_Drought_Reproduction_P Parameter: Organism Value: A. thaliana
  misc_feature: MA Experiment 20001911 PARAMETER Experiment Name: At_Drought_Reproduction_P Parameter: Plant Line Value: WS
  misc_feature: MA Experiment 20001911 PARAMETER Experiment Name: At_Drought_Reproduction_P Parameter: Timepoint (day) Value: 10
  misc_feature: MA Experiment 20001911 PARAMETER Experiment Name: At_Drought_Reproduction_P Parameter: Tissue Value: Flowers
  misc_feature: MA Experiment 20001911 PARAMETER Experiment Name: At_Drought_Reproduction_P Parameter: Treatment Value: Drought vs. No Drought
  misc_feature: Phenotype: ROSETTE LEAVES Curled-Curled 3
  misc_feature: Phenotype: ROSETTE LEAVES Curled-Curled 3
  misc_feature: Phenotype: ROSETTE LEAVES Curled-Curled 3
  misc_feature: Phenotype: WHOLE PLANT Size-Small
  misc_feature: Phenotype: ROSETTE LEAVES Curled-Curled 3
  misc_feature: Phenotype: WHOLE PLANT Size-Small
  misc_feature: Phenotype: ROSETTE LEAVES Curled-Curled 3
  misc_feature: Phenotype: WHOLE PLANT Size-Small
  misc_feature: Phenotype: ROSETTE LEAVES Curled-Curled 3
  misc_feature: Phenotype: WHOLE PLANT Size-Small
aaaaaaaaaaaaaaaacgtctatacacaaaaaaacaaatgggagagaaagaggaagtgaaactattaggagtatggtacagtccatacgccataagacctaagatcgctcttcgtctcaaatcagtggattatgattacgttgaggaaaatctgtttggatccaagagtgagcttcttctcaaatcaaacccggttcacaagaaagtccctgttctcctccacaacaacaaaccgattgtcgagtctctcaacatcgttgaatacattgatgagacgtggaactcatctgcaccgtccattcttccttcacatccttatgatcgtgctcttgctcgcttttggtctgacttcgttgataacaagtggtttccggcgttgagaatggcggcgatcactaaatcggaagacgcaaaagcgaaagccatggaagaagtggaagaagggttgttgcaactcgaggatgcgtttgtttctataagcaaagggaaaccctttttcggcggtgaagcaatcgggtttatggatatttgctttggaagctttgtggttctcttgaaagctagagaaaagtttaaagcagaaaagcttttagtcgaatcaaaaactccttctctttgtaaatgggccgaccggttcttgtccgatgaaacggtgaagaatgtggcaccggagatcgaaaaagtagctgagtttctacaagaacttgaggttagagctcaatccgcagcttcaagatcttgagatcatcttagaaatgtattgcaatgcaattgtgttttgtgtacatgtaaaacgaaaataagttgaagttttaaagtgttgtgttcagtctatgctaggatttatgacgcggtgtatgggctacggactattttcagtttatgtttatcgaaaatataagggtcagcccaagattattaggggtcgtccccccttt

SEQ ID NO: 28804 - protein, 246 aa, Arabidopsis thaliana
  peptide (1)..(246): Ceres Seq. ID no. 13491244
  misc_feature (18)..(241): Homolog of NCBI NO: 6856103 NR Description: glutathione S-transferase [Gossypium hirsutum]
  misc_feature (148)..(241): Homolog of NCBI NO: 11096018 NR Description: glutathione S-transferase [Arabidopsis thaliana]
  misc_feature (18)..(127): Homolog of NCBI NO: 11096018 NR Description: glutathione S-transferase [Arabidopsis thaliana]
  misc_feature (17)..(241): Homolog of NCBI NO: 15218517 NR Description: glutathione transferase, putative [Arabidopsis
  misc_feature (18)..(241): Homolog of NCBI NO: 15375408 NR Description: glutathione S-transferase [Arabidopsis thaliana]
  misc_feature (18)..(241): Homolog of NCBI NO: 11096016 NR Description: glutathione S-transferase [Arabidopsis thaliana]
  misc_feature (13)..(240): Homolog of NCBI NO: 21537210 NR Description: glutathione S-transferase, putative [Arabidopsis
  misc_feature (13)..(240): Homolog of NCBI NO: 15218868 NR Description: glutathione transferase, putative [Arabidopsis
  misc_feature (13)..(246): Homolog of NCBI NO: 15218872 NR Description: glutathione transferase, putative [Arabidopsis
  misc_feature (13)..(246): Homolog of NCBI NO: 13877559 NR Description: similar to glutathione S-transferase [Arabidopsis
KKKKKRLYTKKQMGEKEEVKLLGVWYSPYAIRPKIALRLKSVDYDYVEENLFGSKSELLLKSNPVHKKVPVLLHNNKPIVESLNIVEYIDETWNSSAPSILPSHPYDRALARFWSDFVDNKWFPALRMAAITKSEDAKAKAMEEVEEGLLQLEDAFVSISKGKPFFGGEAIGFMDICFGSFVVLLKAREKFKAEKLLVESKTPSLCKWADRFLSDETVKNVAPEIEKVAEFLQELEVRAQSAASRS

SEQ ID NO: 28805 - protein, 234 aa, Arabidopsis thaliana
  peptide (1)..(234): Ceres Seq. ID no. 13491245
  misc_feature (6)..(229): Homolog of NCBI NO: 6856103 NR Description: glutathione S-transferase [Gossypium hirsutum]
  misc_feature (136)..(229): Homolog of NCBI NO: 11096018 NR Description: glutathione S-transferase [Arabidopsis thaliana]
  misc_feature (6)..(115): Homolog of NCBI NO: 11096018 NR Description: glutathione S-transferase [Arabidopsis thaliana]
  misc_feature (5)..(229): Homolog of NCBI NO: 15218517 NR Description: glutathione transferase, putative [Arabidopsis
  misc_feature (6)..(229): Homolog of NCBI NO: 15375408 NR Description: glutathione S-transferase [Arabidopsis thaliana]
  misc_feature (6)..(229): Homolog of NCBI NO: 11096016 NR Description: glutathione S-transferase [Arabidopsis thaliana]
  misc_feature (1)..(228): Homolog of NCBI NO: 21537210 NR Description: glutathione S-transferase, putative [Arabidopsis
  misc_feature (1)..(228): Homolog of NCBI NO: 15218868 NR Description: glutathione transferase, putative [Arabidopsis
  misc_feature (1)..(234): Homolog of NCBI NO: 15218872 NR Description: glutathione transferase, putative [Arabidopsis
  misc_feature (1)..(234): Homolog of NCBI NO: 13877559 NR Description: similar to glutathione S-transferase [Arabidopsis
MGEKEEVKLLGVWYSPYAIRPKIALRLKSVDYDYVEENLFGSKSELLLKSNPVHKKVPVLLHNNKPIVESLNIVEYIDETWNSSAPSILPSHPYDRALARFWSDFVDNKWFPALRMAAITKSEDAKAKAMEEVEEGLLQLEDAFVSISKGKPFFGGEAIGFMDICFGSFVVLLKAREKFKAEKLLVESKTPSLCKWADRFLSDETVKNVAPEIEKVAEFLQELEVRAQSAASRS

SEQ ID NO: 28806 - DNA, 2023 bp, Arabidopsis thaliana
  misc_feature (1)..(2023): Ceres Seq. ID no. 12370614
  misc_feature: MA Experiment ID: 108433 Result: Up-regulated in Transcription
  misc_feature: MA Experiment 108433 PARAMETER Experiment Name: At_rhl_Mutant2_cDNA_P Parameter: Age (day) Value: 7
  misc_feature: MA Experiment 108433 PARAMETER Experiment Name: At_rhl_Mutant2_cDNA_P Parameter: Organism Value: A. thaliana
  misc_feature: MA Experiment 108433 PARAMETER Experiment Name: At_rhl_Mutant2_cDNA_P Parameter: Plant Line Value: rhl Mutant vs. wt landsburg
  misc_feature: MA Experiment 108433 PARAMETER Experiment Name: At_rhl_Mutant2_cDNA_P Parameter: Tissue Value: Roots
  misc_feature: MA Experiment ID: 108434 Result: Down-regulated in Transcription
  misc_feature: MA Experiment 108434 PARAMETER Experiment Name: At_Root_Tips_cDNA_P Parameter: Tissue Value: Root Tips
  misc_feature: MA Experiment ID: 108464 Result: Up-regulated in Transcription
  misc_feature: MA Experiment 108464 PARAMETER Experiment Name: At_Germinating_Seeds_cDNA_P Parameter: Age (day) Value: 4 vs. 0
  misc_feature: MA Experiment 108464 PARAMETER Experiment Name: At_Germinating_Seeds_cDNA_P Parameter: Tissue Value: Germinating Seeds
  misc_feature: MA Experiment ID: 108569 Result: Up-regulated in Transcription
  misc_feature: MA Experiment 108569 PARAMETER Experiment Name: At_0.001%_MeJA__cDNA_P Parameter: Timepoint (hr) Value: 6
  misc_feature: MA Experiment 108569 PARAMETER Experiment Name: At_0.001%_MeJA__cDNA_P Parameter: Tissue Value: Aerial
  misc_feature: MA Experiment 108569 PARAMETER Experiment Name: At_0.001%_MeJA__cDNA_P Parameter: Treatment Value: 0.001% MeJA vs. No Treatment
  misc_feature: MA Experiment ID: 20000030 Result: Down-regulated in Transcription
  misc_feature: MA Experiment 20000030 PARAMETER Experiment Name: At_CS6630_Roots_cDNA_P Parameter: Plant Line Value: CS6630 vs. WS
  misc_feature: MA Experiment 20000030 PARAMETER Experiment Name: At_CS6630_Roots_cDNA_P Parameter: Tissue Value: Roots
aatccaaaatctatctaccgccgatcaaaaaaccctagaatttcttccactgttatgtaagtttgatcatgttgtctccactaagaggcgaagagagaaagagggttttaggttgtgtgttctgtttcaaagggtttacttctcgttgaccccgatcgagatggttgattcttctcgtgattcgtgtttcaaagctggtaagtttagtgctccaggttttcgatttcaccctactgatgaagagcttgtggtttattatcttaagaggaagatctgttgtaaaaaacttcgaatcaatgccattggtgtcgttgatgtttacaaagtcgatccttctgaattgcctggtctatcgatgttgaagacgggagatagacagtggttctttttcactccaaggaataggaagtatcctaacgcagctaggtcaagtagaggtactgcaactggttattggaaggcgacaggaaaggatcgagtcattgagtacaattcaagatctgttggactcaagaagactcttgttttctatagaggtcgtgctcctaatggtgagagaactgactgggtgatgcatgagtacactatggatgaagaagagctagggagatgtaagaacgctaaggagtattatgctctttataagctttataagaagagtggggctggtcctaagaatggtgaacagtatggtgctccgttccaagaagaagaatgggttgatagtgatagtgaagatgcagatagtgtcgctataccggattatcccgtggtccgttatgagaatggtccttgtgtggatgatactaaattttgcaatcctgtcaaacttcagttagaggatattgagaagcttctcaatgaaatcccagatgcacccggggttaaccaaagacagtttgatgagtttgttggtgtttccaacagggtaatagtgcagaagtgatacagagcacattggctgaataattcttctggagagtatattgaccctcggacgaatggaatgttcttgccaaatggccagctatacaacagggactcgagttttcagtcccatttgaattcatttgaggctacctctggtatggcacctcttctagataatgagaaggaggagtacattgaaatgaatgatcttctgatccctgagctcggtgcttcttcaacagagaaatccacagagttcttgaaccatggtgaatttggtgatgttaatgaatacgaccaattgttcaatgacatatctgtttttcagggaacttctacagatctgtcttgtctgagtaattttactaataacacatcaggccaaagacagcaattactttatgaacagttccagtaccagacacctgagaaccagcttaataactacatgcatcctagtaccactcttaatcagttcactgacaatatgtggtttaaagatgatcaggctgctctctatgttcaaccaccacaatcttcttctggagcattcacttcacagtcaacaggtgtgatgcctgagtctatgaatcccactatgagtgtaaatccccaatacaaggaagtacaaaatggtggtggaacaaggagccagttctcatcagctctgtgggaattattggaatcaataccatcaacaccagcctctgcctgtgagggtcctcttaaccagacctttgtgcgtatgtctagcttcagccgcatcaggttcaatggaacgtcagtgactagtagaaaagtcactgtagcaaagaagcgtatcagtaacagaggttttcttctgttatcaattatgggtgctttgtgtgctatcttctgggtgttcatagccaccgttggagttatgggaagacctctcttgtcgtgacctagactcttgaatcttgattcagcataagttagcctgatccacatctttgattatgtatagagtttgaaagagtttaattcttaacaaaagatttcttttttcctggattctctgatggctttgaaattttgcttgcacttatcatattaagcagaatttttg

SEQ ID NO: 28807 - protein, 314 aa, Arabidopsis thaliana
  peptide (1)..(314): Ceres Seq. ID no. 12370615
  misc_feature (69)..(197): Pfam Name: No apical meristem (NAM) protein Pfam Description: No apical meristem (NAM) protein
  misc_feature (65)..(243): Homolog of NCBI NO: 21105746 NR Description: nam-like protein 9 [Petunia x hybrida]
  misc_feature (70)..(299): Homolog of NCBI NO: 25403164 NR Description: CDS protein F9L11.7 [imported] - Arabidopsis
  misc_feature (70)..(299): Homolog of NCBI NO: 18398627 NR Description: NAM protein, putative; protein id: At1g32870.1
  misc_feature (70)..(299): Homolog of NCBI NO: 14334572 NR Description: putative NAM protein [Arabidopsis thaliana]
  misc_feature (71)..(314): Homolog of NCBI NO: 21105740 NR Description: nam-like protein 6 [Petunia x hybrida]
  misc_feature (71)..(314): Homolog of NCBI NO: 21105742 NR Description: nam-like protein 7 [Petunia x hybrida]
  misc_feature (54)..(314): Homolog of NCBI NO: 18399168 NR Description: NAM(no apical meristem) protein, putative
  misc_feature (54)..(314): Homolog of NCBI NO: 25518168 NR Description: BTF3b factor protein F23M19.14 - Arabidopsis
  misc_feature (54)..(314): Homolog of NCBI NO: 18399166 NR Description: expressed protein
  misc_feature (54)..(314): Homolog of NCBI NO: 21618244 NR Description: NAM-like protein [Arabidopsis thaliana]
IQNLSTADQKTLEFLPLLCKFDHVVSTKRRREKEGFRLCVLFQRVYFSLTPIEMVDSSRDSCFKAGKFSAPGFRFHPTDEELVVYYLKRKICCKKLRINAIGVVDVYKVDPSELPGLSMLKTGDRQWFFFTPRNRKYPNAARSSRGTATGYWKATGKDRVIEYNSRSVGLKKTLVFYRGRAPNGERTDWVMHEYTMDEEELGRCKNAKEYYALYKLYKKSGAGPKNGEQYGAPFQEEEWVDSDSEDADSVAIPDYPVVRYENGPCVDDTKFCNPVKLQLEDIEKLLNEIPDAPGVNQRQFDEFVGVSNRVIVQK

SEQ ID NO: 28808 - protein, 283 aa, Arabidopsis thaliana
  peptide (1)..(283): Ceres Seq. ID no. 12370616
  misc_feature (99)..(282): Homolog of NCBI NO: 18398627 NR Description: NAM protein, putative; protein id: At1g32870.1
  misc_feature (99)..(282): Homolog of NCBI NO: 14334572 NR Description: putative NAM protein [Arabidopsis thaliana]
  misc_feature (66)..(283): Homolog of NCBI NO: 21105740 NR Description: nam-like protein 6 [Petunia x hybrida]
  misc_feature (1)..(54): Homolog of NCBI NO: 21105740 NR Description: nam-like protein 6 [Petunia x hybrida]
  misc_feature (51)..(283): Homolog of NCBI NO: 21105742 NR Description: nam-like protein 7 [Petunia x hybrida]
  misc_feature (1)..(78): Homolog of NCBI NO: 21105742 NR Description: nam-like protein 7 [Petunia x hybrida]
  misc_feature (1)..(282): Homolog of NCBI NO: 18399168 NR Description: NAM(no apical meristem) protein, putative
  misc_feature (1)..(283): Homolog of NCBI NO: 25518168 NR Description: BTF3b factor protein F23M19.14 - Arabidopsis
  misc_feature (1)..(283): Homolog of NCBI NO: 18399166 NR Description: expressed protein
  misc_feature (1)..(283): Homolog of NCBI NO: 21618244 NR Description: NAM-like protein [Arabidopsis thaliana]
MFLPNGQLYNRDSSFQSHLNSFEATSGMAPLLDNEKEEYIEMNDLLIPELGASSTEKSTEFLNHGEFGDVNEYDQLFNDISVFQGTSTDLSCLSNFTNNTSGQRQQLLYEQFQYQTPENQLNNYMHPSTTLNQFTDNMWFKDDQAALYVQPPQSSSGAFTSQSTGVMPESMNPTMSVNPQYKEVQNGGGTRSQFSSALWELLESIPSTPASACEGPLNQTFVRMSSFSRIRFNGTSVTSRKVTVAKKRISNRGFLLLSIMGALCAIFWVFIATVGVMGRPLLS

SEQ ID NO: 28809 - protein, 261 aa, Arabidopsis thaliana
  peptide (1)..(261): Ceres Seq. ID no. 12370617
  misc_feature (16)..(144): Pfam Name: No apical meristem (NAM) protein Pfam Description: No apical meristem (NAM) protein
  misc_feature (12)..(190): Homolog of NCBI NO: 21105746 NR Description: nam-like protein 9 [Petunia x hybrida]
  misc_feature (17)..(246): Homolog of NCBI NO: 25403164 NR Description: CDS protein F9L11.7 [imported] - Arabidopsis
  misc_feature (17)..(246): Homolog of NCBI NO: 18398627 NR Description: NAM protein, putative; protein id: At1g32870.1
  misc_feature (17)..(246): Homolog of NCBI NO: 14334572 NR Description: putative NAM protein [Arabidopsis thaliana]
  misc_feature (18)..(261): Homolog of NCBI NO: 21105740 NR Description: nam-like protein 6 [Petunia x hybrida]
  misc_feature (18)..(261): Homolog of NCBI NO: 21105742 NR Description: nam-like protein 7 [Petunia x hybrida]
  misc_feature (1)..(261): Homolog of NCBI NO: 18399168 NR Description: NAM(no apical meristem) protein, putative
  misc_feature (1)..(261): Homolog of NCBI NO: 25518168 NR Description: BTF3b factor protein F23M19.14 - Arabidopsis
  misc_feature (1)..(261): Homolog of NCBI NO: 18399166 NR Description: expressed protein
  misc_feature (1)..(261): Homolog of NCBI NO: 21618244 NR Description: NAM-like protein [Arabidopsis thaliana]
MVDSSRDSCFKAGKFSAPGFRFHPTDEELVVYYLKRKICCKKLRINAIGVVDVYKVDPSELPGLSMLKTGDRQWFFFTPRNRKYPNAARSSRGTATGYWKATGKDRVIEYNSRSVGLKKTLVFYRGRAPNGERTDWVMHEYTMDEEELGRCKNAKEYYALYKLYKKSGAGPKNGEQYGAPFQEEEWVDSDSEDADSVAIPDYPVVRYENGPCVDDTKFCNPVKLQLEDIEKLLNEIPDAPGVNQRQFDEFVGVSNRVIVQK

SEQ ID NO: 28810 - DNA, 1739 bp, Arabidopsis thaliana
  misc_feature (1)..(1739): Ceres Seq. ID no. 12324446
  misc_feature: MA Experiment ID: 108434 Result: Down-regulated in Transcription
  misc_feature: MA Experiment 108434 PARAMETER Experiment Name: At_Root_Tips_cDNA_P Parameter: Tissue Value: Root Tips
  misc_feature: MA Experiment ID: 108473 Result: Down-regulated in Transcription
  misc_feature: MA Experiment 108473 PARAMETER Experiment Name: At_Drought_Flowers_cDNA_P Parameter: Timepoint (hr) Value: 7 d
  misc_feature: MA Experiment 108473 PARAMETER Experiment Name: At_Drought_Flowers_cDNA_P Parameter: Tissue Value: Flower
  misc_feature: MA Experiment 108473 PARAMETER Experiment Name: At_Drought_Flowers_cDNA_P Parameter: Treatment Value: Drought vs. No Drought
  misc_feature: MA Experiment ID: 108573 Result: Down-regulated in Transcription
  misc_feature: MA Experiment 108573 PARAMETER Experiment Name: At_Drought_cDNA_P Parameter: Timepoint (hr) Value: 6
  misc_feature: MA Experiment 108573 PARAMETER Experiment Name: At_Drought_cDNA_P Parameter: Tissue Value: Aerial
  misc_feature: MA Experiment 108573 PARAMETER Experiment Name: At_Drought_cDNA_P Parameter: Treatment Value: Drought vs. No Drought
  misc_feature: MA Experiment ID: 108585 Result: Down-regulated in Transcription
  misc_feature: MA Experiment 108585 PARAMETER Experiment Name: At_5mM_NaNP_cDNA_P Parameter: Timepoint (hr) Value: 6
  misc_feature: MA Experiment 108585 PARAMETER Experiment Name: At_5mM_NaNP_cDNA_P Parameter: Tissue Value: Aerial
  misc_feature: MA Experiment 108585 PARAMETER Experiment Name: At_5mM_NaNP_cDNA_P Parameter: Treatment Value: null
  misc_feature: MA Experiment ID: 108668 Result: Down-regulated in Transcription
  misc_feature: MA Experiment 108668 PARAMETER Experiment Name: At_2mM_SA_cDNA_P Parameter: Plant Line Value: WS
  misc_feature: MA Experiment 108668 PARAMETER Experiment Name: At_2mM_SA_cDNA_P Parameter: Timepoint (hr) Value: 6
  misc_feature: MA Experiment 108668 PARAMETER Experiment Name: At_2mM_SA_cDNA_P Parameter: Treatment Value: 2mM SA vs. No Treatment
  misc_feature: MA Experiment ID: 20000070 Result: Up-regulated in Transcription
  misc_feature: MA Experiment 20000070 PARAMETER Experiment Name: At_100uM_ABA_Mutants_cDNA_P Parameter: Plant Line Value: CS24
  misc_feature: MA Experiment 20000070 PARAMETER Experiment Name: At_100uM_ABA_Mutants_cDNA_P Parameter: Timepoint (hr) Value: 6
  misc_feature: MA Experiment 20000070 PARAMETER Experiment Name: At_100uM_ABA_Mutants_cDNA_P Parameter: Tissue Value: Aerial
  misc_feature: MA Experiment 20000070 PARAMETER Experiment Name: At_100uM_ABA_Mutants_cDNA_P Parameter: Treatment Value: 100uM ABA vs. No Treatment
  misc_feature: MA Experiment ID: 20000071 Result: Up-regulated in Transcription
  misc_feature: MA Experiment 20000071 PARAMETER Experiment Name: At_100uM_ABA_Mutants_cDNA_P Parameter: Plant Line Value: CS8104
  misc_feature: MA Experiment 20000071 PARAMETER Experiment Name: At_100uM_ABA_Mutants_cDNA_P Parameter: Timepoint (hr) Value: 6
  misc_feature: MA Experiment 20000071 PARAMETER Experiment Name: At_100uM_ABA_Mutants_cDNA_P Parameter: Tissue Value: Aerial
  misc_feature: MA Experiment 20000071 PARAMETER Experiment Name: At_100uM_ABA_Mutants_cDNA_P Parameter: Treatment Value: 100uM ABA vs. No Treatment
  misc_feature: MA Experiment ID: 20000072 Result: Up-regulated in Transcription
  misc_feature: MA Experiment 20000072 PARAMETER Experiment Name: At_100uM_ABA_Mutants_cDNA_P Parameter: Plant Line Value: CS8105
  misc_feature: MA Experiment 20000072 PARAMETER Experiment Name: At_100uM_ABA_Mutants_cDNA_P Parameter: Timepoint (hr) Value: 6
  misc_feature: MA Experiment 20000072 PARAMETER Experiment Name: At_100uM_ABA_Mutants_cDNA_P Parameter: Tissue Value: Aerial
  misc_feature: MA Experiment 20000072 PARAMETER Experiment Name: At_100uM_ABA_Mutants_cDNA_P Parameter: Treatment Value: 100uM ABA vs. No Treatment
  misc_feature: MA Experiment ID: 20000086 Result: Up-regulated in Transcription
  misc_feature: MA Experiment 20000086 PARAMETER Experiment Name: At_100uM_ABA_Mutants_cDNA_P Parameter: Plant Line Value: CS22
  misc_feature: MA Experiment 20000086 PARAMETER Experiment Name: At_100uM_ABA_Mutants_cDNA_P Parameter: Timepoint (hr) Value: 6
  misc_feature: MA Experiment 20000086 PARAMETER Experiment Name: At_100uM_ABA_Mutants_cDNA_P Parameter: Tissue Value: Aerial
  misc_feature: MA Experiment 20000086 PARAMETER Experiment Name: At_100uM_ABA_Mutants_cDNA_P Parameter: Treatment Value: 100uM ABA vs. No Treatment
  misc_feature: MA Experiment ID: 20000087 Result: Up-regulated in Transcription
  misc_feature: MA Experiment 20000087 PARAMETER Experiment Name: At_100uM_ABA_Mutants_cDNA_P Parameter: Plant Line Value: WS
  misc_feature: MA Experiment 20000087 PARAMETER Experiment Name: At_100uM_ABA_Mutants_cDNA_P Parameter: Timepoint (hr) Value: 6
  misc_feature: MA Experiment 20000087 PARAMETER Experiment Name: At_100uM_ABA_Mutants_cDNA_P Parameter: Tissue Value: Aerial
  misc_feature: MA Experiment 20000087 PARAMETER Experiment Name: At_100uM_ABA_Mutants_cDNA_P Parameter: Treatment Value: 100uM ABA vs. No Treatment
  misc_feature: MA Experiment ID: 20000088 Result: Up-regulated in Transcription
  misc_feature: MA Experiment 20000088 PARAMETER Experiment Name: At_100uM_ABA_Mutants_cDNA_P Parameter: Plant Line Value: Landsberg
  misc_feature: MA Experiment 20000088 PARAMETER Experiment Name: At_100uM_ABA_Mutants_cDNA_P Parameter: Timepoint (hr) Value: 6
  misc_feature: MA Experiment 20000088 PARAMETER Experiment Name: At_100uM_ABA_Mutants_cDNA_P Parameter: Tissue Value: Aerial
  misc_feature: MA Experiment 20000088 PARAMETER Experiment Name: At_100uM_ABA_Mutants_cDNA_P Parameter: Treatment Value: 100uM ABA vs. No Treatment
  misc_feature: MA Experiment ID: 20000089 Result: Up-regulated in Transcription
  misc_feature: MA Experiment ID: 20000090 Result: Up-regulated in Transcription
  misc_feature: MA Experiment ID: 20000111 Result: Down-regulated in Transcription
  misc_feature: MA Experiment 20000111 PARAMETER Experiment Name: At_42deg_Heat_cDNA_P Parameter: Temperature (deg C) Value: 42 vs. 22
  misc_feature: MA Experiment 20000111 PARAMETER Experiment Name: At_42deg_Heat_cDNA_P Parameter: Timepoint (hr) Value: 6
  misc_feature: MA Experiment 20000111 PARAMETER Experiment Name: At_42deg_Heat_cDNA_P Parameter: Tissue Value: Aerial
  misc_feature: MA Experiment ID: 20000112 Result: Down-regulated in Transcription
  misc_feature: MA Experiment 20000112 PARAMETER Experiment Name: At_42deg_Heat_cDNA_P Parameter: Temperature (deg C) Value: 42 vs. 22
  misc_feature: MA Experiment 20000112 PARAMETER Experiment Name: At_42deg_Heat_cDNA_P Parameter: Timepoint (hr) Value: 2
  misc_feature: MA Experiment 20000112 PARAMETER Experiment Name: At_42deg_Heat_cDNA_P Parameter: Tissue Value: Aerial
  misc_feature: MA Experiment ID: 20000113 Result: Down-regulated in Transcription
  misc_feature: MA Experiment 20000113 PARAMETER Experiment Name: At_42deg_Heat_cDNA_P Parameter: Temperature (deg C) Value: 42 vs. 22
  misc_feature: MA Experiment 20000113 PARAMETER Experiment Name: At_42deg_Heat_cDNA_P Parameter: Timepoint (hr) Value: 8
  misc_feature: MA Experiment 20000113 PARAMETER Experiment Name: At_42deg_Heat_cDNA_P Parameter: Tissue Value: Aerial
  misc_feature: MA Experiment ID: 20000117 Result: Up-regulated in Transcription
  misc_feature: MA Experiment 20000117 PARAMETER Experiment Name: At_100uM_ABA_Mutants_cDNA_P Parameter: Plant Line Value: Columbia
  misc_feature: MA Experiment 20000117 PARAMETER Experiment Name: At_100uM_ABA_Mutants_cDNA_P Parameter: Timepoint (hr) Value: 6
  misc_feature: MA Experiment 20000117 PARAMETER Experiment Name: At_100uM_ABA_Mutants_cDNA_P Parameter: Tissue Value: Aerial
  misc_feature: MA Experiment 20000117 PARAMETER Experiment Name: At_100uM_ABA_Mutants_cDNA_P Parameter: Treatment Value: 100uM ABA vs. No Treatment
  misc_feature: MA Experiment ID: 20000144 Result: Down-regulated in Transcription
  misc_feature: MA Experiment 20000144 PARAMETER Experiment Name: At_42deg_Heat_cDNA_P Parameter: Temperature (deg C) Value: 42 vs. 22
  misc_feature: MA Experiment 20000144 PARAMETER Experiment Name: At_42deg_Heat_cDNA_P Parameter: Timepoint (hr) Value: 1
  misc_feature: MA Experiment 20000144 PARAMETER Experiment Name: At_42deg_Heat_cDNA_P Parameter: Tissue Value: Aerial
  misc_feature: MA Experiment ID: 20000171 Result: Down-regulated in Transcription
  misc_feature: MA Experiment 20000171 PARAMETER Experiment Name: At_42deg_Heat_P Parameter: Age (day) Value: 14
  misc_feature: MA Experiment 20000171 PARAMETER Experiment Name: At_42deg_Heat_P Parameter: Organism Value: A. thaliana
  misc_feature: MA Experiment 20000171 PARAMETER Experiment Name: At_42deg_Heat_P Parameter: Plant Line Value: WS
  misc_feature: MA Experiment 20000171 PARAMETER Experiment Name: At_42deg_Heat_P Parameter: Temperature (deg C) Value: 42 vs. 22
  misc_feature: MA Experiment 20000171 PARAMETER Experiment Name: At_42deg_Heat_P Parameter: Timepoint (hr) Value: 1
  misc_feature: MA Experiment 20000171 PARAMETER Experiment Name: At_42deg_Heat_P Parameter: Tissue Value: Aerial
  misc_feature: MA Experiment ID: 20000173 Result: Down-regulated in Transcription
  misc_feature: MA Experiment 20000173 PARAMETER Experiment Name: At_42deg_Heat_P Parameter: Age (day) Value: 14
  misc_feature: MA Experiment 20000173 PARAMETER Experiment Name: At_42deg_Heat_P Parameter: Organism Value: A. thaliana
  misc_feature: MA Experiment 20000173 PARAMETER Experiment Name: At_42deg_Heat_P Parameter: Plant Line Value: WS
  misc_feature: MA Experiment 20000173 PARAMETER Experiment Name: At_42deg_Heat_P Parameter: Temperature (deg C) Value: 42 vs. 22
  misc_feature: MA Experiment 20000173 PARAMETER Experiment Name: At_42deg_Heat_P Parameter: Timepoint (hr) Value: 6
  misc_feature: MA Experiment 20000173 PARAMETER Experiment Name: At_42deg_Heat_P Parameter: Tissue Value: Aerial
  misc_feature: MA Experiment ID: 20000180 Result: Up-regulated in Transcription
  misc_feature: MA Experiment 20000180 PARAMETER Experiment Name: At_Germinating_Seeds_P Parameter: Age (hr) Value: 24 vs. 0
  misc_feature: MA Experiment 20000180 PARAMETER Experiment Name: At_Germinating_Seeds_P Parameter: Tissue Value: Germinating Seeds
  misc_feature: MA Experiment ID: 20000184 Result: Down-regulated in Transcription
  misc_feature: MA Experiment 20000184 PARAMETER Experiment Name: At_Shoots__P Parameter: Age (day) Value: 7
  misc_feature: MA Experiment 20000184 PARAMETER Experiment Name: At_Shoots__P Parameter: Tissue Value: Shoots vs. Whole Plant
  misc_feature: MA Experiment ID: 20000185 Result: Down-regulated in Transcription
  misc_feature: MA Experiment 20000185 PARAMETER Experiment Name: At_Roots__P Parameter: Age (day) Value: 7 vs. 21
  misc_feature: MA Experiment 20000185 PARAMETER Experiment Name: At_Roots__P Parameter: Organism Value: A. thaliana
  misc_feature: MA Experiment 20000185 PARAMETER Experiment Name: At_Roots__P Parameter: Tissue Value: Roots vs. Whole Plant
  misc_feature: MA Experiment ID: 20000224 Result: Up-regulated in Transcription
  misc_feature: MA Experiment ID: 20000227 Result: Down-regulated in Transcription
  misc_feature: MA Experiment 20000227 PARAMETER Experiment Name: At_Root-Tips-vs-Tops_P Parameter: Tissue Value: Root Tips vs. Root Tops
  misc_feature: MA Experiment ID: 20000439 Result: Down-regulated in Transcription
  misc_feature: MA Experiment 20000439 PARAMETER Experiment Name: At_Roots__P Parameter: Age (day) Value: 14 vs. 21
  misc_feature: MA Experiment 20000439 PARAMETER Experiment Name: At_Roots__P Parameter: Organism Value: A. thaliana
  misc_feature: MA Experiment 20000439 PARAMETER Experiment Name: At_Roots__P Parameter: Tissue Value: Roots vs. Whole Plant
  misc_feature: MA Experiment ID: 20000495 Result: Up-regulated in Transcription
  misc_feature: MA Experiment 20000495 PARAMETER Experiment Name: At_Guard_Cells_P Parameter: Harvest Date Value: 8/2/2002
  misc_feature: MA Experiment 20000495 PARAMETER Experiment Name: At_Guard_Cells_P Parameter: Organism Value: A. thaliana
  misc_feature: MA Experiment 20000495 PARAMETER Experiment Name: At_Guard_Cells_P Parameter: Tissue Value: Guard Cells vs. Leaves
  misc_feature: MA Experiment ID: 20000527 Result: Down-regulated in Transcription
  misc_feature: MA Experiment 20000527 PARAMETER Experiment Name: At_10percent_PEG_P Parameter: Age (day) Value: 20
  misc_feature: MA Experiment 20000527 PARAMETER Experiment Name: At_10percent_PEG_P Parameter: Organism Value: A. thaliana
  misc_feature: MA Experiment 20000527 PARAMETER Experiment Name: At_10percent_PEG_P Parameter: Plant Line Value: WS
  misc_feature: MA Experiment 20000527 PARAMETER Experiment Name: At_10percent_PEG_P Parameter: Timepoint (day) Value: 20
  misc_feature: MA Experiment 20000527 PARAMETER Experiment Name: At_10percent_PEG_P Parameter: Tissue Value: Whole Plant
  misc_feature: MA Experiment 20000527 PARAMETER Experiment Name: At_10percent_PEG_P Parameter: Treatment Value: 10percent PEG vs. No Treatment
  misc_feature: MA Experiment ID: 20001247 Result: Down-regulated in Transcription
  misc_feature: MA Experiment 20001247 PARAMETER Experiment Name: At_Far-red-induction_P Parameter: Age (day) Value: 7
  misc_feature: MA Experiment 20001247 PARAMETER Experiment Name: At_Far-red-induction_P Parameter: Light Value: Far-red vs. White
  misc_feature: MA Experiment 20001247 PARAMETER Experiment Name: At_Far-red-induction_P Parameter: Organism Value: A. thaliana
  misc_feature: MA Experiment 20001247 PARAMETER Experiment Name: At_Far-red-induction_P Parameter: Plant Line Value: Columbia
  misc_feature: MA Experiment 20001247 PARAMETER Experiment Name: At_Far-red-induction_P Parameter: Timepoint (hr) Value: 1
  misc_feature: MA Experiment 20001247 PARAMETER Experiment Name: At_Far-red-induction_P Parameter: Tissue Value: Whole Plant
  misc_feature: MA Experiment ID: 20001556 Result: Down-regulated in Transcription
  misc_feature: MA Experiment 20001556 PARAMETER Experiment Name: At_Drought_Soil_Dry_P Parameter: Age (day) Value: 26
  misc_feature: MA Experiment 20001556 PARAMETER Experiment Name: At_Drought_Soil_Dry_P Parameter: Organism Value: A. thaliana
  misc_feature: MA Experiment 20001556 PARAMETER Experiment Name: At_Drought_Soil_Dry_P Parameter: Plant Line Value: WS
  misc_feature: MA Experiment 20001556 PARAMETER Experiment Name: At_Drought_Soil_Dry_P Parameter: Post Timepoint (hr) Value: None
  misc_feature: MA Experiment 20001556 PARAMETER Experiment Name: At_Drought_Soil_Dry_P Parameter: Post-Treatment Value: None
  misc_feature: MA Experiment 20001556 PARAMETER Experiment Name: At_Drought_Soil_Dry_P Parameter: Timepoint (day) Value: 12
  misc_feature: MA Experiment 20001556 PARAMETER Experiment Name: At_Drought_Soil_Dry_P Parameter: Treatment Value: Drought vs. No Drought
  misc_feature: MA Experiment ID: 20001558 Result: Down-regulated in Transcription
  misc_feature: MA Experiment 20001558 PARAMETER Experiment Name: At_Drought_Soil_Dry_P Parameter: Age (day) Value: 27
  misc_feature: MA Experiment 20001558 PARAMETER Experiment Name: At_Drought_Soil_Dry_P Parameter: Organism Value: A. thaliana
  misc_feature: MA Experiment 20001558 PARAMETER Experiment Name: At_Drought_Soil_Dry_P Parameter: Plant Line Value: WS
  misc_feature: MA Experiment 20001558 PARAMETER Experiment Name: At_Drought_Soil_Dry_P Parameter: Post Timepoint (hr) Value: 6
  misc_feature: MA Experiment 20001558 PARAMETER Experiment Name: At_Drought_Soil_Dry_P Parameter: Post-Treatment Value: Re-Water vs. No Drought
  misc_feature: MA Experiment 20001558 PARAMETER Experiment Name: At_Drought_Soil_Dry_P Parameter: Timepoint (day) Value: 13
  misc_feature: MA Experiment 20001558 PARAMETER Experiment Name: At_Drought_Soil_Dry_P Parameter: Treatment Value: Drought vs. No Drought
  misc_feature: MA Experiment ID: 20001559 Result: Down-regulated in Transcription
  misc_feature: MA Experiment 20001559 PARAMETER Experiment Name: At_Drought_Soil_Dry_P Parameter: Age (day) Value: 28
  misc_feature: MA Experiment 20001559 PARAMETER Experiment Name: At_Drought_Soil_Dry_P Parameter: Organism Value: A. thaliana
  misc_feature: MA Experiment 20001559 PARAMETER Experiment Name: At_Drought_Soil_Dry_P Parameter: Plant Line Value: WS
  misc_feature: MA Experiment 20001559 PARAMETER Experiment Name: At_Drought_Soil_Dry_P Parameter: Post Timepoint (hr) Value: 29
  misc_feature: MA Experiment 20001559 PARAMETER Experiment Name: At_Drought_Soil_Dry_P Parameter: Post-Treatment Value: Re-Water vs. No Drought
  misc_feature: MA Experiment 20001559 PARAMETER Experiment Name: At_Drought_Soil_Dry_P Parameter: Timepoint (day) Value: 14
  misc_feature: MA Experiment 20001559 PARAMETER Experiment Name: At_Drought_Soil_Dry_P Parameter: Treatment Value: Drought vs. No Drought
  misc_feature: MA Experiment ID: 20001910 Result: Down-regulated in Transcription
  misc_feature: MA Experiment 20001910 PARAMETER Experiment Name: At_Drought_Reproduction_P Parameter: Age (day) Value: 37
  misc_feature: MA Experiment 20001910 PARAMETER Experiment Name: At_Drought_Reproduction_P Parameter: Organism Value: A. thaliana
  misc_feature: MA Experiment 20001910 PARAMETER Experiment Name: At_Drought_Reproduction_P Parameter: Plant Line Value: WS
  misc_feature: MA Experiment 20001910 PARAMETER Experiment Name: At_Drought_Reproduction_P Parameter: Timepoint (day) Value: 7
  misc_feature: MA Experiment 20001910 PARAMETER Experiment Name: At_Drought_Reproduction_P Parameter: Tissue Value: Flowers
  misc_feature: MA Experiment 20001910 PARAMETER Experiment Name: At_Drought_Reproduction_P Parameter: Treatment Value: Drought vs. No Drought
aaaccaaacggtcaaacctcactcaccatgagacaccttagctcacctccatggcctctcctccttctcctcctcctctcttctttcacctccggcgaatcctctctgtccgcagaaaaaaacaaattgcacaccggtggtctcagtagacagagttttcctaaaggattcgtgtttggaaccgccacgtcagcttatcaagtcgaaggcgagactcatcaagacggtcgtggcccaagcatttgggatgccttcgtcaagattcctgggaagatcgccaagaatgccacggctgagataacagtggaccagtatcaccgttacaaggaagatgtggatttgatgaagaaactgaacttcgatgcttacagattttccatttcatggtccaggatattccctgagggaagtggtaaagtcaactggaaaggagttgcttattacaatagattgattgattacatggttcaaaaagggattacaccttatgctaatctgtaccactacgatcttccattggctttggaaaacaagtataaaggcttgcttggtagacaagtagtgaaagattttgcggattacgctgagttttgttacaagacatttggtgatagagtgaaaaattggatgacgttcaacgagccgcgtgtggtagctgctttaggttatgataatggtattttcgcaccgggtagatgctcaaaagcatttggaaattgcactgaaggaaactccgcgacagagccatacatagttactcatcaccttatcttggcccacgcagcagcagtccaaagataccgcaaatattaccaagcgaaacaaaagggaagggttgggatacttttagatttcgtttggtatgagccgcttactagaagtaaagcagataatcttgcagctcaaagagcaagagacttccatatcggatggtttattcacccattagtatatggagagtatccaaagacaatgcagaacattgtgaaagagaggcttccaaagttcacggagaaagaagtgaaaatggtgaaaggttccatagattttgtgggaataaaccaatacacgacttattacatgtccgaaccacatcccaccaccaaacctaaggatttgggttatcaacaagattggaatgtggaatttggctttgctaagttggggaagccaataggtccaagggcttactcgtcttggttatacaacgtaccatggggaatgtacaaggccttgatgtatatgaaggaacgttacggcaaccctactatgatcctctctgaaaacggtatggatgacccgggaaacgttactctagctcaaggactacatgacaccacgagaatcaagtattacaaagattacttaaccaaccttaagaaagctagggatgatggagccaatgtggttggatattttgcgtggtcattgctagataatttcgaatggttatcaggatatacttcaaggtttgggatcgtttatgttgattacaaaacattgaagaggtaccccaagatgtctgctcagtggtttaagcaacttctgaaacgaaacaacaaatgatctcaatgtatcaatgccgggtggatttagtttttaaaaaggttggaattgatgattgaagaaataatggggccggtttagtcactttgtttattataaggggggtgaattgtaacttgaactctctccttcttcagttctttgacttttcaacacaaataaaataaaagttt

SEQ ID NO: 28811 - protein, 521 aa, Arabidopsis thaliana
  peptide (1)..(521): Ceres Seq. ID no. 12324447
  misc_feature (49)..(521): Pfam Name: Glycosyl hydrolase family 1 Pfam Description: Glycosyl hydrolase family 1
  misc_feature (405)..(521): Homolog of NCBI NO: 12746303 NR Description: beta-glucosidase [Musa acuminata]
  misc_feature (36)..(388): Homolog of NCBI NO: 12746303 NR Description: beta-glucosidase [Musa acuminata]
  misc_feature (24)..(517): Homolog of NCBI NO: 22658440 NR Description: beta-glucosidase [Oryza sativa (japonica
  misc_feature (20)..(517): Homolog of NCBI NO: 18875458 NR Description: beta-glucosidase [Oryza sativa]
  misc_feature (46)..(519): Homolog of NCBI NO: 34899014 NR Description: putative non-cyanogenic beta-glucosidase
  misc_feature (44)..(521): Homolog of NCBI NO: 1362162 NR Description: beta-glucosidase BGQ60 precursor - barley
  misc_feature (14)..(518): Homolog of NCBI NO: 17226270 NR Description: beta-mannosidase enzyme [Lycopersicon esculentum]
  misc_feature (21)..(521): Homolog of NCBI NO: 9294062 NR Description: beta-glucosidase [Arabidopsis thaliana]
  misc_feature (21)..(521): Homolog of NCBI NO: 22331147 NR Description: glycosyl hydrolase family 1; protein id:
  misc_feature (10)..(521): Homolog of NCBI NO: 15229584 NR Description: glycosyl hydrolase family 1
KPNGQTSLTMRHLSSPPWPLLLLLLLSSFTSGESSLSAEKNKLHTGGLSRQSFPKGFVFGTATSAYQVEGETHQDGRGPSIWDAFVKIPGKIAKNATAEITVDQYHRYKEDVDLMKKLNFDAYRFSISWSRIFPEGSGKVNWKGVAYYNRLIDYMVQKGITPYANLYHYDLPLALENKYKGLLGRQVVKDFADYAEFCYKTFGDRVKNWMTFNEPRVVAALGYDNGIFAPGRCSKAFGNCTEGNSATEPYIVTHHLILAHAAAVQRYRKYYQAKQKGRVGILLDFVWYEPLTRSKADNLAAQRARDFHIGWFIHPLVYGEYPKTMQNIVKERLPKFTEKEVKMVKGSIDFVGINQYTTYYMSEPHPTTKPKDLGYQQDWNVEFGFAKLGKPIGPRAYSSWLYNVPWGMYKALMYMKERYGNPTMILSENGMDDPGNVTLAQGLHDTTRIKYYKDYLTNLKKARDDGANVVGYFAWSLLDNFEWLSGYTSRFGIVYVDYKTLKRYPKMSAQWFKQLLKRNNK

SEQ ID NO: 28812 - protein, 512 aa, Arabidopsis thaliana
  peptide (1)..(512): Ceres Seq. ID no. 12324448
  misc_feature (40)..(512): Pfam Name: Glycosyl hydrolase family 1 Pfam Description: Glycosyl hydrolase family 1
  misc_feature (396)..(512): Homolog of NCBI NO: 12746303 NR Description: beta-glucosidase [Musa acuminata]
  misc_feature (27)..(379): Homolog of NCBI NO: 12746303 NR Description: beta-glucosidase [Musa acuminata]
  misc_feature (15)..(508): Homolog of NCBI NO: 22658440 NR Description: beta-glucosidase [Oryza sativa (japonica
  misc_feature (11)..(508): Homolog of NCBI NO: 18875458 NR Description: beta-glucosidase [Oryza sativa]
  misc_feature (37)..(510): Homolog of NCBI NO: 34899014 NR Description: putative non-cyanogenic beta-glucosidase
  misc_feature (35)..(512): Homolog of NCBI NO: 1362162 NR Description: beta-glucosidase BGQ60 precursor - barley
  misc_feature (5)..(509): Homolog of NCBI NO: 17226270 NR Description: beta-mannosidase enzyme [Lycopersicon esculentum]
  misc_feature (12)..(512): Homolog of NCBI NO: 9294062 NR Description: beta-glucosidase [Arabidopsis thaliana]
  misc_feature (12)..(512): Homolog of NCBI NO: 22331147 NR Description: glycosyl hydrolase family 1; protein id:
  misc_feature (1)..(512): Homolog of NCBI NO: 15229584 NR Description: glycosyl hydrolase family 1
MRHLSSPPWPLLLLLLLSSFTSGESSLSAEKNKLHTGGLSRQSFPKGFVFGTATSAYQVEGETHQDGRGPSIWDAFVKIPGKIAKNATAEITVDQYHRYKEDVDLMKKLNFDAYRFSISWSRIFPEGSGKVNWKGVAYYNRLIDYMVQKGITPYANLYHYDLPLALENKYKGLLGRQVVKDFADYAEFCYKTFGDRVKNWMTFNEPRVVAALGYDNGIFAPGRCSKAFGNCTEGNSATEPYIVTHHLILAHAAAVQRYRKYYQAKQKGRVGILLDFVWYEPLTRSKADNLAAQRARDFHIGWFIHPLVYGEYPKTMQNIVKERLPKFTEKEVKMVKGSIDFVGINQYTTYYMSEPHPTTKPKDLGYQQDWNVEFGFAKLGKPIGPRAYSSWLYNVPWGMYKALMYMKERYGNPTMILSENGMDDPGNVTLAQGLHDTTRIKYYKDYLTNLKKARDDGANVVGYFAWSLLDNFEWLSGYTSRFGIVYVDYKTLKRYPKMSAQWFKQLLKRNNK

SEQ ID NO: 28813 - protein, 407 aa, Arabidopsis thaliana
  peptide (1)..(407): Ceres Seq. ID no. 12324449
  misc_feature (1)..(407): Pfam Name: Glycosyl hydrolase family 1 Pfam Description: Glycosyl hydrolase family 1
  misc_feature (291)..(407): Homolog of NCBI NO: 12746303 NR Description: beta-glucosidase [Musa acuminata]
  misc_feature (1)..(274): Homolog of NCBI NO: 12746303 NR Description: beta-glucosidase [Musa acuminata]
  misc_feature (1)..(403): Homolog of NCBI NO: 22658440 NR Description: beta-glucosidase [Oryza sativa (japonica
  misc_feature (1)..(403): Homolog of NCBI NO: 18875458 NR Description: beta-glucosidase [Oryza sativa]
  misc_feature (1)..(405): Homolog of NCBI NO: 34899014 NR Description: putative non-cyanogenic beta-glucosidase
  misc_feature (1)..(407): Homolog of NCBI NO: 1362162 NR Description: beta-glucosidase BGQ60 precursor - barley
  misc_feature (1)..(404): Homolog of NCBI NO: 17226270 NR Description: beta-mannosidase enzyme [Lycopersicon esculentum]
  misc_feature (1)..(407): Homolog of NCBI NO: 9294062 NR Description: beta-glucosidase [Arabidopsis thaliana]
  misc_feature (1)..(407): Homolog of NCBI NO: 22331147 NR Description: glycosyl hydrolase family 1; protein id:
  misc_feature (1)..(407): Homolog of NCBI NO: 15229584 NR Description: glycosyl hydrolase family 1
MKKLNFDAYRFSISWSRIFPEGSGKVNWKGVAYYNRLIDYMVQKGITPYANLYHYDLPLALENKYKGLLGRQVVKDFADYAEFCYKTFGDRVKNWMTFNEPRVVAALGYDNGIFAPGRCSKAFGNCTEGNSATEPYIVTHHLILAHAAAVQRYRKYYQAKQKGRVGILLDFVWYEPLTRSKADNLAAQRARDFHIGWFIHPLVYGEYPKTMQNIVKERLPKFTEKEVKMVKGSIDFVGINQYTTYYMSEPHPTTKPKDLGYQQDWNVEFGFAKLGKPIGPRAYSSWLYNVPWGMYKALMYMKERYGNPTMILSENGMDDPGNVTLAQGLHDTTRIKYYKDYLTNLKKARDDGANVVGYFAWSLLDNFEWLSGYTSRFGIVYVDYKTLKRYPKMSAQWFKQLLKRNNK

SEQ ID NO: 28814 - DNA, 1589 bp, Arabidopsis thaliana
  misc_feature (1)..(1589): Ceres Seq. ID no. 13497178
  misc_feature: MA Experiment ID: 108434 Result: Up-regulated in Transcription
  misc_feature: MA Experiment 108434 PARAMETER Experiment Name: At_Root_Tips_cDNA_P Parameter: Tissue Value: Root Tips
  misc_feature: MA Experiment ID: 108463 Result: Down-regulated in Transcription
  misc_feature: MA Experiment 108463 PARAMETER Experiment Name: At_Germinating_Seeds_cDNA_P Parameter: Age (day) Value: 3 vs. 0
  misc_feature: MA Experiment 108463 PARAMETER Experiment Name: At_Germinating_Seeds_cDNA_P Parameter: Tissue Value: Germinating Seeds
  misc_feature: MA Experiment ID: 108576 Result: Down-regulated in Transcription
  misc_feature: MA Experiment 108576 PARAMETER Experiment Name: At_42deg_Heat_cDNA_P Parameter: Temperature (deg C) Value: 42 vs. 22
  misc_feature: MA Experiment 108576 PARAMETER Experiment Name: At_42deg_Heat_cDNA_P Parameter: Timepoint (hr) Value: 1
  misc_feature: MA Experiment 108576 PARAMETER Experiment Name: At_42deg_Heat_cDNA_P Parameter: Tissue Value: Aerial
  misc_feature: MA Experiment ID: 108577 Result: Down-regulated in Transcription
  misc_feature: MA Experiment 108577 PARAMETER Experiment Name: At_42deg_Heat_cDNA_P Parameter: Temperature (deg C) Value: 42 vs. 22
  misc_feature: MA Experiment 108577 PARAMETER Experiment Name: At_42deg_Heat_cDNA_P Parameter: Timepoint (hr) Value: 6
  misc_feature: MA Experiment 108577 PARAMETER Experiment Name: At_42deg_Heat_cDNA_P Parameter: Tissue Value: Aerial
  misc_feature: MA Experiment ID: 108585 Result: Up-regulated in Transcription
  misc_feature: MA Experiment 108585 PARAMETER Experiment Name: At_5mM_NaNP_cDNA_P Parameter: Timepoint (hr) Value: 6
  misc_feature: MA Experiment 108585 PARAMETER Experiment Name: At_5mM_NaNP_cDNA_P Parameter: Tissue Value: Aerial
  misc_feature: MA Experiment 108585 PARAMETER Experiment Name: At_5mM_NaNP_cDNA_P Parameter: Treatment Value: null
  misc_feature: MA Experiment ID: 108668 Result: Down-regulated in Transcription
  misc_feature: MA Experiment 108668 PARAMETER Experiment Name: At_2mM_SA_cDNA_P Parameter: Plant Line Value: WS
  misc_feature: MA Experiment 108668 PARAMETER Experiment Name: At_2mM_SA_cDNA_P Parameter: Timepoint (hr) Value: 6
  misc_feature: MA Experiment 108668 PARAMETER Experiment Name: At_2mM_SA_cDNA_P Parameter: Treatment Value: 2mM SA vs. No Treatment
  misc_feature: MA Experiment ID: 20000069 Result: Down-regulated in Transcription
  misc_feature: MA Experiment 20000069 PARAMETER Experiment Name: At_100uM_ABA_Mutants_cDNA_P Parameter: Plant Line Value: CS23
  misc_feature: MA Experiment 20000069 PARAMETER Experiment Name: At_100uM_ABA_Mutants_cDNA_P Parameter: Timepoint (hr) Value: 6
  misc_feature: MA Experiment 20000069 PARAMETER Experiment Name: At_100uM_ABA_Mutants_cDNA_P Parameter: Tissue Value: Aerial
  misc_feature: MA Experiment 20000069 PARAMETER Experiment Name: At_100uM_ABA_Mutants_cDNA_P Parameter: Treatment Value: 100uM ABA vs. No Treatment
  misc_feature: MA Experiment ID: 20000071 Result: Down-regulated in Transcription
  misc_feature: MA Experiment 20000071 PARAMETER Experiment Name: At_100uM_ABA_Mutants_cDNA_P Parameter: Plant Line Value: CS8104
  misc_feature: MA Experiment 20000071 PARAMETER Experiment Name: At_100uM_ABA_Mutants_cDNA_P Parameter: Timepoint (hr) Value: 6
  misc_feature: MA Experiment 20000071 PARAMETER Experiment Name: At_100uM_ABA_Mutants_cDNA_P Parameter: Tissue Value: Aerial
  misc_feature: MA Experiment 20000071 PARAMETER Experiment Name: At_100uM_ABA_Mutants_cDNA_P Parameter: Treatment Value: 100uM ABA vs. No Treatment
  misc_feature: MA Experiment ID: 20000072 Result: Down-regulated in Transcription
  misc_feature: MA Experiment 20000072 PARAMETER Experiment Name: At_100uM_ABA_Mutants_cDNA_P Parameter: Plant Line Value: CS8105
  misc_feature: MA Experiment 20000072 PARAMETER Experiment Name: At_100uM_ABA_Mutants_cDNA_P Parameter: Timepoint (hr) Value: 6
  misc_feature: MA Experiment 20000072 PARAMETER Experiment Name: At_100uM_ABA_Mutants_cDNA_P Parameter: Tissue Value: Aerial
  misc_feature: MA Experiment 20000072 PARAMETER Experiment Name: At_100uM_ABA_Mutants_cDNA_P Parameter: Treatment Value: 100uM ABA vs. No Treatment
  misc_feature: MA Experiment ID: 20000086 Result: Down-regulated in Transcription
  misc_feature: MA Experiment 20000086 PARAMETER Experiment Name: At_100uM_ABA_Mutants_cDNA_P Parameter: Plant Line Value: CS22
  misc_feature: MA Experiment 20000086 PARAMETER Experiment Name: At_100uM_ABA_Mutants_cDNA_P Parameter: Timepoint (hr) Value: 6
  misc_feature: MA Experiment 20000086 PARAMETER Experiment Name: At_100uM_ABA_Mutants_cDNA_P Parameter: Tissue Value: Aerial
  misc_feature: MA Experiment 20000086 PARAMETER Experiment Name: At_100uM_ABA_Mutants_cDNA_P Parameter: Treatment Value: 100uM ABA vs. No Treatment
  misc_feature: MA Experiment ID: 20000087 Result: Down-regulated in Transcription
  misc_feature: MA Experiment 20000087 PARAMETER Experiment Name: At_100uM_ABA_Mutants_cDNA_P Parameter: Plant Line Value: WS
  misc_feature: MA Experiment 20000087 PARAMETER Experiment Name: At_100uM_ABA_Mutants_cDNA_P Parameter: Timepoint (hr) Value: 6
  misc_feature: MA Experiment 20000087 PARAMETER Experiment Name: At_100uM_ABA_Mutants_cDNA_P Parameter: Tissue Value: Aerial
  misc_feature: MA Experiment 20000087 PARAMETER Experiment Name: At_100uM_ABA_Mutants_cDNA_P Parameter: Treatment Value: 100uM ABA vs. No Treatment
  misc_feature: MA Experiment ID: 20000089 Result: Down-regulated in Transcription
  misc_feature: MA Experiment ID: 20000090 Result: Down-regulated in Transcription
  misc_feature: MA Experiment ID: 20000093 Result: Down-regulated in Transcription
  misc_feature: MA Experiment 20000093 PARAMETER Experiment Name: At_42deg_Heat_cDNA_P Parameter: Temperature (deg C) Value: 42 vs. 22
  misc_feature: MA Experiment 20000093 PARAMETER Experiment Name: At_42deg_Heat_cDNA_P Parameter: Timepoint (hr) Value: 0.5
  misc_feature: MA Experiment 20000093 PARAMETER Experiment Name: At_42deg_Heat_cDNA_P Parameter: Tissue Value: Aerial
  misc_feature: MA Experiment ID: 20000111 Result: Down-regulated in Transcription
  misc_feature: MA Experiment 20000111 PARAMETER Experiment Name: At_42deg_Heat_cDNA_P Parameter: Temperature (deg C) Value: 42 vs. 22
  misc_feature: MA Experiment 20000111 PARAMETER Experiment Name: At_42deg_Heat_cDNA_P Parameter: Timepoint (hr) Value: 6
  misc_feature: MA Experiment 20000111 PARAMETER Experiment Name: At_42deg_Heat_cDNA_P Parameter: Tissue Value: Aerial
  misc_feature: MA Experiment ID: 20000112 Result: Down-regulated in Transcription
  misc_feature: MA Experiment 20000112 PARAMETER Experiment Name: At_42deg_Heat_cDNA_P Parameter: Temperature (deg C) Value: 42 vs. 22
  misc_feature: MA Experiment 20000112 PARAMETER Experiment Name: At_42deg_Heat_cDNA_P Parameter: Timepoint (hr) Value: 2
  misc_feature: MA Experiment 20000112 PARAMETER Experiment Name: At_42deg_Heat_cDNA_P Parameter: Tissue Value: Aerial
  misc_feature: MA Experiment ID: 20000113 Result: Down-regulated in Transcription
  misc_feature: MA Experiment 20000113 PARAMETER Experiment Name: At_42deg_Heat_cDNA_P Parameter: Temperature (deg C) Value: 42 vs. 22
  misc_feature: MA Experiment 20000113 PARAMETER Experiment Name: At_42deg_Heat_cDNA_P Parameter: Timepoint (hr) Value: 8
  misc_feature: MA Experiment 20000113 PARAMETER Experiment Name: At_42deg_Heat_cDNA_P Parameter: Tissue Value: Aerial
  misc_feature: MA Experiment ID: 20000117 Result: Down-regulated in Transcription
  misc_feature: MA Experiment 20000117 PARAMETER Experiment Name: At_100uM_ABA_Mutants_cDNA_P Parameter: Plant Line Value: Columbia
  misc_feature: MA Experiment 20000117 PARAMETER Experiment Name: At_100uM_ABA_Mutants_cDNA_P Parameter: Timepoint (hr) Value: 6
  misc_feature: MA Experiment 20000117 PARAMETER Experiment Name: At_100uM_ABA_Mutants_cDNA_P Parameter: Tissue Value: Aerial
  misc_feature: MA Experiment 20000117 PARAMETER Experiment Name: At_100uM_ABA_Mutants_cDNA_P Parameter: Treatment Value: 100uM ABA vs. No Treatment
  misc_feature: MA Experiment ID: 20000144 Result: Down-regulated in Transcription
  misc_feature: MA Experiment 20000144 PARAMETER Experiment Name: At_42deg_Heat_cDNA_P Parameter: Temperature (deg C) Value: 42 vs. 22
  misc_feature: MA Experiment 20000144 PARAMETER Experiment Name: At_42deg_Heat_cDNA_P Parameter: Timepoint (hr) Value: 1
  misc_feature: MA Experiment 20000144 PARAMETER Experiment Name: At_42deg_Heat_cDNA_P Parameter: Tissue Value: Aerial
  misc_feature: MA Experiment ID: 20000171 Result: Down-regulated in Transcription
  misc_feature: MA Experiment 20000171 PARAMETER Experiment Name: At_42deg_Heat_P Parameter: Age (day) Value: 14
  misc_feature: MA Experiment 20000171 PARAMETER Experiment Name: At_42deg_Heat_P Parameter: Organism Value: A. thaliana
  misc_feature: MA Experiment 20000171 PARAMETER Experiment Name: At_42deg_Heat_P Parameter: Plant Line Value: WS
  misc_feature: MA Experiment 20000171 PARAMETER Experiment Name: At_42deg_Heat_P Parameter: Temperature (deg C) Value: 42 vs. 22
  misc_feature: MA Experiment 20000171 PARAMETER Experiment Name: At_42deg_Heat_P Parameter: Timepoint (hr) Value: 1
  misc_feature: MA Experiment 20000171 PARAMETER Experiment Name: At_42deg_Heat_P Parameter: Tissue Value: Aerial
  misc_feature: MA Experiment ID: 20000173 Result: Down-regulated in Transcription
  misc_feature: MA Experiment 20000173 PARAMETER Experiment Name: At_42deg_Heat_P Parameter: Age (day) Value: 14
  misc_feature: MA Experiment 20000173 PARAMETER Experiment Name: At_42deg_Heat_P Parameter: Organism Value: A. thaliana
  misc_feature: MA Experiment 20000173 PARAMETER Experiment Name: At_42deg_Heat_P Parameter: Plant Line Value: WS
  misc_feature: MA Experiment 20000173 PARAMETER Experiment Name: At_42deg_Heat_P Parameter: Temperature (deg C) Value: 42 vs. 22
  misc_feature: MA Experiment 20000173 PARAMETER Experiment Name: At_42deg_Heat_P Parameter: Timepoint (hr) Value: 6
  misc_feature: MA Experiment 20000173 PARAMETER Experiment Name: At_42deg_Heat_P Parameter: Tissue Value: Aerial
  misc_feature: MA Experiment ID: 20000184 Result: Up-regulated in Transcription
  misc_feature: MA Experiment 20000184 PARAMETER Experiment Name: At_Shoots__P Parameter: Age (day) Value: 7
  misc_feature: MA Experiment 20000184 PARAMETER Experiment Name: At_Shoots__P Parameter: Tissue Value: Shoots vs. Whole Plant
  misc_feature: MA Experiment ID: 20000185 Result: Down-regulated in Transcription
  misc_feature: MA Experiment 20000185 PARAMETER Experiment Name: At_Roots__P Parameter: Age (day) Value: 7 vs. 21
  misc_feature: MA Experiment 20000185 PARAMETER Experiment Name: At_Roots__P Parameter: Organism Value: A. thaliana
  misc_feature: MA Experiment 20000185 PARAMETER Experiment Name: At_Roots__P Parameter: Tissue Value: Roots vs. Whole Plant
  misc_feature: MA Experiment ID: 20000234 Result: Up-regulated in Transcription
  misc_feature: MA Experiment 20000234 PARAMETER Experiment Name: At_Siliques_P Parameter: Age (day) Value: 21
  misc_feature: MA Experiment 20000234 PARAMETER Experiment Name: At_Siliques_P Parameter: Organism Value: A. thaliana
  misc_feature: MA Experiment 20000234 PARAMETER Experiment Name: At_Siliques_P Parameter: Plant Line Value: WS
  misc_feature: MA Experiment 20000234 PARAMETER Experiment Name: At_Siliques_P Parameter: Tissue Value: Less Than 5mm Siliques vs. Whole Plant
  misc_feature: MA Experiment ID: 20000235 Result: Up-regulated in Transcription
  misc_feature: MA Experiment 20000235 PARAMETER Experiment Name: At_Siliques_P Parameter: Age (day) Value: 21
  misc_feature: MA Experiment 20000235 PARAMETER Experiment Name: At_Siliques_P Parameter: Organism Value: A. thaliana
  misc_feature: MA Experiment 20000235 PARAMETER Experiment Name: At_Siliques_P Parameter: Plant Line Value: WS
  misc_feature: MA Experiment 20000235 PARAMETER Experiment Name: At_Siliques_P Parameter: Tissue Value: 5-10mm Siliques vs. Whole Plant
  misc_feature: MA Experiment ID: 20000437 Result: Down-regulated in Transcription
  misc_feature: MA Experiment 20000437 PARAMETER Experiment Name: At_Drought_P Parameter: Age (day) Value: 8
  misc_feature: MA Experiment 20000437 PARAMETER Experiment Name: At_Drought_P Parameter: Organism Value: A. thaliana
  misc_feature: MA Experiment 20000437 PARAMETER Experiment Name: At_Drought_P Parameter: Plant Line Value: WS
  misc_feature: MA Experiment 20000437 PARAMETER Experiment Name: At_Drought_P Parameter: Timepoint (hr) Value: 24
  misc_feature: MA Experiment 20000437 PARAMETER Experiment Name: At_Drought_P Parameter: Tissue Value: Whole Plant
  misc_feature: MA Experiment 20000437 PARAMETER Experiment Name: At_Drought_P Parameter: Treatment Value: Drought vs. No Drought
  misc_feature: MA Experiment ID: 20000439 Result: Down-regulated in Transcription
  misc_feature: MA Experiment 20000439 PARAMETER Experiment Name: At_Roots__P Parameter: Age (day) Value: 14 vs. 21
  misc_feature: MA Experiment 20000439 PARAMETER Experiment Name: At_Roots__P Parameter: Organism Value: A. thaliana
  misc_feature: MA Experiment 20000439 PARAMETER Experiment Name: At_Roots__P Parameter: Tissue Value: Roots vs. Whole Plant
  misc_feature: MA Experiment ID: 20001247 Result: Up-regulated in Transcription
  misc_feature: MA Experiment 20001247 PARAMETER Experiment Name: At_Far-red-induction_P Parameter: Age (day) Value: 7
  misc_feature: MA Experiment 20001247 PARAMETER Experiment Name: At_Far-red-induction_P Parameter: Light Value: Far-red vs. White
  misc_feature: MA Experiment 20001247 PARAMETER Experiment Name: At_Far-red-induction_P Parameter: Organism Value: A. thaliana
  misc_feature: MA Experiment 20001247 PARAMETER Experiment Name: At_Far-red-induction_P Parameter: Plant Line Value: Columbia
  misc_feature: MA Experiment 20001247 PARAMETER Experiment Name: At_Far-red-induction_P Parameter: Timepoint (hr) Value: 1
  misc_feature: MA Experiment 20001247 PARAMETER Experiment Name: At_Far-red-induction_P Parameter: Tissue Value: Whole Plant
  misc_feature: MA Experiment ID: 20001905 Result: Down-regulated in Transcription
  misc_feature: MA Experiment 20001905 PARAMETER Experiment Name: At_Drought_Reproduction_P Parameter: Age (day) Value: 40
  misc_feature: MA Experiment 20001905 PARAMETER Experiment Name: At_Drought_Reproduction_P Parameter: Organism Value: A. thaliana
  misc_feature: MA Experiment 20001905 PARAMETER Experiment Name: At_Drought_Reproduction_P Parameter: Plant Line Value: WS
  misc_feature: MA Experiment 20001905 PARAMETER Experiment Name: At_Drought_Reproduction_P Parameter: Timepoint (day) Value: 10
  misc_feature: MA Experiment 20001905 PARAMETER Experiment Name: At_Drought_Reproduction_P Parameter: Tissue Value: Rosettes
  misc_feature: MA Experiment 20001905 PARAMETER Experiment Name: At_Drought_Reproduction_P Parameter: Treatment Value: Drought vs. No Drought
  misc_feature: MA Experiment ID: 20001911 Result: Down-regulated in Transcription
  misc_feature: MA Experiment 20001911 PARAMETER Experiment Name: At_Drought_Reproduction_P Parameter: Age (day) Value: 40
  misc_feature: MA Experiment 20001911 PARAMETER Experiment Name: At_Drought_Reproduction_P Parameter: Organism Value: A. thaliana
  misc_feature: MA Experiment 20001911 PARAMETER Experiment Name: At_Drought_Reproduction_P Parameter: Plant Line Value: WS
  misc_feature: MA Experiment 20001911 PARAMETER Experiment Name: At_Drought_Reproduction_P Parameter: Timepoint (day) Value: 10
  misc_feature: MA Experiment 20001911 PARAMETER Experiment Name: At_Drought_Reproduction_P Parameter: Tissue Value: Flowers
  misc_feature: MA Experiment 20001911 PARAMETER Experiment Name: At_Drought_Reproduction_P Parameter: Treatment Value: Drought vs. No Drought
ctctctctctctctctctcacttcatctatggcttcttcttctctgcagtctctcttctctctgttttgccttgctctgttctctcttcctctcatcgtctcctccatcggcatcaactatgggcaggtcgctaacaaccttcctccccctaaaaacgtcatccctctcctcaagtctgtgggagctacaaaagtcaagctctatgacgccgatccacaagccctacgtgccttcgccggctccggcttcgagctcaccgtggccctcggtaacgagtacctggctcagatgagcgaccctattaaagcccaaggctgggtgaaggagaacgtccaagcttacctcccaaacaccaagatcgtggccatcgtagtgggaaacgaagtcctcacctcaaaccagtcagccctcacggcagccctcttcccggctatgcaaagcatccacggtgctctggtggattgtggcctaaacaagcagatctttgtgacgacggctcactcactagccatcttggatgtatcctaccctccctcggccacttccttccgccgcgacctcctcggctccctcactcccatcttggacttccacgtcaagactggctcaccaatcctcatcaacgcctaccctttcttcgcctacgaagaaaaccccaaacacgtttctctcgacttcgtactcttccaaccaaatcaaggcttcaccgatcctggctctaatttccactacgacaacatgctcttcgctcaggtcgacgcagtctatcacgctcttgacgctgtcggcatcagctacaagaaagttcccattgtcgtctccgagaccggatggccttccaacggtgacccgcaagaagtcggagccacctgcgacaatgctcgcaagtacaatgggaatctgatcaagatgatgatgagcaagaagatgaggacgcctatacgacctgagtgcgatctcaccatcttcgtctttgctctctttaacgagaacatgaagcctggaccaacctccgagaggaactacggtctcttcaaccctgacggaactccggtttactcacttgggatcaagacctcttccactcatagtagtggtagtggtagcagcaactccactggtggtagtagcagtggcggtggcggtaacactggtggctcttccagcggtggtggcatctatcagccagtcacgggtaacccatcaccggattacatgtccatttcctccgccgggggaaaaggcagattcgttgagtgtgtgttgttcttcttcttgctttgcatcatcaagcttcggttgtaaaagcttctccactagatctcgtcggctttgtacttttactcggttgatgacgtgatatagcccccaaatttaatttaattagttttgtgttggtgttttggtcggaggatgatttaggagacataccatctttgttgtgccgacctcctctccaactctttttttttttccttttccattctcctttttcttgtttaagcatagattatttaaataatgaatcttagttgattagatttttctaaagaagatgatgattttcgataattgtataacttgaagg

SEQ ID NO: 28815 - protein, 434 aa, Arabidopsis thaliana
  peptide (1)..(434): Ceres Seq. ID no. 13497179
  misc_feature (36)..(357): Pfam Name: Glycosyl hydrolases family 17 Pfam Description: Glycosyl hydrolases family 17
  misc_feature (12)..(366): Homolog of NCBI NO: 34908492 NR Description: putative beta-1,3-glucanase
  misc_feature (35)..(375): Homolog of NCBI NO: 38346337 NR Description: OSJNBa0073L04.8 [Oryza sativa (japonica
  misc_feature (10)..(358): Homolog of NCBI NO: 25316425 NR Description: probable beta-1,3-glucanase [imported] -
  misc_feature (10)..(358): Homolog of NCBI NO: 18401444 NR Description: glycosyl hydrolase family 17 [Arabidopsis
  misc_feature (34)..(394): Homolog of NCBI NO: 6006371 NR Description: Similar to hypothetical protein - potato (S31196)
  misc_feature (36)..(408): Homolog of NCBI NO: 37531294 NR Description: putative beta-1,3-glucanase
  misc_feature (20)..(386): Homolog of NCBI NO: 419789 NR Description: hypothetical protein - potato
  misc_feature (10)..(426): Homolog of NCBI NO: 30692765 NR Description: glycosyl hydrolase family 17 [Arabidopsis
  misc_feature (10)..(430): Homolog of NCBI NO: 25316443 NR Description: CDS protein F9L11.6 [imported] - Arabidopsis
  misc_feature (10)..(434): Homolog of NCBI NO: 15238298 NR Description: glycosyl hydrolase family 17 [Arabidopsis
SLSLSLTSSMASSSLQSLFSLFCLALFSLPLIVSSIGINYGQVANNLPPPKNVIPLLKSVGATKVKLYDADPQALRAFAGSGFELTVALGNEYLAQMSDPIKAQGWVKENVQAYLPNTKIVAIVVGNEVLTSNQSALTAALFPAMQSIHGALVDCGLNKQIFVTTAHSLAILDVSYPPSATSFRRDLLGSLTPILDFHVKTGSPILINAYPFFAYEENPKHVSLDFVLFQPNQGFTDPGSNFHYDNMLFAQVDAVYHALDAVGISYKKVPIVVSETGWPSNGDPQEVGATCDNARKYNGNLIKMMMSKKMRTPIRPECDLTIFVFALFNENMKPGPTSERNYGLFNPDGTPVYSLGIKTSSTHSSGSGSSNSTGGSSSGGGGNTGGSSSGGGIYQPVTGNPSPDYMSISSAGGKGRFVECVLFFFLLCIIKLRL

SEQ ID NO: 28816 - protein, 425 aa, Arabidopsis thaliana
  peptide (1)..(425): Ceres Seq. ID no. 13497180
  misc_feature (27)..(348): Pfam Name: Glycosyl hydrolases family 17 Pfam Description: Glycosyl hydrolases family 17
  misc_feature (3)..(357): Homolog of NCBI NO: 34908492 NR Description: putative beta-1,3-glucanase
  misc_feature (26)..(366): Homolog of NCBI NO: 38346337 NR Description: OSJNBa0073L04.8 [Oryza sativa (japonica
  misc_feature (1)..(349): Homolog of NCBI NO: 25316425 NR Description: probable beta-1,3-glucanase [imported] -
  misc_feature (1)..(349): Homolog of NCBI NO: 18401444 NR Description: glycosyl hydrolase family 17 [Arabidopsis
  misc_feature (25)..(385): Homolog of NCBI NO: 6006371 NR Description: Similar to hypothetical protein - potato (S31196)
  misc_feature (27)..(399): Homolog of NCBI NO: 37531294 NR Description: putative beta-1,3-glucanase
  misc_feature (11)..(377): Homolog of NCBI NO: 419789 NR Description: hypothetical protein - potato
  misc_feature (1)..(417): Homolog of NCBI NO: 30692765 NR Description: glycosyl hydrolase family 17 [Arabidopsis
  misc_feature (1)..(421): Homolog of NCBI NO: 25316443 NR Description: CDS protein F9L11.6 [imported] - Arabidopsis
  misc_feature (1)..(425): Homolog of NCBI NO: 15238298 NR Description: glycosyl hydrolase family 17 [Arabidopsis
MASSSLQSLFSLFCLALFSLPLIVSSIGINYGQVANNLPPPKNVIPLLKSVGATKVKLYDADPQALRAFAGSGFELTVALGNEYLAQMSDPIKAQGWVKENVQAYLPNTKIVAIVVGNEVLTSNQSALTAALFPAMQSIHGALVDCGLNKQIFVTTAHSLAILDVSYPPSATSFRRDLLGSLTPILDFHVKTGSPILINAYPFFAYEENPKHVSLDFVLFQPNQGFTDPGSNFHYDNMLFAQVDAVYHALDAVGISYKKVPIVVSETGWPSNGDPQEVGATCDNARKYNGNLIKMMMSKKMRTPIRPECDLTIFVFALFNENMKPGPTSERNYGLFNPDGTPVYSLGIKTSSTHSSGSGSSNSTGGSSSGGGGNTGGSSSGGGIYQPVTGNPSPDYMSISSAGGKGRFVECVLFFFLLCIIKLRL

SEQ ID NO: 28817 - protein, 338 aa, Arabidopsis thaliana
  peptide (1)..(338): Ceres Seq. ID no. 13497181
  misc_feature (1)..(261): Pfam Name: Glycosyl hydrolases family 17 Pfam Description: Glycosyl hydrolases family 17
  misc_feature (1)..(270): Homolog of NCBI NO: 34908492 NR Description: putative beta-1,3-glucanase
  misc_feature (1)..(279): Homolog of NCBI NO: 38346337 NR Description: OSJNBa0073L04.8 [Oryza sativa (japonica
  misc_feature (1)..(262): Homolog of NCBI NO: 25316425 NR Description: probable beta-1,3-glucanase [imported] -
  misc_feature (1)..(262): Homolog of NCBI NO: 18401444 NR Description: glycosyl hydrolase family 17 [Arabidopsis
  misc_feature (1)..(298): Homolog of NCBI NO: 6006371 NR Description: Similar to hypothetical protein - potato (S31196)
  misc_feature (1)..(312): Homolog of NCBI NO: 37531294 NR Description: putative beta-1,3-glucanase
  misc_feature (1)..(290): Homolog of NCBI NO: 419789 NR Description: hypothetical protein - potato
  misc_feature (1)..(330): Homolog of NCBI NO: 30692765 NR Description: glycosyl hydrolase family 17 [Arabidopsis
  misc_feature (1)..(334): Homolog of NCBI NO: 25316443 NR Description: CDS protein F9L11.6 [imported] - Arabidopsis
  misc_feature (1)..(338): Homolog of NCBI NO: 15238298 NR Description: glycosyl hydrolase family 17 [Arabidopsis
MSDPIKAQGWVKENVQAYLPNTKIVAIVVGNEVLTSNQSALTAALFPAMQSIHGALVDCGLNKQIFVTTAHSLAILDVSYPPSATSFRRDLLGSLTPILDFHVKTGSPILINAYPFFAYEENPKHVSLDFVLFQPNQGFTDPGSNFHYDNMLFAQVDAVYHALDAVGISYKKVPIVVSETGWPSNGDPQEVGATCDNARKYNGNLIKMMMSKKMRTPIRPECDLTIFVFALFNENMKPGPTSERNYGLFNPDGTPVYSLGIKTSSTHSSGSGSSNSTGGSSSGGGGNTGGSSSGGGIYQPVTGNPSPDYMSISSAGGKGRFVECVLFFFLLCIIKLRL

SEQ ID NO: 28818 - DNA, 1132 bp, Arabidopsis thaliana
  misc_feature (1)..(1132): Ceres Seq. ID no. 12371695
  misc_feature: MA Experiment ID: 108434 Result: Down-regulated in Transcription
  misc_feature: MA Experiment 108434 PARAMETER Experiment Name: At_Root_Tips_cDNA_P Parameter: Tissue Value: Root Tips
  misc_feature: MA Experiment ID: 108462 Result: Up-regulated in Transcription
  misc_feature: MA Experiment 108462 PARAMETER Experiment Name: At_Germinating_Seeds_cDNA_P Parameter: Age (day) Value: 2 vs. 0
  misc_feature: MA Experiment 108462 PARAMETER Experiment Name: At_Germinating_Seeds_cDNA_P Parameter: Tissue Value: Germinating Seeds
  misc_feature: MA Experiment ID: 108463 Result: Up-regulated in Transcription
  misc_feature: MA Experiment 108463 PARAMETER Experiment Name: At_Germinating_Seeds_cDNA_P Parameter: Age (day) Value: 3 vs. 0
  misc_feature: MA Experiment 108463 PARAMETER Experiment Name: At_Germinating_Seeds_cDNA_P Parameter: Tissue Value: Germinating Seeds
  misc_feature: MA Experiment ID: 108464 Result: Up-regulated in Transcription
  misc_feature: MA Experiment 108464 PARAMETER Experiment Name: At_Germinating_Seeds_cDNA_P Parameter: Age (day) Value: 4 vs. 0
  misc_feature: MA Experiment 108464 PARAMETER Experiment Name: At_Germinating_Seeds_cDNA_P Parameter: Tissue Value: Germinating Seeds
  misc_feature: MA Experiment ID: 108569 Result: Up-regulated in Transcription
  misc_feature: MA Experiment 108569 PARAMETER Experiment Name: At_0.001%_MeJA__cDNA_P Parameter: Timepoint (hr) Value: 6
  misc_feature: MA Experiment 108569 PARAMETER Experiment Name: At_0.001%_MeJA__cDNA_P Parameter: Tissue Value: Aerial
  misc_feature: MA Experiment 108569 PARAMETER Experiment Name: At_0.001%_MeJA__cDNA_P Parameter: Treatment Value: 0.001% MeJA vs. No Treatment
  misc_feature: MA Experiment ID: 108572 Result: Up-regulated in Transcription
  misc_feature: MA Experiment 108572 PARAMETER Experiment Name: At_Drought_cDNA_P Parameter: Timepoint (hr) Value: 1
  misc_feature: MA Experiment 108572 PARAMETER Experiment Name: At_Drought_cDNA_P Parameter: Tissue Value: Aerial
  misc_feature: MA Experiment 108572 PARAMETER Experiment Name: At_Drought_cDNA_P Parameter: Treatment Value: Drought vs. No Drought
  misc_feature: MA Experiment ID: 108573 Result: Up-regulated in Transcription
  misc_feature: MA Experiment 108573 PARAMETER Experiment Name: At_Drought_cDNA_P Parameter: Timepoint (hr) Value: 6
  misc_feature: MA Experiment 108573 PARAMETER Experiment Name: At_Drought_cDNA_P Parameter: Tissue Value: Aerial
  misc_feature: MA Experiment 108573 PARAMETER Experiment Name: At_Drought_cDNA_P Parameter: Treatment Value: Drought vs. No Drought
  misc_feature: MA Experiment ID: 108574 Result: Up-regulated in Transcription
  misc_feature: MA Experiment 108574 PARAMETER Experiment Name: At_Wounding__cDNA_P Parameter: Timepoint (hr) Value: 1
  misc_feature: MA Experiment 108574 PARAMETER Experiment Name: At_Wounding__cDNA_P Parameter: Tissue Value: Aerial
  misc_feature: MA Experiment 108574 PARAMETER Experiment Name: At_Wounding__cDNA_P Parameter: Treatment Value: Wounding vs. No Wounding
  misc_feature: MA Experiment ID: 108576 Result: Up-regulated in Transcription
  misc_feature: MA Experiment 108576 PARAMETER Experiment Name: At_42deg_Heat_cDNA_P Parameter: Temperature (deg C) Value: 42 vs. 22
  misc_feature: MA Experiment 108576 PARAMETER Experiment Name: At_42deg_Heat_cDNA_P Parameter: Timepoint (hr) Value: 1
  misc_feature: MA Experiment 108576 PARAMETER Experiment Name: At_42deg_Heat_cDNA_P Parameter: Tissue Value: Aerial
  misc_feature: MA Experiment ID: 108577 Result: Up-regulated in Transcription
  misc_feature: MA Experiment 108577 PARAMETER Experiment Name: At_42deg_Heat_cDNA_P Parameter: Temperature (deg C) Value: 42 vs. 22
  misc_feature: MA Experiment 108577 PARAMETER Experiment Name: At_42deg_Heat_cDNA_P Parameter: Timepoint (hr) Value: 6
  misc_feature: MA Experiment 108577 PARAMETER Experiment Name: At_42deg_Heat_cDNA_P Parameter: Tissue Value: Aerial
  misc_feature: MA Experiment ID: 108579 Result: Down-regulated in Transcription
  misc_feature: MA Experiment 108579 PARAMETER Experiment Name: At_4deg_Cold_cDNA_P Parameter: Temperature (deg C) Value: 4 vs. 22
  misc_feature: MA Experiment 108579 PARAMETER Experiment Name: At_4deg_Cold_cDNA_P Parameter: Timepoint (hr) Value: 6
  misc_feature: MA Experiment 108579 PARAMETER Experiment Name: At_4deg_Cold_cDNA_P Parameter: Tissue Value: Aerial
  misc_feature: MA Experiment ID: 108585 Result: Up-regulated in Transcription
  misc_feature: MA Experiment 108585 PARAMETER Experiment Name: At_5mM_NaNP_cDNA_P Parameter: Timepoint (hr) Value: 6
  misc_feature: MA Experiment 108585 PARAMETER Experiment Name: At_5mM_NaNP_cDNA_P Parameter: Tissue Value: Aerial
  misc_feature: MA Experiment 108585 PARAMETER Experiment Name: At_5mM_NaNP_cDNA_P Parameter: Treatment Value: null
  misc_feature: MA Experiment ID: 108594 Result: Down-regulated in Transcription
  misc_feature: MA Experiment 108594 PARAMETER Experiment Name: At_Ler-rhl_Root_cDNA_P Parameter: Plant Line Value: null
  misc_feature: MA Experiment ID: 20000086 Result: Down-regulated in Transcription
  misc_feature: MA Experiment 20000086 PARAMETER Experiment Name: At_100uM_ABA_Mutants_cDNA_P Parameter: Plant Line Value: CS22
  misc_feature: MA Experiment 20000086 PARAMETER Experiment Name: At_100uM_ABA_Mutants_cDNA_P Parameter: Timepoint (hr) Value: 6
  misc_feature: MA Experiment 20000086 PARAMETER Experiment Name: At_100uM_ABA_Mutants_cDNA_P Parameter: Tissue Value: Aerial
  misc_feature: MA Experiment 20000086 PARAMETER Experiment Name: At_100uM_ABA_Mutants_cDNA_P Parameter: Treatment Value: 100uM ABA vs. No Treatment
  misc_feature: MA Experiment ID: 20000087 Result: Down-regulated in Transcription
  misc_feature: MA Experiment 20000087 PARAMETER Experiment Name: At_100uM_ABA_Mutants_cDNA_P Parameter: Plant Line Value: WS
  misc_feature: MA Experiment 20000087 PARAMETER Experiment Name: At_100uM_ABA_Mutants_cDNA_P Parameter: Timepoint (hr) Value: 6
  misc_feature: MA Experiment 20000087 PARAMETER Experiment Name: At_100uM_ABA_Mutants_cDNA_P Parameter: Tissue Value: Aerial
  misc_feature: MA Experiment 20000087 PARAMETER Experiment Name: At_100uM_ABA_Mutants_cDNA_P Parameter: Treatment Value: 100uM ABA vs. No Treatment
  misc_feature: MA Experiment ID: 20000089 Result: Down-regulated in Transcription
  misc_feature: MA Experiment ID: 20000090 Result: Down-regulated in Transcription
  misc_feature: MA Experiment ID: 20000093 Result: Up-regulated in Transcription
  misc_feature: MA Experiment 20000093 PARAMETER Experiment Name: At_42deg_Heat_cDNA_P Parameter: Temperature (deg C) Value: 42 vs. 22
  misc_feature: MA Experiment 20000093 PARAMETER Experiment Name: At_42deg_Heat_cDNA_P Parameter: Timepoint (hr) Value: 0.5
  misc_feature: MA Experiment 20000093 PARAMETER Experiment Name: At_42deg_Heat_cDNA_P Parameter: Tissue Value: Aerial
  misc_feature: MA Experiment ID: 20000111 Result: Up-regulated in Transcription
  misc_feature: MA Experiment 20000111 PARAMETER Experiment Name: At_42deg_Heat_cDNA_P Parameter: Temperature (deg C) Value: 42 vs. 22
  misc_feature: MA Experiment 20000111 PARAMETER Experiment Name: At_42deg_Heat_cDNA_P Parameter: Timepoint (hr) Value: 6
  misc_feature: MA Experiment 20000111 PARAMETER Experiment Name: At_42deg_Heat_cDNA_P Parameter: Tissue Value: Aerial
  misc_feature: MA Experiment ID: 20000113 Result: Up-regulated in Transcription
  misc_feature: MA Experiment 20000113 PARAMETER Experiment Name: At_42deg_Heat_cDNA_P Parameter: Temperature (deg C) Value: 42 vs. 22
  misc_feature: MA Experiment 20000113 PARAMETER Experiment Name: At_42deg_Heat_cDNA_P Parameter: Timepoint (hr) Value: 8
  misc_feature: MA Experiment 20000113 PARAMETER Experiment Name: At_42deg_Heat_cDNA_P Parameter: Tissue Value: Aerial
  misc_feature: MA Experiment ID: 20000166 Result: Up-regulated in Transcription
  misc_feature: MA Experiment 20000166 PARAMETER Experiment Name: At_100uM_ABA_P Parameter: Age (day) Value: 14
  misc_feature: MA Experiment 20000166 PARAMETER Experiment Name: At_100uM_ABA_P Parameter: Organism Value: A. thaliana
  misc_feature: MA Experiment 20000166 PARAMETER Experiment Name: At_100uM_ABA_P Parameter: Plant Line Value: WS
  misc_feature: MA Experiment 20000166 PARAMETER Experiment Name: At_100uM_ABA_P Parameter: Timepoint (hr) Value: 1
  misc_feature: MA Experiment 20000166 PARAMETER Experiment Name: At_100uM_ABA_P Parameter: Tissue Value: Aerial
  misc_feature: MA Experiment 20000166 PARAMETER Experiment Name: At_100uM_ABA_P Parameter: Treatment Value: 100uM ABA vs. No Treatment
  misc_feature: MA Experiment ID: 20000171 Result: Up-regulated in Transcription
  misc_feature: MA Experiment 20000171 PARAMETER Experiment Name: At_42deg_Heat_P Parameter: Age (day) Value: 14
  misc_feature: MA Experiment 20000171 PARAMETER Experiment Name: At_42deg_Heat_P Parameter: Organism Value: A. thaliana
  misc_feature: MA Experiment 20000171 PARAMETER Experiment Name: At_42deg_Heat_P Parameter: Plant Line Value: WS
  misc_feature: MA Experiment 20000171 PARAMETER Experiment Name: At_42deg_Heat_P Parameter: Temperature (deg C) Value: 42 vs. 22
  misc_feature: MA Experiment 20000171 PARAMETER Experiment Name: At_42deg_Heat_P Parameter: Timepoint (hr) Value: 1
  misc_feature: MA Experiment 20000171 PARAMETER Experiment Name: At_42deg_Heat_P Parameter: Tissue Value: Aerial
  misc_feature: MA Experiment ID: 20000173 Result: Up-regulated in Transcription
  misc_feature: MA Experiment 20000173 PARAMETER Experiment Name: At_42deg_Heat_P Parameter: Age (day) Value: 14
  misc_feature: MA Experiment 20000173 PARAMETER Experiment Name: At_42deg_Heat_P Parameter: Organism Value: A. thaliana
  misc_feature: MA Experiment 20000173 PARAMETER Experiment Name: At_42deg_Heat_P Parameter: Plant Line Value: WS
  misc_feature: MA Experiment 20000173 PARAMETER Experiment Name: At_42deg_Heat_P Parameter: Temperature (deg C) Value: 42 vs. 22
  misc_feature: MA Experiment 20000173 PARAMETER Experiment Name: At_42deg_Heat_P Parameter: Timepoint (hr) Value: 6
  misc_feature: MA Experiment 20000173 PARAMETER Experiment Name: At_42deg_Heat_P Parameter: Tissue Value: Aerial
  misc_feature: MA Experiment ID: 20000182 Result: Up-regulated in Transcription
  misc_feature: MA Experiment 20000182 PARAMETER Experiment Name: At_2mM_SA_P Parameter: Age (day) Value: 14
  misc_feature: MA Experiment 20000182 PARAMETER Experiment Name: At_2mM_SA_P Parameter: Organism Value: A. thaliana
  misc_feature: MA Experiment 20000182 PARAMETER Experiment Name: At_2mM_SA_P Parameter: Plant Line Value: WS
  misc_feature: MA Experiment 20000182 PARAMETER Experiment Name: At_2mM_SA_P Parameter: Timepoint (hr) Value: 6
  misc_feature: MA Experiment 20000182 PARAMETER Experiment Name: At_2mM_SA_P Parameter: Tissue Value: Aerial
  misc_feature: MA Experiment 20000182 PARAMETER Experiment Name: At_2mM_SA_P Parameter: Treatment Value: 2mM SA vs. No Treatment
  misc_feature: MA Experiment ID: 20000184 Result: Up-regulated in Transcription
  misc_feature: MA Experiment 20000184 PARAMETER Experiment Name: At_Shoots__P Parameter: Age (day) Value: 7
  misc_feature: MA Experiment 20000184 PARAMETER Experiment Name: At_Shoots__P Parameter: Tissue Value: Shoots vs. Whole Plant
  misc_feature: MA Experiment ID: 20000185 Result: Up-regulated in Transcription
  misc_feature: MA Experiment 20000185 PARAMETER Experiment Name: At_Roots__P Parameter: Age (day) Value: 7 vs. 21
  misc_feature: MA Experiment 20000185 PARAMETER Experiment Name: At_Roots__P Parameter: Organism Value: A. thaliana
  misc_feature: MA Experiment 20000185 PARAMETER Experiment Name: At_Roots__P Parameter: Tissue Value: Roots vs. Whole Plant
  misc_feature: MA Experiment ID: 20000269 Result: Down-regulated in Transcription
  misc_feature: MA Experiment 20000269 PARAMETER Experiment Name: At_1mM_KNO3_L-vs-H_Roots_P Parameter: Age (day) Value: 7,10,12
  misc_feature: MA Experiment 20000269 PARAMETER Experiment Name: At_1mM_KNO3_L-vs-H_Roots_P Parameter: Organism Value: A. thaliana
  misc_feature: MA Experiment 20000269 PARAMETER Experiment Name: At_1mM_KNO3_L-vs-H_Roots_P Parameter: Plant Line Value: WS
  misc_feature: MA Experiment 20000269 PARAMETER Experiment Name: At_1mM_KNO3_L-vs-H_Roots_P Parameter: Timepoint (day) Value: 7,10,12
  misc_feature: MA Experiment 20000269 PARAMETER Experiment Name: At_1mM_KNO3_L-vs-H_Roots_P Parameter: Tissue Value: Roots
  misc_feature: MA Experiment 20000269 PARAMETER Experiment Name: At_1mM_KNO3_L-vs-H_Roots_P Parameter: Treatment Value: 1mM KNO3 vs. 50mM KNO3
  misc_feature: MA Experiment ID: 20000437 Result: Down-regulated in Transcription
  misc_feature: MA Experiment 20000437 PARAMETER Experiment Name: At_Drought_P Parameter: Age (day) Value: 8
  misc_feature: MA Experiment 20000437 PARAMETER Experiment Name: At_Drought_P Parameter: Organism Value: A. thaliana
  misc_feature: MA Experiment 20000437 PARAMETER Experiment Name: At_Drought_P Parameter: Plant Line Value: WS
  misc_feature: MA Experiment 20000437 PARAMETER Experiment Name: At_Drought_P Parameter: Timepoint (hr) Value: 24
  misc_feature: MA Experiment 20000437 PARAMETER Experiment Name: At_Drought_P Parameter: Tissue Value: Whole Plant
  misc_feature: MA Experiment 20000437 PARAMETER Experiment Name: At_Drought_P Parameter: Treatment Value: Drought vs. No Drought
  misc_feature: MA Experiment ID: 20000439 Result: Up-regulated in Transcription
  misc_feature: MA Experiment 20000439 PARAMETER Experiment Name: At_Roots__P Parameter: Age (day) Value: 14 vs. 21
  misc_feature: MA Experiment 20000439 PARAMETER Experiment Name: At_Roots__P Parameter: Organism Value: A. thaliana
  misc_feature: MA Experiment 20000439 PARAMETER Experiment Name: At_Roots__P Parameter: Tissue Value: Roots vs. Whole Plant
  misc_feature: MA Experiment ID: 20000451 Result: Down-regulated in Transcription
  misc_feature: MA Experiment 20000451 PARAMETER Experiment Name: At_CS6879_Shoots-Roots_P Parameter: Age (day) Value: 14
  misc_feature: MA Experiment 20000451 PARAMETER Experiment Name: At_CS6879_Shoots-Roots_P Parameter: Organism Value: A. thaliana
  misc_feature: MA Experiment 20000451 PARAMETER Experiment Name: At_CS6879_Shoots-Roots_P Parameter: Plant Line Value: CS6879 vs. WS
  misc_feature: MA Experiment 20000451 PARAMETER Experiment Name: At_CS6879_Shoots-Roots_P Parameter: Tissue Value: Roots
  misc_feature: MA Experiment ID: 20000506 Result: Up-regulated in Transcription
  misc_feature: MA Experiment 20000506 PARAMETER Experiment Name: At_Wounding_P Parameter: Organism Value: A. thaliana
  misc_feature: MA Experiment 20000506 PARAMETER Experiment Name: At_Wounding_P Parameter: Plant Line Value: WS
  misc_feature: MA Experiment 20000506 PARAMETER Experiment Name: At_Wounding_P Parameter: Timepoint (hr) Value: 6
  misc_feature: MA Experiment 20000506 PARAMETER Experiment Name: At_Wounding_P Parameter: Tissue Value: Aerial
  misc_feature: MA Experiment 20000506 PARAMETER Experiment Name: At_Wounding_P Parameter: Treatment Value: Wounding vs. No Wounding
  misc_feature: MA Experiment ID: 20001247 Result: Up-regulated in Transcription
  misc_feature: MA Experiment 20001247 PARAMETER Experiment Name: At_Far-red-induction_P Parameter: Age (day) Value: 7
  misc_feature: MA Experiment 20001247 PARAMETER Experiment Name: At_Far-red-induction_P Parameter: Light Value: Far-red vs. White
  misc_feature: MA Experiment 20001247 PARAMETER Experiment Name: At_Far-red-induction_P Parameter: Organism Value: A. thaliana
  misc_feature: MA Experiment 20001247 PARAMETER Experiment Name: At_Far-red-induction_P Parameter: Plant Line Value: Columbia
  misc_feature: MA Experiment 20001247 PARAMETER Experiment Name: At_Far-red-induction_P Parameter: Timepoint (hr) Value: 1
  misc_feature: MA Experiment 20001247 PARAMETER Experiment Name: At_Far-red-induction_P Parameter: Tissue Value: Whole Plant
  misc_feature: MA Experiment ID: 20001248 Result: Down-regulated in Transcription
  misc_feature: MA Experiment 20001248 PARAMETER Experiment Name: At_Far-red-induction_P Parameter: Age (day) Value: 7
  misc_feature: MA Experiment 20001248 PARAMETER Experiment Name: At_Far-red-induction_P Parameter: Light Value: Far-red vs. White
  misc_feature: MA Experiment 20001248 PARAMETER Experiment Name: At_Far-red-induction_P Parameter: Organism Value: A. thaliana
  misc_feature: MA Experiment 20001248 PARAMETER Experiment Name: At_Far-red-induction_P Parameter: Plant Line Value: Columbia
  misc_feature: MA Experiment 20001248 PARAMETER Experiment Name: At_Far-red-induction_P Parameter: Timepoint (hr) Value: 4
  misc_feature: MA Experiment 20001248 PARAMETER Experiment Name: At_Far-red-induction_P Parameter: Tissue Value: Whole Plant
  misc_feature: MA Experiment ID: 20001556 Result: Down-regulated in Transcription
  misc_feature: MA Experiment 20001556 PARAMETER Experiment Name: At_Drought_Soil_Dry_P Parameter: Age (day) Value: 26
  misc_feature: MA Experiment 20001556 PARAMETER Experiment Name: At_Drought_Soil_Dry_P Parameter: Organism Value: A. thaliana
  misc_feature: MA Experiment 20001556 PARAMETER Experiment Name: At_Drought_Soil_Dry_P Parameter: Plant Line Value: WS
  misc_feature: MA Experiment 20001556 PARAMETER Experiment Name: At_Drought_Soil_Dry_P Parameter: Post Timepoint (hr) Value: None
  misc_feature: MA Experiment 20001556 PARAMETER Experiment Name: At_Drought_Soil_Dry_P Parameter: Post-Treatment Value: None
  misc_feature: MA Experiment 20001556 PARAMETER Experiment Name: At_Drought_Soil_Dry_P Parameter: Timepoint (day) Value: 12
  misc_feature: MA Experiment 20001556 PARAMETER Experiment Name: At_Drought_Soil_Dry_P Parameter: Treatment Value: Drought vs. No Drought
  misc_feature: MA Experiment ID: 20001557 Result: Up-regulated in Transcription
  misc_feature: MA Experiment 20001557 PARAMETER Experiment Name: At_Drought_Soil_Dry_P Parameter: Age (day) Value: 27
  misc_feature: MA Experiment 20001557 PARAMETER Experiment Name: At_Drought_Soil_Dry_P Parameter: Organism Value: A. thaliana
  misc_feature: MA Experiment 20001557 PARAMETER Experiment Name: At_Drought_Soil_Dry_P Parameter: Plant Line Value: WS
  misc_feature: MA Experiment 20001557 PARAMETER Experiment Name: At_Drought_Soil_Dry_P Parameter: Post Timepoint (hr) Value: 3
  misc_feature: MA Experiment 20001557 PARAMETER Experiment Name: At_Drought_Soil_Dry_P Parameter: Post-Treatment Value: Re-Water vs. No Drought
  misc_feature: MA Experiment 20001557 PARAMETER Experiment Name: At_Drought_Soil_Dry_P Parameter: Timepoint (day) Value: 13
  misc_feature: MA Experiment 20001557 PARAMETER Experiment Name: At_Drought_Soil_Dry_P Parameter: Treatment Value: Drought vs. No Drought
  misc_feature: MA Experiment ID: 20001558 Result: Up-regulated in Transcription
  misc_feature: MA Experiment 20001558 PARAMETER Experiment Name: At_Drought_Soil_Dry_P Parameter: Age (day) Value: 27
  misc_feature: MA Experiment 20001558 PARAMETER Experiment Name: At_Drought_Soil_Dry_P Parameter: Organism Value: A. thaliana
  misc_feature: MA Experiment 20001558 PARAMETER Experiment Name: At_Drought_Soil_Dry_P Parameter: Plant Line Value: WS
  misc_feature: MA Experiment 20001558 PARAMETER Experiment Name: At_Drought_Soil_Dry_P Parameter: Post Timepoint (hr) Value: 6
  misc_feature: MA Experiment 20001558 PARAMETER Experiment Name: At_Drought_Soil_Dry_P Parameter: Post-Treatment Value: Re-Water vs. No Drought
  misc_feature: MA Experiment 20001558 PARAMETER Experiment Name: At_Drought_Soil_Dry_P Parameter: Timepoint (day) Value: 13
  misc_feature: MA Experiment 20001558 PARAMETER Experiment Name: At_Drought_Soil_Dry_P Parameter: Treatment Value: Drought vs. No Drought
  misc_feature: MA Experiment ID: 20001560 Result: Up-regulated in Transcription
  misc_feature: MA Experiment 20001560 PARAMETER Experiment Name: At_Drought_Soil_Dry_P Parameter: Age (day) Value: 28
  misc_feature: MA Experiment 20001560 PARAMETER Experiment Name: At_Drought_Soil_Dry_P Parameter: Organism Value: A. thaliana
  misc_feature: MA Experiment 20001560 PARAMETER Experiment Name: At_Drought_Soil_Dry_P Parameter: Plant Line Value: WS
  misc_feature: MA Experiment 20001560 PARAMETER Experiment Name: At_Drought_Soil_Dry_P Parameter: Post Timepoint (hr) Value: None
  misc_feature: MA Experiment 20001560 PARAMETER Experiment Name: At_Drought_Soil_Dry_P Parameter: Post-Treatment Value: None
  misc_feature: MA Experiment 20001560 PARAMETER Experiment Name: At_Drought_Soil_Dry_P Parameter: Timepoint (day) Value: 14
  misc_feature: MA Experiment 20001560 PARAMETER Experiment Name: At_Drought_Soil_Dry_P Parameter: Treatment Value: Drought vs. No Drought
  misc_feature: MA Experiment ID: 20001768 Result: Up-regulated in Transcription
  misc_feature: MA Experiment 20001768 PARAMETER Experiment Name: At_Far-red-enriched-adult_P Parameter: Age (day) Value: 28
  misc_feature: MA Experiment 20001768 PARAMETER Experiment Name: At_Far-red-enriched-adult_P Parameter: Light Value: Far-red enriched vs. White
  misc_feature: MA Experiment 20001768 PARAMETER Experiment Name: At_Far-red-enriched-adult_P Parameter: Organism Value: A. thaliana
  misc_feature: MA Experiment 20001768 PARAMETER Experiment Name: At_Far-red-enriched-adult_P Parameter: Plant Line Value: Columbia
  misc_feature: MA Experiment 20001768 PARAMETER Experiment Name: At_Far-red-enriched-adult_P Parameter: Timepoint (hr) Value: 1
  misc_feature: MA Experiment 20001768 PARAMETER Experiment Name: At_Far-red-enriched-adult_P Parameter: Tissue Value: Aerial
  misc_feature: MA Experiment ID: 20001905 Result: Down-regulated in Transcription
  misc_feature: MA Experiment 20001905 PARAMETER Experiment Name: At_Drought_Reproduction_P Parameter: Age (day) Value: 40
  misc_feature: MA Experiment 20001905 PARAMETER Experiment Name: At_Drought_Reproduction_P Parameter: Organism Value: A. thaliana
  misc_feature: MA Experiment 20001905 PARAMETER Experiment Name: At_Drought_Reproduction_P Parameter: Plant Line Value: WS
  misc_feature: MA Experiment 20001905 PARAMETER Experiment Name: At_Drought_Reproduction_P Parameter: Timepoint (day) Value: 10
  misc_feature: MA Experiment 20001905 PARAMETER Experiment Name: At_Drought_Reproduction_P Parameter: Tissue Value: Rosettes
  misc_feature: MA Experiment 20001905 PARAMETER Experiment Name: At_Drought_Reproduction_P Parameter: Treatment Value: Drought vs. No Drought
  misc_feature: MA Experiment ID: 20001911 Result: Down-regulated in Transcription
  misc_feature: MA Experiment 20001911 PARAMETER Experiment Name: At_Drought_Reproduction_P Parameter: Age (day) Value: 40
  misc_feature: MA Experiment 20001911 PARAMETER Experiment Name: At_Drought_Reproduction_P Parameter: Organism Value: A. thaliana
  misc_feature: MA Experiment 20001911 PARAMETER Experiment Name: At_Drought_Reproduction_P Parameter: Plant Line Value: WS
  misc_feature: MA Experiment 20001911 PARAMETER Experiment Name: At_Drought_Reproduction_P Parameter: Timepoint (day) Value: 10
  misc_feature: MA Experiment 20001911 PARAMETER Experiment Name: At_Drought_Reproduction_P Parameter: Tissue Value: Flowers
  misc_feature: MA Experiment 20001911 PARAMETER Experiment Name: At_Drought_Reproduction_P Parameter: Treatment Value: Drought vs. No Drought
acaagccctacaacaaccacaaagcaaaacacttacttagaaagtccagaaacatccattaacacatatggctaaagacgtggaaggacctgatggatttcagacgagagattacgaagatcctccgccaacaccgtttttcgacgcagaggagcttaccaagtggtctttatacagagcagtcatcgccgagttcgtagccactctcctcttcttgtacgtcaccgttttaactgtcattggttacaagattcagtccgacacaaaagccggtggagttgactgcggcggcgtcggaatccttggcatcgcgtgggcttttggtggcatgatcttcatccttgtctactgcaccgccggtatctcaggtggtcacataaaccctgcggtgacgtttggtttgttcttagcccggaaggtatcgctgattagggcggtgctttacatggtggctcagtgtttgggtgctatttgtggagttgggtttgtgaaggcatttcaaagctctcactatgttaattacggtggaggagccaactttctagctgacggctacaatacaggcaccggactcgcggcagagatcatcggaacattcgtgcttgtctacacagtcttctccgctactgatcccaaacgcaacgctagagactcccacgttccggttttggcgccacttccgattgggtttgcggtgtttatggtacatttggccactattccgatcaccggaaccggtatcaacccggctaggagtttcggagccgccgtaatctttaacaagagcaagccatgggatgaccactggatattctgggtgggaccattcattggagctacgatagctgcattttatcaccaattcgttctaagggcctcaggctccaagtccctcggttcattcagaagtgcagccaacgtttaaacttagccacgaaagaaaaaaagtgtgcctacaattatgtagaaacatatcctcttttccactcgtatcttagcttcttcctattttctatttctaactgtgtgattccatattaaatcgagtgaaatgtttttcaattcatctttgcaacgtatgtaagtttggtgtattgagaaaaaaaaatcgagaaagacaactttttcttcg

SEQ ID NO: 28819 - protein, 285 aa, Arabidopsis thaliana
  peptide (1)..(285): Ceres Seq. ID no. 12371696
  misc_feature (29)..(264): Pfam Name: Major intrinsic protein Pfam Description: Major intrinsic protein
  misc_feature (1)..(285): Homolog of NCBI NO: 5081421 NR Description: plasma membrane intrinsic protein 1 [Brassica
  misc_feature (1)..(285): Homolog of NCBI NO: 3551133 NR Description: Plasma membrane aquaporin (PAQ2) [Raphanus
  misc_feature (1)..(283): Homolog of NCBI NO: 7209562 NR Description: Plasma membrane aquaporin 2c [Raphanus sativus]
  misc_feature (1)..(283): Homolog of NCBI NO: 5081423 NR Description: plasma membrane intrinsic protein 2 [Brassica
  misc_feature (1)..(283): Homolog of NCBI NO: 7209560 NR Description: Plasma membrane aquaporin 2b [Raphanus sativus]
  misc_feature (1)..(285): Homolog of NCBI NO: 629543 NR Description: plasma membrane intrinsic protein 2b -
  misc_feature (1)..(285): Homolog of NCBI NO: 21554356 NR Description: aquaporin (plasma membrane intrinsic protein 2B)
  misc_feature (1)..(285): Homolog of NCBI NO: 15228095 NR Description: aquaporin (plasma membrane intrinsic protein 2B)
  misc_feature (1)..(285): Homolog of NCBI NO: 21537097 NR Description: aquaporin (plasma membrane intrinsic protein 2C)
  misc_feature (1)..(285): Homolog of NCBI NO: 15228096 NR Description: aquaporin (plasma membrane intrinsic protein 2C)
MAKDVEGPDGFQTRDYEDPPPTPFFDAEELTKWSLYRAVIAEFVATLLFLYVTVLTVIGYKIQSDTKAGGVDCGGVGILGIAWAFGGMIFILVYCTAGISGGHINPAVTFGLFLARKVSLIRAVLYMVAQCLGAICGVGFVKAFQSSHYVNYGGGANFLADGYNTGTGLAAEIIGTFVLVYTVFSATDPKRNARDSHVPVLAPLPIGFAVFMVHLATIPITGTGINPARSFGAAVIFNKSKPWDDHWIFWVGPFIGATIAAFYHQFVLRASGSKSLGSFRSAANV

SEQ ID NO: 28820 - protein, 198 aa, Arabidopsis thaliana
  peptide (1)..(198): Ceres Seq. ID no. 12371697
  misc_feature (1)..(177): Pfam Name: Major intrinsic protein Pfam Description: Major intrinsic protein
  misc_feature (1)..(198): Homolog of NCBI NO: 5081421 NR Description: plasma membrane intrinsic protein 1 [Brassica
  misc_feature (1)..(198): Homolog of NCBI NO: 3551133 NR Description: Plasma membrane aquaporin (PAQ2) [Raphanus
  misc_feature (1)..(196): Homolog of NCBI NO: 7209562 NR Description: Plasma membrane aquaporin 2c [Raphanus sativus]
  misc_feature (1)..(196): Homolog of NCBI NO: 5081423 NR Description: plasma membrane intrinsic protein 2 [Brassica
  misc_feature (1)..(196): Homolog of NCBI NO: 7209560 NR Description: Plasma membrane aquaporin 2b [Raphanus sativus]
  misc_feature (1)..(198): Homolog of NCBI NO: 629543 NR Description: plasma membrane intrinsic protein 2b -
  misc_feature (1)..(198): Homolog of NCBI NO: 21554356 NR Description: aquaporin (plasma membrane intrinsic protein 2B)
  misc_feature (1)..(198): Homolog of NCBI NO: 15228095 NR Description: aquaporin (plasma membrane intrinsic protein 2B)
  misc_feature (1)..(198): Homolog of NCBI NO: 21537097 NR Description: aquaporin (plasma membrane intrinsic protein 2C)
  misc_feature (1)..(198): Homolog of NCBI NO: 15228096 NR Description: aquaporin (plasma membrane intrinsic protein 2C)
MIFILVYCTAGISGGHINPAVTFGLFLARKVSLIRAVLYMVAQCLGAICGVGFVKAFQSSHYVNYGGGANFLADGYNTGTGLAAEIIGTFVLVYTVFSATDPKRNARDSHVPVLAPLPIGFAVFMVHLATIPITGTGINPARSFGAAVIFNKSKPWDDHWIFWVGPFIGATIAAFYHQFVLRASGSKSLGSFRSAANV

SEQ ID NO: 28821 - protein, 159 aa, Arabidopsis thaliana
  peptide (1)..(159): Ceres Seq. ID no. 12371698
  misc_feature (1)..(138): Pfam Name: Major intrinsic protein Pfam Description: Major intrinsic protein
  misc_feature (1)..(159): Homolog of NCBI NO: 5081421 NR Description: plasma membrane intrinsic protein 1 [Brassica
  misc_feature (1)..(159): Homolog of NCBI NO: 3551133 NR Description: Plasma membrane aquaporin (PAQ2) [Raphanus
  misc_feature (1)..(157): Homolog of NCBI NO: 7209562 NR Description: Plasma membrane aquaporin 2c [Raphanus sativus]
  misc_feature (1)..(157): Homolog of NCBI NO: 5081423 NR Description: plasma membrane intrinsic protein 2 [Brassica
  misc_feature (1)..(157): Homolog of NCBI NO: 7209560 NR Description: Plasma membrane aquaporin 2b [Raphanus sativus]
  misc_feature (1)..(159): Homolog of NCBI NO: 629543 NR Description: plasma membrane intrinsic protein 2b -
  misc_feature (1)..(159): Homolog of NCBI NO: 21554356 NR Description: aquaporin (plasma membrane intrinsic protein 2B)
  misc_feature (1)..(159): Homolog of NCBI NO: 15228095 NR Description: aquaporin (plasma membrane intrinsic protein 2B)
  misc_feature (1)..(159): Homolog of NCBI NO: 21537097 NR Description: aquaporin (plasma membrane intrinsic protein 2C)
  misc_feature (1)..(159): Homolog of NCBI NO: 15228096 NR Description: aquaporin (plasma membrane intrinsic protein 2C)
MVAQCLGAICGVGFVKAFQSSHYVNYGGGANFLADGYNTGTGLAAEIIGTFVLVYTVFSATDPKRNARDSHVPVLAPLPIGFAVFMVHLATIPITGTGINPARSFGAAVIFNKSKPWDDHWIFWVGPFIGATIAAFYHQFVLRASGSKSLGSFRSAANV

SEQ ID NO: 28822 - DNA, 1154 bp, Arabidopsis thaliana; identical to SEQ ID NO: 26919
  misc_feature (1)..(1154): Ceres Seq. ID no. 12385275
  misc_feature: MA Experiment ID: 108435 Result: Up-regulated in Transcription
  misc_feature: MA Experiment 108435 PARAMETER Experiment Name: At_stm_Mutants_cDNA_P Parameter: Plant Line Value: wt Landsburg vs stm
  misc_feature: MA Experiment 108435 PARAMETER Experiment Name: At_stm_Mutants_cDNA_P Parameter: Tissue Value: Shoot Apical Meristem Region
  misc_feature: MA Experiment ID: 108461 Result: Up-regulated in Transcription
  misc_feature: MA Experiment 108461 PARAMETER Experiment Name: At_Germinating_Seeds_cDNA_P Parameter: Age (day) Value: 1 vs. 0
  misc_feature: MA Experiment 108461 PARAMETER Experiment Name: At_Germinating_Seeds_cDNA_P Parameter: Tissue Value: Germinating Seeds
  misc_feature: MA Experiment ID: 108462 Result: Up-regulated in Transcription
  misc_feature: MA Experiment 108462 PARAMETER Experiment Name: At_Germinating_Seeds_cDNA_P Parameter: Age (day) Value: 2 vs. 0
  misc_feature: MA Experiment 108462 PARAMETER Experiment Name: At_Germinating_Seeds_cDNA_P Parameter: Tissue Value: Germinating Seeds
  misc_feature: MA Experiment ID: 108473 Result: Down-regulated in Transcription
  misc_feature: MA Experiment 108473 PARAMETER Experiment Name: At_Drought_Flowers_cDNA_P Parameter: Timepoint (hr) Value: 7 d
  misc_feature: MA Experiment 108473 PARAMETER Experiment Name: At_Drought_Flowers_cDNA_P Parameter: Tissue Value: Flower
  misc_feature: MA Experiment 108473 PARAMETER Experiment Name: At_Drought_Flowers_cDNA_P Parameter: Treatment Value: Drought vs. No Drought
  misc_feature: MA Experiment ID: 20000069 Result: Down-regulated in Transcription
  misc_feature: MA Experiment 20000069 PARAMETER Experiment Name: At_100uM_ABA_Mutants_cDNA_P Parameter: Plant Line Value: CS23
  misc_feature: MA Experiment 20000069 PARAMETER Experiment Name: At_100uM_ABA_Mutants_cDNA_P Parameter: Timepoint (hr) Value: 6
  misc_feature: MA Experiment 20000069 PARAMETER Experiment Name: At_100uM_ABA_Mutants_cDNA_P Parameter: Tissue Value: Aerial
  misc_feature: MA Experiment 20000069 PARAMETER Experiment Name: At_100uM_ABA_Mutants_cDNA_P Parameter: Treatment Value: 100uM ABA vs. No Treatment
  misc_feature: MA Experiment ID: 20000111 Result: Down-regulated in Transcription
  misc_feature: MA Experiment 20000111 PARAMETER Experiment Name: At_42deg_Heat_cDNA_P Parameter: Temperature (deg C) Value: 42 vs. 22
  misc_feature: MA Experiment 20000111 PARAMETER Experiment Name: At_42deg_Heat_cDNA_P Parameter: Timepoint (hr) Value: 6
  misc_feature: MA Experiment 20000111 PARAMETER Experiment Name: At_42deg_Heat_cDNA_P Parameter: Tissue Value: Aerial
  misc_feature: MA Experiment ID: 20000144 Result: Down-regulated in Transcription
  misc_feature: MA Experiment 20000144 PARAMETER Experiment Name: At_42deg_Heat_cDNA_P Parameter: Temperature (deg C) Value: 42 vs. 22
  misc_feature: MA Experiment 20000144 PARAMETER Experiment Name: At_42deg_Heat_cDNA_P Parameter: Timepoint (hr) Value: 1
  misc_feature: MA Experiment 20000144 PARAMETER Experiment Name: At_42deg_Heat_cDNA_P Parameter: Tissue Value: Aerial
  misc_feature: MA Experiment ID: 20000180 Result: Up-regulated in Transcription
  misc_feature: MA Experiment 20000180 PARAMETER Experiment Name: At_Germinating_Seeds_P Parameter: Age (hr) Value: 24 vs. 0
  misc_feature: MA Experiment 20000180 PARAMETER Experiment Name: At_Germinating_Seeds_P Parameter: Tissue Value: Germinating Seeds
  misc_feature: MA Experiment ID: 20000185 Result: Down-regulated in Transcription
  misc_feature: MA Experiment 20000185 PARAMETER Experiment Name: At_Roots__P Parameter: Age (day) Value: 7 vs. 21
  misc_feature: MA Experiment 20000185 PARAMETER Experiment Name: At_Roots__P Parameter: Organism Value: A. thaliana
  misc_feature: MA Experiment 20000185 PARAMETER Experiment Name: At_Roots__P Parameter: Tissue Value: Roots vs. Whole Plant
  misc_feature: MA Experiment ID: 20000224 Result: Up-regulated in Transcription
  misc_feature: MA Experiment ID: 20000234 Result: Up-regulated in Transcription
  misc_feature: MA Experiment 20000234 PARAMETER Experiment Name: At_Siliques_P Parameter: Age (day) Value: 21
  misc_feature: MA Experiment 20000234 PARAMETER Experiment Name: At_Siliques_P Parameter: Organism Value: A. thaliana
  misc_feature: MA Experiment 20000234 PARAMETER Experiment Name: At_Siliques_P Parameter: Plant Line Value: WS
  misc_feature: MA Experiment 20000234 PARAMETER Experiment Name: At_Siliques_P Parameter: Tissue Value: Less Than 5mm Siliques vs. Whole Plant
  misc_feature: MA Experiment ID: 20000265 Result: Up-regulated in Transcription
  misc_feature: MA Experiment 20000265 PARAMETER Experiment Name: At_Open_Flower_P Parameter: Age (day) Value: 21
  misc_feature: MA Experiment 20000265 PARAMETER Experiment Name: At_Open_Flower_P Parameter: Plant Line Value: WS
  misc_feature: MA Experiment 20000265 PARAMETER Experiment Name: At_Open_Flower_P Parameter: Tissue Value: Closed Flower vs. Whole Plant
  misc_feature: MA Experiment ID: 20000286 Result: Up-regulated in Transcription
  misc_feature: MA Experiment 20000286 PARAMETER Experiment Name: At_Open_Flower_P Parameter: Age (day) Value: 21
  misc_feature: MA Experiment 20000286 PARAMETER Experiment Name: At_Open_Flower_P Parameter: Plant Line Value: WS
  misc_feature: MA Experiment 20000286 PARAMETER Experiment Name: At_Open_Flower_P Parameter: Tissue Value: Half Open vs. Whole Plant
  misc_feature: MA Experiment ID: 20000437 Result: Down-regulated in Transcription
  misc_feature: MA Experiment 20000437 PARAMETER Experiment Name: At_Drought_P Parameter: Age (day) Value: 8
  misc_feature: MA Experiment 20000437 PARAMETER Experiment Name: At_Drought_P Parameter: Organism Value: A. thaliana
  misc_feature: MA Experiment 20000437 PARAMETER Experiment Name: At_Drought_P Parameter: Plant Line Value: WS
  misc_feature: MA Experiment 20000437 PARAMETER Experiment Name: At_Drought_P Parameter: Timepoint (hr) Value: 24
  misc_feature: MA Experiment 20000437 PARAMETER Experiment Name: At_Drought_P Parameter: Tissue Value: Whole Plant
  misc_feature: MA Experiment 20000437 PARAMETER Experiment Name: At_Drought_P Parameter: Treatment Value: Drought vs. No Drought
  misc_feature: MA Experiment ID: 20000439 Result: Down-regulated in Transcription
  misc_feature: MA Experiment 20000439 PARAMETER Experiment Name: At_Roots__P Parameter: Age (day) Value: 14 vs. 21
  misc_feature: MA Experiment 20000439 PARAMETER Experiment Name: At_Roots__P Parameter: Organism Value: A. thaliana
  misc_feature: MA Experiment 20000439 PARAMETER Experiment Name: At_Roots__P Parameter: Tissue Value: Roots vs. Whole Plant
  misc_feature: MA Experiment ID: 20000495 Result: Up-regulated in Transcription
  misc_feature: MA Experiment 20000495 PARAMETER Experiment Name: At_Guard_Cells_P Parameter: Harvest Date Value: 8/2/2002
  misc_feature: MA Experiment 20000495 PARAMETER Experiment Name: At_Guard_Cells_P Parameter: Organism Value: A. thaliana
  misc_feature: MA Experiment 20000495 PARAMETER Experiment Name: At_Guard_Cells_P Parameter: Tissue Value: Guard Cells vs. Leaves
  misc_feature: MA Experiment ID: 20001248 Result: Down-regulated in Transcription
  misc_feature: MA Experiment 20001248 PARAMETER Experiment Name: At_Far-red-induction_P Parameter: Age (day) Value: 7
  misc_feature: MA Experiment 20001248 PARAMETER Experiment Name: At_Far-red-induction_P Parameter: Light Value: Far-red vs. White
  misc_feature: MA Experiment 20001248 PARAMETER Experiment Name: At_Far-red-induction_P Parameter: Organism Value: A. thaliana
  misc_feature: MA Experiment 20001248 PARAMETER Experiment Name: At_Far-red-induction_P Parameter: Plant Line Value: Columbia
  misc_feature: MA Experiment 20001248 PARAMETER Experiment Name: At_Far-red-induction_P Parameter: Timepoint (hr) Value: 4
  misc_feature: MA Experiment 20001248 PARAMETER Experiment Name: At_Far-red-induction_P Parameter: Tissue Value: Whole Plant
  misc_feature: MA Experiment ID: 20001555 Result: Down-regulated in Transcription
  misc_feature: MA Experiment 20001555 PARAMETER Experiment Name: At_Drought_Soil_Dry_P Parameter: Age (day) Value: 24
  misc_feature: MA Experiment 20001555 PARAMETER Experiment Name: At_Drought_Soil_Dry_P Parameter: Organism Value: A. thaliana
  misc_feature: MA Experiment 20001555 PARAMETER Experiment Name: At_Drought_Soil_Dry_P Parameter: Plant Line Value: WS
  misc_feature: MA Experiment 20001555 PARAMETER Experiment Name: At_Drought_Soil_Dry_P Parameter: Post Timepoint (hr) Value: None
  misc_feature: MA Experiment 20001555 PARAMETER Experiment Name: At_Drought_Soil_Dry_P Parameter: Post-Treatment Value: None
  misc_feature: MA Experiment 20001555 PARAMETER Experiment Name: At_Drought_Soil_Dry_P Parameter: Timepoint (day) Value: 10
  misc_feature: MA Experiment 20001555 PARAMETER Experiment Name: At_Drought_Soil_Dry_P Parameter: Treatment Value: Drought vs. No Drought

SEQ ID NO: 28823 - protein, 350 aa, Arabidopsis thaliana; identical to SEQ ID NO: 26920
  peptide (1)..(350): Ceres Seq. ID no. 12385276
  misc_feature (73)..(338): Pfam Name: alpha/beta hydrolase fold Pfam Description: alpha/beta hydrolase fold
  misc_feature (73)..(338): Pfam Name: alpha/beta hydrolase fold Pfam Description: alpha/beta hydrolase fold
  misc_feature (73)..(338): Pfam Name: alpha/beta hydrolase fold Pfam Description: alpha/beta hydrolase fold
  misc_feature (20)..(350): Homolog of NCBI NO: 15230018 NR Description: putative epoxide hydrolase
  misc_feature (20)..(350): Homolog of NCBI NO: 15230018 NR Description: putative epoxide hydrolase
  misc_feature (20)..(350): Homolog of NCBI NO: 15230018 NR Description: putative epoxide hydrolase

SEQ ID NO: 28824 - protein, 331 aa, Arabidopsis thaliana; identical to SEQ ID NO: 21476
  peptide (1)..(331): Ceres Seq. ID no. 12385277
  misc_feature (54)..(319): Pfam Name: alpha/beta hydrolase fold Pfam Description: alpha/beta hydrolase fold
  misc_feature (54)..(319): Pfam Name: alpha/beta hydrolase fold Pfam Description: alpha/beta hydrolase fold
  misc_feature (54)..(319): Pfam Name: alpha/beta hydrolase fold Pfam Description: alpha/beta hydrolase fold
  misc_feature (1)..(331): Homolog of NCBI NO: 15230018 NR Description: putative epoxide hydrolase
  misc_feature (1)..(331): Homolog of NCBI NO: 15230018 NR Description: putative epoxide hydrolase
  misc_feature (1)..(331): Homolog of NCBI NO: 15230018 NR Description: putative epoxide hydrolase

SEQ ID NO: 28825 - protein, 324 aa, Arabidopsis thaliana; identical to SEQ ID NO: 21477
  peptide (1)..(324): Ceres Seq. ID no. 12385278
  misc_feature (47)..(312): Pfam Name: alpha/beta hydrolase fold Pfam Description: alpha/beta hydrolase fold
  misc_feature (47)..(312): Pfam Name: alpha/beta hydrolase fold Pfam Description: alpha/beta hydrolase fold
  misc_feature (47)..(312): Pfam Name: alpha/beta hydrolase fold Pfam Description: alpha/beta hydrolase fold
  misc_feature (1)..(324): Homolog of NCBI NO: 15230018 NR Description: putative epoxide hydrolase
  misc_feature (1)..(324): Homolog of NCBI NO: 15230018 NR Description: putative epoxide hydrolase
  misc_feature (1)..(324): Homolog of NCBI NO: 15230018 NR Description: putative epoxide hydrolase

SEQ ID NO: 28826 - DNA, 1013 bp, Arabidopsis thaliana; identical to SEQ ID NO: 26249
  misc_feature (1)..(1013): Ceres Seq. ID no. 12580328
  misc_feature: MA Experiment ID: 108434 Result: Up-regulated in Transcription
  misc_feature: MA Experiment 108434 PARAMETER Experiment Name: At_Root_Tips_cDNA_P Parameter: Tissue Value: Root Tips
  misc_feature: MA Experiment ID: 108461 Result: Up-regulated in Transcription
  misc_feature: MA Experiment 108461 PARAMETER Experiment Name: At_Germinating_Seeds_cDNA_P Parameter: Age (day) Value: 1 vs. 0
  misc_feature: MA Experiment 108461 PARAMETER Experiment Name: At_Germinating_Seeds_cDNA_P Parameter: Tissue Value: Germinating Seeds
  misc_feature: MA Experiment ID: 108462 Result: Up-regulated in Transcription
  misc_feature: MA Experiment 108462 PARAMETER Experiment Name: At_Germinating_Seeds_cDNA_P Parameter: Age (day) Value: 2 vs. 0
  misc_feature: MA Experiment 108462 PARAMETER Experiment Name: At_Germinating_Seeds_cDNA_P Parameter: Tissue Value: Germinating Seeds
  misc_feature: MA Experiment ID: 20000113 Result: Down-regulated in Transcription
  misc_feature: MA Experiment 20000113 PARAMETER Experiment Name: At_42deg_Heat_cDNA_P Parameter: Temperature (deg C) Value: 42 vs. 22
  misc_feature: MA Experiment 20000113 PARAMETER Experiment Name: At_42deg_Heat_cDNA_P Parameter: Timepoint (hr) Value: 8
  misc_feature: MA Experiment 20000113 PARAMETER Experiment Name: At_42deg_Heat_cDNA_P Parameter: Tissue Value: Aerial
  misc_feature: MA Experiment ID: 20000179 Result: Up-regulated in Transcription
  misc_feature: MA Experiment 20000179 PARAMETER Experiment Name: At_Germinating_Seeds_P Parameter: Age (hr) Value: 6 vs. 0
  misc_feature: MA Experiment 20000179 PARAMETER Experiment Name: At_Germinating_Seeds_P Parameter: Tissue Value: Germinating Seeds

SEQ ID NO: 28827 - protein, 182 aa, Arabidopsis thaliana; identical to SEQ ID NO: 26250
  peptide (1)..(182): Ceres Seq. ID no. 12580329
  misc_feature (4)..(177): Pfam Name: ADP-ribosylation factor family Pfam Description: ADP-ribosylation factor family
  misc_feature (4)..(177): Pfam Name: ADP-ribosylation factor family Pfam Description: ADP-ribosylation factor family
  misc_feature (4)..(177): Pfam Name: ADP-ribosylation factor family Pfam Description: ADP-ribosylation factor family
  misc_feature (1)..(179): Homolog of NCBI NO: 11131023 NR Description: ADP-ribosylation factor 1
  misc_feature (1)..(179): Homolog of NCBI NO: 39653273 NR Description: ADP-ribosylation factor [Medicago sativa]
  misc_feature (1)..(181): Homolog of NCBI NO: 31240205 NR Description: ENSANGP00000015770 [Anopheles gambiae]
  misc_feature (1)..(179): Homolog of NCBI NO: 29124979 NR Description: ADP-ribosylation factor 1 [Populus tremuloides]
  misc_feature (1)..(179): Homolog of NCBI NO: 4502227 NR Description: ADP-ribosylation factor-like 1 [Homo sapiens]
  misc_feature (1)..(179): Homolog of NCBI NO: 11131023 NR Description: ADP-ribosylation factor 1
  misc_feature (1)..(181): Homolog of NCBI NO: 31240205 NR Description: ENSANGP00000015770 [Anopheles gambiae]
  misc_feature (1)..(179): Homolog of NCBI NO: 4502227 NR Description: ADP-ribosylation factor-like 1 [Homo sapiens]
  misc_feature (1)..(179): Homolog of NCBI NO: 29124979 NR Description: ADP-ribosylation factor 1 [Populus tremuloides]
  misc_feature (1)..(181): Homolog of NCBI NO: 31240205 NR Description: ENSANGP00000015770 [Anopheles gambiae]
  misc_feature (1)..(179): Homolog of NCBI NO: 39653273 NR Description: ADP-ribosylation factor [Medicago sativa]
  misc_feature (1)..(179): Homolog of NCBI NO: 11131023 NR Description: ADP-ribosylation factor 1
  misc_feature (1)..(182): Homolog of NCBI NO: 30682545 NR Description: ADP-ribosylation factor 3 (ARF3) [Arabidopsis
  misc_feature (1)..(182): Homolog of NCBI NO: 3182922 NR Description: ADP-ribosylation factor 1
  misc_feature (1)..(181): Homolog of NCBI NO: 40253742 NR Description: putative ADP-ribosylation factor 3
  misc_feature (1)..(179): Homolog of NCBI NO: 13385340 NR Description: ADP-ribosylation-like 1 [Mus musculus]
  misc_feature (1)..(179): Homolog of NCBI NO: 11693150 NR Description: ADP-ribosylation factor-like 1 [Rattus
  misc_feature (1)..(182): Homolog of NCBI NO: 30682545 NR Description: ADP-ribosylation factor 3 (ARF3) [Arabidopsis
  misc_feature (1)..(182): Homolog of NCBI NO: 3182922 NR Description: ADP-ribosylation factor 1
  misc_feature (1)..(181): Homolog of NCBI NO: 40253742 NR Description: putative ADP-ribosylation factor 3
  misc_feature (1)..(179): Homolog of NCBI NO: 13385340 NR Description: ADP-ribosylation-like 1 [Mus musculus]
  misc_feature (1)..(179): Homolog of NCBI NO: 11693150 NR Description: ADP-ribosylation factor-like 1 [Rattus
  misc_feature (1)..(179): Homolog of NCBI NO: 4502227 NR Description: ADP-ribosylation factor-like 1 [Homo sapiens]
  misc_feature (1)..(179): Homolog of NCBI NO: 29124979 NR Description: ADP-ribosylation factor 1 [Populus tremuloides]
  misc_feature (1)..(179): Homolog of NCBI NO: 39653273 NR Description: ADP-ribosylation factor [Medicago sativa]
  misc_feature (1)..(179): Homolog of NCBI NO: 11693150 NR Description: ADP-ribosylation factor-like 1 [Rattus
  misc_feature (1)..(179): Homolog of NCBI NO: 13385340 NR Description: ADP-ribosylation-like 1 [Mus musculus]
  misc_feature (1)..(181): Homolog of NCBI NO: 40253742 NR Description: putative ADP-ribosylation factor 3
  misc_feature (1)..(182): Homolog of NCBI NO: 3182922 NR Description: ADP-ribosylation factor 1
  misc_feature (1)..(182): Homolog of NCBI NO: 30682545 NR Description: ADP-ribosylation factor 3 (ARF3) [Arabidopsis

SEQ ID NO: 28828 - protein, 175 aa, Arabidopsis thaliana; identical to SEQ ID NO: 26251
  peptide (1)..(175): Ceres Seq. ID no. 12580330
  misc_feature (1)..(170): Pfam Name: ADP-ribosylation factor family Pfam Description: ADP-ribosylation factor family
  misc_feature (1)..(170): Pfam Name: ADP-ribosylation factor family Pfam Description: ADP-ribosylation factor family
  misc_feature (1)..(170): Pfam Name: ADP-ribosylation factor family Pfam Description: ADP-ribosylation factor family
  misc_feature (1)..(172): Homolog of NCBI NO: 11131023 NR Description: ADP-ribosylation factor 1
  misc_feature (1)..(172): Homolog of NCBI NO: 39653273 NR Description: ADP-ribosylation factor [Medicago sativa]
  misc_feature (1)..(174): Homolog of NCBI NO: 31240205 NR Description: ENSANGP00000015770 [Anopheles gambiae]
  misc_feature (1)..(172): Homolog of NCBI NO: 29124979 NR Description: ADP-ribosylation factor 1 [Populus tremuloides]
  misc_feature (1)..(172): Homolog of NCBI NO: 4502227 NR Description: ADP-ribosylation factor-like 1 [Homo sapiens]
  misc_feature (1)..(172): Homolog of NCBI NO: 11131023 NR Description: ADP-ribosylation factor 1
  misc_feature (1)..(174): Homolog of NCBI NO: 31240205 NR Description: ENSANGP00000015770 [Anopheles gambiae]
  misc_feature (1)..(172): Homolog of NCBI NO: 4502227 NR Description: ADP-ribosylation factor-like 1 [Homo sapiens]
  misc_feature (1)..(172): Homolog of NCBI NO: 29124979 NR Description: ADP-ribosylation factor 1 [Populus tremuloides]
  misc_feature (1)..(174): Homolog of NCBI NO: 31240205 NR Description: ENSANGP00000015770 [Anopheles gambiae]
  misc_feature (1)..(172): Homolog of NCBI NO: 39653273 NR Description: ADP-ribosylation factor [Medicago sativa]
  misc_feature (1)..(172): Homolog of NCBI NO: 11131023 NR Description: ADP-ribosylation factor 1
  misc_feature (1)..(175): Homolog of NCBI NO: 30682545 NR Description: ADP-ribosylation factor 3 (ARF3) [Arabidopsis
  misc_feature (1)..(175): Homolog of NCBI NO: 3182922 NR Description: ADP-ribosylation factor 1
  misc_feature (1)..(174): Homolog of NCBI NO: 40253742 NR Description: putative ADP-ribosylation factor 3
  misc_feature (1)..(172): Homolog of NCBI NO: 13385340 NR Description: ADP-ribosylation-like 1 [Mus musculus]
  misc_feature (1)..(172): Homolog of NCBI NO: 11693150 NR Description: ADP-ribosylation factor-like 1 [Rattus
  misc_feature (1)..(175): Homolog of NCBI NO: 30682545 NR Description: ADP-ribosylation factor 3 (ARF3) [Arabidopsis
  misc_feature (1)..(175): Homolog of NCBI NO: 3182922 NR Description: ADP-ribosylation factor 1
  misc_feature (1)..(174): Homolog of NCBI NO: 40253742 NR Description: putative ADP-ribosylation factor 3
  misc_feature (1)..(172): Homolog of NCBI NO: 13385340 NR Description: ADP-ribosylation-like 1 [Mus musculus]
  misc_feature (1)..(172): Homolog of NCBI NO: 11693150 NR Description: ADP-ribosylation factor-like 1 [Rattus
  misc_feature (1)..(172): Homolog of NCBI NO: 4502227 NR Description: ADP-ribosylation factor-like 1 [Homo sapiens]
  misc_feature (1)..(172): Homolog of NCBI NO: 29124979 NR Description: ADP-ribosylation factor 1 [Populus tremuloides]
  misc_feature (1)..(172): Homolog of NCBI NO: 39653273 NR Description: ADP-ribosylation factor [Medicago sativa]
  misc_feature (1)..(172): Homolog of NCBI NO: 11693150 NR Description: ADP-ribosylation factor-like 1 [Rattus
  misc_feature (1)..(172): Homolog of NCBI NO: 13385340 NR Description: ADP-ribosylation-like 1 [Mus musculus]
  misc_feature (1)..(174): Homolog of NCBI NO: 40253742 NR Description: putative ADP-ribosylation factor 3
  misc_feature (1)..(175): Homolog of NCBI NO: 3182922 NR Description: ADP-ribosylation factor 1
  misc_feature (1)..(175): Homolog of NCBI NO: 30682545 NR Description: ADP-ribosylation factor 3 (ARF3) [Arabidopsis

SEQ ID NO: 28829 - protein, 144 aa, Arabidopsis thaliana; identical to SEQ ID NO: 26252
  peptide (1)..(144): Ceres Seq. ID no. 12580331
  misc_feature (1)..(139): Pfam Name: ADP-ribosylation factor family Pfam Description: ADP-ribosylation factor family
  misc_feature (1)..(139): Pfam Name: ADP-ribosylation factor family Pfam Description: ADP-ribosylation factor family
  misc_feature (1)..(139): Pfam Name: ADP-ribosylation factor family Pfam Description: ADP-ribosylation factor family
  misc_feature (1)..(141): Homolog of NCBI NO: 11131023 NR Description: ADP-ribosylation factor 1
  misc_feature (1)..(141): Homolog of NCBI NO: 39653273 NR Description: ADP-ribosylation factor [Medicago sativa]
  misc_feature (1)..(143): Homolog of NCBI NO: 31240205 NR Description: ENSANGP00000015770 [Anopheles gambiae]
  misc_feature (1)..(141): Homolog of NCBI NO: 29124979 NR Description: ADP-ribosylation factor 1 [Populus tremuloides]
  misc_feature (1)..(141): Homolog of NCBI NO: 4502227 NR Description: ADP-ribosylation factor-like 1 [Homo sapiens]
  misc_feature (1)..(141): Homolog of NCBI NO: 11131023 NR Description: ADP-ribosylation factor 1
  misc_feature (1)..(143): Homolog of NCBI NO: 31240205 NR Description: ENSANGP00000015770 [Anopheles gambiae]
  misc_feature (1)..(141): Homolog of NCBI NO: 4502227 NR Description: ADP-ribosylation factor-like 1 [Homo sapiens]
  misc_feature (1)..(141): Homolog of NCBI NO: 29124979 NR Description: ADP-ribosylation factor 1 [Populus tremuloides]
  misc_feature (1)..(143): Homolog of NCBI NO: 31240205 NR Description: ENSANGP00000015770 [Anopheles gambiae]
  misc_feature (1)..(141): Homolog of NCBI NO: 39653273 NR Description: ADP-ribosylation factor [Medicago sativa]
  misc_feature (1)..(141): Homolog of NCBI NO: 11131023 NR Description: ADP-ribosylation factor 1
  misc_feature (1)..(144): Homolog of NCBI NO: 30682545 NR Description: ADP-ribosylation factor 3 (ARF3) [Arabidopsis
  misc_feature (1)..(144): Homolog of NCBI NO: 3182922 NR Description: ADP-ribosylation factor 1
  misc_feature (1)..(143): Homolog of NCBI NO: 40253742 NR Description: putative ADP-ribosylation factor 3
  misc_feature (1)..(141): Homolog of NCBI NO: 13385340 NR Description: ADP-ribosylation-like 1 [Mus musculus]
  misc_feature (1)..(141): Homolog of NCBI NO: 11693150 NR Description: ADP-ribosylation factor-like 1 [Rattus
  misc_feature (1)..(144): Homolog of NCBI NO: 30682545 NR Description: ADP-ribosylation factor 3 (ARF3) [Arabidopsis
  misc_feature (1)..(144): Homolog of NCBI NO: 3182922 NR Description: ADP-ribosylation factor 1
  misc_feature (1)..(143): Homolog of NCBI NO: 40253742 NR Description: putative ADP-ribosylation factor 3
  misc_feature (1)..(141): Homolog of NCBI NO: 13385340 NR Description: ADP-ribosylation-like 1 [Mus musculus]
  misc_feature (1)..(141): Homolog of NCBI NO: 11693150 NR Description: ADP-ribosylation factor-like 1 [Rattus
  misc_feature (1)..(141): Homolog of NCBI NO: 4502227 NR Description: ADP-ribosylation factor-like 1 [Homo sapiens]
  misc_feature (1)..(141): Homolog of NCBI NO: 29124979 NR Description: ADP-ribosylation factor 1 [Populus tremuloides]
  misc_feature (1)..(141): Homolog of NCBI NO: 39653273 NR Description: ADP-ribosylation factor [Medicago sativa]
  misc_feature (1)..(141): Homolog of NCBI NO: 11693150 NR Description: ADP-ribosylation factor-like 1 [Rattus
  misc_feature (1)..(141): Homolog of NCBI NO: 13385340 NR Description: ADP-ribosylation-like 1 [Mus musculus]
  misc_feature (1)..(143): Homolog of NCBI NO: 40253742 NR Description: putative ADP-ribosylation factor 3
  misc_feature (1)..(144): Homolog of NCBI NO: 3182922 NR Description: ADP-ribosylation factor 1
  misc_feature (1)..(144): Homolog of NCBI NO: 30682545 NR Description: ADP-ribosylation factor 3 (ARF3) [Arabidopsis

SEQ ID NO: 28830 - DNA, 1148 bp, Arabidopsis thaliana
  misc_feature (1)..(1148): Ceres Seq. ID no. 12334441
  misc_feature: MA Experiment ID: 108434 Result: Down-regulated in Transcription
  misc_feature: MA Experiment 108434 PARAMETER Experiment Name: At_Root_Tips_cDNA_P Parameter: Tissue Value: Root Tips
  misc_feature: MA Experiment ID: 108463 Result: Up-regulated in Transcription
  misc_feature: MA Experiment 108463 PARAMETER Experiment Name: At_Germinating_Seeds_cDNA_P Parameter: Age (day) Value: 3 vs. 0
  misc_feature: MA Experiment 108463 PARAMETER Experiment Name: At_Germinating_Seeds_cDNA_P Parameter: Tissue Value: Germinating Seeds
  misc_feature: MA Experiment ID: 108585 Result: Up-regulated in Transcription
  misc_feature: MA Experiment 108585 PARAMETER Experiment Name: At_5mM_NaNP_cDNA_P Parameter: Timepoint (hr) Value: 6
  misc_feature: MA Experiment 108585 PARAMETER Experiment Name: At_5mM_NaNP_cDNA_P Parameter: Tissue Value: Aerial
  misc_feature: MA Experiment 108585 PARAMETER Experiment Name: At_5mM_NaNP_cDNA_P Parameter: Treatment Value: null
  misc_feature: MA Experiment ID: 108594 Result: Down-regulated in Transcription
  misc_feature: MA Experiment 108594 PARAMETER Experiment Name: At_Ler-rhl_Root_cDNA_P Parameter: Plant Line Value: null
  misc_feature: MA Experiment ID: 20000069 Result: Up-regulated in Transcription
  misc_feature: MA Experiment 20000069 PARAMETER Experiment Name: At_100uM_ABA_Mutants_cDNA_P Parameter: Plant Line Value: CS23
  misc_feature: MA Experiment 20000069 PARAMETER Experiment Name: At_100uM_ABA_Mutants_cDNA_P Parameter: Timepoint (hr) Value: 6
  misc_feature: MA Experiment 20000069 PARAMETER Experiment Name: At_100uM_ABA_Mutants_cDNA_P Parameter: Tissue Value: Aerial
  misc_feature: MA Experiment 20000069 PARAMETER Experiment Name: At_100uM_ABA_Mutants_cDNA_P Parameter: Treatment Value: 100uM ABA vs. No Treatment
  misc_feature: MA Experiment ID: 20000180 Result: Down-regulated in Transcription
  misc_feature: MA Experiment 20000180 PARAMETER Experiment Name: At_Germinating_Seeds_P Parameter: Age (hr) Value: 24 vs. 0
  misc_feature: MA Experiment 20000180 PARAMETER Experiment Name: At_Germinating_Seeds_P Parameter: Tissue Value: Germinating Seeds
  misc_feature: MA Experiment ID: 20000184 Result: Down-regulated in Transcription
  misc_feature: MA Experiment 20000184 PARAMETER Experiment Name: At_Shoots__P Parameter: Age (day) Value: 7
  misc_feature: MA Experiment 20000184 PARAMETER Experiment Name: At_Shoots__P Parameter: Tissue Value: Shoots vs. Whole Plant
  misc_feature: MA Experiment ID: 20000234 Result: Down-regulated in Transcription
  misc_feature: MA Experiment 20000234 PARAMETER Experiment Name: At_Siliques_P Parameter: Age (day) Value: 21
  misc_feature: MA Experiment 20000234 PARAMETER Experiment Name: At_Siliques_P Parameter: Organism Value: A. thaliana
  misc_feature: MA Experiment 20000234 PARAMETER Experiment Name: At_Siliques_P Parameter: Plant Line Value: WS
  misc_feature: MA Experiment 20000234 PARAMETER Experiment Name: At_Siliques_P Parameter: Tissue Value: Less Than 5mm Siliques vs. Whole Plant
  misc_feature: MA Experiment ID: 20000264 Result: Down-regulated in Transcription
  misc_feature: MA Experiment 20000264 PARAMETER Experiment Name: At_Open_Flower_P Parameter: Age (day) Value: 21
  misc_feature: MA Experiment 20000264 PARAMETER Experiment Name: At_Open_Flower_P Parameter: Plant Line Value: WS
  misc_feature: MA Experiment 20000264 PARAMETER Experiment Name: At_Open_Flower_P Parameter: Tissue Value: Open Flower vs. Whole Plant
  misc_feature: MA Experiment ID: 20000265 Result: Down-regulated in Transcription
  misc_feature: MA Experiment 20000265 PARAMETER Experiment Name: At_Open_Flower_P Parameter: Age (day) Value: 21
  misc_feature: MA Experiment 20000265 PARAMETER Experiment Name: At_Open_Flower_P Parameter: Plant Line Value: WS
  misc_feature: MA Experiment 20000265 PARAMETER Experiment Name: At_Open_Flower_P Parameter: Tissue Value: Closed Flower vs. Whole Plant
  misc_feature: MA Experiment ID: 20001248 Result: Up-regulated in Transcription
  misc_feature: MA Experiment 20001248 PARAMETER Experiment Name: At_Far-red-induction_P Parameter: Age (day) Value: 7
  misc_feature: MA Experiment 20001248 PARAMETER Experiment Name: At_Far-red-induction_P Parameter: Light Value: Far-red vs. White
  misc_feature: MA Experiment 20001248 PARAMETER Experiment Name: At_Far-red-induction_P Parameter: Organism Value: A. thaliana
  misc_feature: MA Experiment 20001248 PARAMETER Experiment Name: At_Far-red-induction_P Parameter: Plant Line Value: Columbia
  misc_feature: MA Experiment 20001248 PARAMETER Experiment Name: At_Far-red-induction_P Parameter: Timepoint (hr) Value: 4
  misc_feature: MA Experiment 20001248 PARAMETER Experiment Name: At_Far-red-induction_P Parameter: Tissue Value: Whole Plant
  misc_feature: MA Experiment ID: 20001904 Result: Down-regulated in Transcription
  misc_feature: MA Experiment 20001904 PARAMETER Experiment Name: At_Drought_Reproduction_P Parameter: Age (day) Value: 37
  misc_feature: MA Experiment 20001904 PARAMETER Experiment Name: At_Drought_Reproduction_P Parameter: Organism Value: A. thaliana
  misc_feature: MA Experiment 20001904 PARAMETER Experiment Name: At_Drought_Reproduction_P Parameter: Plant Line Value: WS
  misc_feature: MA Experiment 20001904 PARAMETER Experiment Name: At_Drought_Reproduction_P Parameter: Timepoint (day) Value: 7
  misc_feature: MA Experiment 20001904 PARAMETER Experiment Name: At_Drought_Reproduction_P Parameter: Tissue Value: Rosettes
  misc_feature: MA Experiment 20001904 PARAMETER Experiment Name: At_Drought_Reproduction_P Parameter: Treatment Value: Drought vs. No Drought
  misc_feature: MA Experiment ID: 20001905 Result: Down-regulated in Transcription
  misc_feature: MA Experiment 20001905 PARAMETER Experiment Name: At_Drought_Reproduction_P Parameter: Age (day) Value: 40
  misc_feature: MA Experiment 20001905 PARAMETER Experiment Name: At_Drought_Reproduction_P Parameter: Organism Value: A. thaliana
  misc_feature: MA Experiment 20001905 PARAMETER Experiment Name: At_Drought_Reproduction_P Parameter: Plant Line Value: WS
  misc_feature: MA Experiment 20001905 PARAMETER Experiment Name: At_Drought_Reproduction_P Parameter: Timepoint (day) Value: 10
  misc_feature: MA Experiment 20001905 PARAMETER Experiment Name: At_Drought_Reproduction_P Parameter: Tissue Value: Rosettes
  misc_feature: MA Experiment 20001905 PARAMETER Experiment Name: At_Drought_Reproduction_P Parameter: Treatment Value: Drought vs. No Drought
aaggaggttgggttggtcgactttgctaagataagagaagagagactgactctctctctctctaactcttcattcttctctcttttaccttctctccaagaaatcttcactttctctctagaaaaaagttggaagctgactcgataaagactctctttttcttcttcttcctgcaaatggcgatcgaggatcaagagaacacaatccgtgaaatcaaacctaagaacagaagaatcatgggagctggtggaccggaggaagaggagaaccggtggccgccatggttgaaacctttgcttaaagagcaattctttgttcattgcaagtttcatggagactctcataagagtgaatgcaatatgtattgcttagactgcaccaatggcccactttgctctctttgtcttgctcatcacaaggatcatcgcaccattcagataaggagatcttcttatcatgatgttataagggtgaatgagatacaaaagtatcttgatataggtgggatccaaacctatgtgatcaatagtgctaaagtcgtcttcctgaatgagaggcctcagcctaggcctgggaaaggagtgaccaatacctgcaaggtttgctatcgtagcctcgttgatgatagcttccgcttctgctctcttggctgcaagattgctggaacatcaagaggctttgaaaagggaagggagaacctgctaatggaaacagaggattcaagtagcagcattgcaattgggaagaacattacaaatctccagagtttcagcccatcaacacctccacttactacatctagtaactgcagaatcgtcaagcgaagaaagggaattcctcaccgatctccaatgggataagaaccgagataagaaagaagctagtttcttcatcagattacacacaaaggttttagctaatacagaggcttcttctgtctcttatctttcctcgtataccaaaagaaatggtcttttgcttgtgttagcaaaaaaagaaaggccttaagttaggttttgttgtcctactacttgggcaaatatgtgaatatgtaatgtgctttgtatatgatgcaaaagggtagaaatggaaatataggggttttagtgggctaaaagtaagaataaaaacaaaattagtttttggtc

SEQ ID NO: 28831 - protein, 227 aa, Arabidopsis thaliana
  peptide (1)..(227): Ceres Seq. ID no. 12334442
  misc_feature (31)..(165): Pfam Name: Protein of unknown function, DUF597 Pfam Description: Protein of unknown function, DUF597
  misc_feature (27)..(167): Homolog of NCBI NO: 21537073 NR Description: unknown [Arabidopsis thaliana]
  misc_feature (27)..(167): Homolog of NCBI NO: 25337907 NR Description: hypothetical protein F9H16.1 - Arabidopsis
  misc_feature (27)..(167): Homolog of NCBI NO: 18394936 NR Description: expressed protein
  misc_feature (1)..(227): Homolog of NCBI NO: 37537092 NR Description: unknown protein [Oryza sativa (japonica
  misc_feature (17)..(227): Homolog of NCBI NO: 38346725 NR Description: OSJNBa0086O06.23 [Oryza sativa (japonica
  misc_feature (1)..(225): Homolog of NCBI NO: 15237491 NR Description: putative protein
  misc_feature (25)..(227): Homolog of NCBI NO: 21554139 NR Description: unknown [Arabidopsis thaliana]
  misc_feature (25)..(227): Homolog of NCBI NO: 18398555 NR Description: expressed protein
  misc_feature (1)..(227): Homolog of NCBI NO: 6714272 NR Description: F6N18.8 [Arabidopsis thaliana]
  misc_feature (1)..(165): Homolog of NCBI NO: 15236696 NR Description: putative protein; protein id: At4g17900.1
MAIEDQENTIREIKPKNRRIMGAGGPEEEENRWPPWLKPLLKEQFFVHCKFHGDSHKSECNMYCLDCTNGPLCSLCLAHHKDHRTIQIRRSSYHDVIRVNEIQKYLDIGGIQTYVINSAKVVFLNERPQPRPGKGVTNTCKVCYRSLVDDSFRFCSLGCKIAGTSRGFEKGRENLLMETEDSSSSIAIGKNITNLQSFSPSTPPLTTSSNCRIVKRRKGIPHRSPMG

SEQ ID NO: 28832 - protein, 207 aa, Arabidopsis thaliana
  peptide (1)..(207): Ceres Seq. ID no. 12334443
  misc_feature (11)..(145): Pfam Name: Protein of unknown function, DUF597 Pfam Description: Protein of unknown function, DUF597
  misc_feature (7)..(147): Homolog of NCBI NO: 21537073 NR Description: unknown [Arabidopsis thaliana]
  misc_feature (7)..(147): Homolog of NCBI NO: 25337907 NR Description: hypothetical protein F9H16.1 - Arabidopsis
  misc_feature (7)..(147): Homolog of NCBI NO: 18394936 NR Description: expressed protein
  misc_feature (1)..(207): Homolog of NCBI NO: 37537092 NR Description: unknown protein [Oryza sativa (japonica
  misc_feature (1)..(207): Homolog of NCBI NO: 38346725 NR Description: OSJNBa0086O06.23 [Oryza sativa (japonica
  misc_feature (1)..(205): Homolog of NCBI NO: 15237491 NR Description: putative protein
  misc_feature (5)..(207): Homolog of NCBI NO: 21554139 NR Description: unknown [Arabidopsis thaliana]
  misc_feature (5)..(207): Homolog of NCBI NO: 18398555 NR Description: expressed protein
  misc_feature (1)..(207): Homolog of NCBI NO: 6714272 NR Description: F6N18.8 [Arabidopsis thaliana]
  misc_feature (1)..(145): Homolog of NCBI NO: 15236696 NR Description: putative protein; protein id: At4g17900.1
MGAGGPEEEENRWPPWLKPLLKEQFFVHCKFHGDSHKSECNMYCLDCTNGPLCSLCLAHHKDHRTIQIRRSSYHDVIRVNEIQKYLDIGGIQTYVINSAKVVFLNERPQPRPGKGVTNTCKVCYRSLVDDSFRFCSLGCKIAGTSRGFEKGRENLLMETEDSSSSIAIGKNITNLQSFSPSTPPLTTSSNCRIVKRRKGIPHRSPMG

SEQ ID NO: 28833 - protein, 166 aa, Arabidopsis thaliana
  peptide (1)..(166): Ceres Seq. ID no. 12334444
  misc_feature (1)..(104): Pfam Name: Protein of unknown function, DUF597 Pfam Description: Protein of unknown function, DUF597
  misc_feature (1)..(106): Homolog of NCBI NO: 21537073 NR Description: unknown [Arabidopsis thaliana]
  misc_feature (1)..(106): Homolog of NCBI NO: 25337907 NR Description: hypothetical protein F9H16.1 - Arabidopsis
  misc_feature (1)..(106): Homolog of NCBI NO: 18394936 NR Description: expressed protein
  misc_feature (1)..(166): Homolog of NCBI NO: 37537092 NR Description: unknown protein [Oryza sativa (japonica
  misc_feature (1)..(166): Homolog of NCBI NO: 38346725 NR Description: OSJNBa0086O06.23 [Oryza sativa (japonica
  misc_feature (1)..(164): Homolog of NCBI NO: 15237491 NR Description: putative protein
  misc_feature (1)..(166): Homolog of NCBI NO: 21554139 NR Description: unknown [Arabidopsis thaliana]
  misc_feature (1)..(166): Homolog of NCBI NO: 18398555 NR Description: expressed protein
  misc_feature (1)..(166): Homolog of NCBI NO: 6714272 NR Description: F6N18.8 [Arabidopsis thaliana]
  misc_feature (1)..(104): Homolog of NCBI NO: 15236696 NR Description: putative protein; protein id: At4g17900.1
MYCLDCTNGPLCSLCLAHHKDHRTIQIRRSSYHDVIRVNEIQKYLDIGGIQTYVINSAKVVFLNERPQPRPGKGVTNTCKVCYRSLVDDSFRFCSLGCKIAGTSRGFEKGRENLLMETEDSSSSIAIGKNITNLQSFSPSTPPLTTSSNCRIVKRRKGIPHRSPMG

SEQ ID NO: 28834 - DNA, 1854 bp, Arabidopsis thaliana
  misc_feature (1)..(1854): Ceres Seq. ID no. 13499750
  misc_feature: MA Experiment ID: 20000184 Result: Down-regulated in Transcription
  misc_feature: MA Experiment 20000184 PARAMETER Experiment Name: At_Shoots__P Parameter: Age (day) Value: 7
  misc_feature: MA Experiment 20000184 PARAMETER Experiment Name: At_Shoots__P Parameter: Tissue Value: Shoots vs. Whole Plant
  misc_feature: MA Experiment ID: 20001451 Result: Up-regulated in Transcription
  misc_feature: MA Experiment 20001451 PARAMETER Experiment Name: At_Far-red-induction_P Parameter: Age (day) Value: 7
  misc_feature: MA Experiment 20001451 PARAMETER Experiment Name: At_Far-red-induction_P Parameter: Light Value: Far-red vs. White
  misc_feature: MA Experiment 20001451 PARAMETER Experiment Name: At_Far-red-induction_P Parameter: Organism Value: A. thaliana
  misc_feature: MA Experiment 20001451 PARAMETER Experiment Name: At_Far-red-induction_P Parameter: Plant Line Value: Columbia
  misc_feature: MA Experiment 20001451 PARAMETER Experiment Name: At_Far-red-induction_P Parameter: Timepoint (hr) Value: 24
  misc_feature: MA Experiment 20001451 PARAMETER Experiment Name: At_Far-red-induction_P Parameter: Tissue Value: Whole Plant
ggtggcgttaagtcgttaactgcgtctgatctactcgtagcttcttcgttcttcagcatttgatcggagtagtgacctttttgattgacagatggaagctctgtcttctcttacgttcaagggttctcttccagaagccatatttgaagccaaagggaagaagaagctttttgttgtctacatttctggagaggatgaagagtcggataagttgaacagattgacttggactgatgcatcggtggcagattcgttgtcgaagtattgtattttagtgcatatccaagctggaagtgttgacgccacaaacttctctgcaatatacccatattcatctgttccttgtatagctgccattggattcagtggtacacaagtttggagaaccgaaggatttatcactgctgaagaccttgcatccagtttagagaaagcgtggttaggacttcatatccaggaaacaactgcaagtatcttttcagcagcacttgcatcacagaactcagagacacctgtttctagtgcttcgagtgttgtcttgcctcccggaagtgttcctttagatgcagcggttgcatctccatcgacggcttctagtgttcaaccctcagagacaaagtcaacggtaacatctgcatcaacaacagaaaacaatgatggcacagttgcagttaagggcaaagaatctgctgaacccagtaatttgtgtgatactactaaaaaccagccagcaccctctgttgatggaactaaggccaatgttgaacatgaagcgacagagacccctttgcgtgttcaggcagaaaaggagccaattcgtcctacagccccaggaacaaatgataatacatccagggttcgatcttctgttgatagaaaaaggaaacagggaactgtgataaatgaagaggatagtggtgtaggtgttagtggaagggacattaatctaacaaaatctgtcgatacaaaagagaccatgaagccaaaggatgaaggaggagaggaagaggatggagaaaaatccaaaaaagcatctgacgttcatttaaacattcgattacctgatggtagtagccttcaggagaagttttctgtgacaagtatattgagaatggtcaaggattatgtgaacagtaatcaaacaatcggactgggtgcttatgatcttgcggttccttacccacgtaaggtgtatactgaccaagatctggataagtctctatccgagttgagattgttcgatagacaagcacttgtagtagttccgcgaaaaagagcaaccgtctatcaaagaggaacatcttactcggagtctaacaacaacacagaccctaatagtggcggttactttgcttatgttagaagagtactgtcttatgcaaacccgttttcatattttggcggtggtactgccaacgcatcaagctctgttccagaacgtcaaacaagaccaaatacggaggtgagaaacaatctggggcaagtagggacgtcctttcaagatccatcagaaggtaggagcaacgttaggaataggagaccaaccacttctcggattggaagtaacatccatacgttgaatcacaatgaagatgaggctccgtttggtgatggaaacgctttttggaacggaaactccacacagtacggtggtggaagcggtggagacagtaatgatagacgatgaaataagagaagttgaaatctgtgtggatagatacagaaacagctcgggtgtttactttttatacttgactctttatgaaccatttaagagaccagctgcaaaatgtatcctgatgcgtttccgttttttcggttgctcgtattaaatttaaatctaaaaaaactacc

SEQ ID NO: 28835 - protein, 531 aa, Arabidopsis thaliana
  peptide (1)..(531): Ceres Seq. ID no. 13499751
  misc_feature (311)..(392): Pfam Name: UBX domain Pfam Description: UBX domain
  misc_feature (7)..(203): Homolog of NCBI NO: 12847220 NR Description: unnamed protein product [Mus musculus]
  misc_feature (7)..(203): Homolog of NCBI NO: 12859540 NR Description: unnamed protein product [Mus musculus]
  misc_feature (7)..(518): Homolog of NCBI NO: 23956178 NR Description: RIKEN cDNA 1300013G12 [Mus musculus]
  misc_feature (7)..(518): Homolog of NCBI NO: 26344511 NR Description: unnamed protein product [Mus musculus]
  misc_feature (7)..(518): Homolog of NCBI NO: 1663704 NR Description: KIAA0242 protein [Homo sapiens]
  misc_feature (7)..(518): Homolog of NCBI NO: 24307965 NR Description: UBX domain containing 2
  misc_feature (9)..(518): Homolog of NCBI NO: 40555755 NR Description: Unknown (protein for MGC:73362) [Danio rerio]
  misc_feature (1)..(452): Homolog of NCBI NO: 25408846 NR Description: hypothetical protein At2g43210 [imported] -
  misc_feature (1)..(531): Homolog of NCBI NO: 20147205 NR Description: MFL8.1/MFL8.1 [Arabidopsis thaliana]
  misc_feature (1)..(531): Homolog of NCBI NO: 30689298 NR Description: expressed protein [Arabidopsis thaliana]
MEALSSLTFKGSLPEAIFEAKGKKKLFVVYISGEDEESDKLNRLTWTDASVADSLSKYCILVHIQAGSVDATNFSAIYPYSSVPCIAAIGFSGTQVWRTEGFITAEDLASSLEKAWLGLHIQETTASIFSAALASQNSETPVSSASSVVLPPGSVPLDAAVASPSTASSVQPSETKSTVTSASTTENNDGTVAVKGKESAEPSNLCDTTKNQPAPSVDGTKANVEHEATETPLRVQAEKEPIRPTAPGTNDNTSRVRSSVDRKRKQGTVINEEDSGVGVSGRDINLTKSVDTKETMKPKDEGGEEEDGEKSKKASDVHLNIRLPDGSSLQEKFSVTSILRMVKDYVNSNQTIGLGAYDLAVPYPRKVYTDQDLDKSLSELRLFDRQALVVVPRKRATVYQRGTSYSESNNNTDPNSGGYFAYVRRVLSYANPFSYFGGGTANASSSVPERQTRPNTEVRNNLGQVGTSFQDPSEGRSNVRNRRPTTSRIGSNIHTLNHNEDEAPFGDGNAFWNGNSTQYGGGSGGDSNDRR

SEQ ID NO: 28836 - DNA, 1377 bp, Arabidopsis thaliana
  misc_feature (1)..(1377): Ceres Seq. ID no. 13487616
  misc_feature: MA Experiment ID: 108434 Result: Down-regulated in Transcription
  misc_feature: MA Experiment 108434 PARAMETER Experiment Name: At_Root_Tips_cDNA_P Parameter: Tissue Value: Root Tips
  misc_feature: MA Experiment ID: 108462 Result: Up-regulated in Transcription
  misc_feature: MA Experiment 108462 PARAMETER Experiment Name: At_Germinating_Seeds_cDNA_P Parameter: Age (day) Value: 2 vs. 0
  misc_feature: MA Experiment 108462 PARAMETER Experiment Name: At_Germinating_Seeds_cDNA_P Parameter: Tissue Value: Germinating Seeds
  misc_feature: MA Experiment ID: 108463 Result: Up-regulated in Transcription
  misc_feature: MA Experiment 108463 PARAMETER Experiment Name: At_Germinating_Seeds_cDNA_P Parameter: Age (day) Value: 3 vs. 0
  misc_feature: MA Experiment 108463 PARAMETER Experiment Name: At_Germinating_Seeds_cDNA_P Parameter: Tissue Value: Germinating Seeds
  misc_feature: MA Experiment ID: 108488 Result: Down-regulated in Transcription
  misc_feature: MA Experiment ID: 108594 Result: Down-regulated in Transcription
  misc_feature: MA Experiment 108594 PARAMETER Experiment Name: At_Ler-rhl_Root_cDNA_P Parameter: Plant Line Value: null
  misc_feature: MA Experiment ID: 108595 Result: Down-regulated in Transcription
  misc_feature: MA Experiment 108595 PARAMETER Experiment Name: At_Ler-pi_Ovule_cDNA_P Parameter: Plant Line Value: null
  misc_feature: MA Experiment ID: 20000071 Result: Up-regulated in Transcription
  misc_feature: MA Experiment 20000071 PARAMETER Experiment Name: At_100uM_ABA_Mutants_cDNA_P Parameter: Plant Line Value: CS8104
  misc_feature: MA Experiment 20000071 PARAMETER Experiment Name: At_100uM_ABA_Mutants_cDNA_P Parameter: Timepoint (hr) Value: 6
  misc_feature: MA Experiment 20000071 PARAMETER Experiment Name: At_100uM_ABA_Mutants_cDNA_P Parameter: Tissue Value: Aerial
  misc_feature: MA Experiment 20000071 PARAMETER Experiment Name: At_100uM_ABA_Mutants_cDNA_P Parameter: Treatment Value: 100uM ABA vs. No Treatment
  misc_feature: MA Experiment ID: 20000306 Result: Up-regulated in Transcription
  misc_feature: MA Experiment 20000306 PARAMETER Experiment Name: At_Germinating_Seeds_Sub_P Parameter: Age (hr) Value: 6 vs. 0
  misc_feature: MA Experiment 20000306 PARAMETER Experiment Name: At_Germinating_Seeds_Sub_P Parameter: Organism Value: A. thaliana
  misc_feature: MA Experiment 20000306 PARAMETER Experiment Name: At_Germinating_Seeds_Sub_P Parameter: Plant Line Value: WS
  misc_feature: MA Experiment 20000306 PARAMETER Experiment Name: At_Germinating_Seeds_Sub_P Parameter: Tissue Value: Germinating Seeds
  misc_feature: MA Experiment ID: 20000307 Result: Up-regulated in Transcription
  misc_feature: MA Experiment 20000307 PARAMETER Experiment Name: At_Germinating_Seeds_Sub_P Parameter: Age (hr) Value: 24 vs. 0
  misc_feature: MA Experiment 20000307 PARAMETER Experiment Name: At_Germinating_Seeds_Sub_P Parameter: Organism Value: A. thaliana
  misc_feature: MA Experiment 20000307 PARAMETER Experiment Name: At_Germinating_Seeds_Sub_P Parameter: Plant Line Value: WS
  misc_feature: MA Experiment 20000307 PARAMETER Experiment Name: At_Germinating_Seeds_Sub_P Parameter: Tissue Value: Germinating Seeds
  misc_feature: MA Experiment ID: 20000328 Result: Down-regulated in Transcription
  misc_feature: MA Experiment 20000328 PARAMETER Experiment Name: At_42deg_Heat_Sub_P Parameter: Age (day) Value: 14
  misc_feature: MA Experiment 20000328 PARAMETER Experiment Name: At_42deg_Heat_Sub_P Parameter: Organism Value: A. thaliana
  misc_feature: MA Experiment 20000328 PARAMETER Experiment Name: At_42deg_Heat_Sub_P Parameter: Plant Line Value: WS
  misc_feature: MA Experiment 20000328 PARAMETER Experiment Name: At_42deg_Heat_Sub_P Parameter: Temperature (deg C) Value: 42 vs. 22
  misc_feature: MA Experiment 20000328 PARAMETER Experiment Name: At_42deg_Heat_Sub_P Parameter: Timepoint (hr) Value: 6
  misc_feature: MA Experiment 20000328 PARAMETER Experiment Name: At_42deg_Heat_Sub_P Parameter: Tissue Value: Aerial
  misc_feature: MA Experiment ID: 20000329 Result: Down-regulated in Transcription
  misc_feature: MA Experiment 20000329 PARAMETER Experiment Name: At_4deg_Cold_Sub_P Parameter: Age (day) Value: 14
  misc_feature: MA Experiment 20000329 PARAMETER Experiment Name: At_4deg_Cold_Sub_P Parameter: Organism Value: A. thaliana
  misc_feature: MA Experiment 20000329 PARAMETER Experiment Name: At_4deg_Cold_Sub_P Parameter: Plant Line Value: WS
  misc_feature: MA Experiment 20000329 PARAMETER Experiment Name: At_4deg_Cold_Sub_P Parameter: Temperature (deg C) Value: 4 vs. 22
  misc_feature: MA Experiment 20000329 PARAMETER Experiment Name: At_4deg_Cold_Sub_P Parameter: Timepoint (hr) Value: 6
  misc_feature: MA Experiment 20000329 PARAMETER Experiment Name: At_4deg_Cold_Sub_P Parameter: Tissue Value: Aerial
  misc_feature: MA Experiment ID: 20000355 Result: Down-regulated in Transcription
  misc_feature: MA Experiment 20000355 PARAMETER Experiment Name: At_Siliques_Sub_P Parameter: Age (day) Value: 21
  misc_feature: MA Experiment 20000355 PARAMETER Experiment Name: At_Siliques_Sub_P Parameter: Organism Value: A. thaliana
  misc_feature: MA Experiment 20000355 PARAMETER Experiment Name: At_Siliques_Sub_P Parameter: Plant Line Value: WS
  misc_feature: MA Experiment 20000355 PARAMETER Experiment Name: At_Siliques_Sub_P Parameter: Tissue Value: Less Than 5mm Siliques vs. Whole Plant
  misc_feature: MA Experiment ID: 20000440 Result: Down-regulated in Transcription
  misc_feature: MA Experiment 20000440 PARAMETER Experiment Name: At_Closed-Flower__Sub_P Parameter: Tissue Value: Closed Flower vs. Whole Plant
acttccctttgttcagacgtttctttattcttcttccttccttcttctccttcttcttgatcgtgttcagaaatcatattcatcacctctctctctctatgtctctatatttggattctttataacatgtgagatcgatctatttttgatcagagacagagagaagactagaagaagcaaagaatatttcaagaatgatgaagatgaatacaggaacatcgccgtcggtcatcggcggcgggactagtggtaatgagtgggagtctcgacctggaggaatggttgttcaacgtcggacagatcagaactccgatgtgccacgtgtctttcgtgttcgggttaaatacgggtcggtttatcacgagatcaacatcaattcccaatcttccttcggagagttgaagaagatgttgtctgatcaagtgggacttcaccatgaagacatgaaggttttgtacaaagacaaagagagagattcaaagatgtttcttgatctttgtggagttaaagatcggtcaaagcttgttgttaaagaagatccaatttctcaggagaaacgtctccttgcaaaaaggaaaaacgccgccattgaaaaagcttctaaatctatctctgatattagtttcgaagtcgacagactcgccggacaggtgtcggcgtttgagacggtgattaataaaggaggtaaagttgaagagaagagtcttgtgaatctgatagagatgttgatgaatcagttattgagacttgatgctattattgctgatggtgatgtcaaattgatgaggaagatgcaggtgcaaagagttcagaagtacgttgaggcactcgacctcttaaaagtcaaaaactctgccaaaaaagttgaagtcaacaagtccgtccgccacaaaccgcaaacgcaaacgcgatttgagcaacgcgatttgttatcgtttgtggaggaagaggaggaggagcctaggaattccaatgcatcatcctcatcaggtactccggcggttgtagcttcaaaatgggaaatgtttgattccgcatcgacggccaaggcggctgaaacggttaaaccggtccctccgcgattcaaatgggaattcttcgattaagatgaacactatatatacatacatgataaatatgtcttttttttctccggtttcatatgtgatttgttttgtttttcatctcaactgagatgtgtatgatttgtgatttgatcttggctattttttgaggctttgtctagaatatcttttggttggactcccttttaagtcaatcaaaaataataggggagtttcaacaattactatcattgtaatacctaaagatttggattttctttactattacaataaaaagctatcaaaaagatgc

SEQ ID NO: 28837 - protein, 303 aa, Arabidopsis thaliana
  peptide (1)..(303): Ceres Seq. ID no. 13487617
  misc_feature (138)..(216): Pfam Name: BAG domain Pfam Description: BAG domain
  misc_feature (78)..(255): Homolog of NCBI NO: 10334497 NR Description: hypothetical protein [Cicer arietinum]
  misc_feature (7)..(302): Homolog of NCBI NO: 34898024 NR Description: ESTs AU082174(S13676),AU032395(R3986) correspond a region of the predicted gene.~Similar to Arabidopsis thaliana
  misc_feature (7)..(302): Homolog of NCBI NO: 25553557 NR Description: OSJNBa0038F22.4 [Oryza sativa (japonica
  misc_feature (68)..(303): Homolog of NCBI NO: 10176928 NR Description: contains similarity to unknown
  misc_feature (14)..(279): Homolog of NCBI NO: 15242267 NR Description: BAG domain containing protein [Arabidopsis
  misc_feature (13)..(303): Homolog of NCBI NO: 21553443 NR Description: unknown [Arabidopsis thaliana]
  misc_feature (1)..(303): Homolog of NCBI NO: 30697627 NR Description: BAG domain containing protein [Arabidopsis
  misc_feature (1)..(303): Homolog of NCBI NO: 30697630 NR Description: BAG domain containing protein [Arabidopsis
  misc_feature (4)..(303): Homolog of NCBI NO: 21537107 NR Description: unknown [Arabidopsis thaliana]
  misc_feature (1)..(303): Homolog of NCBI NO: 15240726 NR Description: BAG domain containing protein [Arabidopsis
MMKMNTGTSPSVIGGGTSGNEWESRPGGMVVQRRTDQNSDVPRVFRVRVKYGSVYHEININSQSSFGELKKMLSDQVGLHHEDMKVLYKDKERDSKMFLDLCGVKDRSKLVVKEDPISQEKRLLAKRKNAAIEKASKSISDISFEVDRLAGQVSAFETVINKGGKVEEKSLVNLIEMLMNQLLRLDAIIADGDVKLMRKMQVQRVQKYVEALDLLKVKNSAKKVEVNKSVRHKPQTQTRFEQRDLLSFVEEEEEEPRNSNASSSSGTPAVVASKWEMFDSASTAKAAETVKPVPPRFKWEFFD

SEQ ID NO: 28838 - protein, 302 aa, Arabidopsis thaliana
  peptide (1)..(302): Ceres Seq. ID no. 13487618
  misc_feature (137)..(215): Pfam Name: BAG domain Pfam Description: BAG domain
  misc_feature (77)..(254): Homolog of NCBI NO: 10334497 NR Description: hypothetical protein [Cicer arietinum]
  misc_feature (6)..(301): Homolog of NCBI NO: 34898024 NR Description: ESTs AU082174(S13676),AU032395(R3986) correspond a region of the predicted gene.~Similar to Arabidopsis thaliana
  misc_feature (6)..(301): Homolog of NCBI NO: 25553557 NR Description: OSJNBa0038F22.4 [Oryza sativa (japonica
  misc_feature (67)..(302): Homolog of NCBI NO: 10176928 NR Description: contains similarity to unknown
  misc_feature (13)..(278): Homolog of NCBI NO: 15242267 NR Description: BAG domain containing protein [Arabidopsis
  misc_feature (12)..(302): Homolog of NCBI NO: 21553443 NR Description: unknown [Arabidopsis thaliana]
  misc_feature (1)..(302): Homolog of NCBI NO: 30697627 NR Description: BAG domain containing protein [Arabidopsis
  misc_feature (1)..(302): Homolog of NCBI NO: 30697630 NR Description: BAG domain containing protein [Arabidopsis
  misc_feature (3)..(302): Homolog of NCBI NO: 21537107 NR Description: unknown [Arabidopsis thaliana]
  misc_feature (1)..(302): Homolog of NCBI NO: 15240726 NR Description: BAG domain containing protein [Arabidopsis
MKMNTGTSPSVIGGGTSGNEWESRPGGMVVQRRTDQNSDVPRVFRVRVKYGSVYHEININSQSSFGELKKMLSDQVGLHHEDMKVLYKDKERDSKMFLDLCGVKDRSKLVVKEDPISQEKRLLAKRKNAAIEKASKSISDISFEVDRLAGQVSAFETVINKGGKVEEKSLVNLIEMLMNQLLRLDAIIADGDVKLMRKMQVQRVQKYVEALDLLKVKNSAKKVEVNKSVRHKPQTQTRFEQRDLLSFVEEEEEEPRNSNASSSSGTPAVVASKWEMFDSASTAKAAETVKPVPPRFKWEFFD

SEQ ID NO: 28839 - protein, 300 aa, Arabidopsis thaliana
  peptide (1)..(300): Ceres Seq. ID no. 13487619
  misc_feature (135)..(213): Pfam Name: BAG domain Pfam Description: BAG domain
  misc_feature (75)..(252): Homolog of NCBI NO: 10334497 NR Description: hypothetical protein [Cicer arietinum]
  misc_feature (4)..(299): Homolog of NCBI NO: 34898024 NR Description: ESTs AU082174(S13676),AU032395(R3986) correspond a region of the predicted gene.~Similar to Arabidopsis thaliana
  misc_feature (4)..(299): Homolog of NCBI NO: 25553557 NR Description: OSJNBa0038F22.4 [Oryza sativa (japonica
  misc_feature (65)..(300): Homolog of NCBI NO: 10176928 NR Description: contains similarity to unknown
  misc_feature (11)..(276): Homolog of NCBI NO: 15242267 NR Description: BAG domain containing protein [Arabidopsis
  misc_feature (10)..(300): Homolog of NCBI NO: 21553443 NR Description: unknown [Arabidopsis thaliana]
  misc_feature (1)..(300): Homolog of NCBI NO: 30697627 NR Description: BAG domain containing protein [Arabidopsis
  misc_feature (1)..(300): Homolog of NCBI NO: 30697630 NR Description: BAG domain containing protein [Arabidopsis
  misc_feature (1)..(300): Homolog of NCBI NO: 21537107 NR Description: unknown [Arabidopsis thaliana]
  misc_feature (1)..(300): Homolog of NCBI NO: 15240726 NR Description: BAG domain containing protein [Arabidopsis
MNTGTSPSVIGGGTSGNEWESRPGGMVVQRRTDQNSDVPRVFRVRVKYGSVYHEININSQSSFGELKKMLSDQVGLHHEDMKVLYKDKERDSKMFLDLCGVKDRSKLVVKEDPISQEKRLLAKRKNAAIEKASKSISDISFEVDRLAGQVSAFETVINKGGKVEEKSLVNLIEMLMNQLLRLDAIIADGDVKLMRKMQVQRVQKYVEALDLLKVKNSAKKVEVNKSVRHKPQTQTRFEQRDLLSFVEEEEEEPRNSNASSSSGTPAVVASKWEMFDSASTAKAAETVKPVPPRFKWEFFD

SEQ ID NO: 28840 - DNA, 1159 bp, Arabidopsis thaliana
  misc_feature (1)..(1159): Ceres Seq. ID no. 12335058
  misc_feature: MA Experiment ID: 108461 Result: Up-regulated in Transcription
  misc_feature: MA Experiment 108461 PARAMETER Experiment Name: At_Germinating_Seeds_cDNA_P Parameter: Age (day) Value: 1 vs. 0
  misc_feature: MA Experiment 108461 PARAMETER Experiment Name: At_Germinating_Seeds_cDNA_P Parameter: Tissue Value: Germinating Seeds
  misc_feature: MA Experiment ID: 108595 Result: Down-regulated in Transcription
  misc_feature: MA Experiment 108595 PARAMETER Experiment Name: At_Ler-pi_Ovule_cDNA_P Parameter: Plant Line Value: null
  misc_feature: MA Experiment ID: 108668 Result: Down-regulated in Transcription
  misc_feature: MA Experiment 108668 PARAMETER Experiment Name: At_2mM_SA_cDNA_P Parameter: Plant Line Value: WS
  misc_feature: MA Experiment 108668 PARAMETER Experiment Name: At_2mM_SA_cDNA_P Parameter: Timepoint (hr) Value: 6
  misc_feature: MA Experiment 108668 PARAMETER Experiment Name: At_2mM_SA_cDNA_P Parameter: Treatment Value: 2mM SA vs. No Treatment
  misc_feature: MA Experiment ID: 20001556 Result: Up-regulated in Transcription
  misc_feature: MA Experiment 20001556 PARAMETER Experiment Name: At_Drought_Soil_Dry_P Parameter: Age (day) Value: 26
  misc_feature: MA Experiment 20001556 PARAMETER Experiment Name: At_Drought_Soil_Dry_P Parameter: Organism Value: A. thaliana
  misc_feature: MA Experiment 20001556 PARAMETER Experiment Name: At_Drought_Soil_Dry_P Parameter: Plant Line Value: WS
  misc_feature: MA Experiment 20001556 PARAMETER Experiment Name: At_Drought_Soil_Dry_P Parameter: Post Timepoint (hr) Value: None
  misc_feature: MA Experiment 20001556 PARAMETER Experiment Name: At_Drought_Soil_Dry_P Parameter: Post-Treatment Value: None
  misc_feature: MA Experiment 20001556 PARAMETER Experiment Name: At_Drought_Soil_Dry_P Parameter: Timepoint (day) Value: 12
  misc_feature: MA Experiment 20001556 PARAMETER Experiment Name: At_Drought_Soil_Dry_P Parameter: Treatment Value: Drought vs. No Drought
  misc_feature: MA Experiment ID: 20001904 Result: Up-regulated in Transcription
  misc_feature: MA Experiment 20001904 PARAMETER Experiment Name: At_Drought_Reproduction_P Parameter: Age (day) Value: 37
  misc_feature: MA Experiment 20001904 PARAMETER Experiment Name: At_Drought_Reproduction_P Parameter: Organism Value: A. thaliana
  misc_feature: MA Experiment 20001904 PARAMETER Experiment Name: At_Drought_Reproduction_P Parameter: Plant Line Value: WS
  misc_feature: MA Experiment 20001904 PARAMETER Experiment Name: At_Drought_Reproduction_P Parameter: Timepoint (day) Value: 7
  misc_feature: MA Experiment 20001904 PARAMETER Experiment Name: At_Drought_Reproduction_P Parameter: Tissue Value: Rosettes
  misc_feature: MA Experiment 20001904 PARAMETER Experiment Name: At_Drought_Reproduction_P Parameter: Treatment Value: Drought vs. No Drought
aagatttttacagattctgcctcgatcaacagactctaatcagcagcaaatgtggagcgtcaccggagcattgactgtggcggtgccgcctaccgccgccgcttgccgtacgaaaccctttctcatctcctcttcctttcccaagcagacaaagaaactccatctctcttcgccttctctgtctctaccatcatcacatttctcctcctctttcaaaaccgcagctacctccatcgagcaacagtcttctgttaacaagggagagagcaccaagtaccatttcctggtagcaaacgctaaattcatgcttgacgaagaggagcacttccaggagcaattgtttgaacgtctccgttacttcggtgagcgtgaattagtgcaagacttctggcttgtcattgagcctaaattccttgacaatttccccaaaattactcaaagacttcgtcgtcctgctgttgctcttgtttccaccaatggcacctggatcacgtttatgaagttaagattggatcgtgttctgtatgattcctttgaagctacctctcttgatgaagctttggcctccaatcctaccactcttgagttcgataagcctaaaaattgggtggcgccataccccaagtatgaacctggatggtgggataccttcttgcctaaagtaacccaagaatctgcagtatagaactttgctttttgtcttgtttttgcattctccaatctcagctttgtcttagtgcttcaaagttttgtactactgagctcattatccaagtctatatctttcctagtgtagcttctattactcaaagttgcctgtttgatacgtcactgactcaaggttaagcatagaactagacaacaaaaagcatcctcacatttagctccatcaaagtcttaagggtgaccatatttgttgatttctcacgagaatattggcaagaaccttcagttaaagctctaggtattaagttgtctagtcacaggagggcaatatgcctactcgctgaagaactttgcaaaagatctgaattttttggttttcaaaacgatttgtggactcggaacatgttgttactcgttaggtctagtgactggagttgatcaaagtaagttgcacatgtttctgctgaatcaagtgttctatgttgtacttctg

SEQ ID NO: 28841 - protein, 227 aa, Arabidopsis thaliana
  peptide (1)..(227): Ceres Seq. ID no. 12335059
  misc_feature (92)..(182): Homolog of NCBI NO: 37520451 NR Description: hypothetical protein [Gloeobacter violaceus]
  misc_feature (90)..(179): Homolog of NCBI NO: 11465670 NR Description: ORF108 [Porphyra purpurea]
  misc_feature (90)..(179): Homolog of NCBI NO: 33861662 NR Description: conserved hypothetical protein
  misc_feature (92)..(189): Homolog of NCBI NO: 22299042 NR Description: ORF_ID:tll1499~hypothetical protein
  misc_feature (92)..(192): Homolog of NCBI NO: 17227712 NR Description: hypothetical protein [Nostoc sp. PCC 7120]
  misc_feature (92)..(189): Homolog of NCBI NO: 16329384 NR Description: hypothetical protein [Synechocystis sp. PCC 6803]
  misc_feature (92)..(192): Homolog of NCBI NO: 23042740 NR Description: hypothetical protein [Trichodesmium erythraeum
  misc_feature (92)..(192): Homolog of NCBI NO: 23129763 NR Description: hypothetical protein [Nostoc punctiforme]
  misc_feature (90)..(189): Homolog of NCBI NO: 33865445 NR Description: conserved hypothetical protein [Synechococcus sp.
  misc_feature (17)..(227): Homolog of NCBI NO: 15237144 NR Description: similar to unknown protein (sp|P72777); protein
RFLQILPRSTDSNQQQMWSVTGALTVAVPPTAAACRTKPFLISSSFPKQTKKLHLSSPSLSLPSSHFSSSFKTAATSIEQQSSVNKGESTKYHFLVANAKFMLDEEEHFQEQLFERLRYFGERELVQDFWLVIEPKFLDNFPKITQRLRRPAVALVSTNGTWITFMKLRLDRVLYDSFEATSLDEALASNPTTLEFDKPKNWVAPYPKYEPGWWDTFLPKVTQESAV

SEQ ID NO: 28842 - protein, 211 aa, Arabidopsis thaliana
  peptide (1)..(211): Ceres Seq. ID no. 12335060
  misc_feature (76)..(166): Homolog of NCBI NO: 37520451 NR Description: hypothetical protein [Gloeobacter violaceus]
  misc_feature (74)..(163): Homolog of NCBI NO: 11465670 NR Description: ORF108 [Porphyra purpurea]
  misc_feature (74)..(163): Homolog of NCBI NO: 33861662 NR Description: conserved hypothetical protein
  misc_feature (76)..(173): Homolog of NCBI NO: 22299042 NR Description: ORF_ID:tll1499~hypothetical protein
  misc_feature (76)..(176): Homolog of NCBI NO: 17227712 NR Description: hypothetical protein [Nostoc sp. PCC 7120]
  misc_feature (76)..(173): Homolog of NCBI NO: 16329384 NR Description: hypothetical protein [Synechocystis sp. PCC 6803]
  misc_feature (76)..(176): Homolog of NCBI NO: 23042740 NR Description: hypothetical protein [Trichodesmium erythraeum
  misc_feature (76)..(176): Homolog of NCBI NO: 23129763 NR Description: hypothetical protein [Nostoc punctiforme]
  misc_feature (74)..(173): Homolog of NCBI NO: 33865445 NR Description: conserved hypothetical protein [Synechococcus sp.
  misc_feature (1)..(211): Homolog of NCBI NO: 15237144 NR Description: similar to unknown protein (sp|P72777); protein
MWSVTGALTVAVPPTAAACRTKPFLISSSFPKQTKKLHLSSPSLSLPSSHFSSSFKTAATSIEQQSSVNKGESTKYHFLVANAKFMLDEEEHFQEQLFERLRYFGERELVQDFWLVIEPKFLDNFPKITQRLRRPAVALVSTNGTWITFMKLRLDRVLYDSFEATSLDEALASNPTTLEFDKPKNWVAPYPKYEPGWWDTFLPKVTQESAV

SEQ ID NO: 28843 - protein, 126 aa, Arabidopsis thaliana
  peptide (1)..(126): Ceres Seq. ID no. 12335061
  misc_feature (1)..(81): Homolog of NCBI NO: 37520451 NR Description: hypothetical protein [Gloeobacter violaceus]
  misc_feature (1)..(78): Homolog of NCBI NO: 11465670 NR Description: ORF108 [Porphyra purpurea]
  misc_feature (1)..(78): Homolog of NCBI NO: 33861662 NR Description: conserved hypothetical protein
  misc_feature (1)..(88): Homolog of NCBI NO: 22299042 NR Description: ORF_ID:tll1499~hypothetical protein
  misc_feature (1)..(91): Homolog of NCBI NO: 17227712 NR Description: hypothetical protein [Nostoc sp. PCC 7120]
  misc_feature (1)..(88): Homolog of NCBI NO: 16329384 NR Description: hypothetical protein [Synechocystis sp. PCC 6803]
  misc_feature (1)..(91): Homolog of NCBI NO: 23042740 NR Description: hypothetical protein [Trichodesmium erythraeum
  misc_feature (1)..(91): Homolog of NCBI NO: 23129763 NR Description: hypothetical protein [Nostoc punctiforme]
  misc_feature (1)..(88): Homolog of NCBI NO: 33865445 NR Description: conserved hypothetical protein [Synechococcus sp.
  misc_feature (1)..(126): Homolog of NCBI NO: 15237144 NR Description: similar to unknown protein (sp|P72777); protein
MLDEEEHFQEQLFERLRYFGERELVQDFWLVIEPKFLDNFPKITQRLRRPAVALVSTNGTWITFMKLRLDRVLYDSFEATSLDEALASNPTTLEFDKPKNWVAPYPKYEPGWWDTFLPKVTQESAV

SEQ ID NO: 28844 - DNA, 1387 bp, Arabidopsis thaliana
  misc_feature (1)..(1387): Ceres Seq. ID no. 12439771
  misc_feature: MA Experiment ID: 108434 Result: Down-regulated in Transcription
  misc_feature: MA Experiment 108434 PARAMETER Experiment Name: At_Root_Tips_cDNA_P Parameter: Tissue Value: Root Tips
  misc_feature: MA Experiment ID: 108435 Result: Up-regulated in Transcription
  misc_feature: MA Experiment 108435 PARAMETER Experiment Name: At_stm_Mutants_cDNA_P Parameter: Plant Line Value: wt Landsburg vs stm
  misc_feature: MA Experiment 108435 PARAMETER Experiment Name: At_stm_Mutants_cDNA_P Parameter: Tissue Value: Shoot Apical Meristem Region
  misc_feature: MA Experiment ID: 108464 Result: Down-regulated in Transcription
  misc_feature: MA Experiment 108464 PARAMETER Experiment Name: At_Germinating_Seeds_cDNA_P Parameter: Age (day) Value: 4 vs. 0
  misc_feature: MA Experiment 108464 PARAMETER Experiment Name: At_Germinating_Seeds_cDNA_P Parameter: Tissue Value: Germinating Seeds
  misc_feature: MA Experiment ID: 20000070 Result: Up-regulated in Transcription
  misc_feature: MA Experiment 20000070 PARAMETER Experiment Name: At_100uM_ABA_Mutants_cDNA_P Parameter: Plant Line Value: CS24
  misc_feature: MA Experiment 20000070 PARAMETER Experiment Name: At_100uM_ABA_Mutants_cDNA_P Parameter: Timepoint (hr) Value: 6
  misc_feature: MA Experiment 20000070 PARAMETER Experiment Name: At_100uM_ABA_Mutants_cDNA_P Parameter: Tissue Value: Aerial
  misc_feature: MA Experiment 20000070 PARAMETER Experiment Name: At_100uM_ABA_Mutants_cDNA_P Parameter: Treatment Value: 100uM ABA vs. No Treatment
  misc_feature: MA Experiment ID: 20000179 Result: Up-regulated in Transcription
  misc_feature: MA Experiment 20000179 PARAMETER Experiment Name: At_Germinating_Seeds_P Parameter: Age (hr) Value: 6 vs. 0
  misc_feature: MA Experiment 20000179 PARAMETER Experiment Name: At_Germinating_Seeds_P Parameter: Tissue Value: Germinating Seeds
  misc_feature: MA Experiment ID: 20000264 Result: Up-regulated in Transcription
  misc_feature: MA Experiment 20000264 PARAMETER Experiment Name: At_Open_Flower_P Parameter: Age (day) Value: 21
  misc_feature: MA Experiment 20000264 PARAMETER Experiment Name: At_Open_Flower_P Parameter: Plant Line Value: WS
  misc_feature: MA Experiment 20000264 PARAMETER Experiment Name: At_Open_Flower_P Parameter: Tissue Value: Open Flower vs. Whole Plant
  misc_feature: MA Experiment ID: 20000286 Result: Up-regulated in Transcription
  misc_feature: MA Experiment 20000286 PARAMETER Experiment Name: At_Open_Flower_P Parameter: Age (day) Value: 21
  misc_feature: MA Experiment 20000286 PARAMETER Experiment Name: At_Open_Flower_P Parameter: Plant Line Value: WS
  misc_feature: MA Experiment 20000286 PARAMETER Experiment Name: At_Open_Flower_P Parameter: Tissue Value: Half Open vs. Whole Plant
  misc_feature: MA Experiment ID: 20000794 Result: Up-regulated in Transcription
  misc_feature: MA Experiment 20000794 PARAMETER Experiment Name: At_Petals_P Parameter: Age (day) Value: 23-25 days
  misc_feature: MA Experiment 20000794 PARAMETER Experiment Name: At_Petals_P Parameter: Plant Line Value: WS
  misc_feature: MA Experiment 20000794 PARAMETER Experiment Name: At_Petals_P Parameter: Tissue Value: Petals vs. Whole plant
  misc_feature: MA Experiment ID: 20001904 Result: Up-regulated in Transcription
  misc_feature: MA Experiment 20001904 PARAMETER Experiment Name: At_Drought_Reproduction_P Parameter: Age (day) Value: 37
  misc_feature: MA Experiment 20001904 PARAMETER Experiment Name: At_Drought_Reproduction_P Parameter: Organism Value: A. thaliana
  misc_feature: MA Experiment 20001904 PARAMETER Experiment Name: At_Drought_Reproduction_P Parameter: Plant Line Value: WS
  misc_feature: MA Experiment 20001904 PARAMETER Experiment Name: At_Drought_Reproduction_P Parameter: Timepoint (day) Value: 7
  misc_feature: MA Experiment 20001904 PARAMETER Experiment Name: At_Drought_Reproduction_P Parameter: Tissue Value: Rosettes
  misc_feature: MA Experiment 20001904 PARAMETER Experiment Name: At_Drought_Reproduction_P Parameter: Treatment Value: Drought vs. No Drought
  misc_feature: MA Experiment ID: 20001905 Result: Up-regulated in Transcription
  misc_feature: MA Experiment 20001905 PARAMETER Experiment Name: At_Drought_Reproduction_P Parameter: Age (day) Value: 40
  misc_feature: MA Experiment 20001905 PARAMETER Experiment Name: At_Drought_Reproduction_P Parameter: Organism Value: A. thaliana
  misc_feature: MA Experiment 20001905 PARAMETER Experiment Name: At_Drought_Reproduction_P Parameter: Plant Line Value: WS
  misc_feature: MA Experiment 20001905 PARAMETER Experiment Name: At_Drought_Reproduction_P Parameter: Timepoint (day) Value: 10
  misc_feature: MA Experiment 20001905 PARAMETER Experiment Name: At_Drought_Reproduction_P Parameter: Tissue Value: Rosettes
  misc_feature: MA Experiment 20001905 PARAMETER Experiment Name: At_Drought_Reproduction_P Parameter: Treatment Value: Drought vs. No Drought
ctcaaacatttcctaattccatcctaataattttcaaagctttaattctaagaaataatatctacaagaaaatattatctcatgtatttcttcttcctccttgatttttaatctgatttttaacctttggatttggaaaattatatcttcttctgtcccaaatctatttttaggtttgtcaaaacgattattttgtttaataatcgtaataggtatggagactaccggagaagttgttaaaacaaccaccgggagcgacggaggcgttacggtggtgagatccaacgcgccgtcagacttccacatggctccgaggtcagaaacttcaaacacacctcccaactccgtcgctcctcctcctcctccaccgccgcaaaactcctttactccgtcggcggctatggatggtttctcaagcggaccgataaagaagagacgtgggcgccctaggaagtacggacacgacggagcagcggtgacgctatctccgaatccgatatcatcagccgcaccaacgacttctcacgtcatcgatttctcgacgacatcggagaaacgtggcaaaatgaaaccagcaactccaactccaagctcattcatcaggccaaagtaccaggtcgagaatttaggtgaatggtctccttcctctgccgccgctaatttcacgccgcatattattacggtgaatgcaggcgaggacgttacgaagaggataatatcattttctcaacaagggtctctagctatttgcgttttatgcgcaaacggtgtcgtttcgagcgttacacttcgtcagcctgattcatctggtggtacattgacctatgagggtcggtttgagatattgtcactatctggaacattcatgcctagtgactcagacgggacacgaagcagaacaggcgggatgagcgtgtcgcttgctagccctgatggacgtgtagtaggtggtggtgttgctggcttgctggttgcagccactcctattcaagtggttgtaggaactttcttaggtggaacaaaccagcaagaacagacaccgaagccgcataaccacaacttcatgtcttctccattaatgccaacttcttcgaatgtagctgatcatcgaaccatccgtcccatgacatctagtctcccgatcagtacatggacaccgtcttttccttctgattcacgacacaagcattctcatgactttaatatcactttgacgtgatttcttccttgaagaactcgtagatcctctgtattttggtttccagtttagggctctacatgttagactctcaaagtctaggtgttatgttggtctgtcacttaggattgtcacttaggattgttagaccatctccatcaatggtttctcattgagaaactgttcaat

SEQ ID NO: 28845 - protein, 334 aa, Arabidopsis thaliana
  peptide (1)..(334): Ceres Seq. ID no. 12439772
  misc_feature (1)..(239): Pfam Name: Herpes virus major outer envelope glycoprotein (BLLF1) Pfam Description: Herpes virus major outer envelope glycoprotein
  misc_feature (24)..(316): Homolog of NCBI NO: 18403332 NR Description: AT-hook DNA-binding protein (AHP1)
  misc_feature (24)..(316): Homolog of NCBI NO: 2598227 NR Description: AT-hook protein 1 [Arabidopsis thaliana]
  misc_feature (24)..(316): Homolog of NCBI NO: 14326504 NR Description: At2g33620/F4P9.39 [Arabidopsis thaliana]
  misc_feature (1)..(277): Homolog of NCBI NO: 8809639 NR Description: contains similarity to DNA-binding
  misc_feature (148)..(277): Homolog of NCBI NO: 15241763 NR Description: putative protein; protein id: At5g62260.1
  misc_feature (1)..(141): Homolog of NCBI NO: 15241763 NR Description: putative protein; protein id: At5g62260.1
  misc_feature (2)..(317): Homolog of NCBI NO: 15235023 NR Description: putative protein
  misc_feature (33)..(334): Homolog of NCBI NO: 7485570 NR Description: hypothetical protein F16J13.150 - Arabidopsis
  misc_feature (1)..(334): Homolog of NCBI NO: 22328578 NR Description: putative DNA-binding protein
  misc_feature (1)..(334): Homolog of NCBI NO: 15235790 NR Description: putative DNA binding protein
METTGEVVKTTTGSDGGVTVVRSNAPSDFHMAPRSETSNTPPNSVAPPPPPPPQNSFTPSAAMDGFSSGPIKKRRGRPRKYGHDGAAVTLSPNPISSAAPTTSHVIDFSTTSEKRGKMKPATPTPSSFIRPKYQVENLGEWSPSSAAANFTPHIITVNAGEDVTKRIISFSQQGSLAICVLCANGVVSSVTLRQPDSSGGTLTYEGRFEILSLSGTFMPSDSDGTRSRTGGMSVSLASPDGRVVGGGVAGLLVAATPIQVVVGTFLGGTNQQEQTPKPHNHNFMSSPLMPTSSNVADHRTIRPMTSSLPISTWTPSFPSDSRHKHSHDFNITLT

SEQ ID NO: 28846 - protein, 304 aa, Arabidopsis thaliana
  peptide (1)..(304): Ceres Seq. ID no. 12439773
  misc_feature (1)..(209): Pfam Name: Herpes virus major outer envelope glycoprotein (BLLF1) Pfam Description: Herpes virus major outer envelope glycoprotein
  misc_feature (1)..(286): Homolog of NCBI NO: 18403332 NR Description: AT-hook DNA-binding protein (AHP1)
  misc_feature (1)..(286): Homolog of NCBI NO: 2598227 NR Description: AT-hook protein 1 [Arabidopsis thaliana]
  misc_feature (1)..(286): Homolog of NCBI NO: 14326504 NR Description: At2g33620/F4P9.39 [Arabidopsis thaliana]
  misc_feature (1)..(247): Homolog of NCBI NO: 8809639 NR Description: contains similarity to DNA-binding
  misc_feature (118)..(247): Homolog of NCBI NO: 15241763 NR Description: putative protein; protein id: At5g62260.1
  misc_feature (1)..(111): Homolog of NCBI NO: 15241763 NR Description: putative protein; protein id: At5g62260.1
  misc_feature (1)..(287): Homolog of NCBI NO: 15235023 NR Description: putative protein
  misc_feature (3)..(304): Homolog of NCBI NO: 7485570 NR Description: hypothetical protein F16J13.150 - Arabidopsis
  misc_feature (1)..(304): Homolog of NCBI NO: 22328578 NR Description: putative DNA-binding protein
  misc_feature (1)..(304): Homolog of NCBI NO: 15235790 NR Description: putative DNA binding protein
MAPRSETSNTPPNSVAPPPPPPPQNSFTPSAAMDGFSSGPIKKRRGRPRKYGHDGAAVTLSPNPISSAAPTTSHVIDFSTTSEKRGKMKPATPTPSSFIRPKYQVENLGEWSPSSAAANFTPHIITVNAGEDVTKRIISFSQQGSLAICVLCANGVVSSVTLRQPDSSGGTLTYEGRFEILSLSGTFMPSDSDGTRSRTGGMSVSLASPDGRVVGGGVAGLLVAATPIQVVVGTFLGGTNQQEQTPKPHNHNFMSSPLMPTSSNVADHRTIRPMTSSLPISTWTPSFPSDSRHKHSHDFNITLT

SEQ ID NO: 28847 - protein, 272 aa, Arabidopsis thaliana
  peptide (1)..(272): Ceres Seq. ID no. 12439774
  misc_feature (1)..(177): Pfam Name: Herpes virus major outer envelope glycoprotein (BLLF1) Pfam Description: Herpes virus major outer envelope glycoprotein
  misc_feature (1)..(254): Homolog of NCBI NO: 18403332 NR Description: AT-hook DNA-binding protein (AHP1)
  misc_feature (1)..(254): Homolog of NCBI NO: 2598227 NR Description: AT-hook protein 1 [Arabidopsis thaliana]
  misc_feature (1)..(254): Homolog of NCBI NO: 14326504 NR Description: At2g33620/F4P9.39 [Arabidopsis thaliana]
  misc_feature (1)..(215): Homolog of NCBI NO: 8809639 NR Description: contains similarity to DNA-binding
  misc_feature (86)..(215): Homolog of NCBI NO: 15241763 NR Description: putative protein; protein id: At5g62260.1
  misc_feature (1)..(79): Homolog of NCBI NO: 15241763 NR Description: putative protein; protein id: At5g62260.1
  misc_feature (1)..(255): Homolog of NCBI NO: 15235023 NR Description: putative protein
  misc_feature (1)..(272): Homolog of NCBI NO: 7485570 NR Description: hypothetical protein F16J13.150 - Arabidopsis
  misc_feature (1)..(272): Homolog of NCBI NO: 22328578 NR Description: putative DNA-binding protein
  misc_feature (1)..(272): Homolog of NCBI NO: 15235790 NR Description: putative DNA binding protein
MDGFSSGPIKKRRGRPRKYGHDGAAVTLSPNPISSAAPTTSHVIDFSTTSEKRGKMKPATPTPSSFIRPKYQVENLGEWSPSSAAANFTPHIITVNAGEDVTKRIISFSQQGSLAICVLCANGVVSSVTLRQPDSSGGTLTYEGRFEILSLSGTFMPSDSDGTRSRTGGMSVSLASPDGRVVGGGVAGLLVAATPIQVVVGTFLGGTNQQEQTPKPHNHNFMSSPLMPTSSNVADHRTIRPMTSSLPISTWTPSFPSDSRHKHSHDFNITLT

SEQ ID NO: 28848 - DNA, 1455 bp, Arabidopsis thaliana
  misc_feature (1)..(1455): Ceres Seq. ID no. 13490626
  misc_feature: MA Experiment ID: 108488 Result: Down-regulated in Transcription
  misc_feature: MA Experiment ID: 108501 Result: Down-regulated in Transcription
  misc_feature: MA Experiment 108501 PARAMETER Experiment Name: At_ap2_floral_buds_cDNA_P Parameter: Plant Line Value: ap2 (Ler.)
  misc_feature: MA Experiment 108501 PARAMETER Experiment Name: At_ap2_floral_buds_cDNA_P Parameter: Tissue Value: Closed Flower
  misc_feature: MA Experiment ID: 108561 Result: Up-regulated in Transcription
  misc_feature: MA Experiment 108561 PARAMETER Experiment Name: At_100uM_ABA_cDNA_P Parameter: Timepoint (hr) Value: 6
  misc_feature: MA Experiment 108561 PARAMETER Experiment Name: At_100uM_ABA_cDNA_P Parameter: Tissue Value: Aerial
  misc_feature: MA Experiment 108561 PARAMETER Experiment Name: At_100uM_ABA_cDNA_P Parameter: Treatment Value: 100uM ABA vs. No Treatment
  misc_feature: MA Experiment ID: 108573 Result: Up-regulated in Transcription
  misc_feature: MA Experiment 108573 PARAMETER Experiment Name: At_Drought_cDNA_P Parameter: Timepoint (hr) Value: 6
  misc_feature: MA Experiment 108573 PARAMETER Experiment Name: At_Drought_cDNA_P Parameter: Tissue Value: Aerial
  misc_feature: MA Experiment 108573 PARAMETER Experiment Name: At_Drought_cDNA_P Parameter: Treatment Value: Drought vs. No Drought
  misc_feature: MA Experiment ID: 20000185 Result: Down-regulated in Transcription
  misc_feature: MA Experiment 20000185 PARAMETER Experiment Name: At_Roots__P Parameter: Age (day) Value: 7 vs. 21
  misc_feature: MA Experiment 20000185 PARAMETER Experiment Name: At_Roots__P Parameter: Organism Value: A. thaliana
  misc_feature: MA Experiment 20000185 PARAMETER Experiment Name: At_Roots__P Parameter: Tissue Value: Roots vs. Whole Plant
  misc_feature: MA Experiment ID: 20001904 Result: Up-regulated in Transcription
  misc_feature: MA Experiment 20001904 PARAMETER Experiment Name: At_Drought_Reproduction_P Parameter: Age (day) Value: 37
  misc_feature: MA Experiment 20001904 PARAMETER Experiment Name: At_Drought_Reproduction_P Parameter: Organism Value: A. thaliana
  misc_feature: MA Experiment 20001904 PARAMETER Experiment Name: At_Drought_Reproduction_P Parameter: Plant Line Value: WS
  misc_feature: MA Experiment 20001904 PARAMETER Experiment Name: At_Drought_Reproduction_P Parameter: Timepoint (day) Value: 7
  misc_feature: MA Experiment 20001904 PARAMETER Experiment Name: At_Drought_Reproduction_P Parameter: Tissue Value: Rosettes
  misc_feature: MA Experiment 20001904 PARAMETER Experiment Name: At_Drought_Reproduction_P Parameter: Treatment Value: Drought vs. No Drought
taaaaaaaaaaaaataaaaatctaggaaggagaaggagagaggagaagtgattcgatcgattctctttttggtgatcgaagctaaatctataaggaatttgaatctttgtatgtgtttttttcgtggagatgagaagcggcggcttggaaatgatgtcatcttcagcaatcgtagcgtttaatttgaaggagggtaagaattggtggtgggatgtgaatgaatctccggtgtggcaggatcgtatcttccatgttcttgctgttctatatggaatcgtttccgtcattgctgtgattcaattggtaagaatacaattgagagttccagaatatggctggacgacgcagaaggtctttcattttctcaatttcatggttaacggagttcgagctctggtttttctcttccggcgagatgcacagaacatgcagccagagattctgcaacatatcttacttgatattccaagtcttgctttcttcactacatatgcgcttctggttctcttttgggcagagatttactaccaggcacgtgctgtatcgactgatggactgaggccaagtttcttcacaattaatgcagttgtatacgtaattcagattgctctttggttggttttgtggtggaagcctgttcaccttatggtaatcatttctaagatgttctttgcaggtgtctcattgtttgcggcccttggctttttattatatggaggaaggcttttcctgatgctgcaacgatttccagtagagtctaaagggcggcgcaagaagctacaagaggttggctacgtgacaaccatatgctttacatgtttcctcatcagatgtatcatgatgtgctttgatgcgtttgacgatgcagcagatcttgatgtcttagatcatccaatcctaaacttcatatattacttgttggtggagatattgccatcgtctctggtcctctttatcctaagaaagcttccgccaaaacgcggtatcacacagtaccatcaaatccaatgaacatgttcagagaatcgaaacactgaggtaccggtaaaccgaggggttcatgtttctttcatagacaaaagtgtaaattgtaaggggtttcagaacaatggattgtgatttctctctaactaattcaatgcggttgattagtataagtctctcttgtttatactgattcaaagtagtttggtgtgagaatgatagaatcatagttactgagatatccagcttctggttctgacttctgagacggaagaacaattggtattttgatgatatattatggacattggcttgttgtcagttcatacgaagtagttttttaagaaatgcaaatagtcatttgttgactggttggtcttttctctaccggtcttttccacttggttaattgaaagttaggtgatatctgcacgtactaatttcggttattattaattaattacaatcggc

SEQ ID NO: 28849 - protein, 293 aa, Arabidopsis thaliana
  peptide (1)..(293): Ceres Seq. ID no. 13490627
  misc_feature (23)..(293): Homolog of NCBI NO: 34896982 NR Description: unknown protein [Oryza sativa]
  misc_feature (24)..(293): Homolog of NCBI NO: 18415765 NR Description: TOM1 protein [Arabidopsis thaliana]
  misc_feature (24)..(292): Homolog of NCBI NO: 34902220 NR Description: Putative transmembrane protein
  misc_feature (10)..(292): Homolog of NCBI NO: 37536460 NR Description: putative transmembrane protein
  misc_feature (10)..(293): Homolog of NCBI NO: 21537264 NR Description: unknown [Arabidopsis thaliana]
  misc_feature (1)..(293): Homolog of NCBI NO: 18395323 NR Description: TOM3 protein [Arabidopsis thaliana]
  misc_feature (9)..(293): Homolog of NCBI NO: 21537116 NR Description: unknown [Arabidopsis thaliana]
  misc_feature (1)..(293): Homolog of NCBI NO: 27754346 NR Description: unknown protein [Arabidopsis thaliana]
  misc_feature (1)..(293): Homolog of NCBI NO: 18394129 NR Description: THH1 protein [Arabidopsis thaliana]
  misc_feature (1)..(293): Homolog of NCBI NO: 7262697 NR Description: Contains similarity to an unknown protein from
MRSGGLEMMSSSAIVAFNLKEGKNWWWDVNESPVWQDRIFHVLAVLYGIVSVIAVIQLVRIQLRVPEYGWTTQKVFHFLNFMVNGVRALVFLFRRDAQNMQPEILQHILLDIPSLAFFTTYALLVLFWAEIYYQARAVSTDGLRPSFFTINAVVYVIQIALWLVLWWKPVHLMVIISKMFFAGVSLFAALGFLLYGGRLFLMLQRFPVESKGRRKKLQEVGYVTTICFTCFLIRCIMMCFDAFDDAADLDVLDHPILNFIYYLLVEILPSSLVLFILRKLPPKRGITQYHQIQ

SEQ ID NO: 28850 - protein, 286 aa, Arabidopsis thaliana
  peptide (1)..(286): Ceres Seq. ID no. 13490628
  misc_feature (16)..(286): Homolog of NCBI NO: 34896982 NR Description: unknown protein [Oryza sativa]
  misc_feature (17)..(286): Homolog of NCBI NO: 18415765 NR Description: TOM1 protein [Arabidopsis thaliana]
  misc_feature (17)..(285): Homolog of NCBI NO: 34902220 NR Description: Putative transmembrane protein
  misc_feature (3)..(285): Homolog of NCBI NO: 37536460 NR Description: putative transmembrane protein
  misc_feature (3)..(286): Homolog of NCBI NO: 21537264 NR Description: unknown [Arabidopsis thaliana]
  misc_feature (1)..(286): Homolog of NCBI NO: 18395323 NR Description: TOM3 protein [Arabidopsis thaliana]
  misc_feature (2)..(286): Homolog of NCBI NO: 21537116 NR Description: unknown [Arabidopsis thaliana]
  misc_feature (1)..(286): Homolog of NCBI NO: 27754346 NR Description: unknown protein [Arabidopsis thaliana]
  misc_feature (1)..(286): Homolog of NCBI NO: 18394129 NR Description: THH1 protein [Arabidopsis thaliana]
  misc_feature (1)..(286): Homolog of NCBI NO: 7262697 NR Description: Contains similarity to an unknown protein from
MMSSSAIVAFNLKEGKNWWWDVNESPVWQDRIFHVLAVLYGIVSVIAVIQLVRIQLRVPEYGWTTQKVFHFLNFMVNGVRALVFLFRRDAQNMQPEILQHILLDIPSLAFFTTYALLVLFWAEIYYQARAVSTDGLRPSFFTINAVVYVIQIALWLVLWWKPVHLMVIISKMFFAGVSLFAALGFLLYGGRLFLMLQRFPVESKGRRKKLQEVGYVTTICFTCFLIRCIMMCFDAFDDAADLDVLDHPILNFIYYLLVEILPSSLVLFILRKLPPKRGITQYHQIQ

SEQ ID NO: 28851 - protein, 285 aa, Arabidopsis thaliana
  peptide (1)..(285): Ceres Seq. ID no. 13490629
  misc_feature (15)..(285): Homolog of NCBI NO: 34896982 NR Description: unknown protein [Oryza sativa]
  misc_feature (16)..(285): Homolog of NCBI NO: 18415765 NR Description: TOM1 protein [Arabidopsis thaliana]
  misc_feature (16)..(284): Homolog of NCBI NO: 34902220 NR Description: Putative transmembrane protein
  misc_feature (2)..(284): Homolog of NCBI NO: 37536460 NR Description: putative transmembrane protein
  misc_feature (2)..(285): Homolog of NCBI NO: 21537264 NR Description: unknown [Arabidopsis thaliana]
  misc_feature (1)..(285): Homolog of NCBI NO: 18395323 NR Description: TOM3 protein [Arabidopsis thaliana]
  misc_feature (1)..(285): Homolog of NCBI NO: 21537116 NR Description: unknown [Arabidopsis thaliana]
  misc_feature (1)..(285): Homolog of NCBI NO: 27754346 NR Description: unknown protein [Arabidopsis thaliana]
  misc_feature (1)..(285): Homolog of NCBI NO: 18394129 NR Description: THH1 protein [Arabidopsis thaliana]
  misc_feature (1)..(285): Homolog of NCBI NO: 7262697 NR Description: Contains similarity to an unknown protein from
MSSSAIVAFNLKEGKNWWWDVNESPVWQDRIFHVLAVLYGIVSVIAVIQLVRIQLRVPEYGWTTQKVFHFLNFMVNGVRALVFLFRRDAQNMQPEILQHILLDIPSLAFFTTYALLVLFWAEIYYQARAVSTDGLRPSFFTINAVVYVIQIALWLVLWWKPVHLMVIISKMFFAGVSLFAALGFLLYGGRLFLMLQRFPVESKGRRKKLQEVGYVTTICFTCFLIRCIMMCFDAFDDAADLDVLDHPILNFIYYLLVEILPSSLVLFILRKLPPKRGITQYHQIQ

SEQ ID NO: 28852 - DNA, 803 bp, Arabidopsis thaliana
  misc_feature (1)..(803): Ceres Seq. ID no. 13489786
  misc_feature: MA Experiment ID: 108595 Result: Up-regulated in Transcription
  misc_feature: MA Experiment 108595 PARAMETER Experiment Name: At_Ler-pi_Ovule_cDNA_P Parameter: Plant Line Value: null
  misc_feature: MA Experiment ID: 108609 Result: Up-regulated in Transcription
  misc_feature: MA Experiment 108609 PARAMETER Experiment Name: At_100uM_ABA_cDNA_P Parameter: Timepoint (hr) Value: 24
  misc_feature: MA Experiment 108609 PARAMETER Experiment Name: At_100uM_ABA_cDNA_P Parameter: Tissue Value: Aerial
  misc_feature: MA Experiment 108609 PARAMETER Experiment Name: At_100uM_ABA_cDNA_P Parameter: Treatment Value: 100uM ABA vs. No Treatment
  misc_feature: MA Experiment ID: 20000069 Result: Up-regulated in Transcription
  misc_feature: MA Experiment 20000069 PARAMETER Experiment Name: At_100uM_ABA_Mutants_cDNA_P Parameter: Plant Line Value: CS23
  misc_feature: MA Experiment 20000069 PARAMETER Experiment Name: At_100uM_ABA_Mutants_cDNA_P Parameter: Timepoint (hr) Value: 6
  misc_feature: MA Experiment 20000069 PARAMETER Experiment Name: At_100uM_ABA_Mutants_cDNA_P Parameter: Tissue Value: Aerial
  misc_feature: MA Experiment 20000069 PARAMETER Experiment Name: At_100uM_ABA_Mutants_cDNA_P Parameter: Treatment Value: 100uM ABA vs. No Treatment
  misc_feature: MA Experiment ID: 20000184 Result: Down-regulated in Transcription
  misc_feature: MA Experiment 20000184 PARAMETER Experiment Name: At_Shoots__P Parameter: Age (day) Value: 7
  misc_feature: MA Experiment 20000184 PARAMETER Experiment Name: At_Shoots__P Parameter: Tissue Value: Shoots vs. Whole Plant
  misc_feature: MA Experiment ID: 20000185 Result: Down-regulated in Transcription
  misc_feature: MA Experiment 20000185 PARAMETER Experiment Name: At_Roots__P Parameter: Age (day) Value: 7 vs. 21
  misc_feature: MA Experiment 20000185 PARAMETER Experiment Name: At_Roots__P Parameter: Organism Value: A. thaliana
  misc_feature: MA Experiment 20000185 PARAMETER Experiment Name: At_Roots__P Parameter: Tissue Value: Roots vs. Whole Plant
  misc_feature: MA Experiment ID: 20000265 Result: Up-regulated in Transcription
  misc_feature: MA Experiment 20000265 PARAMETER Experiment Name: At_Open_Flower_P Parameter: Age (day) Value: 21
  misc_feature: MA Experiment 20000265 PARAMETER Experiment Name: At_Open_Flower_P Parameter: Plant Line Value: WS
  misc_feature: MA Experiment 20000265 PARAMETER Experiment Name: At_Open_Flower_P Parameter: Tissue Value: Closed Flower vs. Whole Plant
  misc_feature: MA Experiment ID: 20000438 Result: Down-regulated in Transcription
  misc_feature: MA Experiment 20000438 PARAMETER Experiment Name: At_Shoots__P Parameter: Age (day) Value: 14
  misc_feature: MA Experiment 20000438 PARAMETER Experiment Name: At_Shoots__P Parameter: Tissue Value: Shoots vs. Whole Plant
  misc_feature: MA Experiment ID: 20000439 Result: Down-regulated in Transcription
  misc_feature: MA Experiment 20000439 PARAMETER Experiment Name: At_Roots__P Parameter: Age (day) Value: 14 vs. 21
  misc_feature: MA Experiment 20000439 PARAMETER Experiment Name: At_Roots__P Parameter: Organism Value: A. thaliana
  misc_feature: MA Experiment 20000439 PARAMETER Experiment Name: At_Roots__P Parameter: Tissue Value: Roots vs. Whole Plant
  misc_feature: MA Experiment ID: 20000453 Result: Up-regulated in Transcription
  misc_feature: MA Experiment 20000453 PARAMETER Experiment Name: At_100uM_ABA_P Parameter: Age (day) Value: 15
  misc_feature: MA Experiment 20000453 PARAMETER Experiment Name: At_100uM_ABA_P Parameter: Organism Value: A. thaliana
  misc_feature: MA Experiment 20000453 PARAMETER Experiment Name: At_100uM_ABA_P Parameter: Plant Line Value: WS
  misc_feature: MA Experiment 20000453 PARAMETER Experiment Name: At_100uM_ABA_P Parameter: Timepoint (hr) Value: 24
  misc_feature: MA Experiment 20000453 PARAMETER Experiment Name: At_100uM_ABA_P Parameter: Tissue Value: Aerial
  misc_feature: MA Experiment 20000453 PARAMETER Experiment Name: At_100uM_ABA_P Parameter: Treatment Value: 100uM ABA vs. No Treatment
  misc_feature: MA Experiment ID: 20000456 Result: Down-regulated in Transcription
  misc_feature: MA Experiment 20000456 PARAMETER Experiment Name: At_100uM_BA_P Parameter: Age (day) Value: 14
  misc_feature: MA Experiment 20000456 PARAMETER Experiment Name: At_100uM_BA_P Parameter: Organism Value: A. thaliana
  misc_feature: MA Experiment 20000456 PARAMETER Experiment Name: At_100uM_BA_P Parameter: Plant Line Value: WS
  misc_feature: MA Experiment 20000456 PARAMETER Experiment Name: At_100uM_BA_P Parameter: Timepoint (hr) Value: 6
  misc_feature: MA Experiment 20000456 PARAMETER Experiment Name: At_100uM_BA_P Parameter: Tissue Value: Aerial
  misc_feature: MA Experiment 20000456 PARAMETER Experiment Name: At_100uM_BA_P Parameter: Treatment Value: 100uM BA vs. No Treatment
  misc_feature: MA Experiment ID: 20000573 Result: Down-regulated in Transcription
  misc_feature: MA Experiment 20000573 PARAMETER Experiment Name: At_100uM_ABA_Mutants__P Parameter: Organism Value: A. thaliana
  misc_feature: MA Experiment 20000573 PARAMETER Experiment Name: At_100uM_ABA_Mutants__P Parameter: Plant Line Value: CS22 vs. Ler wt
  misc_feature: MA Experiment 20000573 PARAMETER Experiment Name: At_100uM_ABA_Mutants__P Parameter: Timepoint (hr) Value: N/A
  misc_feature: MA Experiment 20000573 PARAMETER Experiment Name: At_100uM_ABA_Mutants__P Parameter: Tissue Value: Whole Plant
  misc_feature: MA Experiment 20000573 PARAMETER Experiment Name: At_100uM_ABA_Mutants__P Parameter: Treatment Value: None
  misc_feature: MA Experiment ID: 20000574 Result: Down-regulated in Transcription
  misc_feature: MA Experiment 20000574 PARAMETER Experiment Name: At_100uM_ABA_Mutants__P Parameter: Organism Value: A. thaliana
  misc_feature: MA Experiment 20000574 PARAMETER Experiment Name: At_100uM_ABA_Mutants__P Parameter: Plant Line Value: CS23 vs. Ler wt
  misc_feature: MA Experiment 20000574 PARAMETER Experiment Name: At_100uM_ABA_Mutants__P Parameter: Timepoint (hr) Value: N/A
  misc_feature: MA Experiment 20000574 PARAMETER Experiment Name: At_100uM_ABA_Mutants__P Parameter: Tissue Value: Whole Plant
  misc_feature: MA Experiment 20000574 PARAMETER Experiment Name: At_100uM_ABA_Mutants__P Parameter: Treatment Value: None
  misc_feature: MA Experiment ID: 20000794 Result: Down-regulated in Transcription
  misc_feature: MA Experiment 20000794 PARAMETER Experiment Name: At_Petals_P Parameter: Age (day) Value: 23-25 days
  misc_feature: MA Experiment 20000794 PARAMETER Experiment Name: At_Petals_P Parameter: Plant Line Value: WS
  misc_feature: MA Experiment 20000794 PARAMETER Experiment Name: At_Petals_P Parameter: Tissue Value: Petals vs. Whole plant
  misc_feature: MA Experiment ID: 20001554 Result: Up-regulated in Transcription
  misc_feature: MA Experiment 20001554 PARAMETER Experiment Name: At_Drought_Soil_Dry_P Parameter: Age (day) Value: 21
  misc_feature: MA Experiment 20001554 PARAMETER Experiment Name: At_Drought_Soil_Dry_P Parameter: Organism Value: A. thaliana
  misc_feature: MA Experiment 20001554 PARAMETER Experiment Name: At_Drought_Soil_Dry_P Parameter: Plant Line Value: WS
  misc_feature: MA Experiment 20001554 PARAMETER Experiment Name: At_Drought_Soil_Dry_P Parameter: Post Timepoint (hr) Value: None
  misc_feature: MA Experiment 20001554 PARAMETER Experiment Name: At_Drought_Soil_Dry_P Parameter: Post-Treatment Value: None
  misc_feature: MA Experiment 20001554 PARAMETER Experiment Name: At_Drought_Soil_Dry_P Parameter: Timepoint (day) Value: 7
  misc_feature: MA Experiment 20001554 PARAMETER Experiment Name: At_Drought_Soil_Dry_P Parameter: Treatment Value: Drought vs. No Drought
  misc_feature: MA Experiment ID: 20001555 Result: Up-regulated in Transcription
  misc_feature: MA Experiment 20001555 PARAMETER Experiment Name: At_Drought_Soil_Dry_P Parameter: Age (day) Value: 24
  misc_feature: MA Experiment 20001555 PARAMETER Experiment Name: At_Drought_Soil_Dry_P Parameter: Organism Value: A. thaliana
  misc_feature: MA Experiment 20001555 PARAMETER Experiment Name: At_Drought_Soil_Dry_P Parameter: Plant Line Value: WS
  misc_feature: MA Experiment 20001555 PARAMETER Experiment Name: At_Drought_Soil_Dry_P Parameter: Post Timepoint (hr) Value: None
  misc_feature: MA Experiment 20001555 PARAMETER Experiment Name: At_Drought_Soil_Dry_P Parameter: Post-Treatment Value: None
  misc_feature: MA Experiment 20001555 PARAMETER Experiment Name: At_Drought_Soil_Dry_P Parameter: Timepoint (day) Value: 10
  misc_feature: MA Experiment 20001555 PARAMETER Experiment Name: At_Drought_Soil_Dry_P Parameter: Treatment Value: Drought vs. No Drought
  misc_feature: MA Experiment ID: 20001557 Result: Down-regulated in Transcription
  misc_feature: MA Experiment 20001557 PARAMETER Experiment Name: At_Drought_Soil_Dry_P Parameter: Age (day) Value: 27
  misc_feature: MA Experiment 20001557 PARAMETER Experiment Name: At_Drought_Soil_Dry_P Parameter: Organism Value: A. thaliana
  misc_feature: MA Experiment 20001557 PARAMETER Experiment Name: At_Drought_Soil_Dry_P Parameter: Plant Line Value: WS
  misc_feature: MA Experiment 20001557 PARAMETER Experiment Name: At_Drought_Soil_Dry_P Parameter: Post Timepoint (hr) Value: 3
  misc_feature: MA Experiment 20001557 PARAMETER Experiment Name: At_Drought_Soil_Dry_P Parameter: Post-Treatment Value: Re-Water vs. No Drought
  misc_feature: MA Experiment 20001557 PARAMETER Experiment Name: At_Drought_Soil_Dry_P Parameter: Timepoint (day) Value: 13
  misc_feature: MA Experiment 20001557 PARAMETER Experiment Name: At_Drought_Soil_Dry_P Parameter: Treatment Value: Drought vs. No Drought
  misc_feature: MA Experiment ID: 20001559 Result: Up-regulated in Transcription
  misc_feature: MA Experiment 20001559 PARAMETER Experiment Name: At_Drought_Soil_Dry_P Parameter: Age (day) Value: 28
  misc_feature: MA Experiment 20001559 PARAMETER Experiment Name: At_Drought_Soil_Dry_P Parameter: Organism Value: A. thaliana
  misc_feature: MA Experiment 20001559 PARAMETER Experiment Name: At_Drought_Soil_Dry_P Parameter: Plant Line Value: WS
  misc_feature: MA Experiment 20001559 PARAMETER Experiment Name: At_Drought_Soil_Dry_P Parameter: Post Timepoint (hr) Value: 29
  misc_feature: MA Experiment 20001559 PARAMETER Experiment Name: At_Drought_Soil_Dry_P Parameter: Post-Treatment Value: Re-Water vs. No Drought
  misc_feature: MA Experiment 20001559 PARAMETER Experiment Name: At_Drought_Soil_Dry_P Parameter: Timepoint (day) Value: 14
  misc_feature: MA Experiment 20001559 PARAMETER Experiment Name: At_Drought_Soil_Dry_P Parameter: Treatment Value: Drought vs. No Drought
  misc_feature: Phenotype: ROSETTE LEAVES Other
  misc_feature: Phenotype: ROSETTE LEAVES Other
  misc_feature: Phenotype: WHOLE PLANT Size-Small
  misc_feature: Phenotype: WHOLE PLANT Size-Small
  misc_feature: Phenotype: INFLORESCENCE Height-Short
  misc_feature: Phenotype: INFLORESCENCE Strength-Weak
  misc_feature: Phenotype: ROSETTE LEAVES Other
  misc_feature: Phenotype: ROSETTE LEAVES Other
  misc_feature: Phenotype: ROSETTE LEAVES Shape-Serrate
gttgcttaacctattagagtttccttcctccaacaaaccatctttataagactccaaaatggagggtaagagatcacaaggacaaggttacatgaaaaagaagtcttaccttgtggaagaagatatggagactgatacggatgaagaagaggaagtaggtagggatagagttagagggtctagaggtagcatcaatcgtggtggctcgttgcggctttgccaagtagatagatgcacagctgatatgaaagaggcaaaactgtatcaccggagacacaaagtgtgtgaagttcatgcaaaggcatcttctgtctttctctcaggacttaaccaacgcttttgtcaacaatgcagtaggtttcatgacctccaagagtttgatgaagctaagagaagttgcaggaggcgcttagctggacacaatgagcgaagaaggaagagctctggtgagagtacttatggagaaggatcaggtcggagaggaatcaatggtcaggtggtgatgcagaatcaagaaagatcaagggtagagatgacacttcctatgccaaactcatcattcaagcgaccacagattagatagagaagctgtctgctctctctcttctgtcatctaaacttctctcttagaatcctaaaattgtggtatctaacaatgttatagagaaataaataactaccactctctctagtactctctaatgttatcagctatatgcaaacgctaagactatacttgaaccttgagtgttatcttgtatgtttcaaagatatggctaatgatatgtgtaatacttctacct

SEQ ID NO: 28853 - protein, 174 aa, Arabidopsis thaliana
  peptide (1)..(174): Ceres Seq. ID no. 13489787
  misc_feature (53)..(131): Pfam Name: SBP domain Pfam Description: SBP domain
  misc_feature (39)..(136): Homolog of NCBI NO: 34394700 NR Description: putative squamosa-promoter binding protein
  misc_feature (6)..(132): Homolog of NCBI NO: 6094239 NR Description: SQUAMOSA-PROMOTER BINDING PROTEIN 1
  misc_feature (1)..(129): Homolog of NCBI NO: 21618221 NR Description: putative squamosa-promoter binding protein
  misc_feature (1)..(129): Homolog of NCBI NO: 25408313 NR Description: probable squamosa-promoter binding protein
  misc_feature (1)..(129): Homolog of NCBI NO: 18403387 NR Description: squamosa-promoter binding protein -related
  misc_feature (1)..(138): Homolog of NCBI NO: 30577628 NR Description: squamosa promoter binding like-protein [Betula
  misc_feature (1)..(129): Homolog of NCBI NO: 25456671 NR Description: squamosa promoter binding protein-like 5
  misc_feature (1)..(174): Homolog of NCBI NO: 15232541 NR Description: squamosa promoter binding protein-related 5
  misc_feature (8)..(174): Homolog of NCBI NO: 25456654 NR Description: squamosa promoter binding protein 4
  misc_feature (1)..(174): Homolog of NCBI NO: 15219210 NR Description: transcription factor -related [Arabidopsis
MEGKRSQGQGYMKKKSYLVEEDMETDTDEEEEVGRDRVRGSRGSINRGGSLRLCQVDRCTADMKEAKLYHRRHKVCEVHAKASSVFLSGLNQRFCQQCSRFHDLQEFDEAKRSCRRRLAGHNERRRKSSGESTYGEGSGRRGINGQVVMQNQERSRVEMTLPMPNSSFKRPQIR

SEQ ID NO: 28854 - protein, 163 aa, Arabidopsis thaliana
  peptide (1)..(163): Ceres Seq. ID no. 13489788
  misc_feature (42)..(120): Pfam Name: SBP domain Pfam Description: SBP domain
  misc_feature (28)..(125): Homolog of NCBI NO: 34394700 NR Description: putative squamosa-promoter binding protein
  misc_feature (1)..(121): Homolog of NCBI NO: 6094239 NR Description: SQUAMOSA-PROMOTER BINDING PROTEIN 1
  misc_feature (1)..(118): Homolog of NCBI NO: 21618221 NR Description: putative squamosa-promoter binding protein
  misc_feature (1)..(118): Homolog of NCBI NO: 25408313 NR Description: probable squamosa-promoter binding protein
  misc_feature (1)..(118): Homolog of NCBI NO: 18403387 NR Description: squamosa-promoter binding protein -related
  misc_feature (1)..(127): Homolog of NCBI NO: 30577628 NR Description: squamosa promoter binding like-protein [Betula
  misc_feature (1)..(118): Homolog of NCBI NO: 25456671 NR Description: squamosa promoter binding protein-like 5
  misc_feature (1)..(163): Homolog of NCBI NO: 15232541 NR Description: squamosa promoter binding protein-related 5
  misc_feature (1)..(163): Homolog of NCBI NO: 25456654 NR Description: squamosa promoter binding protein 4
  misc_feature (1)..(163): Homolog of NCBI NO: 15219210 NR Description: transcription factor -related [Arabidopsis
MKKKSYLVEEDMETDTDEEEEVGRDRVRGSRGSINRGGSLRLCQVDRCTADMKEAKLYHRRHKVCEVHAKASSVFLSGLNQRFCQQCSRFHDLQEFDEAKRSCRRRLAGHNERRRKSSGESTYGEGSGRRGINGQVVMQNQERSRVEMTLPMPNSSFKRPQIR

SEQ ID NO: 28855 - protein, 152 aa, Arabidopsis thaliana
  peptide (1)..(152): Ceres Seq. ID no. 13489789
  misc_feature (31)..(109): Pfam Name: SBP domain Pfam Description: SBP domain
  misc_feature (17)..(114): Homolog of NCBI NO: 34394700 NR Description: putative squamosa-promoter binding protein
  misc_feature (1)..(110): Homolog of NCBI NO: 6094239 NR Description: SQUAMOSA-PROMOTER BINDING PROTEIN 1
  misc_feature (1)..(107): Homolog of NCBI NO: 21618221 NR Description: putative squamosa-promoter binding protein
  misc_feature (1)..(107): Homolog of NCBI NO: 25408313 NR Description: probable squamosa-promoter binding protein
  misc_feature (1)..(107): Homolog of NCBI NO: 18403387 NR Description: squamosa-promoter binding protein -related
  misc_feature (1)..(116): Homolog of NCBI NO: 30577628 NR Description: squamosa promoter binding like-protein [Betula
  misc_feature (1)..(107): Homolog of NCBI NO: 25456671 NR Description: squamosa promoter binding protein-like 5
  misc_feature (1)..(152): Homolog of NCBI NO: 15232541 NR Description: squamosa promoter binding protein-related 5
  misc_feature (1)..(152): Homolog of NCBI NO: 25456654 NR Description: squamosa promoter binding protein 4
  misc_feature (1)..(152): Homolog of NCBI NO: 15219210 NR Description: transcription factor -related [Arabidopsis
METDTDEEEEVGRDRVRGSRGSINRGGSLRLCQVDRCTADMKEAKLYHRRHKVCEVHAKASSVFLSGLNQRFCQQCSRFHDLQEFDEAKRSCRRRLAGHNERRRKSSGESTYGEGSGRRGINGQVVMQNQERSRVEMTLPMPNSSFKRPQIR

SEQ ID NO: 28856 - DNA, 773 bp, Arabidopsis thaliana
  misc_feature (1)..(773): Ceres Seq. ID no. 13646075
  misc_feature: MA Experiment ID: 20000180 Result: Up-regulated in Transcription
  misc_feature: MA Experiment 20000180 PARAMETER Experiment Name: At_Germinating_Seeds_P Parameter: Age (hr) Value: 24 vs. 0
  misc_feature: MA Experiment 20000180 PARAMETER Experiment Name: At_Germinating_Seeds_P Parameter: Tissue Value: Germinating Seeds
  misc_feature: MA Experiment ID: 20000182 Result: Down-regulated in Transcription
  misc_feature: MA Experiment 20000182 PARAMETER Experiment Name: At_2mM_SA_P Parameter: Age (day) Value: 14
  misc_feature: MA Experiment 20000182 PARAMETER Experiment Name: At_2mM_SA_P Parameter: Organism Value: A. thaliana
  misc_feature: MA Experiment 20000182 PARAMETER Experiment Name: At_2mM_SA_P Parameter: Plant Line Value: WS
  misc_feature: MA Experiment 20000182 PARAMETER Experiment Name: At_2mM_SA_P Parameter: Timepoint (hr) Value: 6
  misc_feature: MA Experiment 20000182 PARAMETER Experiment Name: At_2mM_SA_P Parameter: Tissue Value: Aerial
  misc_feature: MA Experiment 20000182 PARAMETER Experiment Name: At_2mM_SA_P Parameter: Treatment Value: 2mM SA vs. No Treatment
  misc_feature: MA Experiment ID: 20000185 Result: Up-regulated in Transcription
  misc_feature: MA Experiment 20000185 PARAMETER Experiment Name: At_Roots__P Parameter: Age (day) Value: 7 vs. 21
  misc_feature: MA Experiment 20000185 PARAMETER Experiment Name: At_Roots__P Parameter: Organism Value: A. thaliana
  misc_feature: MA Experiment 20000185 PARAMETER Experiment Name: At_Roots__P Parameter: Tissue Value: Roots vs. Whole Plant
  misc_feature: MA Experiment ID: 20000211 Result: Up-regulated in Transcription
  misc_feature: MA Experiment 20000211 PARAMETER Experiment Name: At_0.001percent_MeJA__P Parameter: Age (day) Value: 14
  misc_feature: MA Experiment 20000211 PARAMETER Experiment Name: At_0.001percent_MeJA__P Parameter: Organism Value: A. thaliana
  misc_feature: MA Experiment 20000211 PARAMETER Experiment Name: At_0.001percent_MeJA__P Parameter: Plant Line Value: WS
  misc_feature: MA Experiment 20000211 PARAMETER Experiment Name: At_0.001percent_MeJA__P Parameter: Timepoint (hr) Value: 1
  misc_feature: MA Experiment 20000211 PARAMETER Experiment Name: At_0.001percent_MeJA__P Parameter: Tissue Value: Aerial
  misc_feature: MA Experiment 20000211 PARAMETER Experiment Name: At_0.001percent_MeJA__P Parameter: Treatment Value: 0.001percent MeJA vs. No Treatment
  misc_feature: MA Experiment ID: 20000234 Result: Up-regulated in Transcription
  misc_feature: MA Experiment 20000234 PARAMETER Experiment Name: At_Siliques_P Parameter: Age (day) Value: 21
  misc_feature: MA Experiment 20000234 PARAMETER Experiment Name: At_Siliques_P Parameter: Organism Value: A. thaliana
  misc_feature: MA Experiment 20000234 PARAMETER Experiment Name: At_Siliques_P Parameter: Plant Line Value: WS
  misc_feature: MA Experiment 20000234 PARAMETER Experiment Name: At_Siliques_P Parameter: Tissue Value: Less Than 5mm Siliques vs. Whole Plant
  misc_feature: MA Experiment ID: 20000235 Result: Up-regulated in Transcription
  misc_feature: MA Experiment 20000235 PARAMETER Experiment Name: At_Siliques_P Parameter: Age (day) Value: 21
  misc_feature: MA Experiment 20000235 PARAMETER Experiment Name: At_Siliques_P Parameter: Organism Value: A. thaliana
  misc_feature: MA Experiment 20000235 PARAMETER Experiment Name: At_Siliques_P Parameter: Plant Line Value: WS
  misc_feature: MA Experiment 20000235 PARAMETER Experiment Name: At_Siliques_P Parameter: Tissue Value: 5-10mm Siliques vs. Whole Plant
  misc_feature: MA Experiment ID: 20000264 Result: Up-regulated in Transcription
  misc_feature: MA Experiment 20000264 PARAMETER Experiment Name: At_Open_Flower_P Parameter: Age (day) Value: 21
  misc_feature: MA Experiment 20000264 PARAMETER Experiment Name: At_Open_Flower_P Parameter: Plant Line Value: WS
  misc_feature: MA Experiment 20000264 PARAMETER Experiment Name: At_Open_Flower_P Parameter: Tissue Value: Open Flower vs. Whole Plant
  misc_feature: MA Experiment ID: 20000265 Result: Up-regulated in Transcription
  misc_feature: MA Experiment 20000265 PARAMETER Experiment Name: At_Open_Flower_P Parameter: Age (day) Value: 21
  misc_feature: MA Experiment 20000265 PARAMETER Experiment Name: At_Open_Flower_P Parameter: Plant Line Value: WS
  misc_feature: MA Experiment 20000265 PARAMETER Experiment Name: At_Open_Flower_P Parameter: Tissue Value: Closed Flower vs. Whole Plant
  misc_feature: MA Experiment ID: 20000286 Result: Up-regulated in Transcription
  misc_feature: MA Experiment 20000286 PARAMETER Experiment Name: At_Open_Flower_P Parameter: Age (day) Value: 21
  misc_feature: MA Experiment 20000286 PARAMETER Experiment Name: At_Open_Flower_P Parameter: Plant Line Value: WS
  misc_feature: MA Experiment 20000286 PARAMETER Experiment Name: At_Open_Flower_P Parameter: Tissue Value: Half Open vs. Whole Plant
  misc_feature: MA Experiment ID: 20000437 Result: Down-regulated in Transcription
  misc_feature: MA Experiment 20000437 PARAMETER Experiment Name: At_Drought_P Parameter: Age (day) Value: 8
  misc_feature: MA Experiment 20000437 PARAMETER Experiment Name: At_Drought_P Parameter: Organism Value: A. thaliana
  misc_feature: MA Experiment 20000437 PARAMETER Experiment Name: At_Drought_P Parameter: Plant Line Value: WS
  misc_feature: MA Experiment 20000437 PARAMETER Experiment Name: At_Drought_P Parameter: Timepoint (hr) Value: 24
  misc_feature: MA Experiment 20000437 PARAMETER Experiment Name: At_Drought_P Parameter: Tissue Value: Whole Plant
  misc_feature: MA Experiment 20000437 PARAMETER Experiment Name: At_Drought_P Parameter: Treatment Value: Drought vs. No Drought
  misc_feature: MA Experiment ID: 20000439 Result: Up-regulated in Transcription
  misc_feature: MA Experiment 20000439 PARAMETER Experiment Name: At_Roots__P Parameter: Age (day) Value: 14 vs. 21
  misc_feature: MA Experiment 20000439 PARAMETER Experiment Name: At_Roots__P Parameter: Organism Value: A. thaliana
  misc_feature: MA Experiment 20000439 PARAMETER Experiment Name: At_Roots__P Parameter: Tissue Value: Roots vs. Whole Plant
  misc_feature: MA Experiment ID: 20000573 Result: Down-regulated in Transcription
  misc_feature: MA Experiment 20000573 PARAMETER Experiment Name: At_100uM_ABA_Mutants__P Parameter: Organism Value: A. thaliana
  misc_feature: MA Experiment 20000573 PARAMETER Experiment Name: At_100uM_ABA_Mutants__P Parameter: Plant Line Value: CS22 vs. Ler wt
  misc_feature: MA Experiment 20000573 PARAMETER Experiment Name: At_100uM_ABA_Mutants__P Parameter: Timepoint (hr) Value: N/A
  misc_feature: MA Experiment 20000573 PARAMETER Experiment Name: At_100uM_ABA_Mutants__P Parameter: Tissue Value: Whole Plant
  misc_feature: MA Experiment 20000573 PARAMETER Experiment Name: At_100uM_ABA_Mutants__P Parameter: Treatment Value: None
  misc_feature: MA Experiment ID: 20000574 Result: Down-regulated in Transcription
  misc_feature: MA Experiment 20000574 PARAMETER Experiment Name: At_100uM_ABA_Mutants__P Parameter: Organism Value: A. thaliana
  misc_feature: MA Experiment 20000574 PARAMETER Experiment Name: At_100uM_ABA_Mutants__P Parameter: Plant Line Value: CS23 vs. Ler wt
  misc_feature: MA Experiment 20000574 PARAMETER Experiment Name: At_100uM_ABA_Mutants__P Parameter: Timepoint (hr) Value: N/A
  misc_feature: MA Experiment 20000574 PARAMETER Experiment Name: At_100uM_ABA_Mutants__P Parameter: Tissue Value: Whole Plant
  misc_feature: MA Experiment 20000574 PARAMETER Experiment Name: At_100uM_ABA_Mutants__P Parameter: Treatment Value: None
  misc_feature: MA Experiment ID: 20001248 Result: Down-regulated in Transcription
  misc_feature: MA Experiment 20001248 PARAMETER Experiment Name: At_Far-red-induction_P Parameter: Age (day) Value: 7
  misc_feature: MA Experiment 20001248 PARAMETER Experiment Name: At_Far-red-induction_P Parameter: Light Value: Far-red vs. White
  misc_feature: MA Experiment 20001248 PARAMETER Experiment Name: At_Far-red-induction_P Parameter: Organism Value: A. thaliana
  misc_feature: MA Experiment 20001248 PARAMETER Experiment Name: At_Far-red-induction_P Parameter: Plant Line Value: Columbia
  misc_feature: MA Experiment 20001248 PARAMETER Experiment Name: At_Far-red-induction_P Parameter: Timepoint (hr) Value: 4
  misc_feature: MA Experiment 20001248 PARAMETER Experiment Name: At_Far-red-induction_P Parameter: Tissue Value: Whole Plant
  misc_feature: MA Experiment ID: 20001557 Result: Up-regulated in Transcription
  misc_feature: MA Experiment 20001557 PARAMETER Experiment Name: At_Drought_Soil_Dry_P Parameter: Age (day) Value: 27
  misc_feature: MA Experiment 20001557 PARAMETER Experiment Name: At_Drought_Soil_Dry_P Parameter: Organism Value: A. thaliana
  misc_feature: MA Experiment 20001557 PARAMETER Experiment Name: At_Drought_Soil_Dry_P Parameter: Plant Line Value: WS
  misc_feature: MA Experiment 20001557 PARAMETER Experiment Name: At_Drought_Soil_Dry_P Parameter: Post Timepoint (hr) Value: 3
  misc_feature: MA Experiment 20001557 PARAMETER Experiment Name: At_Drought_Soil_Dry_P Parameter: Post-Treatment Value: Re-Water vs. No Drought
  misc_feature: MA Experiment 20001557 PARAMETER Experiment Name: At_Drought_Soil_Dry_P Parameter: Timepoint (day) Value: 13
  misc_feature: MA Experiment 20001557 PARAMETER Experiment Name: At_Drought_Soil_Dry_P Parameter: Treatment Value: Drought vs. No Drought
  misc_feature: MA Experiment ID: 20001911 Result: Down-regulated in Transcription
  misc_feature: MA Experiment 20001911 PARAMETER Experiment Name: At_Drought_Reproduction_P Parameter: Age (day) Value: 40
  misc_feature: MA Experiment 20001911 PARAMETER Experiment Name: At_Drought_Reproduction_P Parameter: Organism Value: A. thaliana
  misc_feature: MA Experiment 20001911 PARAMETER Experiment Name: At_Drought_Reproduction_P Parameter: Plant Line Value: WS
  misc_feature: MA Experiment 20001911 PARAMETER Experiment Name: At_Drought_Reproduction_P Parameter: Timepoint (day) Value: 10
  misc_feature: MA Experiment 20001911 PARAMETER Experiment Name: At_Drought_Reproduction_P Parameter: Tissue Value: Flowers
  misc_feature: MA Experiment 20001911 PARAMETER Experiment Name: At_Drought_Reproduction_P Parameter: Treatment Value: Drought vs. No Drought
ggctcgaataatacgacgacttgtaataataataccgcccatgttttcgtggcacaaatatttaatatttcggtacctacgccatcgtcttcttctactatatatagtctagacatagacaccatcaagaagaagaaaaaaaacacataccacattctccactcatggcaaaactcatcctcatcatcgtcacccaaatcctcctcatcgcagccgttgtttccgcccgtaaaggcgaaaactttgcaaaaaccattgacaaaaaacattttggcctccgtaaggagaaactcactcatttccgtgtctactggcacgacattttaagcggctcaaaccctagttcggtcgtgatcaaccctcctatctccaactcttccttcttcggatcggtcactgtgatcgataaccgattaactacggaggtcgcggtgaattcgactttagtgggacaagcgcaagggatctacgctgctactggtcaacgtgatgcatctgcgcttatggtgatgaactttgcgttcaagacagggaagtataacggaagttcgatcgcgattcttggccggaacgctgtgttgaccaaggttagggagatgccggtgattggaggaagtggactcttccggtttgctagaggttatgtcgaggctcggaccatgtggtttgatcaaaagtcaggagatgctactgttgagtacagctgttatgtcttgcattattgatgatagtgatgaattattatgcctctcttttttaatgtttgataaaat

SEQ ID NO: 28857 - protein, 186 aa, Arabidopsis thaliana
  peptide (1)..(186): Ceres Seq. ID no. 13646076
  misc_feature (17)..(185): Pfam Name: Dirigent-like protein Pfam Description: Dirigent-like protein
  misc_feature (7)..(185): Homolog of NCBI NO: 30681257 NR Description: disease resistance response protein-related/
  misc_feature (1)..(185): Homolog of NCBI NO: 15238980 NR Description: disease resistance response protein-related
  misc_feature (1)..(185): Homolog of NCBI NO: 15218836 NR Description: disease resistance response protein-related/
  misc_feature (68)..(186): Homolog of NCBI NO: 15231315 NR Description: disease resistance response protein-related/
  misc_feature (29)..(186): Homolog of NCBI NO: 15217886 NR Description: disease resistance response protein-related/
  misc_feature (1)..(177): Homolog of NCBI NO: 15231318 NR Description: disease resistance response protein-related/
  misc_feature (1)..(186): Homolog of NCBI NO: 15239779 NR Description: disease resistance response protein-related/
  misc_feature (1)..(186): Homolog of NCBI NO: 22135914 NR Description: unknown protein [Arabidopsis thaliana]
  misc_feature (1)..(186): Homolog of NCBI NO: 15222673 NR Description: disease resistance response protein-related/
  misc_feature (1)..(186): Homolog of NCBI NO: 15231302 NR Description: disease resistance response protein-related/
MAKLILIIVTQILLIAAVVSARKGENFAKTIDKKHFGLRKEKLTHFRVYWHDILSGSNPSSVVINPPISNSSFFGSVTVIDNRLTTEVAVNSTLVGQAQGIYAATGQRDASALMVMNFAFKTGKYNGSSIAILGRNAVLTKVREMPVIGGSGLFRFARGYVEARTMWFDQKSGDATVEYSCYVLHY

SEQ ID NO: 28858 - protein, 108 aa, Arabidopsis thaliana
  peptide (1)..(108): Ceres Seq. ID no. 13646077
GSNNTTTCNNNTAHVFVAQIFNISVPTPSSSSTIYSLDIDTIKKKKKNTYHILHSWQNSSSSSSPKSSSSQPLFPPVKAKTLQKPLTKNILASVRRNSLISVSTGTTF

SEQ ID NO: 28859 - DNA, 2068 bp, Arabidopsis thaliana
  misc_feature (1)..(2068): Ceres Seq. ID no. 12397174
  misc_feature: MA Experiment ID: 108576 Result: Up-regulated in Transcription
  misc_feature: MA Experiment 108576 PARAMETER Experiment Name: At_42deg_Heat_cDNA_P Parameter: Temperature (deg C) Value: 42 vs. 22
  misc_feature: MA Experiment 108576 PARAMETER Experiment Name: At_42deg_Heat_cDNA_P Parameter: Timepoint (hr) Value: 1
  misc_feature: MA Experiment 108576 PARAMETER Experiment Name: At_42deg_Heat_cDNA_P Parameter: Tissue Value: Aerial
  misc_feature: MA Experiment ID: 20000093 Result: Up-regulated in Transcription
  misc_feature: MA Experiment 20000093 PARAMETER Experiment Name: At_42deg_Heat_cDNA_P Parameter: Temperature (deg C) Value: 42 vs. 22
  misc_feature: MA Experiment 20000093 PARAMETER Experiment Name: At_42deg_Heat_cDNA_P Parameter: Timepoint (hr) Value: 0.5
  misc_feature: MA Experiment 20000093 PARAMETER Experiment Name: At_42deg_Heat_cDNA_P Parameter: Tissue Value: Aerial
  misc_feature: MA Experiment ID: 20000111 Result: Up-regulated in Transcription
  misc_feature: MA Experiment 20000111 PARAMETER Experiment Name: At_42deg_Heat_cDNA_P Parameter: Temperature (deg C) Value: 42 vs. 22
  misc_feature: MA Experiment 20000111 PARAMETER Experiment Name: At_42deg_Heat_cDNA_P Parameter: Timepoint (hr) Value: 6
  misc_feature: MA Experiment 20000111 PARAMETER Experiment Name: At_42deg_Heat_cDNA_P Parameter: Tissue Value: Aerial
  misc_feature: MA Experiment ID: 20000112 Result: Up-regulated in Transcription
  misc_feature: MA Experiment 20000112 PARAMETER Experiment Name: At_42deg_Heat_cDNA_P Parameter: Temperature (deg C) Value: 42 vs. 22
  misc_feature: MA Experiment 20000112 PARAMETER Experiment Name: At_42deg_Heat_cDNA_P Parameter: Timepoint (hr) Value: 2
  misc_feature: MA Experiment 20000112 PARAMETER Experiment Name: At_42deg_Heat_cDNA_P Parameter: Tissue Value: Aerial
  misc_feature: MA Experiment ID: 20000113 Result: Up-regulated in Transcription
  misc_feature: MA Experiment 20000113 PARAMETER Experiment Name: At_42deg_Heat_cDNA_P Parameter: Temperature (deg C) Value: 42 vs. 22
  misc_feature: MA Experiment 20000113 PARAMETER Experiment Name: At_42deg_Heat_cDNA_P Parameter: Timepoint (hr) Value: 8
  misc_feature: MA Experiment 20000113 PARAMETER Experiment Name: At_42deg_Heat_cDNA_P Parameter: Tissue Value: Aerial
  misc_feature: MA Experiment ID: 20000144 Result: Up-regulated in Transcription
  misc_feature: MA Experiment 20000144 PARAMETER Experiment Name: At_42deg_Heat_cDNA_P Parameter: Temperature (deg C) Value: 42 vs. 22
  misc_feature: MA Experiment 20000144 PARAMETER Experiment Name: At_42deg_Heat_cDNA_P Parameter: Timepoint (hr) Value: 1
  misc_feature: MA Experiment 20000144 PARAMETER Experiment Name: At_42deg_Heat_cDNA_P Parameter: Tissue Value: Aerial
  misc_feature: MA Experiment ID: 20000171 Result: Up-regulated in Transcription
  misc_feature: MA Experiment 20000171 PARAMETER Experiment Name: At_42deg_Heat_P Parameter: Age (day) Value: 14
  misc_feature: MA Experiment 20000171 PARAMETER Experiment Name: At_42deg_Heat_P Parameter: Organism Value: A. thaliana
  misc_feature: MA Experiment 20000171 PARAMETER Experiment Name: At_42deg_Heat_P Parameter: Plant Line Value: WS
  misc_feature: MA Experiment 20000171 PARAMETER Experiment Name: At_42deg_Heat_P Parameter: Temperature (deg C) Value: 42 vs. 22
  misc_feature: MA Experiment 20000171 PARAMETER Experiment Name: At_42deg_Heat_P Parameter: Timepoint (hr) Value: 1
  misc_feature: MA Experiment 20000171 PARAMETER Experiment Name: At_42deg_Heat_P Parameter: Tissue Value: Aerial
  misc_feature: MA Experiment ID: 20000173 Result: Up-regulated in Transcription
  misc_feature: MA Experiment 20000173 PARAMETER Experiment Name: At_42deg_Heat_P Parameter: Age (day) Value: 14
  misc_feature: MA Experiment 20000173 PARAMETER Experiment Name: At_42deg_Heat_P Parameter: Organism Value: A. thaliana
  misc_feature: MA Experiment 20000173 PARAMETER Experiment Name: At_42deg_Heat_P Parameter: Plant Line Value: WS
  misc_feature: MA Experiment 20000173 PARAMETER Experiment Name: At_42deg_Heat_P Parameter: Temperature (deg C) Value: 42 vs. 22
  misc_feature: MA Experiment 20000173 PARAMETER Experiment Name: At_42deg_Heat_P Parameter: Timepoint (hr) Value: 6
  misc_feature: MA Experiment 20000173 PARAMETER Experiment Name: At_42deg_Heat_P Parameter: Tissue Value: Aerial
  misc_feature: MA Experiment ID: 20000234 Result: Up-regulated in Transcription
  misc_feature: MA Experiment 20000234 PARAMETER Experiment Name: At_Siliques_P Parameter: Age (day) Value: 21
  misc_feature: MA Experiment 20000234 PARAMETER Experiment Name: At_Siliques_P Parameter: Organism Value: A. thaliana
  misc_feature: MA Experiment 20000234 PARAMETER Experiment Name: At_Siliques_P Parameter: Plant Line Value: WS
  misc_feature: MA Experiment 20000234 PARAMETER Experiment Name: At_Siliques_P Parameter: Tissue Value: Less Than 5mm Siliques vs. Whole Plant
  misc_feature: MA Experiment ID: 20000235 Result: Up-regulated in Transcription
  misc_feature: MA Experiment 20000235 PARAMETER Experiment Name: At_Siliques_P Parameter: Age (day) Value: 21
  misc_feature: MA Experiment 20000235 PARAMETER Experiment Name: At_Siliques_P Parameter: Organism Value: A. thaliana
  misc_feature: MA Experiment 20000235 PARAMETER Experiment Name: At_Siliques_P Parameter: Plant Line Value: WS
  misc_feature: MA Experiment 20000235 PARAMETER Experiment Name: At_Siliques_P Parameter: Tissue Value: 5-10mm Siliques vs. Whole Plant
  misc_feature: MA Experiment ID: 20000264 Result: Up-regulated in Transcription
  misc_feature: MA Experiment 20000264 PARAMETER Experiment Name: At_Open_Flower_P Parameter: Age (day) Value: 21
  misc_feature: MA Experiment 20000264 PARAMETER Experiment Name: At_Open_Flower_P Parameter: Plant Line Value: WS
  misc_feature: MA Experiment 20000264 PARAMETER Experiment Name: At_Open_Flower_P Parameter: Tissue Value: Open Flower vs. Whole Plant
  misc_feature: MA Experiment ID: 20000265 Result: Up-regulated in Transcription
  misc_feature: MA Experiment 20000265 PARAMETER Experiment Name: At_Open_Flower_P Parameter: Age (day) Value: 21
  misc_feature: MA Experiment 20000265 PARAMETER Experiment Name: At_Open_Flower_P Parameter: Plant Line Value: WS
  misc_feature: MA Experiment 20000265 PARAMETER Experiment Name: At_Open_Flower_P Parameter: Tissue Value: Closed Flower vs. Whole Plant
  misc_feature: MA Experiment ID: 20000286 Result: Up-regulated in Transcription
  misc_feature: MA Experiment 20000286 PARAMETER Experiment Name: At_Open_Flower_P Parameter: Age (day) Value: 21
  misc_feature: MA Experiment 20000286 PARAMETER Experiment Name: At_Open_Flower_P Parameter: Plant Line Value: WS
  misc_feature: MA Experiment 20000286 PARAMETER Experiment Name: At_Open_Flower_P Parameter: Tissue Value: Half Open vs. Whole Plant
  misc_feature: MA Experiment ID: 20000794 Result: Up-regulated in Transcription
  misc_feature: MA Experiment 20000794 PARAMETER Experiment Name: At_Petals_P Parameter: Age (day) Value: 23-25 days
  misc_feature: MA Experiment 20000794 PARAMETER Experiment Name: At_Petals_P Parameter: Plant Line Value: WS
  misc_feature: MA Experiment 20000794 PARAMETER Experiment Name: At_Petals_P Parameter: Tissue Value: Petals vs. Whole plant
  misc_feature: MA Experiment ID: 20001557 Result: Up-regulated in Transcription
  misc_feature: MA Experiment 20001557 PARAMETER Experiment Name: At_Drought_Soil_Dry_P Parameter: Age (day) Value: 27
  misc_feature: MA Experiment 20001557 PARAMETER Experiment Name: At_Drought_Soil_Dry_P Parameter: Organism Value: A. thaliana
  misc_feature: MA Experiment 20001557 PARAMETER Experiment Name: At_Drought_Soil_Dry_P Parameter: Plant Line Value: WS
  misc_feature: MA Experiment 20001557 PARAMETER Experiment Name: At_Drought_Soil_Dry_P Parameter: Post Timepoint (hr) Value: 3
  misc_feature: MA Experiment 20001557 PARAMETER Experiment Name: At_Drought_Soil_Dry_P Parameter: Post-Treatment Value: Re-Water vs. No Drought
  misc_feature: MA Experiment 20001557 PARAMETER Experiment Name: At_Drought_Soil_Dry_P Parameter: Timepoint (day) Value: 13
  misc_feature: MA Experiment 20001557 PARAMETER Experiment Name: At_Drought_Soil_Dry_P Parameter: Treatment Value: Drought vs. No Drought
atgatgcaactgggtggtggtactccgaccactacagcggcggctacaaccgtcacaactgctacagcaccaccgccacaatcaaacaacaacgattcagcggcaacagaagcagcggcagcagcggttggggcgtttgaggtgtcggaagagatgcacgaccgtgggtttggaggaaatcgttggccgcggcaggaaacgctagcgttgttgaaaatacgatctgacatgggaatagcgtttcgagacgctagcgttaaaggtcccttatgggaagaggtttctaggaaaatggcggagcatggttacataagaaacgcaaagaaatgcaaagagaaattcgagaacgtttacaaataccacaaacgaaccaaagaaggtcgtaccggaaaatccgaaggcaaaacttatcgcttctttgatcaattagaagctctcgagtctcaatctacaacctcactccaccatcatcaacaacaaacgcctcttcgaccacagcaaaacaacaacaacaacaacaacaacaacaacaacagctccatattttcaactcctcctccggtaacgacagttatgccgacgcttccttcttcatcaattcctccgtatactcagcagattaatgtaccttcgtttccaaacatctccggtgattttctatcggataattctacatcgtcttcgtcttcttattcgacttcttctgacatggagatgggtggtggaactgcgactacaaggaagaaaaggaagaggaaatggaaggtgtttttcgagcggttgatgaaacaagtagttgataaacaggaagagcttcaacgcaaattcttggaagctgttgaaaagcgagaacacgagagattggttagagaagagtcttggagagttcaagagattgccagaatcaaccgcgagcacgagatcttagctcaagaacgctctatgtccgctgcaaaagacgctgctgttatggcctttcttcaaaaactgtcagagaaacaaccgaatcagccacaaccgcagcctcagccgcaacaagttcgaccatcaatgcagcttaataacaacaatcagcagcaaccgcctcaacggtctcctccaccgcaacctcctgctccgcttccgcagccaattcaagcggttgtgtcgacgttagacacaacgaaaacggacaatggtggtgatcagaatatgactcctgcagcttcagcgagctcgtcgcggtggccgaaagtggagatagaagcattgataaagctgaggacgaatcttgattcgaaatatcaagaaaacggaccaaaaggaccattgtgggaagagatatcagcgggaatgagaaggttaggattcaacaggaactcaaagagatgcaaagagaaatgggaaaacataaacaaatacttcaagaaagtcaaagagagcaacaagaaacgtcccgaagattccaagacttgcccttactttcaccagcttgatgctttatatagagagaggaacaaattccacagcaacaacaacattgcagcttcttcttcatcttccggtcttgttaaaccggataattctgttcccttgatggtccaaccagagcagcaatggcctccggctgtaacgactgcgacaactactcccgcagcggctcagcctgatcagcaatctcagccgtcggagcagaactttgatgatgaagaaggtacagatgaagagtacgacgatgaagatgaggaagaggagaatgaagaagaggaaggaggtgagttcgagcttgtgcctagcaataacaacaacaacaagacgacgaataatctgtaatgatgatgattcgagttcgaaccggtttggtggtgaaagattagtaatctttttttaagttttgatacagaacatgagaatttaaatattggagggtttttttttttttttttttttcatctttgatttttaagttatactgaagagagatttaatatgttaaaacaaaattaaaataaactgtgatttaattattttttccttgggatatataaataaaaaatgttaagatagggggacaatgtggggttttcat

SEQ ID NO: 28860 - protein, 603 aa, Arabidopsis thaliana
  peptide (1)..(603): Ceres Seq. ID no. 12397175
  misc_feature (421)..(465): Pfam Name: Myb-like DNA-binding domain Pfam Description: Myb-like DNA-binding domain
  misc_feature (49)..(211): Homolog of NCBI NO: 13646986 NR Description: DNA-binding protein DF1 [Pisum sativum]
  misc_feature (331)..(551): Homolog of NCBI NO: 13646986 NR Description: DNA-binding protein DF1 [Pisum sativum]
  misc_feature (21)..(537): Homolog of NCBI NO: 27476085 NR Description: Hypothetical protein [Oryza sativa (japonica
MMQLGGGTPTTTAAATTVTTATAPPPQSNNNDSAATEAAAAAVGAFEVSEEMHDRGFGGNRWPRQETLALLKIRSDMGIAFRDASVKGPLWEEVSRKMAEHGYIRNAKKCKEKFENVYKYHKRTKEGRTGKSEGKTYRFFDQLEALESQSTTSLHHHQQQTPLRPQQNNNNNNNNNNNSSIFSTPPPVTTVMPTLPSSSIPPYTQQINVPSFPNISGDFLSDNSTSSSSSYSTSSDMEMGGGTATTRKKRKRKWKVFFERLMKQVVDKQEELQRKFLEAVEKREHERLVREESWRVQEIARINREHEILAQERSMSAAKDAAVMAFLQKLSEKQPNQPQPQPQPQQVRPSMQLNNNNQQQPPQRSPPPQPPAPLPQPIQAVVSTLDTTKTDNGGDQNMTPAASASSSRWPKVEIEALIKLRTNLDSKYQENGPKGPLWEEISAGMRRLGFNRNSKRCKEKWENINKYFKKVKESNKKRPEDSKTCPYFHQLDALYRERNKFHSNNNIAASSSSSGLVKPDNSVPLMVQPEQQWPPAVTTATTTPAAAQPDQQSQPSEQNFDDEEGTDEEYDDEDEEEENEEEEGGEFELVPSNNNNNKTTNNL

SEQ ID NO: 28861 - protein, 602 aa, Arabidopsis thaliana
  peptide (1)..(602): Ceres Seq. ID no. 12397176
  misc_feature (420)..(464): Pfam Name: Myb-like DNA-binding domain Pfam Description: Myb-like DNA-binding domain
  misc_feature (48)..(210): Homolog of NCBI NO: 13646986 NR Description: DNA-binding protein DF1 [Pisum sativum]
  misc_feature (330)..(550): Homolog of NCBI NO: 13646986 NR Description: DNA-binding protein DF1 [Pisum sativum]
  misc_feature (20)..(536): Homolog of NCBI NO: 27476085 NR Description: Hypothetical protein [Oryza sativa (japonica
MQLGGGTPTTTAAATTVTTATAPPPQSNNNDSAATEAAAAAVGAFEVSEEMHDRGFGGNRWPRQETLALLKIRSDMGIAFRDASVKGPLWEEVSRKMAEHGYIRNAKKCKEKFENVYKYHKRTKEGRTGKSEGKTYRFFDQLEALESQSTTSLHHHQQQTPLRPQQNNNNNNNNNNNSSIFSTPPPVTTVMPTLPSSSIPPYTQQINVPSFPNISGDFLSDNSTSSSSSYSTSSDMEMGGGTATTRKKRKRKWKVFFERLMKQVVDKQEELQRKFLEAVEKREHERLVREESWRVQEIARINREHEILAQERSMSAAKDAAVMAFLQKLSEKQPNQPQPQPQPQQVRPSMQLNNNNQQQPPQRSPPPQPPAPLPQPIQAVVSTLDTTKTDNGGDQNMTPAASASSSRWPKVEIEALIKLRTNLDSKYQENGPKGPLWEEISAGMRRLGFNRNSKRCKEKWENINKYFKKVKESNKKRPEDSKTCPYFHQLDALYRERNKFHSNNNIAASSSSSGLVKPDNSVPLMVQPEQQWPPAVTTATTTPAAAQPDQQSQPSEQNFDDEEGTDEEYDDEDEEEENEEEEGGEFELVPSNNNNNKTTNNL

SEQ ID NO: 28862 - protein, 552 aa, Arabidopsis thaliana
  peptide (1)..(552): Ceres Seq. ID no. 12397177
  misc_feature (370)..(414): Pfam Name: Myb-like DNA-binding domain Pfam Description: Myb-like DNA-binding domain
  misc_feature (1)..(160): Homolog of NCBI NO: 13646986 NR Description: DNA-binding protein DF1 [Pisum sativum]
  misc_feature (280)..(500): Homolog of NCBI NO: 13646986 NR Description: DNA-binding protein DF1 [Pisum sativum]
  misc_feature (1)..(486): Homolog of NCBI NO: 27476085 NR Description: Hypothetical protein [Oryza sativa (japonica
MHDRGFGGNRWPRQETLALLKIRSDMGIAFRDASVKGPLWEEVSRKMAEHGYIRNAKKCKEKFENVYKYHKRTKEGRTGKSEGKTYRFFDQLEALESQSTTSLHHHQQQTPLRPQQNNNNNNNNNNNSSIFSTPPPVTTVMPTLPSSSIPPYTQQINVPSFPNISGDFLSDNSTSSSSSYSTSSDMEMGGGTATTRKKRKRKWKVFFERLMKQVVDKQEELQRKFLEAVEKREHERLVREESWRVQEIARINREHEILAQERSMSAAKDAAVMAFLQKLSEKQPNQPQPQPQPQQVRPSMQLNNNNQQQPPQRSPPPQPPAPLPQPIQAVVSTLDTTKTDNGGDQNMTPAASASSSRWPKVEIEALIKLRTNLDSKYQENGPKGPLWEEISAGMRRLGFNRNSKRCKEKWENINKYFKKVKESNKKRPEDSKTCPYFHQLDALYRERNKFHSNNNIAASSSSSGLVKPDNSVPLMVQPEQQWPPAVTTATTTPAAAQPDQQSQPSEQNFDDEEGTDEEYDDEDEEEENEEEEGGEFELVPSNNNNNKTTNNL

SEQ ID NO: 28863 - DNA, 845 bp, Arabidopsis thaliana
  misc_feature (1)..(845): Ceres Seq. ID no. 12332612
  misc_feature: MA Experiment ID: 108434 Result: Up-regulated in Transcription
  misc_feature: MA Experiment 108434 PARAMETER Experiment Name: At_Root_Tips_cDNA_P Parameter: Tissue Value: Root Tips
  misc_feature: MA Experiment ID: 108462 Result: Down-regulated in Transcription
  misc_feature: MA Experiment 108462 PARAMETER Experiment Name: At_Germinating_Seeds_cDNA_P Parameter: Age (day) Value: 2 vs. 0
  misc_feature: MA Experiment 108462 PARAMETER Experiment Name: At_Germinating_Seeds_cDNA_P Parameter: Tissue Value: Germinating Seeds
  misc_feature: MA Experiment ID: 108463 Result: Down-regulated in Transcription
  misc_feature: MA Experiment 108463 PARAMETER Experiment Name: At_Germinating_Seeds_cDNA_P Parameter: Age (day) Value: 3 vs. 0
  misc_feature: MA Experiment 108463 PARAMETER Experiment Name: At_Germinating_Seeds_cDNA_P Parameter: Tissue Value: Germinating Seeds
  misc_feature: MA Experiment ID: 108464 Result: Down-regulated in Transcription
  misc_feature: MA Experiment 108464 PARAMETER Experiment Name: At_Germinating_Seeds_cDNA_P Parameter: Age (day) Value: 4 vs. 0
  misc_feature: MA Experiment 108464 PARAMETER Experiment Name: At_Germinating_Seeds_cDNA_P Parameter: Tissue Value: Germinating Seeds
  misc_feature: MA Experiment ID: 108488 Result: Up-regulated in Transcription
  misc_feature: MA Experiment ID: 108561 Result: Down-regulated in Transcription
  misc_feature: MA Experiment 108561 PARAMETER Experiment Name: At_100uM_ABA_cDNA_P Parameter: Timepoint (hr) Value: 6
  misc_feature: MA Experiment 108561 PARAMETER Experiment Name: At_100uM_ABA_cDNA_P Parameter: Tissue Value: Aerial
  misc_feature: MA Experiment 108561 PARAMETER Experiment Name: At_100uM_ABA_cDNA_P Parameter: Treatment Value: 100uM ABA vs. No Treatment
  misc_feature: MA Experiment ID: 108573 Result: Down-regulated in Transcription
  misc_feature: MA Experiment 108573 PARAMETER Experiment Name: At_Drought_cDNA_P Parameter: Timepoint (hr) Value: 6
  misc_feature: MA Experiment 108573 PARAMETER Experiment Name: At_Drought_cDNA_P Parameter: Tissue Value: Aerial
  misc_feature: MA Experiment 108573 PARAMETER Experiment Name: At_Drought_cDNA_P Parameter: Treatment Value: Drought vs. No Drought
  misc_feature: MA Experiment ID: 20000227 Result: Up-regulated in Transcription
  misc_feature: MA Experiment 20000227 PARAMETER Experiment Name: At_Root-Tips-vs-Tops_P Parameter: Tissue Value: Root Tips vs. Root Tops
  misc_feature: MA Experiment ID: 20000234 Result: Up-regulated in Transcription
  misc_feature: MA Experiment 20000234 PARAMETER Experiment Name: At_Siliques_P Parameter: Age (day) Value: 21
  misc_feature: MA Experiment 20000234 PARAMETER Experiment Name: At_Siliques_P Parameter: Organism Value: A. thaliana
  misc_feature: MA Experiment 20000234 PARAMETER Experiment Name: At_Siliques_P Parameter: Plant Line Value: WS
  misc_feature: MA Experiment 20000234 PARAMETER Experiment Name: At_Siliques_P Parameter: Tissue Value: Less Than 5mm Siliques vs. Whole Plant
  misc_feature: MA Experiment ID: 20000437 Result: Down-regulated in Transcription
  misc_feature: MA Experiment 20000437 PARAMETER Experiment Name: At_Drought_P Parameter: Age (day) Value: 8
  misc_feature: MA Experiment 20000437 PARAMETER Experiment Name: At_Drought_P Parameter: Organism Value: A. thaliana
  misc_feature: MA Experiment 20000437 PARAMETER Experiment Name: At_Drought_P Parameter: Plant Line Value: WS
  misc_feature: MA Experiment 20000437 PARAMETER Experiment Name: At_Drought_P Parameter: Timepoint (hr) Value: 24
  misc_feature: MA Experiment 20000437 PARAMETER Experiment Name: At_Drought_P Parameter: Tissue Value: Whole Plant
  misc_feature: MA Experiment 20000437 PARAMETER Experiment Name: At_Drought_P Parameter: Treatment Value: Drought vs. No Drought
  misc_feature: MA Experiment ID: 20001557 Result: Up-regulated in Transcription
  misc_feature: MA Experiment 20001557 PARAMETER Experiment Name: At_Drought_Soil_Dry_P Parameter: Age (day) Value: 27
  misc_feature: MA Experiment 20001557 PARAMETER Experiment Name: At_Drought_Soil_Dry_P Parameter: Organism Value: A. thaliana
  misc_feature: MA Experiment 20001557 PARAMETER Experiment Name: At_Drought_Soil_Dry_P Parameter: Plant Line Value: WS
  misc_feature: MA Experiment 20001557 PARAMETER Experiment Name: At_Drought_Soil_Dry_P Parameter: Post Timepoint (hr) Value: 3
  misc_feature: MA Experiment 20001557 PARAMETER Experiment Name: At_Drought_Soil_Dry_P Parameter: Post-Treatment Value: Re-Water vs. No Drought
  misc_feature: MA Experiment 20001557 PARAMETER Experiment Name: At_Drought_Soil_Dry_P Parameter: Timepoint (day) Value: 13
  misc_feature: MA Experiment 20001557 PARAMETER Experiment Name: At_Drought_Soil_Dry_P Parameter: Treatment Value: Drought vs. No Drought
  misc_feature: MA Experiment ID: 20001558 Result: Up-regulated in Transcription
  misc_feature: MA Experiment 20001558 PARAMETER Experiment Name: At_Drought_Soil_Dry_P Parameter: Age (day) Value: 27
  misc_feature: MA Experiment 20001558 PARAMETER Experiment Name: At_Drought_Soil_Dry_P Parameter: Organism Value: A. thaliana
  misc_feature: MA Experiment 20001558 PARAMETER Experiment Name: At_Drought_Soil_Dry_P Parameter: Plant Line Value: WS
  misc_feature: MA Experiment 20001558 PARAMETER Experiment Name: At_Drought_Soil_Dry_P Parameter: Post Timepoint (hr) Value: 6
  misc_feature: MA Experiment 20001558 PARAMETER Experiment Name: At_Drought_Soil_Dry_P Parameter: Post-Treatment Value: Re-Water vs. No Drought
  misc_feature: MA Experiment 20001558 PARAMETER Experiment Name: At_Drought_Soil_Dry_P Parameter: Timepoint (day) Value: 13
  misc_feature: MA Experiment 20001558 PARAMETER Experiment Name: At_Drought_Soil_Dry_P Parameter: Treatment Value: Drought vs. No Drought
  misc_feature: MA Experiment ID: 20001560 Result: Up-regulated in Transcription
  misc_feature: MA Experiment 20001560 PARAMETER Experiment Name: At_Drought_Soil_Dry_P Parameter: Age (day) Value: 28
  misc_feature: MA Experiment 20001560 PARAMETER Experiment Name: At_Drought_Soil_Dry_P Parameter: Organism Value: A. thaliana
  misc_feature: MA Experiment 20001560 PARAMETER Experiment Name: At_Drought_Soil_Dry_P Parameter: Plant Line Value: WS
  misc_feature: MA Experiment 20001560 PARAMETER Experiment Name: At_Drought_Soil_Dry_P Parameter: Post Timepoint (hr) Value: None
  misc_feature: MA Experiment 20001560 PARAMETER Experiment Name: At_Drought_Soil_Dry_P Parameter: Post-Treatment Value: None
  misc_feature: MA Experiment 20001560 PARAMETER Experiment Name: At_Drought_Soil_Dry_P Parameter: Timepoint (day) Value: 14
  misc_feature: MA Experiment 20001560 PARAMETER Experiment Name: At_Drought_Soil_Dry_P Parameter: Treatment Value: Drought vs. No Drought
  misc_feature: MA Experiment ID: 20001757 Result: Up-regulated in Transcription
  misc_feature: MA Experiment 20001757 PARAMETER Experiment Name: At_50mM_NH4NO3_L-to-H_P Parameter: Timepoint (hr) Value: 6
  misc_feature: MA Experiment 20001757 PARAMETER Experiment Name: At_50mM_NH4NO3_L-to-H_P Parameter: Tissue Value: Leaf
  misc_feature: MA Experiment 20001757 PARAMETER Experiment Name: At_50mM_NH4NO3_L-to-H_P Parameter: Treatment Value: 50mM NH4NO3 vs 100mM Mannitol
ataagtagggttcttgcttgttttctctcatcgtgtgttctgctgctagctcctcttgagttgaagaaatgaagcacaacaatgttatccccaatggtcacttcaaaaagcactggcagaattatgtcaagacatggttcaaccagcctgccaggaaaaccagaagaagaattgcgaggcaaaagaaggctgtgaagatcttccctcgtccaacttctggacctctccgccctgttgtgcatggtcagactcttaagtacaacatgaaggtcagaaccggtaaaggattcactcttgaagagctcaaggctgctggtatcccaaagaagttggcgcctacaattggtattgctgttgaccatcgtcgcaagaaccgatctttggagggtcttcaaacaaatgtccagaggctgaaaacctacaagaccaagttagtcattttcccgcgtcgtgcccgcaaggtcaaggctggtgactctacaccagaagagttggctaatgctacccaagttcaaggagactacttgcctattgtacgtgagaagcctaccatggaactcgtcaagctgacttcagaaatgaagtctttcaaggcttttgacaagatacgccttgagcgcactaacaagaggcatgccggagctagagccaagagagccgcagaggctgagaaagaagagaagaagtgaggtcgttcttcttaggtagaagaaacttttatcttatcaacttttggaactgaattttgtgtatcagactgtcttttctttcatcagtttttatccttaaatctttgattttgctgctaccttgcttctcttgatttatggaaaagaccgtatctc

SEQ ID NO: 28864 - protein, 206 aa, Arabidopsis thaliana [sequence omitted]

SEQ ID NO: 28865 - protein, 141 aa, Arabidopsis thaliana; identical to SEQ ID NO: 25776
  peptide (1)..(141): Ceres Seq. ID no. 12332614
  misc_feature (1)..(118): Pfam Name: Ribosomal protein L13e Pfam Description: Ribosomal protein L13e
  misc_feature (1)..(141): Homolog of NCBI NO: 12580867 NR Description: 60S ribosomal protein L13E [Picea abies]
  misc_feature (1)..(141): Homolog of NCBI NO: 18873677 NR Description: putative cold-induced protein
  misc_feature (1)..(141): Homolog of NCBI NO: 34897952 NR Description: ESTs AU077873(S1878),D40121(S1878) correspond to region of the predicted gene.~Similar to Arabidopsis thaliana 60S
  misc_feature (1)..(141): Homolog of NCBI NO: 15237847 NR Description: 60S ribosomal protein L13
  misc_feature (1)..(141): Homolog of NCBI NO: 7441102 NR Description: ribosomal protein L13.A, cytosolic - rape
  misc_feature (1)..(141): Homolog of NCBI NO: 7441103 NR Description: ribosomal protein L13.B, cytosolic - rape
  misc_feature (1)..(141): Homolog of NCBI NO: 730450 NR Description: 60S RIBOSOMAL PROTEIN L13-2 (COLD INDUCED PROTEIN
  misc_feature (1)..(141): Homolog of NCBI NO: 730449 NR Description: 60S RIBOSOMAL PROTEIN L13-1 (COLD INDUCED PROTEIN
  misc_feature (1)..(141): Homolog of NCBI NO: 21537149 NR Description: 60S ribosomal protein L13, BBC1 protein
  misc_feature (1)..(141): Homolog of NCBI NO: 15229064 NR Description: 60S ribosomal protein L13, BBC1 protein

SEQ ID NO: 28866 - DNA, 1480 bp, Arabidopsis thaliana
  misc_feature (1)..(1480): Ceres Seq. ID no. 12385338
  misc_feature: MA Experiment ID: 108463 Result: Down-regulated in Transcription
  misc_feature: MA Experiment 108463 PARAMETER Experiment Name: At_Germinating_Seeds_cDNA_P Parameter: Age (day) Value: 3 vs. 0
  misc_feature: MA Experiment 108463 PARAMETER Experiment Name: At_Germinating_Seeds_cDNA_P Parameter: Tissue Value: Germinating Seeds
  misc_feature: MA Experiment ID: 108464 Result: Down-regulated in Transcription
  misc_feature: MA Experiment 108464 PARAMETER Experiment Name: At_Germinating_Seeds_cDNA_P Parameter: Age (day) Value: 4 vs. 0
  misc_feature: MA Experiment 108464 PARAMETER Experiment Name: At_Germinating_Seeds_cDNA_P Parameter: Tissue Value: Germinating Seeds
  misc_feature: MA Experiment ID: 108595 Result: Down-regulated in Transcription
  misc_feature: MA Experiment 108595 PARAMETER Experiment Name: At_Ler-pi_Ovule_cDNA_P Parameter: Plant Line Value: null
  misc_feature: MA Experiment ID: 20000088 Result: Up-regulated in Transcription
  misc_feature: MA Experiment 20000088 PARAMETER Experiment Name: At_100uM_ABA_Mutants_cDNA_P Parameter: Plant Line Value: Landsberg
  misc_feature: MA Experiment 20000088 PARAMETER Experiment Name: At_100uM_ABA_Mutants_cDNA_P Parameter: Timepoint (hr) Value: 6
  misc_feature: MA Experiment 20000088 PARAMETER Experiment Name: At_100uM_ABA_Mutants_cDNA_P Parameter: Tissue Value: Aerial
  misc_feature: MA Experiment 20000088 PARAMETER Experiment Name: At_100uM_ABA_Mutants_cDNA_P Parameter: Treatment Value: 100uM ABA vs. No Treatment
  misc_feature: MA Experiment ID: 20000111 Result: Down-regulated in Transcription
  misc_feature: MA Experiment 20000111 PARAMETER Experiment Name: At_42deg_Heat_cDNA_P Parameter: Temperature (deg C) Value: 42 vs. 22
  misc_feature: MA Experiment 20000111 PARAMETER Experiment Name: At_42deg_Heat_cDNA_P Parameter: Timepoint (hr) Value: 6
  misc_feature: MA Experiment 20000111 PARAMETER Experiment Name: At_42deg_Heat_cDNA_P Parameter: Tissue Value: Aerial
  misc_feature: MA Experiment ID: 20000113 Result: Down-regulated in Transcription
  misc_feature: MA Experiment 20000113 PARAMETER Experiment Name: At_42deg_Heat_cDNA_P Parameter: Temperature (deg C) Value: 42 vs. 22
  misc_feature: MA Experiment 20000113 PARAMETER Experiment Name: At_42deg_Heat_cDNA_P Parameter: Timepoint (hr) Value: 8
  misc_feature: MA Experiment 20000113 PARAMETER Experiment Name: At_42deg_Heat_cDNA_P Parameter: Tissue Value: Aerial
  misc_feature: MA Experiment ID: 20000117 Result: Up-regulated in Transcription
  misc_feature: MA Experiment 20000117 PARAMETER Experiment Name: At_100uM_ABA_Mutants_cDNA_P Parameter: Plant Line Value: Columbia
  misc_feature: MA Experiment 20000117 PARAMETER Experiment Name: At_100uM_ABA_Mutants_cDNA_P Parameter: Timepoint (hr) Value: 6
  misc_feature: MA Experiment 20000117 PARAMETER Experiment Name: At_100uM_ABA_Mutants_cDNA_P Parameter: Tissue Value: Aerial
  misc_feature: MA Experiment 20000117 PARAMETER Experiment Name: At_100uM_ABA_Mutants_cDNA_P Parameter: Treatment Value: 100uM ABA vs. No Treatment
  misc_feature: MA Experiment ID: 20000173 Result: Down-regulated in Transcription
  misc_feature: MA Experiment 20000173 PARAMETER Experiment Name: At_42deg_Heat_P Parameter: Age (day) Value: 14
  misc_feature: MA Experiment 20000173 PARAMETER Experiment Name: At_42deg_Heat_P Parameter: Organism Value: A. thaliana
  misc_feature: MA Experiment 20000173 PARAMETER Experiment Name: At_42deg_Heat_P Parameter: Plant Line Value: WS
  misc_feature: MA Experiment 20000173 PARAMETER Experiment Name: At_42deg_Heat_P Parameter: Temperature (deg C) Value: 42 vs. 22
  misc_feature: MA Experiment 20000173 PARAMETER Experiment Name: At_42deg_Heat_P Parameter: Timepoint (hr) Value: 6
  misc_feature: MA Experiment 20000173 PARAMETER Experiment Name: At_42deg_Heat_P Parameter: Tissue Value: Aerial
  misc_feature: MA Experiment ID: 20000439 Result: Up-regulated in Transcription
  misc_feature: MA Experiment 20000439 PARAMETER Experiment Name: At_Roots__P Parameter: Age (day) Value: 14 vs. 21
  misc_feature: MA Experiment 20000439 PARAMETER Experiment Name: At_Roots__P Parameter: Organism Value: A. thaliana
  misc_feature: MA Experiment 20000439 PARAMETER Experiment Name: At_Roots__P Parameter: Tissue Value: Roots vs. Whole Plant
gtccgcctccagctcccaaaagccaaagggcgaatcttcttcttctctttcgatcaaatcttttcagattcaacccaaaattgaagacaaaaatgtctcgcagatcgctaactctcctcaagaatctagctagaaacgcgaatggatcaggtattcaaacccgatccgtgacttacatgcccagacccggtgacggagcaccacgcgcagtgacgctgatccccggagatggaatcggtcctctggtgacgaacgccgtggaacaggtgatggaagcgatgcacgctccgatcttcttcgagaagtacgatgttcacggagaaatgagccgtgtgccgccggaagtgatggagtcgataaggaagaataaggtttgtttgaaaggtgggcttaagactcctgttggtggtggtgttagttctcttaacgtccagcttaggaaagagcttgacctctttgcttctctggtcaactgttttaatttgcctggtttacctactcgccatgagaatgttgacatcgttgtcatcagagagaacactgaaggtgagtacgcggggcttgagcacgaggttgttcctggtgtcgttgagagtctgaaggtgatcacgaagttctgttcggagcgtattgcaaagtatgcttttgagtatgcctacctgaacaacaggaagaaagttacagcggtgcataaggctaacatcatgaaacttgcggatggtttgttcttggaatcttgtcgcgaggttgcgaaaaagtatcccagcatcacctacaatgaaatcattgttgataactgctgtatgcaacttgtagccaaaccagagcaattcgatgtcatggtaacgccgaatctctatgggaatttagttgcaaacactgctgctggtattgctggaggcacaggagtcatgcctggaggaaatgttggggctgaccatgcggtattcgagcaaggtgcatcagcaggaaatgttgggaaagacaagatagtattggaaaacaaagcaaacccagtggcattgcttctctcatcagcgatgatgcttagacaccttcagtttccttcatttgctgaccggctcgaaacagcagtgaagaaagtcatcgctgaaggaaagtgccggacgaaagatcttggtggaacaagcacgactcaagaggtcgttgatgcggtcattgcaaaactagactgactttgacaaattacgtgttcccgctctgcataaatcatcaaattcctgatacagattttgtgttgccaaaatatggggtatgatccaagcacaacggttatctggttttgtacctcgagttttattatattctttagccgtggaatatttcgataagaaaaaaaaacatgttccaaataattcatgttgctacgtttgttggcgccttttgtcatgtcaaagtttcttaaacacttgttcgtggaatatgcaaacttttatggattcgtaatttcaagaatatg

SEQ ID NO: 28867 - protein, 397 aa, Arabidopsis thaliana
  peptide (1)..(397): Ceres Seq. ID no. 12385339
  misc_feature (69)..(392): Pfam Name: Isocitrate/isopropylmalate dehydrogenase Pfam Description: Isocitrate/isopropylmalate dehydrogenase
  misc_feature (31)..(397): Homolog of NCBI NO: 15237075 NR Description: NAD+ dependent isocitrate dehydrogenase -like
  misc_feature (31)..(397): Homolog of NCBI NO: 3790188 NR Description: NAD-dependent isocitrate dehydrogenase [Nicotiana
  misc_feature (31)..(397): Homolog of NCBI NO: 1766048 NR Description: NAD+ dependent isocitrate dehydrogenase subunit 2
  misc_feature (31)..(397): Homolog of NCBI NO: 15227370 NR Description: putative NAD+ dependent isocitrate dehydrogenase
  misc_feature (31)..(397): Homolog of NCBI NO: 28974504 NR Description: NAD-dependent isocitrate dehydrogenase gamma
  misc_feature (31)..(397): Homolog of NCBI NO: 28974498 NR Description: NAD-dependent isocitrate dehydrogenase beta
  misc_feature (31)..(397): Homolog of NCBI NO: 28974502 NR Description: NAD-dependent isocitrate dehydrogenase beta
  misc_feature (31)..(397): Homolog of NCBI NO: 1766046 NR Description: NAD+ dependent isocitrate dehydrogenase subunit 1
  misc_feature (31)..(397): Homolog of NCBI NO: 21537157 NR Description: NAD+ dependent isocitrate dehydrogenase subunit 1
  misc_feature (31)..(397): Homolog of NCBI NO: 15236932 NR Description: NAD+ dependent isocitrate dehydrogenase subunit 1
PPPAPKSQRANLLLLFRSNLFRFNPKLKTKMSRRSLTLLKNLARNANGSGIQTRSVTYMPRPGDGAPRAVTLIPGDGIGPLVTNAVEQVMEAMHAPIFFEKYDVHGEMSRVPPEVMESIRKNKVCLKGGLKTPVGGGVSSLNVQLRKELDLFASLVNCFNLPGLPTRHENVDIVVIRENTEGEYAGLEHEVVPGVVESLKVITKFCSERIAKYAFEYAYLNNRKKVTAVHKANIMKLADGLFLESCREVAKKYPSITYNEIIVDNCCMQLVAKPEQFDVMVTPNLYGNLVANTAAGIAGGTGVMPGGNVGADHAVFEQGASAGNVGKDKIVLENKANPVALLLSSAMMLRHLQFPSFADRLETAVKKVIAEGKCRTKDLGGTSTTQEVVDAVIAKLD

SEQ ID NO: 28868 - protein, 367 aa, Arabidopsis thaliana
  peptide (1)..(367): Ceres Seq. ID no. 12385340
  misc_feature (39)..(362): Pfam Name: Isocitrate/isopropylmalate dehydrogenase Pfam Description: Isocitrate/isopropylmalate dehydrogenase
  misc_feature (1)..(367): Homolog of NCBI NO: 15237075 NR Description: NAD+ dependent isocitrate dehydrogenase -like
  misc_feature (1)..(367): Homolog of NCBI NO: 3790188 NR Description: NAD-dependent isocitrate dehydrogenase [Nicotiana
  misc_feature (1)..(367): Homolog of NCBI NO: 1766048 NR Description: NAD+ dependent isocitrate dehydrogenase subunit 2
  misc_feature (1)..(367): Homolog of NCBI NO: 15227370 NR Description: putative NAD+ dependent isocitrate dehydrogenase
  misc_feature (1)..(367): Homolog of NCBI NO: 28974504 NR Description: NAD-dependent isocitrate dehydrogenase gamma
  misc_feature (1)..(367): Homolog of NCBI NO: 28974498 NR Description: NAD-dependent isocitrate dehydrogenase beta
  misc_feature (1)..(367): Homolog of NCBI NO: 28974502 NR Description: NAD-dependent isocitrate dehydrogenase beta
  misc_feature (1)..(367): Homolog of NCBI NO: 1766046 NR Description: NAD+ dependent isocitrate dehydrogenase subunit 1
  misc_feature (1)..(367): Homolog of NCBI NO: 21537157 NR Description: NAD+ dependent isocitrate dehydrogenase subunit 1
  misc_feature (1)..(367): Homolog of NCBI NO: 15236932 NR Description: NAD+ dependent isocitrate dehydrogenase subunit 1
MSRRSLTLLKNLARNANGSGIQTRSVTYMPRPGDGAPRAVTLIPGDGIGPLVTNAVEQVMEAMHAPIFFEKYDVHGEMSRVPPEVMESIRKNKVCLKGGLKTPVGGGVSSLNVQLRKELDLFASLVNCFNLPGLPTRHENVDIVVIRENTEGEYAGLEHEVVPGVVESLKVITKFCSERIAKYAFEYAYLNNRKKVTAVHKANIMKLADGLFLESCREVAKKYPSITYNEIIVDNCCMQLVAKPEQFDVMVTPNLYGNLVANTAAGIAGGTGVMPGGNVGADHAVFEQGASAGNVGKDKIVLENKANPVALLLSSAMMLRHLQFPSFADRLETAVKKVIAEGKCRTKDLGGTSTTQEVVDAVIAKLD

SEQ ID NO: 28869 - protein, 339 aa, Arabidopsis thaliana
  peptide (1)..(339): Ceres Seq. ID no. 12385341
  misc_feature (11)..(334): Pfam Name: Isocitrate/isopropylmalate dehydrogenase Pfam Description: Isocitrate/isopropylmalate dehydrogenase
  misc_feature (1)..(339): Homolog of NCBI NO: 15237075 NR Description: NAD+ dependent isocitrate dehydrogenase -like
  misc_feature (1)..(339): Homolog of NCBI NO: 3790188 NR Description: NAD-dependent isocitrate dehydrogenase [Nicotiana
  misc_feature (1)..(339): Homolog of NCBI NO: 1766048 NR Description: NAD+ dependent isocitrate dehydrogenase subunit 2
  misc_feature (1)..(339): Homolog of NCBI NO: 15227370 NR Description: putative NAD+ dependent isocitrate dehydrogenase
  misc_feature (1)..(339): Homolog of NCBI NO: 28974504 NR Description: NAD-dependent isocitrate dehydrogenase gamma
  misc_feature (1)..(339): Homolog of NCBI NO: 28974498 NR Description: NAD-dependent isocitrate dehydrogenase beta
  misc_feature (1)..(339): Homolog of NCBI NO: 28974502 NR Description: NAD-dependent isocitrate dehydrogenase beta
  misc_feature (1)..(339): Homolog of NCBI NO: 1766046 NR Description: NAD+ dependent isocitrate dehydrogenase subunit 1
  misc_feature (1)..(339): Homolog of NCBI NO: 21537157 NR Description: NAD+ dependent isocitrate dehydrogenase subunit 1
  misc_feature (1)..(339): Homolog of NCBI NO: 15236932 NR Description: NAD+ dependent isocitrate dehydrogenase subunit 1
MPRPGDGAPRAVTLIPGDGIGPLVTNAVEQVMEAMHAPIFFEKYDVHGEMSRVPPEVMESIRKNKVCLKGGLKTPVGGGVSSLNVQLRKELDLFASLVNCFNLPGLPTRHENVDIVVIRENTEGEYAGLEHEVVPGVVESLKVITKFCSERIAKYAFEYAYLNNRKKVTAVHKANIMKLADGLFLESCREVAKKYPSITYNEIIVDNCCMQLVAKPEQFDVMVTPNLYGNLVANTAAGIAGGTGVMPGGNVGADHAVFEQGASAGNVGKDKIVLENKANPVALLLSSAMMLRHLQFPSFADRLETAVKKVIAEGKCRTKDLGGTSTTQEVVDAVIAKLD

SEQ ID NO: 28870 - DNA, 1454 bp, Arabidopsis thaliana
  misc_feature (1)..(1454): Ceres Seq. ID no. 12393086
  misc_feature: MA Experiment ID: 108595 Result: Down-regulated in Transcription
  misc_feature: MA Experiment 108595 PARAMETER Experiment Name: At_Ler-pi_Ovule_cDNA_P Parameter: Plant Line Value: null
  misc_feature: MA Experiment ID: 20000180 Result: Down-regulated in Transcription
  misc_feature: MA Experiment 20000180 PARAMETER Experiment Name: At_Germinating_Seeds_P Parameter: Age (hr) Value: 24 vs. 0
  misc_feature: MA Experiment 20000180 PARAMETER Experiment Name: At_Germinating_Seeds_P Parameter: Tissue Value: Germinating Seeds
  misc_feature: MA Experiment ID: 20001557 Result: Up-regulated in Transcription
  misc_feature: MA Experiment 20001557 PARAMETER Experiment Name: At_Drought_Soil_Dry_P Parameter: Age (day) Value: 27
  misc_feature: MA Experiment 20001557 PARAMETER Experiment Name: At_Drought_Soil_Dry_P Parameter: Organism Value: A. thaliana
  misc_feature: MA Experiment 20001557 PARAMETER Experiment Name: At_Drought_Soil_Dry_P Parameter: Plant Line Value: WS
  misc_feature: MA Experiment 20001557 PARAMETER Experiment Name: At_Drought_Soil_Dry_P Parameter: Post Timepoint (hr) Value: 3
  misc_feature: MA Experiment 20001557 PARAMETER Experiment Name: At_Drought_Soil_Dry_P Parameter: Post-Treatment Value: Re-Water vs. No Drought
  misc_feature: MA Experiment 20001557 PARAMETER Experiment Name: At_Drought_Soil_Dry_P Parameter: Timepoint (day) Value: 13
  misc_feature: MA Experiment 20001557 PARAMETER Experiment Name: At_Drought_Soil_Dry_P Parameter: Treatment Value: Drought vs. No Drought
aaaaagtaaaaccctaaaatctcaacgaaagggacgaccaattgttcgacgattggtcatggggaaaaccggaatccaattgttcgacgattcgaggaatgggtttttctccgtttccgatttaggattcgattcgagcctaaacagctctaattaccacccaattggtgggttattcgccagcgttaatcagactaatccattcgcatccctctcgtcctcggatctttccaacagaggcaacaacagcttctctacccagctcaatgatctctacaccaagtatatgccgggaaaagaggaggaggaagaagtagttaatggcgagaagaggaagaggaagaagaaaggtgggctcacactgaagattaagatcgctaatccttcgttgcggcggctattaagcggagcagtagctggagcggtgtcgagaacggtggttgcgccgttggagacaatcaggacgcatctaatggtgggaagtggaggaaactccagcactgaagtgttcagtgatatcatgaagcatgaaggttggactggtctcttcaggggcaatttggtcaatgtcattcgtgttgcacctgctcgagccgtcgagctttttgtattcgagaccgtaaacaagaaattgtcgccgccacatggacaagaatcgaaaatcccaattccagcttctttactggctggtgcctgtgctggagttagccagacactcttgacataccctcttgaactagtcaagactcgccttacaattcagagaggtgtttacaaagggatttttgatgcgtttctcaaaatcatacgcgaggaaggacccacagaactctacaggggtcttgctcctagccttattggagttgttccatacgcagctacaaattactttgcatatgattctttgagaaaagcataccggagtttttcaaagcaggagaagattggaaacattgagactcttttgataggttctttagcaggtgcactatcgagcactgcaactttccctcttgaagtggcccggaagcatatgcaggtgggagctgttagcgggagggttgtgtacaagaacatgttgcacgctctggtgaccatacttgagcatgaaggtattctcggttggtacaaagggcttggaccgagttgcttgaagttggttcctgctgctggaatctccttcatgtgttatgaagcttgcaagaagatactcatcgagaacaaccaagaagcttgattttggaattgtatggattcgtggcaaattttaaggattgatcagagaaacacattgtggatactaattgggttcattttacaccacttgagatttcacaaattagtattgaggggggattaaaagattcactctacctttttgtttgaactttacgttttcaatttttgattgatctgattctgattcaaataagagtttacacaatatctcaaag

SEQ ID NO: 28871 - protein, 411 aa, Arabidopsis thaliana
  peptide (1)..(411): Ceres Seq. ID no. 12393087
  misc_feature (128)..(402): Homolog of NCBI NO: 30315255 NR Description: hydrogenosomal carrier protein [Trichomonas
  misc_feature (101)..(404): Homolog of NCBI NO: 34877651 NR Description: similar to CG4241-PA [Rattus norvegicus]
  misc_feature (128)..(402): Homolog of NCBI NO: 6746567 NR Description: hydrogenosomal membrane protein 31 precursor
  misc_feature (131)..(221): Homolog of NCBI NO: 21537282 NR Description: mitochondrial carrier protein, putative
  misc_feature (131)..(221): Homolog of NCBI NO: 15231083 NR Description: mitochondrial carrier protein family
  misc_feature (228)..(408): Homolog of NCBI NO: 21537282 NR Description: mitochondrial carrier protein, putative
  misc_feature (228)..(408): Homolog of NCBI NO: 15231083 NR Description: mitochondrial carrier protein family
  misc_feature (98)..(410): Homolog of NCBI NO: 231654 NR Description: Brittle-1 protein, chloroplast precursor
  misc_feature (58)..(410): Homolog of NCBI NO: 4138581 NR Description: mitochondrial energy transfer protein [Solanum
  misc_feature (20)..(411): Homolog of NCBI NO: 15236783 NR Description: mitochondrial carrier protein family
KSKTLKSQRKGRPIVRRLVMGKTGIQLFDDSRNGFFSVSDLGFDSSLNSSNYHPIGGLFASVNQTNPFASLSSSDLSNRGNNSFSTQLNDLYTKYMPGKEEEEEVVNGEKRKRKKKGGLTLKIKIANPSLRRLLSGAVAGAVSRTVVAPLETIRTHLMVGSGGNSSTEVFSDIMKHEGWTGLFRGNLVNVIRVAPARAVELFVFETVNKKLSPPHGQESKIPIPASLLAGACAGVSQTLLTYPLELVKTRLTIQRGVYKGIFDAFLKIIREEGPTELYRGLAPSLIGVVPYAATNYFAYDSLRKAYRSFSKQEKIGNIETLLIGSLAGALSSTATFPLEVARKHMQVGAVSGRVVYKNMLHALVTILEHEGILGWYKGLGPSCLKLVPAAGISFMCYEACKKILIENNQEA

SEQ ID NO: 28872 - protein, 392 aa, Arabidopsis thaliana
  peptide (1)..(392): Ceres Seq. ID no. 12393088
  misc_feature (109)..(383): Homolog of NCBI NO: 30315255 NR Description: hydrogenosomal carrier protein [Trichomonas
  misc_feature (82)..(385): Homolog of NCBI NO: 34877651 NR Description: similar to CG4241-PA [Rattus norvegicus]
  misc_feature (109)..(383): Homolog of NCBI NO: 6746567 NR Description: hydrogenosomal membrane protein 31 precursor
  misc_feature (112)..(202): Homolog of NCBI NO: 21537282 NR Description: mitochondrial carrier protein, putative
  misc_feature (112)..(202): Homolog of NCBI NO: 15231083 NR Description: mitochondrial carrier protein family
  misc_feature (209)..(389): Homolog of NCBI NO: 21537282 NR Description: mitochondrial carrier protein, putative
  misc_feature (209)..(389): Homolog of NCBI NO: 15231083 NR Description: mitochondrial carrier protein family
  misc_feature (79)..(391): Homolog of NCBI NO: 231654 NR Description: Brittle-1 protein, chloroplast precursor
  misc_feature (39)..(391): Homolog of NCBI NO: 4138581 NR Description: mitochondrial energy transfer protein [Solanum
  misc_feature (1)..(392): Homolog of NCBI NO: 15236783 NR Description: mitochondrial carrier protein family
MGKTGIQLFDDSRNGFFSVSDLGFDSSLNSSNYHPIGGLFASVNQTNPFASLSSSDLSNRGNNSFSTQLNDLYTKYMPGKEEEEEVVNGEKRKRKKKGGLTLKIKIANPSLRRLLSGAVAGAVSRTVVAPLETIRTHLMVGSGGNSSTEVFSDIMKHEGWTGLFRGNLVNVIRVAPARAVELFVFETVNKKLSPPHGQESKIPIPASLLAGACAGVSQTLLTYPLELVKTRLTIQRGVYKGIFDAFLKIIREEGPTELYRGLAPSLIGVVPYAATNYFAYDSLRKAYRSFSKQEKIGNIETLLIGSLAGALSSTATFPLEVARKHMQVGAVSGRVVYKNMLHALVTILEHEGILGWYKGLGPSCLKLVPAAGISFMCYEACKKILIENNQEA

SEQ ID NO: 28873 - protein, 316 aa, Arabidopsis thaliana
  peptide (1)..(316): Ceres Seq. ID no. 12393089
  misc_feature (33)..(307): Homolog of NCBI NO: 30315255 NR Description: hydrogenosomal carrier protein [Trichomonas
  misc_feature (6)..(309): Homolog of NCBI NO: 34877651 NR Description: similar to CG4241-PA [Rattus norvegicus]
  misc_feature (33)..(307): Homolog of NCBI NO: 6746567 NR Description: hydrogenosomal membrane protein 31 precursor
  misc_feature (36)..(126): Homolog of NCBI NO: 21537282 NR Description: mitochondrial carrier protein, putative
  misc_feature (36)..(126): Homolog of NCBI NO: 15231083 NR Description: mitochondrial carrier protein family
  misc_feature (133)..(313): Homolog of NCBI NO: 21537282 NR Description: mitochondrial carrier protein, putative
  misc_feature (133)..(313): Homolog of NCBI NO: 15231083 NR Description: mitochondrial carrier protein family
  misc_feature (3)..(315): Homolog of NCBI NO: 231654 NR Description: Brittle-1 protein, chloroplast precursor
  misc_feature (1)..(315): Homolog of NCBI NO: 4138581 NR Description: mitochondrial energy transfer protein [Solanum
  misc_feature (1)..(316): Homolog of NCBI NO: 15236783 NR Description: mitochondrial carrier protein family
MPGKEEEEEVVNGEKRKRKKKGGLTLKIKIANPSLRRLLSGAVAGAVSRTVVAPLETIRTHLMVGSGGNSSTEVFSDIMKHEGWTGLFRGNLVNVIRVAPARAVELFVFETVNKKLSPPHGQESKIPIPASLLAGACAGVSQTLLTYPLELVKTRLTIQRGVYKGIFDAFLKIIREEGPTELYRGLAPSLIGVVPYAATNYFAYDSLRKAYRSFSKQEKIGNIETLLIGSLAGALSSTATFPLEVARKHMQVGAVSGRVVYKNMLHALVTILEHEGILGWYKGLGPSCLKLVPAAGISFMCYEACKKILIENNQEA

SEQ ID NO: 28874 - DNA, 1411 bp, Arabidopsis thaliana
  misc_feature (1)..(1411): Ceres Seq. ID no. 12321215
  misc_feature: MA Experiment ID: 20000436 Result: Up-regulated in Transcription
  misc_feature: MA Experiment 20000436 PARAMETER Experiment Name: At_Drought_P Parameter: Age (day) Value: 7
  misc_feature: MA Experiment 20000436 PARAMETER Experiment Name: At_Drought_P Parameter: Organism Value: A. thaliana
  misc_feature: MA Experiment 20000436 PARAMETER Experiment Name: At_Drought_P Parameter: Plant Line Value: WS
  misc_feature: MA Experiment 20000436 PARAMETER Experiment Name: At_Drought_P Parameter: Timepoint (hr) Value: 12
  misc_feature: MA Experiment 20000436 PARAMETER Experiment Name: At_Drought_P Parameter: Tissue Value: Whole Plant
  misc_feature: MA Experiment 20000436 PARAMETER Experiment Name: At_Drought_P Parameter: Treatment Value: Drought vs. No Drought
  misc_feature: MA Experiment ID: 20000439 Result: Down-regulated in Transcription
  misc_feature: MA Experiment 20000439 PARAMETER Experiment Name: At_Roots__P Parameter: Age (day) Value: 14 vs. 21
  misc_feature: MA Experiment 20000439 PARAMETER Experiment Name: At_Roots__P Parameter: Organism Value: A. thaliana
  misc_feature: MA Experiment 20000439 PARAMETER Experiment Name: At_Roots__P Parameter: Tissue Value: Roots vs. Whole Plant
  misc_feature: MA Experiment ID: 20000495 Result: Up-regulated in Transcription
  misc_feature: MA Experiment 20000495 PARAMETER Experiment Name: At_Guard_Cells_P Parameter: Harvest Date Value: 8/2/2002
  misc_feature: MA Experiment 20000495 PARAMETER Experiment Name: At_Guard_Cells_P Parameter: Organism Value: A. thaliana
  misc_feature: MA Experiment 20000495 PARAMETER Experiment Name: At_Guard_Cells_P Parameter: Tissue Value: Guard Cells vs. Leaves
  misc_feature: MA Experiment ID: 20000574 Result: Down-regulated in Transcription
  misc_feature: MA Experiment 20000574 PARAMETER Experiment Name: At_100uM_ABA_Mutants__P Parameter: Organism Value: A. thaliana
  misc_feature: MA Experiment 20000574 PARAMETER Experiment Name: At_100uM_ABA_Mutants__P Parameter: Plant Line Value: CS23 vs. Ler wt
  misc_feature: MA Experiment 20000574 PARAMETER Experiment Name: At_100uM_ABA_Mutants__P Parameter: Timepoint (hr) Value: N/A
  misc_feature: MA Experiment 20000574 PARAMETER Experiment Name: At_100uM_ABA_Mutants__P Parameter: Tissue Value: Whole Plant
  misc_feature: MA Experiment 20000574 PARAMETER Experiment Name: At_100uM_ABA_Mutants__P Parameter: Treatment Value: None
  misc_feature: MA Experiment ID: 20001554 Result: Up-regulated in Transcription
  misc_feature: MA Experiment 20001554 PARAMETER Experiment Name: At_Drought_Soil_Dry_P Parameter: Age (day) Value: 21
  misc_feature: MA Experiment 20001554 PARAMETER Experiment Name: At_Drought_Soil_Dry_P Parameter: Organism Value: A. thaliana
  misc_feature: MA Experiment 20001554 PARAMETER Experiment Name: At_Drought_Soil_Dry_P Parameter: Plant Line Value: WS
  misc_feature: MA Experiment 20001554 PARAMETER Experiment Name: At_Drought_Soil_Dry_P Parameter: Post Timepoint (hr) Value: None
  misc_feature: MA Experiment 20001554 PARAMETER Experiment Name: At_Drought_Soil_Dry_P Parameter: Post-Treatment Value: None
  misc_feature: MA Experiment 20001554 PARAMETER Experiment Name: At_Drought_Soil_Dry_P Parameter: Timepoint (day) Value: 7
  misc_feature: MA Experiment 20001554 PARAMETER Experiment Name: At_Drought_Soil_Dry_P Parameter: Treatment Value: Drought vs. No Drought
  misc_feature: MA Experiment ID: 20001555 Result: Up-regulated in Transcription
  misc_feature: MA Experiment 20001555 PARAMETER Experiment Name: At_Drought_Soil_Dry_P Parameter: Age (day) Value: 24
  misc_feature: MA Experiment 20001555 PARAMETER Experiment Name: At_Drought_Soil_Dry_P Parameter: Organism Value: A. thaliana
  misc_feature: MA Experiment 20001555 PARAMETER Experiment Name: At_Drought_Soil_Dry_P Parameter: Plant Line Value: WS
  misc_feature: MA Experiment 20001555 PARAMETER Experiment Name: At_Drought_Soil_Dry_P Parameter: Post Timepoint (hr) Value: None
  misc_feature: MA Experiment 20001555 PARAMETER Experiment Name: At_Drought_Soil_Dry_P Parameter: Post-Treatment Value: None
  misc_feature: MA Experiment 20001555 PARAMETER Experiment Name: At_Drought_Soil_Dry_P Parameter: Timepoint (day) Value: 10
  misc_feature: MA Experiment 20001555 PARAMETER Experiment Name: At_Drought_Soil_Dry_P Parameter: Treatment Value: Drought vs. No Drought
  misc_feature: MA Experiment ID: 20001556 Result: Up-regulated in Transcription
  misc_feature: MA Experiment 20001556 PARAMETER Experiment Name: At_Drought_Soil_Dry_P Parameter: Age (day) Value: 26
  misc_feature: MA Experiment 20001556 PARAMETER Experiment Name: At_Drought_Soil_Dry_P Parameter: Organism Value: A. thaliana
  misc_feature: MA Experiment 20001556 PARAMETER Experiment Name: At_Drought_Soil_Dry_P Parameter: Plant Line Value: WS
  misc_feature: MA Experiment 20001556 PARAMETER Experiment Name: At_Drought_Soil_Dry_P Parameter: Post Timepoint (hr) Value: None
  misc_feature: MA Experiment 20001556 PARAMETER Experiment Name: At_Drought_Soil_Dry_P Parameter: Post-Treatment Value: None
  misc_feature: MA Experiment 20001556 PARAMETER Experiment Name: At_Drought_Soil_Dry_P Parameter: Timepoint (day) Value: 12
  misc_feature: MA Experiment 20001556 PARAMETER Experiment Name: At_Drought_Soil_Dry_P Parameter: Treatment Value: Drought vs. No Drought
atctgaccaccagaagaagagccacacactcacaaattaaaaagagagagagagagagagagacagagagagagagagattctgcggaggagcttcttcttcgtagggtgttcatcgttattaacgttatcgcccctacgtcagctccatctccagaaacatgggtgcaggtggaagaatgccggttcctacttcttccaagaaatcggaaaccgacaccacaaagcgtgtgccgtgcgagaaaccgcctttctcggtgggagatctgaagaaagcaatcccgccgcattgtttcaaacgctcaatccctcgctctttctcctaccttatcagtgacatcattatagcctcatgcttctactacgtcgccaccaattacttctctctcctccctcagcctctctcttacttggcttggccactctattgggcctgtcaaggctgtgtcctaactggtatctgggtcatagcccacgaatgcggtcaccacgcattcagcgactaccaatggctggatgacacagttggtcttatcttccattccttcctcctcgtcccttacttctcctggaagtatagtcatcgccgtcaccattccaacactggatccctcgaaagagatgaagtatttgtcccaaagcagaaatcagcaatcaagtggtacgggaaatacctcaacaaccctcttggacgcatcatgatgttaaccgtccagtttgtcctcgggtggcccttgtacttagcctttaacgtctctggcagaccgtatgacgggttcgcttgccatttcttccccaacgctcccatctacaatgaccgagaacgcctccagatatacctctctgatgcgggtattctagccgtctgttttggtctttaccgttacgctgctgcacaagggatggcctcgatgatctgcctctacggagtaccgcttctgatagtgaatgcgttcctcgtcttgatcacttacttgcagcacactcatccctcgttgcctcactacgattcatcagagtgggactggctcaggggagctttggctaccgtagacagagactacggaatcttgaacaaggtgttccacaacattacagacacacacgtggctcatcacctgttctcgacaatgccgcattataacgcaatggaagctacaaatgcgataaagccaattctgggagactattaccagttcgatggaacaccgtggtatgtggcgatgtatagggaggcaaaggagtgtatctatgtagaaccggacagggaaggtgacaagaaaggtgtgtactggtacaacaataagttatgaggatgatggtgaagaaattgtcgacttttctcttgtctgtttgtcttttgttaaagaagctatgcttcgttttaataatcttattgtccattttgttgc

SEQ ID NO: 28875 - protein, 383 aa, Arabidopsis thaliana
  peptide (1)..(383): Ceres Seq. ID no. 12321216
  misc_feature (89)..(340): Pfam Name: Fatty acid desaturase Pfam Description: Fatty acid desaturase
  misc_feature (1)..(383): Homolog of NCBI NO: 3417601 NR Description: delta-12 fatty acid desaturase [Borago
  misc_feature (1)..(383): Homolog of NCBI NO: 17225582 NR Description: delta-12 fatty acid desaturase [Gossypium
  misc_feature (1)..(382): Homolog of NCBI NO: 27261181 NR Description: delta 12 oleic acid desaturase FAD2 [Vernicia
  misc_feature (1)..(383): Homolog of NCBI NO: 3452129 NR Description: bifunctional oleate 12-hydroxylase:desaturase
  misc_feature (1)..(383): Homolog of NCBI NO: 8705229 NR Description: delta-12 oleate desaturase [Brassica napus]
  misc_feature (1)..(383): Homolog of NCBI NO: 20520624 NR Description: fatty acid desaturase 2 [Brassica rapa]
  misc_feature (1)..(383): Homolog of NCBI NO: 3334184 NR Description: Omega-6 fatty acid desaturase, endoplasmic
  misc_feature (1)..(383): Homolog of NCBI NO: 4378875 NR Description: delta-12 desaturase [Brassica carinata]
  misc_feature (1)..(383): Homolog of NCBI NO: 21536781 NR Description: omega-6 fatty acid desaturase, endoplasmic
  misc_feature (1)..(383): Homolog of NCBI NO: 15229956 NR Description: omega-6 fatty acid desaturase, endoplasmic
MGAGGRMPVPTSSKKSETDTTKRVPCEKPPFSVGDLKKAIPPHCFKRSIPRSFSYLISDIIIASCFYYVATNYFSLLPQPLSYLAWPLYWACQGCVLTGIWVIAHECGHHAFSDYQWLDDTVGLIFHSFLLVPYFSWKYSHRRHHSNTGSLERDEVFVPKQKSAIKWYGKYLNNPLGRIMMLTVQFVLGWPLYLAFNVSGRPYDGFACHFFPNAPIYNDRERLQIYLSDAGILAVCFGLYRYAAAQGMASMICLYGVPLLIVNAFLVLITYLQHTHPSLPHYDSSEWDWLRGALATVDRDYGILNKVFHNITDTHVAHHLFSTMPHYNAMEATNAIKPILGDYYQFDGTPWYVAMYREAKECIYVEPDREGDKKGVYWYNNKL

SEQ ID NO: 28876 - protein, 377 aa, Arabidopsis thaliana
  peptide (1)..(377): Ceres Seq. ID no. 12321217
  misc_feature (83)..(334): Pfam Name: Fatty acid desaturase Pfam Description: Fatty acid desaturase
  misc_feature (1)..(377): Homolog of NCBI NO: 3417601 NR Description: delta-12 fatty acid desaturase [Borago
  misc_feature (1)..(377): Homolog of NCBI NO: 17225582 NR Description: delta-12 fatty acid desaturase [Gossypium
  misc_feature (1)..(376): Homolog of NCBI NO: 27261181 NR Description: delta 12 oleic acid desaturase FAD2 [Vernicia
  misc_feature (1)..(377): Homolog of NCBI NO: 3452129 NR Description: bifunctional oleate 12-hydroxylase:desaturase
  misc_feature (1)..(377): Homolog of NCBI NO: 8705229 NR Description: delta-12 oleate desaturase [Brassica napus]
  misc_feature (1)..(377): Homolog of NCBI NO: 20520624 NR Description: fatty acid desaturase 2 [Brassica rapa]
  misc_feature (1)..(377): Homolog of NCBI NO: 3334184 NR Description: Omega-6 fatty acid desaturase, endoplasmic
  misc_feature (1)..(377): Homolog of NCBI NO: 4378875 NR Description: delta-12 desaturase [Brassica carinata]
  misc_feature (1)..(377): Homolog of NCBI NO: 21536781 NR Description: omega-6 fatty acid desaturase, endoplasmic
  misc_feature (1)..(377): Homolog of NCBI NO: 15229956 NR Description: omega-6 fatty acid desaturase, endoplasmic
MPVPTSSKKSETDTTKRVPCEKPPFSVGDLKKAIPPHCFKRSIPRSFSYLISDIIIASCFYYVATNYFSLLPQPLSYLAWPLYWACQGCVLTGIWVIAHECGHHAFSDYQWLDDTVGLIFHSFLLVPYFSWKYSHRRHHSNTGSLERDEVFVPKQKSAIKWYGKYLNNPLGRIMMLTVQFVLGWPLYLAFNVSGRPYDGFACHFFPNAPIYNDRERLQIYLSDAGILAVCFGLYRYAAAQGMASMICLYGVPLLIVNAFLVLITYLQHTHPSLPHYDSSEWDWLRGALATVDRDYGILNKVFHNITDTHVAHHLFSTMPHYNAMEATNAIKPILGDYYQFDGTPWYVAMYREAKECIYVEPDREGDKKGVYWYNNKL

SEQ ID NO: 28877 - protein, 204 aa, Arabidopsis thaliana
  peptide (1)..(204): Ceres Seq. ID no. 12321218
  misc_feature (1)..(161): Pfam Name: Fatty acid desaturase Pfam Description: Fatty acid desaturase
  misc_feature (1)..(204): Homolog of NCBI NO: 3417601 NR Description: delta-12 fatty acid desaturase [Borago
  misc_feature (1)..(204): Homolog of NCBI NO: 17225582 NR Description: delta-12 fatty acid desaturase [Gossypium
  misc_feature (1)..(203): Homolog of NCBI NO: 27261181 NR Description: delta 12 oleic acid desaturase FAD2 [Vernicia
  misc_feature (1)..(204): Homolog of NCBI NO: 3452129 NR Description: bifunctional oleate 12-hydroxylase:desaturase
  misc_feature (1)..(204): Homolog of NCBI NO: 8705229 NR Description: delta-12 oleate desaturase [Brassica napus]
  misc_feature (1)..(204): Homolog of NCBI NO: 20520624 NR Description: fatty acid desaturase 2 [Brassica rapa]
  misc_feature (1)..(204): Homolog of NCBI NO: 3334184 NR Description: Omega-6 fatty acid desaturase, endoplasmic
  misc_feature (1)..(204): Homolog of NCBI NO: 4378875 NR Description: delta-12 desaturase [Brassica carinata]
  misc_feature (1)..(204): Homolog of NCBI NO: 21536781 NR Description: omega-6 fatty acid desaturase, endoplasmic
  misc_feature (1)..(204): Homolog of NCBI NO: 15229956 NR Description: omega-6 fatty acid desaturase, endoplasmic
MMLTVQFVLGWPLYLAFNVSGRPYDGFACHFFPNAPIYNDRERLQIYLSDAGILAVCFGLYRYAAAQGMASMICLYGVPLLIVNAFLVLITYLQHTHPSLPHYDSSEWDWLRGALATVDRDYGILNKVFHNITDTHVAHHLFSTMPHYNAMEATNAIKPILGDYYQFDGTPWYVAMYREAKECIYVEPDREGDKKGVYWYNNKL

SEQ ID NO: 28878 - DNA, 2073 bp, Arabidopsis thaliana
  misc_feature (1)..(2073): Ceres Seq. ID no. 13487538
  misc_feature: MA Experiment ID: 108573 Result: Up-regulated in Transcription
  misc_feature: MA Experiment 108573 PARAMETER Experiment Name: At_Drought_cDNA_P Parameter: Timepoint (hr) Value: 6
  misc_feature: MA Experiment 108573 PARAMETER Experiment Name: At_Drought_cDNA_P Parameter: Tissue Value: Aerial
  misc_feature: MA Experiment 108573 PARAMETER Experiment Name: At_Drought_cDNA_P Parameter: Treatment Value: Drought vs. No Drought
  misc_feature: MA Experiment ID: 108668 Result: Up-regulated in Transcription
  misc_feature: MA Experiment 108668 PARAMETER Experiment Name: At_2mM_SA_cDNA_P Parameter: Plant Line Value: WS
  misc_feature: MA Experiment 108668 PARAMETER Experiment Name: At_2mM_SA_cDNA_P Parameter: Timepoint (hr) Value: 6
  misc_feature: MA Experiment 108668 PARAMETER Experiment Name: At_2mM_SA_cDNA_P Parameter: Treatment Value: 2mM SA vs. No Treatment
  misc_feature: MA Experiment ID: 20000182 Result: Up-regulated in Transcription
  misc_feature: MA Experiment 20000182 PARAMETER Experiment Name: At_2mM_SA_P Parameter: Age (day) Value: 14
  misc_feature: MA Experiment 20000182 PARAMETER Experiment Name: At_2mM_SA_P Parameter: Organism Value: A. thaliana
  misc_feature: MA Experiment 20000182 PARAMETER Experiment Name: At_2mM_SA_P Parameter: Plant Line Value: WS
  misc_feature: MA Experiment 20000182 PARAMETER Experiment Name: At_2mM_SA_P Parameter: Timepoint (hr) Value: 6
  misc_feature: MA Experiment 20000182 PARAMETER Experiment Name: At_2mM_SA_P Parameter: Tissue Value: Aerial
  misc_feature: MA Experiment 20000182 PARAMETER Experiment Name: At_2mM_SA_P Parameter: Treatment Value: 2mM SA vs. No Treatment
atgaacgtcagatatgattccgatataacccaaaaagtctacgctacaacagagcagcggtctagtctaacgcaaaatccgtttcgtcgtcttcctcgctttacttttcaatctcctccttctccattaatcatctctttctctctctcacggattcgtaagttaatctcagtgcttctccgtcatcttcgcattattggttcttcctttttccctgtaagctcgacacgtggattattcctctgctttttttgttttcccttttcgtgaagattcgtttcctgtatctccgtgaagacttgatggagttagtttcttaaagtagctccttcttagatccgagtttcgatttgcttcactggtgaagaattagtgattgattcaactagatactatcgatttcgttggatttgtactgaaaacttggctgattttgttgattctgtcttgctggtgaagtctcaagctacttcgtgattagaggaggagatctggatttctagttttagcaattcatttgacttccgagttttccagaatcattgaagtgttaggcttacttgattcagattcagaacatagctttagataacgttagaagcagaatcagaatctgcaaatcggctctttagattgctgctactagaaatttgaaattagcttttggtagtgttaaggatgcagaataggattgtacagttggaagaaggaaaagaaaatggaatcacagttcgatcagggcattataaaggatttccatcgaaactgctacttctgctagggttgtttcttacattttctgttactgtcttcatcattagtgtatctactatcaagtatactggaatacaaagtgtagtaaccacagtcacttcaagctttgtgccatgccgtgagggggaaccgaatagtttgagtaaatggatacaacctcctgcggttttgatgcataacatgagcgatgaagagcttctttggcgtgcttctttttggcctcgtagaaaagaatatccgtttaaacgggttccaaaggttgcgtttatgttcttgactaaaggccccttaccgcttgcttcgctttgggagaggttcttgaagggtcacaaagggctttactcggtttaccttcatccacacccttcttttacagccaagtttccagctagctctgttttccaccggaggcaaattccaagccaggttgcagaatgggggagaatgtccatgtgcgatgcagagaagcggcttcttgccaacgccctgcttgatgtgtccaacgaatggtttgttctcgtctcagagtcatgcattccactctacaacttcacaaccatttacagctacttaagccgatcaaaacacagcttcatgggtgcttttgatgaccctggaccgtttgggcgtggccgctacaacgggaacatggaacctgaagttccccttaccaaatggcgaaaagggtctcaatggtttgaggttaaccgggacctggcagctaccattgtcaaagacacattgtattacccgaaattcaaagagttctgcaggcctgcttgctatgtggacgagcattacttcccaacaatgttgacgattgagaaaccaacagtcttggctaaccggagcttgacatgggtggactggtcgaggggcggtccccacccagctacgtttgggcgatcggacattacagaaaacttctttggaaaaatctttgatggaagaaactgcagttacaatggtcgcaacacttccatgtgttatctctttgcgaggaagtttgctccgagtgctttggagcctttgcttcacattgctcccaagattcttggattttgagtagtttagttatgtctctgaagtctgaacctcttgacatcaaatattttattttgtttgttgtgatactagtttggaagaaatgagattttagtagagagaactaggttgcacgacaggatagtcatatgtaaactttatatttcaaagaattactatgcatagatcaaatagtcttctactctttgggactatcttttcagatgcattattgaatcacaaatttgttttctc

SEQ ID NO: 28879 - protein, 386 aa, Arabidopsis thaliana
  peptide (1)..(386): Ceres Seq. ID no. 13487539
  misc_feature (154)..(265): Pfam Name: Arabidopsis protein of unknown function, DUF266 Pfam Description: Arabidopsis protein of unknown function, DUF266
  misc_feature (88)..(386): Homolog of NCBI NO: 15237293 NR Description: hypothetical protein [Arabidopsis thaliana]
  misc_feature (71)..(386): Homolog of NCBI NO: 38344090 NR Description: OSJNBb0056F09.13 [Oryza sativa (japonica
  misc_feature (78)..(386): Homolog of NCBI NO: 15218485 NR Description: expressed protein [Arabidopsis thaliana]
  misc_feature (70)..(386): Homolog of NCBI NO: 15221386 NR Description: hypothetical protein [Arabidopsis thaliana]
  misc_feature (8)..(345): Homolog of NCBI NO: 9280235 NR Description: gb|AAD40142.1~gene_id:MXL8.19~strong similarity
  misc_feature (27)..(384): Homolog of NCBI NO: 15218028 NR Description: hypothetical protein [Arabidopsis thaliana]
  misc_feature (8)..(386): Homolog of NCBI NO: 21554566 NR Description: unknown [Arabidopsis thaliana]
  misc_feature (8)..(386): Homolog of NCBI NO: 18402952 NR Description: expressed protein [Arabidopsis thaliana]
  misc_feature (3)..(384): Homolog of NCBI NO: 15239557 NR Description: hypothetical protein [Arabidopsis thaliana]
  misc_feature (1)..(386): Homolog of NCBI NO: 15239155 NR Description: expressed protein [Arabidopsis thaliana]
MQNRIVQLEEGKENGITVRSGHYKGFPSKLLLLLGLFLTFSVTVFIISVSTIKYTGIQSVVTTVTSSFVPCREGEPNSLSKWIQPPAVLMHNMSDEELLWRASFWPRRKEYPFKRVPKVAFMFLTKGPLPLASLWERFLKGHKGLYSVYLHPHPSFTAKFPASSVFHRRQIPSQVAEWGRMSMCDAEKRLLANALLDVSNEWFVLVSESCIPLYNFTTIYSYLSRSKHSFMGAFDDPGPFGRGRYNGNMEPEVPLTKWRKGSQWFEVNRDLAATIVKDTLYYPKFKEFCRPACYVDEHYFPTMLTIEKPTVLANRSLTWVDWSRGGPHPATFGRSDITENFFGKIFDGRNCSYNGRNTSMCYLFARKFAPSALEPLLHIAPKILGF

SEQ ID NO: 28880 - protein, 297 aa, Arabidopsis thaliana
  peptide (1)..(297): Ceres Seq. ID no. 13487540
  misc_feature (65)..(176): Pfam Name: Arabidopsis protein of unknown function, DUF266 Pfam Description: Arabidopsis protein of unknown function, DUF266
  misc_feature (1)..(297): Homolog of NCBI NO: 15237293 NR Description: hypothetical protein [Arabidopsis thaliana]
  misc_feature (1)..(297): Homolog of NCBI NO: 38344090 NR Description: OSJNBb0056F09.13 [Oryza sativa (japonica
  misc_feature (1)..(297): Homolog of NCBI NO: 15218485 NR Description: expressed protein [Arabidopsis thaliana]
  misc_feature (1)..(297): Homolog of NCBI NO: 15221386 NR Description: hypothetical protein [Arabidopsis thaliana]
  misc_feature (1)..(256): Homolog of NCBI NO: 9280235 NR Description: gb|AAD40142.1~gene_id:MXL8.19~strong similarity
  misc_feature (1)..(295): Homolog of NCBI NO: 15218028 NR Description: hypothetical protein [Arabidopsis thaliana]
  misc_feature (1)..(297): Homolog of NCBI NO: 21554566 NR Description: unknown [Arabidopsis thaliana]
  misc_feature (1)..(297): Homolog of NCBI NO: 18402952 NR Description: expressed protein [Arabidopsis thaliana]
  misc_feature (1)..(295): Homolog of NCBI NO: 15239557 NR Description: hypothetical protein [Arabidopsis thaliana]
  misc_feature (1)..(297): Homolog of NCBI NO: 15239155 NR Description: expressed protein [Arabidopsis thaliana]
MHNMSDEELLWRASFWPRRKEYPFKRVPKVAFMFLTKGPLPLASLWERFLKGHKGLYSVYLHPHPSFTAKFPASSVFHRRQIPSQVAEWGRMSMCDAEKRLLANALLDVSNEWFVLVSESCIPLYNFTTIYSYLSRSKHSFMGAFDDPGPFGRGRYNGNMEPEVPLTKWRKGSQWFEVNRDLAATIVKDTLYYPKFKEFCRPACYVDEHYFPTMLTIEKPTVLANRSLTWVDWSRGGPHPATFGRSDITENFFGKIFDGRNCSYNGRNTSMCYLFARKFAPSALEPLLHIAPKILGF

SEQ ID NO: 28881 - protein, 294 aa, Arabidopsis thaliana
  peptide (1)..(294): Ceres Seq. ID no. 13487541
  misc_feature (62)..(173): Pfam Name: Arabidopsis protein of unknown function, DUF266 Pfam Description: Arabidopsis protein of unknown function, DUF266
  misc_feature (1)..(294): Homolog of NCBI NO: 15237293 NR Description: hypothetical protein [Arabidopsis thaliana]
  misc_feature (1)..(294): Homolog of NCBI NO: 38344090 NR Description: OSJNBb0056F09.13 [Oryza sativa (japonica
  misc_feature (1)..(294): Homolog of NCBI NO: 15218485 NR Description: expressed protein [Arabidopsis thaliana]
  misc_feature (1)..(294): Homolog of NCBI NO: 15221386 NR Description: hypothetical protein [Arabidopsis thaliana]
  misc_feature (1)..(253): Homolog of NCBI NO: 9280235 NR Description: gb|AAD40142.1~gene_id:MXL8.19~strong similarity
  misc_feature (1)..(292): Homolog of NCBI NO: 15218028 NR Description: hypothetical protein [Arabidopsis thaliana]
  misc_feature (1)..(294): Homolog of NCBI NO: 21554566 NR Description: unknown [Arabidopsis thaliana]
  misc_feature (1)..(294): Homolog of NCBI NO: 18402952 NR Description: expressed protein [Arabidopsis thaliana]
  misc_feature (1)..(292): Homolog of NCBI NO: 15239557 NR Description: hypothetical protein [Arabidopsis thaliana]
  misc_feature (1)..(294): Homolog of NCBI NO: 15239155 NR Description: expressed protein [Arabidopsis thaliana]
MSDEELLWRASFWPRRKEYPFKRVPKVAFMFLTKGPLPLASLWERFLKGHKGLYSVYLHPHPSFTAKFPASSVFHRRQIPSQVAEWGRMSMCDAEKRLLANALLDVSNEWFVLVSESCIPLYNFTTIYSYLSRSKHSFMGAFDDPGPFGRGRYNGNMEPEVPLTKWRKGSQWFEVNRDLAATIVKDTLYYPKFKEFCRPACYVDEHYFPTMLTIEKPTVLANRSLTWVDWSRGGPHPATFGRSDITENFFGKIFDGRNCSYNGRNTSMCYLFARKFAPSALEPLLHIAPKILGF

SEQ ID NO: 28882 - DNA, 1140 bp, Arabidopsis thaliana
  misc_feature (1)..(1140): Ceres Seq. ID no. 12321188
  misc_feature: MA Experiment ID: 108434 Result: Down-regulated in Transcription
  misc_feature: MA Experiment 108434 PARAMETER Experiment Name: At_Root_Tips_cDNA_P Parameter: Tissue Value: Root Tips
  misc_feature: MA Experiment ID: 108435 Result: Down-regulated in Transcription
  misc_feature: MA Experiment 108435 PARAMETER Experiment Name: At_stm_Mutants_cDNA_P Parameter: Plant Line Value: wt Landsburg vs stm
  misc_feature: MA Experiment 108435 PARAMETER Experiment Name: At_stm_Mutants_cDNA_P Parameter: Tissue Value: Shoot Apical Meristem Region
  misc_feature: MA Experiment ID: 108488 Result: Down-regulated in Transcription
  misc_feature: MA Experiment ID: 108577 Result: Down-regulated in Transcription
  misc_feature: MA Experiment 108577 PARAMETER Experiment Name: At_42deg_Heat_cDNA_P Parameter: Temperature (deg C) Value: 42 vs. 22
  misc_feature: MA Experiment 108577 PARAMETER Experiment Name: At_42deg_Heat_cDNA_P Parameter: Timepoint (hr) Value: 6
  misc_feature: MA Experiment 108577 PARAMETER Experiment Name: At_42deg_Heat_cDNA_P Parameter: Tissue Value: Aerial
  misc_feature: MA Experiment ID: 108579 Result: Down-regulated in Transcription
  misc_feature: MA Experiment 108579 PARAMETER Experiment Name: At_4deg_Cold_cDNA_P Parameter: Temperature (deg C) Value: 4 vs. 22
  misc_feature: MA Experiment 108579 PARAMETER Experiment Name: At_4deg_Cold_cDNA_P Parameter: Timepoint (hr) Value: 6
  misc_feature: MA Experiment 108579 PARAMETER Experiment Name: At_4deg_Cold_cDNA_P Parameter: Tissue Value: Aerial
  misc_feature: MA Experiment ID: 108595 Result: Down-regulated in Transcription
  misc_feature: MA Experiment 108595 PARAMETER Experiment Name: At_Ler-pi_Ovule_cDNA_P Parameter: Plant Line Value: null
  misc_feature: MA Experiment ID: 20000072 Result: Up-regulated in Transcription
  misc_feature: MA Experiment 20000072 PARAMETER Experiment Name: At_100uM_ABA_Mutants_cDNA_P Parameter: Plant Line Value: CS8105
  misc_feature: MA Experiment 20000072 PARAMETER Experiment Name: At_100uM_ABA_Mutants_cDNA_P Parameter: Timepoint (hr) Value: 6
  misc_feature: MA Experiment 20000072 PARAMETER Experiment Name: At_100uM_ABA_Mutants_cDNA_P Parameter: Tissue Value: Aerial
  misc_feature: MA Experiment 20000072 PARAMETER Experiment Name: At_100uM_ABA_Mutants_cDNA_P Parameter: Treatment Value: 100uM ABA vs. No Treatment
  misc_feature: MA Experiment ID: 20000111 Result: Down-regulated in Transcription
  misc_feature: MA Experiment 20000111 PARAMETER Experiment Name: At_42deg_Heat_cDNA_P Parameter: Temperature (deg C) Value: 42 vs. 22
  misc_feature: MA Experiment 20000111 PARAMETER Experiment Name: At_42deg_Heat_cDNA_P Parameter: Timepoint (hr) Value: 6
  misc_feature: MA Experiment 20000111 PARAMETER Experiment Name: At_42deg_Heat_cDNA_P Parameter: Tissue Value: Aerial
  misc_feature: MA Experiment ID: 20000113 Result: Down-regulated in Transcription
  misc_feature: MA Experiment 20000113 PARAMETER Experiment Name: At_42deg_Heat_cDNA_P Parameter: Temperature (deg C) Value: 42 vs. 22
  misc_feature: MA Experiment 20000113 PARAMETER Experiment Name: At_42deg_Heat_cDNA_P Parameter: Timepoint (hr) Value: 8
  misc_feature: MA Experiment 20000113 PARAMETER Experiment Name: At_42deg_Heat_cDNA_P Parameter: Tissue Value: Aerial
  misc_feature: MA Experiment ID: 20000173 Result: Down-regulated in Transcription
  misc_feature: MA Experiment 20000173 PARAMETER Experiment Name: At_42deg_Heat_P Parameter: Age (day) Value: 14
  misc_feature: MA Experiment 20000173 PARAMETER Experiment Name: At_42deg_Heat_P Parameter: Organism Value: A. thaliana
  misc_feature: MA Experiment 20000173 PARAMETER Experiment Name: At_42deg_Heat_P Parameter: Plant Line Value: WS
  misc_feature: MA Experiment 20000173 PARAMETER Experiment Name: At_42deg_Heat_P Parameter: Temperature (deg C) Value: 42 vs. 22
  misc_feature: MA Experiment 20000173 PARAMETER Experiment Name: At_42deg_Heat_P Parameter: Timepoint (hr) Value: 6
  misc_feature: MA Experiment 20000173 PARAMETER Experiment Name: At_42deg_Heat_P Parameter: Tissue Value: Aerial
  misc_feature: MA Experiment ID: 20000179 Result: Up-regulated in Transcription
  misc_feature: MA Experiment 20000179 PARAMETER Experiment Name: At_Germinating_Seeds_P Parameter: Age (hr) Value: 6 vs. 0
  misc_feature: MA Experiment 20000179 PARAMETER Experiment Name: At_Germinating_Seeds_P Parameter: Tissue Value: Germinating Seeds
  misc_feature: MA Experiment ID: 20000184 Result: Down-regulated in Transcription
  misc_feature: MA Experiment 20000184 PARAMETER Experiment Name: At_Shoots__P Parameter: Age (day) Value: 7
  misc_feature: MA Experiment 20000184 PARAMETER Experiment Name: At_Shoots__P Parameter: Tissue Value: Shoots vs. Whole Plant
  misc_feature: MA Experiment ID: 20000185 Result: Down-regulated in Transcription
  misc_feature: MA Experiment 20000185 PARAMETER Experiment Name: At_Roots__P Parameter: Age (day) Value: 7 vs. 21
  misc_feature: MA Experiment 20000185 PARAMETER Experiment Name: At_Roots__P Parameter: Organism Value: A. thaliana
  misc_feature: MA Experiment 20000185 PARAMETER Experiment Name: At_Roots__P Parameter: Tissue Value: Roots vs. Whole Plant
  misc_feature: MA Experiment ID: 20000227 Result: Down-regulated in Transcription
  misc_feature: MA Experiment 20000227 PARAMETER Experiment Name: At_Root-Tips-vs-Tops_P Parameter: Tissue Value: Root Tips vs. Root Tops
  misc_feature: MA Experiment ID: 20000234 Result: Down-regulated in Transcription
  misc_feature: MA Experiment 20000234 PARAMETER Experiment Name: At_Siliques_P Parameter: Age (day) Value: 21
  misc_feature: MA Experiment 20000234 PARAMETER Experiment Name: At_Siliques_P Parameter: Organism Value: A. thaliana
  misc_feature: MA Experiment 20000234 PARAMETER Experiment Name: At_Siliques_P Parameter: Plant Line Value: WS
  misc_feature: MA Experiment 20000234 PARAMETER Experiment Name: At_Siliques_P Parameter: Tissue Value: Less Than 5mm Siliques vs. Whole Plant
  misc_feature: MA Experiment ID: 20000264 Result: Down-regulated in Transcription
  misc_feature: MA Experiment 20000264 PARAMETER Experiment Name: At_Open_Flower_P Parameter: Age (day) Value: 21
  misc_feature: MA Experiment 20000264 PARAMETER Experiment Name: At_Open_Flower_P Parameter: Plant Line Value: WS
  misc_feature: MA Experiment 20000264 PARAMETER Experiment Name: At_Open_Flower_P Parameter: Tissue Value: Open Flower vs. Whole Plant
  misc_feature: MA Experiment ID: 20000439 Result: Down-regulated in Transcription
  misc_feature: MA Experiment 20000439 PARAMETER Experiment Name: At_Roots__P Parameter: Age (day) Value: 14 vs. 21
  misc_feature: MA Experiment 20000439 PARAMETER Experiment Name: At_Roots__P Parameter: Organism Value: A. thaliana
  misc_feature: MA Experiment 20000439 PARAMETER Experiment Name: At_Roots__P Parameter: Tissue Value: Roots vs. Whole Plant
  misc_feature: MA Experiment ID: 20000495 Result: Down-regulated in Transcription
  misc_feature: MA Experiment 20000495 PARAMETER Experiment Name: At_Guard_Cells_P Parameter: Harvest Date Value: 8/2/2002
  misc_feature: MA Experiment 20000495 PARAMETER Experiment Name: At_Guard_Cells_P Parameter: Organism Value: A. thaliana
  misc_feature: MA Experiment 20000495 PARAMETER Experiment Name: At_Guard_Cells_P Parameter: Tissue Value: Guard Cells vs. Leaves
atgatttgtttacattttttcgtggtgttcttgatttttttctttgatcaaaactagtagaaattttccaatttcgtcctgccttgtgattagtagtagatattttggaatttgattagtaggtagaagaagatggggacgacgttagatgtatcaagagcagagctagcacttgtggtaatgtatttgaacaaagcagaggcaagagataagttatgcagagctatacagtatggttccaagttcttgagtggtggacaacctggtactgctcaaaatgttgacaaatctactagcttagcaagaaaagtcttccgtcttttcaagtttgtgaatgacttgcatggtcttatcagtcctgtgcctaaaggaactcctcttcctcttgttttacttggaaagtcgaagaacgcacttttatctacattcttgttcctggatcaaattgtctggcttgggagatcaggaatatataagaacaaagaacgagctgagttacttggacgtatatctctcttctgctggatgggatcttctgtctgcacaactttagtcgaggttggtgagatgggaaggctttcttcatcaatgaagaagatcgaaaagggactcaagaatggaaacaagtatcaggatgaggattatcgtgctaagctaaaaaaatcaaacgagaggtcacttgctttgatcaaatcagctatggacattgttgtagcagctggtcttcttcagttagctccaacgaagatcactcctcgtgtcaccggagcttttggattcatcacctccatcatttcttgttaccagttgcttccgacacgccccaagatcaaaacaccctgaagtcaatcgaggaagctggtgttaaggagaaagtcatttcagaaagtttctgttcttcttattattaaggaaattcactgctgttataaaacatcgtataaaatacttatttgcaggaattacggttattataaatttatgcctcagattcttgatacacaagtttcaatactcaatagtattgcattattatgagatgttgtttctgctacgcaataactagaggcaaaatccaactacatatatgttttgatctgattattataatagactttgggcttcattccgcctaaagct

SEQ ID NO: 28883 - protein, 236 aa, Arabidopsis thaliana
  peptide (1)..(236): Ceres Seq. ID no. 12321189
  misc_feature (12)..(227): Pfam Name: Peroxisomal biogenesis factor 11 (PEX11) Pfam Description: Peroxisomal biogenesis factor 11 (PEX11)
  misc_feature (132)..(236): Homolog of NCBI NO: 14335058 NR Description: At2g45740/F4I18.28 [Arabidopsis thaliana]
  misc_feature (3)..(225): Homolog of NCBI NO: 34898026 NR Description: ESTs AU064537(E31904),AU082147(E31904) correspond a region of the predicted gene.~Similar to Arabidopsis thaliana
  misc_feature (3)..(234): Homolog of NCBI NO: 25553559 NR Description: OSJNBa0038F22.7 [Oryza sativa (japonica
  misc_feature (3)..(234): Homolog of NCBI NO: 8489788 NR Description: unknown [Lycopersicon esculentum]
  misc_feature (3)..(236): Homolog of NCBI NO: 11358250 NR Description: hypothetical protein T27I15_160 - Arabidopsis
  misc_feature (3)..(234): Homolog of NCBI NO: 18378887 NR Description: expressed protein
  misc_feature (3)..(236): Homolog of NCBI NO: 30695340 NR Description: expressed protein [Arabidopsis thaliana]
  misc_feature (1)..(231): Homolog of NCBI NO: 7486466 NR Description: hypothetical protein At2g45740 [imported] -
  misc_feature (1)..(236): Homolog of NCBI NO: 18406877 NR Description: expressed protein
MGTTLDVSRAELALVVMYLNKAEARDKLCRAIQYGSKFLSGGQPGTAQNVDKSTSLARKVFRLFKFVNDLHGLISPVPKGTPLPLVLLGKSKNALLSTFLFLDQIVWLGRSGIYKNKERAELLGRISLFCWMGSSVCTTLVEVGEMGRLSSSMKKIEKGLKNGNKYQDEDYRAKLKKSNERSLALIKSAMDIVVAAGLLQLAPTKITPRVTGAFGFITSIISCYQLLPTRPKIKTP

SEQ ID NO: 28884 - protein, 220 aa, Arabidopsis thaliana
  peptide (1)..(220): Ceres Seq. ID no. 12321190
  misc_feature (1)..(211): Pfam Name: Peroxisomal biogenesis factor 11 (PEX11) Pfam Description: Peroxisomal biogenesis factor 11 (PEX11)
  misc_feature (116)..(220): Homolog of NCBI NO: 14335058 NR Description: At2g45740/F4I18.28 [Arabidopsis thaliana]
  misc_feature (1)..(209): Homolog of NCBI NO: 34898026 NR Description: ESTs AU064537(E31904),AU082147(E31904) correspond a region of the predicted gene.~Similar to Arabidopsis thaliana
  misc_feature (1)..(218): Homolog of NCBI NO: 25553559 NR Description: OSJNBa0038F22.7 [Oryza sativa (japonica
  misc_feature (1)..(218): Homolog of NCBI NO: 8489788 NR Description: unknown [Lycopersicon esculentum]
  misc_feature (1)..(220): Homolog of NCBI NO: 11358250 NR Description: hypothetical protein T27I15_160 - Arabidopsis
  misc_feature (1)..(218): Homolog of NCBI NO: 18378887 NR Description: expressed protein
  misc_feature (1)..(220): Homolog of NCBI NO: 30695340 NR Description: expressed protein [Arabidopsis thaliana]
  misc_feature (1)..(215): Homolog of NCBI NO: 7486466 NR Description: hypothetical protein At2g45740 [imported] -
  misc_feature (1)..(220): Homolog of NCBI NO: 18406877 NR Description: expressed protein
MYLNKAEARDKLCRAIQYGSKFLSGGQPGTAQNVDKSTSLARKVFRLFKFVNDLHGLISPVPKGTPLPLVLLGKSKNALLSTFLFLDQIVWLGRSGIYKNKERAELLGRISLFCWMGSSVCTTLVEVGEMGRLSSSMKKIEKGLKNGNKYQDEDYRAKLKKSNERSLALIKSAMDIVVAAGLLQLAPTKITPRVTGAFGFITSIISCYQLLPTRPKIKTP

SEQ ID NO: 28885 - DNA, 1136 bp, Arabidopsis thaliana
  misc_feature (1)..(1136): Ceres Seq. ID no. 12337739
  misc_feature: MA Experiment ID: 108434 Result: Down-regulated in Transcription
  misc_feature: MA Experiment 108434 PARAMETER Experiment Name: At_Root_Tips_cDNA_P Parameter: Tissue Value: Root Tips
  misc_feature: MA Experiment ID: 108461 Result: Down-regulated in Transcription
  misc_feature: MA Experiment 108461 PARAMETER Experiment Name: At_Germinating_Seeds_cDNA_P Parameter: Age (day) Value: 1 vs. 0
  misc_feature: MA Experiment 108461 PARAMETER Experiment Name: At_Germinating_Seeds_cDNA_P Parameter: Tissue Value: Germinating Seeds
  misc_feature: MA Experiment ID: 108488 Result: Down-regulated in Transcription
  misc_feature: MA Experiment ID: 108569 Result: Up-regulated in Transcription
  misc_feature: MA Experiment 108569 PARAMETER Experiment Name: At_0.001%_MeJA__cDNA_P Parameter: Timepoint (hr) Value: 6
  misc_feature: MA Experiment 108569 PARAMETER Experiment Name: At_0.001%_MeJA__cDNA_P Parameter: Tissue Value: Aerial
  misc_feature: MA Experiment 108569 PARAMETER Experiment Name: At_0.001%_MeJA__cDNA_P Parameter: Treatment Value: 0.001% MeJA vs. No Treatment
  misc_feature: MA Experiment ID: 108573 Result: Up-regulated in Transcription
  misc_feature: MA Experiment 108573 PARAMETER Experiment Name: At_Drought_cDNA_P Parameter: Timepoint (hr) Value: 6
  misc_feature: MA Experiment 108573 PARAMETER Experiment Name: At_Drought_cDNA_P Parameter: Tissue Value: Aerial
  misc_feature: MA Experiment 108573 PARAMETER Experiment Name: At_Drought_cDNA_P Parameter: Treatment Value: Drought vs. No Drought
  misc_feature: MA Experiment ID: 108574 Result: Up-regulated in Transcription
  misc_feature: MA Experiment 108574 PARAMETER Experiment Name: At_Wounding__cDNA_P Parameter: Timepoint (hr) Value: 1
  misc_feature: MA Experiment 108574 PARAMETER Experiment Name: At_Wounding__cDNA_P Parameter: Tissue Value: Aerial
  misc_feature: MA Experiment 108574 PARAMETER Experiment Name: At_Wounding__cDNA_P Parameter: Treatment Value: Wounding vs. No Wounding
  misc_feature: MA Experiment ID: 108585 Result: Up-regulated in Transcription
  misc_feature: MA Experiment 108585 PARAMETER Experiment Name: At_5mM_NaNP_cDNA_P Parameter: Timepoint (hr) Value: 6
  misc_feature: MA Experiment 108585 PARAMETER Experiment Name: At_5mM_NaNP_cDNA_P Parameter: Tissue Value: Aerial
  misc_feature: MA Experiment 108585 PARAMETER Experiment Name: At_5mM_NaNP_cDNA_P Parameter: Treatment Value: null
  misc_feature: MA Experiment ID: 108595 Result: Up-regulated in Transcription
  misc_feature: MA Experiment 108595 PARAMETER Experiment Name: At_Ler-pi_Ovule_cDNA_P Parameter: Plant Line Value: null
  misc_feature: MA Experiment ID: 108667 Result: Up-regulated in Transcription
  misc_feature: MA Experiment 108667 PARAMETER Experiment Name: At_2mM_SA_cDNA_P Parameter: Plant Line Value: WS
  misc_feature: MA Experiment 108667 PARAMETER Experiment Name: At_2mM_SA_cDNA_P Parameter: Timepoint (hr) Value: 1
  misc_feature: MA Experiment 108667 PARAMETER Experiment Name: At_2mM_SA_cDNA_P Parameter: Treatment Value: 2mM SA vs. No Treatment
  misc_feature: MA Experiment ID: 20000069 Result: Up-regulated in Transcription
  misc_feature: MA Experiment 20000069 PARAMETER Experiment Name: At_100uM_ABA_Mutants_cDNA_P Parameter: Plant Line Value: CS23
  misc_feature: MA Experiment 20000069 PARAMETER Experiment Name: At_100uM_ABA_Mutants_cDNA_P Parameter: Timepoint (hr) Value: 6
  misc_feature: MA Experiment 20000069 PARAMETER Experiment Name: At_100uM_ABA_Mutants_cDNA_P Parameter: Tissue Value: Aerial
  misc_feature: MA Experiment 20000069 PARAMETER Experiment Name: At_100uM_ABA_Mutants_cDNA_P Parameter: Treatment Value: 100uM ABA vs. No Treatment
  misc_feature: MA Experiment ID: 20000070 Result: Up-regulated in Transcription
  misc_feature: MA Experiment 20000070 PARAMETER Experiment Name: At_100uM_ABA_Mutants_cDNA_P Parameter: Plant Line Value: CS24
  misc_feature: MA Experiment 20000070 PARAMETER Experiment Name: At_100uM_ABA_Mutants_cDNA_P Parameter: Timepoint (hr) Value: 6
  misc_feature: MA Experiment 20000070 PARAMETER Experiment Name: At_100uM_ABA_Mutants_cDNA_P Parameter: Tissue Value: Aerial
  misc_feature: MA Experiment 20000070 PARAMETER Experiment Name: At_100uM_ABA_Mutants_cDNA_P Parameter: Treatment Value: 100uM ABA vs. No Treatment
  misc_feature: MA Experiment ID: 20000071 Result: Up-regulated in Transcription
  misc_feature: MA Experiment 20000071 PARAMETER Experiment Name: At_100uM_ABA_Mutants_cDNA_P Parameter: Plant Line Value: CS8104
  misc_feature: MA Experiment 20000071 PARAMETER Experiment Name: At_100uM_ABA_Mutants_cDNA_P Parameter: Timepoint (hr) Value: 6
  misc_feature: MA Experiment 20000071 PARAMETER Experiment Name: At_100uM_ABA_Mutants_cDNA_P Parameter: Tissue Value: Aerial
  misc_feature: MA Experiment 20000071 PARAMETER Experiment Name: At_100uM_ABA_Mutants_cDNA_P Parameter: Treatment Value: 100uM ABA vs. No Treatment
  misc_feature: MA Experiment ID: 20000072 Result: Up-regulated in Transcription
  misc_feature: MA Experiment 20000072 PARAMETER Experiment Name: At_100uM_ABA_Mutants_cDNA_P Parameter: Plant Line Value: CS8105
  misc_feature: MA Experiment 20000072 PARAMETER Experiment Name: At_100uM_ABA_Mutants_cDNA_P Parameter: Timepoint (hr) Value: 6
  misc_feature: MA Experiment 20000072 PARAMETER Experiment Name: At_100uM_ABA_Mutants_cDNA_P Parameter: Tissue Value: Aerial
  misc_feature: MA Experiment 20000072 PARAMETER Experiment Name: At_100uM_ABA_Mutants_cDNA_P Parameter: Treatment Value: 100uM ABA vs. No Treatment
  misc_feature: MA Experiment ID: 20000087 Result: Up-regulated in Transcription
  misc_feature: MA Experiment 20000087 PARAMETER Experiment Name: At_100uM_ABA_Mutants_cDNA_P Parameter: Plant Line Value: WS
  misc_feature: MA Experiment 20000087 PARAMETER Experiment Name: At_100uM_ABA_Mutants_cDNA_P Parameter: Timepoint (hr) Value: 6
  misc_feature: MA Experiment 20000087 PARAMETER Experiment Name: At_100uM_ABA_Mutants_cDNA_P Parameter: Tissue Value: Aerial
  misc_feature: MA Experiment 20000087 PARAMETER Experiment Name: At_100uM_ABA_Mutants_cDNA_P Parameter: Treatment Value: 100uM ABA vs. No Treatment
  misc_feature: MA Experiment ID: 20000088 Result: Up-regulated in Transcription
  misc_feature: MA Experiment 20000088 PARAMETER Experiment Name: At_100uM_ABA_Mutants_cDNA_P Parameter: Plant Line Value: Landsberg
  misc_feature: MA Experiment 20000088 PARAMETER Experiment Name: At_100uM_ABA_Mutants_cDNA_P Parameter: Timepoint (hr) Value: 6
  misc_feature: MA Experiment 20000088 PARAMETER Experiment Name: At_100uM_ABA_Mutants_cDNA_P Parameter: Tissue Value: Aerial
  misc_feature: MA Experiment 20000088 PARAMETER Experiment Name: At_100uM_ABA_Mutants_cDNA_P Parameter: Treatment Value: 100uM ABA vs. No Treatment
  misc_feature: MA Experiment ID: 20000089 Result: Up-regulated in Transcription
  misc_feature: MA Experiment ID: 20000093 Result: Up-regulated in Transcription
  misc_feature: MA Experiment 20000093 PARAMETER Experiment Name: At_42deg_Heat_cDNA_P Parameter: Temperature (deg C) Value: 42 vs. 22
  misc_feature: MA Experiment 20000093 PARAMETER Experiment Name: At_42deg_Heat_cDNA_P Parameter: Timepoint (hr) Value: 0.5
  misc_feature: MA Experiment 20000093 PARAMETER Experiment Name: At_42deg_Heat_cDNA_P Parameter: Tissue Value: Aerial
  misc_feature: MA Experiment ID: 20000112 Result: Up-regulated in Transcription
  misc_feature: MA Experiment 20000112 PARAMETER Experiment Name: At_42deg_Heat_cDNA_P Parameter: Temperature (deg C) Value: 42 vs. 22
  misc_feature: MA Experiment 20000112 PARAMETER Experiment Name: At_42deg_Heat_cDNA_P Parameter: Timepoint (hr) Value: 2
  misc_feature: MA Experiment 20000112 PARAMETER Experiment Name: At_42deg_Heat_cDNA_P Parameter: Tissue Value: Aerial
  misc_feature: MA Experiment ID: 20000113 Result: Up-regulated in Transcription
  misc_feature: MA Experiment 20000113 PARAMETER Experiment Name: At_42deg_Heat_cDNA_P Parameter: Temperature (deg C) Value: 42 vs. 22
  misc_feature: MA Experiment 20000113 PARAMETER Experiment Name: At_42deg_Heat_cDNA_P Parameter: Timepoint (hr) Value: 8
  misc_feature: MA Experiment 20000113 PARAMETER Experiment Name: At_42deg_Heat_cDNA_P Parameter: Tissue Value: Aerial
  misc_feature: MA Experiment ID: 20000117 Result: Up-regulated in Transcription
  misc_feature: MA Experiment 20000117 PARAMETER Experiment Name: At_100uM_ABA_Mutants_cDNA_P Parameter: Plant Line Value: Columbia
  misc_feature: MA Experiment 20000117 PARAMETER Experiment Name: At_100uM_ABA_Mutants_cDNA_P Parameter: Timepoint (hr) Value: 6
  misc_feature: MA Experiment 20000117 PARAMETER Experiment Name: At_100uM_ABA_Mutants_cDNA_P Parameter: Tissue Value: Aerial
  misc_feature: MA Experiment 20000117 PARAMETER Experiment Name: At_100uM_ABA_Mutants_cDNA_P Parameter: Treatment Value: 100uM ABA vs. No Treatment
  misc_feature: MA Experiment ID: 20000144 Result: Up-regulated in Transcription
  misc_feature: MA Experiment 20000144 PARAMETER Experiment Name: At_42deg_Heat_cDNA_P Parameter: Temperature (deg C) Value: 42 vs. 22
  misc_feature: MA Experiment 20000144 PARAMETER Experiment Name: At_42deg_Heat_cDNA_P Parameter: Timepoint (hr) Value: 1
  misc_feature: MA Experiment 20000144 PARAMETER Experiment Name: At_42deg_Heat_cDNA_P Parameter: Tissue Value: Aerial
  misc_feature: MA Experiment ID: 20000171 Result: Up-regulated in Transcription
  misc_feature: MA Experiment 20000171 PARAMETER Experiment Name: At_42deg_Heat_P Parameter: Age (day) Value: 14
  misc_feature: MA Experiment 20000171 PARAMETER Experiment Name: At_42deg_Heat_P Parameter: Organism Value: A. thaliana
  misc_feature: MA Experiment 20000171 PARAMETER Experiment Name: At_42deg_Heat_P Parameter: Plant Line Value: WS
  misc_feature: MA Experiment 20000171 PARAMETER Experiment Name: At_42deg_Heat_P Parameter: Temperature (deg C) Value: 42 vs. 22
  misc_feature: MA Experiment 20000171 PARAMETER Experiment Name: At_42deg_Heat_P Parameter: Timepoint (hr) Value: 1
  misc_feature: MA Experiment 20000171 PARAMETER Experiment Name: At_42deg_Heat_P Parameter: Tissue Value: Aerial
  misc_feature: MA Experiment ID: 20000173 Result: Up-regulated in Transcription
  misc_feature: MA Experiment 20000173 PARAMETER Experiment Name: At_42deg_Heat_P Parameter: Age (day) Value: 14
  misc_feature: MA Experiment 20000173 PARAMETER Experiment Name: At_42deg_Heat_P Parameter: Organism Value: A. thaliana
  misc_feature: MA Experiment 20000173 PARAMETER Experiment Name: At_42deg_Heat_P Parameter: Plant Line Value: WS
  misc_feature: MA Experiment 20000173 PARAMETER Experiment Name: At_42deg_Heat_P Parameter: Temperature (deg C) Value: 42 vs. 22
  misc_feature: MA Experiment 20000173 PARAMETER Experiment Name: At_42deg_Heat_P Parameter: Timepoint (hr) Value: 6
  misc_feature: MA Experiment 20000173 PARAMETER Experiment Name: At_42deg_Heat_P Parameter: Tissue Value: Aerial
  misc_feature: MA Experiment ID: 20000185 Result: Down-regulated in Transcription
  misc_feature: MA Experiment 20000185 PARAMETER Experiment Name: At_Roots__P Parameter: Age (day) Value: 7 vs. 21
  misc_feature: MA Experiment 20000185 PARAMETER Experiment Name: At_Roots__P Parameter: Organism Value: A. thaliana
  misc_feature: MA Experiment 20000185 PARAMETER Experiment Name: At_Roots__P Parameter: Tissue Value: Roots vs. Whole Plant
  misc_feature: MA Experiment ID: 20000224 Result: Down-regulated in Transcription
  misc_feature: MA Experiment ID: 20000234 Result: Down-regulated in Transcription
  misc_feature: MA Experiment 20000234 PARAMETER Experiment Name: At_Siliques_P Parameter: Age (day) Value: 21
  misc_feature: MA Experiment 20000234 PARAMETER Experiment Name: At_Siliques_P Parameter: Organism Value: A. thaliana
  misc_feature: MA Experiment 20000234 PARAMETER Experiment Name: At_Siliques_P Parameter: Plant Line Value: WS
  misc_feature: MA Experiment 20000234 PARAMETER Experiment Name: At_Siliques_P Parameter: Tissue Value: Less Than 5mm Siliques vs. Whole Plant
  misc_feature: MA Experiment ID: 20000235 Result: Down-regulated in Transcription
  misc_feature: MA Experiment 20000235 PARAMETER Experiment Name: At_Siliques_P Parameter: Age (day) Value: 21
  misc_feature: MA Experiment 20000235 PARAMETER Experiment Name: At_Siliques_P Parameter: Organism Value: A. thaliana
  misc_feature: MA Experiment 20000235 PARAMETER Experiment Name: At_Siliques_P Parameter: Plant Line Value: WS
  misc_feature: MA Experiment 20000235 PARAMETER Experiment Name: At_Siliques_P Parameter: Tissue Value: 5-10mm Siliques vs. Whole Plant
  misc_feature: MA Experiment ID: 20000264 Result: Down-regulated in Transcription
  misc_feature: MA Experiment 20000264 PARAMETER Experiment Name: At_Open_Flower_P Parameter: Age (day) Value: 21
  misc_feature: MA Experiment 20000264 PARAMETER Experiment Name: At_Open_Flower_P Parameter: Plant Line Value: WS
  misc_feature: MA Experiment 20000264 PARAMETER Experiment Name: At_Open_Flower_P Parameter: Tissue Value: Open Flower vs. Whole Plant
  misc_feature: MA Experiment ID: 20000265 Result: Down-regulated in Transcription
  misc_feature: MA Experiment 20000265 PARAMETER Experiment Name: At_Open_Flower_P Parameter: Age (day) Value: 21
  misc_feature: MA Experiment 20000265 PARAMETER Experiment Name: At_Open_Flower_P Parameter: Plant Line Value: WS
  misc_feature: MA Experiment 20000265 PARAMETER Experiment Name: At_Open_Flower_P Parameter: Tissue Value: Closed Flower vs. Whole Plant
  misc_feature: MA Experiment ID: 20000286 Result: Down-regulated in Transcription
  misc_feature: MA Experiment 20000286 PARAMETER Experiment Name: At_Open_Flower_P Parameter: Age (day) Value: 21
  misc_feature: MA Experiment 20000286 PARAMETER Experiment Name: At_Open_Flower_P Parameter: Plant Line Value: WS
  misc_feature: MA Experiment 20000286 PARAMETER Experiment Name: At_Open_Flower_P Parameter: Tissue Value: Half Open vs. Whole Plant
  misc_feature: MA Experiment ID: 20000437 Result: Up-regulated in Transcription
  misc_feature: MA Experiment 20000437 PARAMETER Experiment Name: At_Drought_P Parameter: Age (day) Value: 8
  misc_feature: MA Experiment 20000437 PARAMETER Experiment Name: At_Drought_P Parameter: Organism Value: A. thaliana
  misc_feature: MA Experiment 20000437 PARAMETER Experiment Name: At_Drought_P Parameter: Plant Line Value: WS
  misc_feature: MA Experiment 20000437 PARAMETER Experiment Name: At_Drought_P Parameter: Timepoint (hr) Value: 24
  misc_feature: MA Experiment 20000437 PARAMETER Experiment Name: At_Drought_P Parameter: Tissue Value: Whole Plant
  misc_feature: MA Experiment 20000437 PARAMETER Experiment Name: At_Drought_P Parameter: Treatment Value: Drought vs. No Drought
  misc_feature: MA Experiment ID: 20000439 Result: Down-regulated in Transcription
  misc_feature: MA Experiment 20000439 PARAMETER Experiment Name: At_Roots__P Parameter: Age (day) Value: 14 vs. 21
  misc_feature: MA Experiment 20000439 PARAMETER Experiment Name: At_Roots__P Parameter: Organism Value: A. thaliana
  misc_feature: MA Experiment 20000439 PARAMETER Experiment Name: At_Roots__P Parameter: Tissue Value: Roots vs. Whole Plant
  misc_feature: MA Experiment ID: 20000441 Result: Up-regulated in Transcription
  misc_feature: MA Experiment 20000441 PARAMETER Experiment Name: At_1uM_BR-BRZ__P Parameter: Tissue Value: Shoot Apices
  misc_feature: MA Experiment 20000441 PARAMETER Experiment Name: At_1uM_BR-BRZ__P Parameter: Treatment Value: 1uM BR vs. No Treatment
  misc_feature: MA Experiment ID: 20000443 Result: Up-regulated in Transcription
  misc_feature: MA Experiment 20000443 PARAMETER Experiment Name: At_1uM_BR-BRZ__P Parameter: Tissue Value: Shoot Apices
  misc_feature: MA Experiment 20000443 PARAMETER Experiment Name: At_1uM_BR-BRZ__P Parameter: Treatment Value: 1uM BRZ vs. No Treatment
  misc_feature: MA Experiment ID: 20000445 Result: Up-regulated in Transcription
  misc_feature: MA Experiment 20000445 PARAMETER Experiment Name: At_100uM_NAA__P Parameter: Age (day) Value: 14
  misc_feature: MA Experiment 20000445 PARAMETER Experiment Name: At_100uM_NAA__P Parameter: Organism Value: A. thaliana
  misc_feature: MA Experiment 20000445 PARAMETER Experiment Name: At_100uM_NAA__P Parameter: Plant Line Value: WS
  misc_feature: MA Experiment 20000445 PARAMETER Experiment Name: At_100uM_NAA__P Parameter: Timepoint (hr) Value: 6
  misc_feature: MA Experiment 20000445 PARAMETER Experiment Name: At_100uM_NAA__P Parameter: Tissue Value: Aerial
  misc_feature: MA Experiment 20000445 PARAMETER Experiment Name: At_100uM_NAA__P Parameter: Treatment Value: 100uM NAA vs. No Treatment
  misc_feature: MA Experiment ID: 20000495 Result: Down-regulated in Transcription
  misc_feature: MA Experiment 20000495 PARAMETER Experiment Name: At_Guard_Cells_P Parameter: Harvest Date Value: 8/2/2002
  misc_feature: MA Experiment 20000495 PARAMETER Experiment Name: At_Guard_Cells_P Parameter: Organism Value: A. thaliana
  misc_feature: MA Experiment 20000495 PARAMETER Experiment Name: At_Guard_Cells_P Parameter: Tissue Value: Guard Cells vs. Leaves
  misc_feature: MA Experiment ID: 20000496 Result: Down-regulated in Transcription
  misc_feature: MA Experiment 20000496 PARAMETER Experiment Name: At_Guard_Cells_P Parameter: Harvest Date Value: 7/19/2002
  misc_feature: MA Experiment 20000496 PARAMETER Experiment Name: At_Guard_Cells_P Parameter: Organism Value: Canola
  misc_feature: MA Experiment 20000496 PARAMETER Experiment Name: At_Guard_Cells_P Parameter: Tissue Value: Guard Cells vs. Leaves
  misc_feature: MA Experiment ID: 20000527 Result: Up-regulated in Transcription
  misc_feature: MA Experiment 20000527 PARAMETER Experiment Name: At_10percent_PEG_P Parameter: Age (day) Value: 20
  misc_feature: MA Experiment 20000527 PARAMETER Experiment Name: At_10percent_PEG_P Parameter: Organism Value: A. thaliana
  misc_feature: MA Experiment 20000527 PARAMETER Experiment Name: At_10percent_PEG_P Parameter: Plant Line Value: WS
  misc_feature: MA Experiment 20000527 PARAMETER Experiment Name: At_10percent_PEG_P Parameter: Timepoint (day) Value: 20
  misc_feature: MA Experiment 20000527 PARAMETER Experiment Name: At_10percent_PEG_P Parameter: Tissue Value: Whole Plant
  misc_feature: MA Experiment 20000527 PARAMETER Experiment Name: At_10percent_PEG_P Parameter: Treatment Value: 10percent PEG vs. No Treatment
  misc_feature: MA Experiment ID: 20000574 Result: Down-regulated in Transcription
  misc_feature: MA Experiment 20000574 PARAMETER Experiment Name: At_100uM_ABA_Mutants__P Parameter: Organism Value: A. thaliana
  misc_feature: MA Experiment 20000574 PARAMETER Experiment Name: At_100uM_ABA_Mutants__P Parameter: Plant Line Value: CS23 vs. Ler wt
  misc_feature: MA Experiment 20000574 PARAMETER Experiment Name: At_100uM_ABA_Mutants__P Parameter: Timepoint (hr) Value: N/A
  misc_feature: MA Experiment 20000574 PARAMETER Experiment Name: At_100uM_ABA_Mutants__P Parameter: Tissue Value: Whole Plant
  misc_feature: MA Experiment 20000574 PARAMETER Experiment Name: At_100uM_ABA_Mutants__P Parameter: Treatment Value: None
  misc_feature: MA Experiment ID: 20000794 Result: Down-regulated in Transcription
  misc_feature: MA Experiment 20000794 PARAMETER Experiment Name: At_Petals_P Parameter: Age (day) Value: 23-25 days
  misc_feature: MA Experiment 20000794 PARAMETER Experiment Name: At_Petals_P Parameter: Plant Line Value: WS
  misc_feature: MA Experiment 20000794 PARAMETER Experiment Name: At_Petals_P Parameter: Tissue Value: Petals vs. Whole plant
  misc_feature: MA Experiment ID: 20001247 Result: Up-regulated in Transcription
  misc_feature: MA Experiment 20001247 PARAMETER Experiment Name: At_Far-red-induction_P Parameter: Age (day) Value: 7
  misc_feature: MA Experiment 20001247 PARAMETER Experiment Name: At_Far-red-induction_P Parameter: Light Value: Far-red vs. White
  misc_feature: MA Experiment 20001247 PARAMETER Experiment Name: At_Far-red-induction_P Parameter: Organism Value: A. thaliana
  misc_feature: MA Experiment 20001247 PARAMETER Experiment Name: At_Far-red-induction_P Parameter: Plant Line Value: Columbia
  misc_feature: MA Experiment 20001247 PARAMETER Experiment Name: At_Far-red-induction_P Parameter: Timepoint (hr) Value: 1
  misc_feature: MA Experiment 20001247 PARAMETER Experiment Name: At_Far-red-induction_P Parameter: Tissue Value: Whole Plant
  misc_feature: MA Experiment ID: 20001248 Result: Up-regulated in Transcription
  misc_feature: MA Experiment 20001248 PARAMETER Experiment Name: At_Far-red-induction_P Parameter: Age (day) Value: 7
  misc_feature: MA Experiment 20001248 PARAMETER Experiment Name: At_Far-red-induction_P Parameter: Light Value: Far-red vs. White
  misc_feature: MA Experiment 20001248 PARAMETER Experiment Name: At_Far-red-induction_P Parameter: Organism Value: A. thaliana
  misc_feature: MA Experiment 20001248 PARAMETER Experiment Name: At_Far-red-induction_P Parameter: Plant Line Value: Columbia
  misc_feature: MA Experiment 20001248 PARAMETER Experiment Name: At_Far-red-induction_P Parameter: Timepoint (hr) Value: 4
  misc_feature: MA Experiment 20001248 PARAMETER Experiment Name: At_Far-red-induction_P Parameter: Tissue Value: Whole Plant
  misc_feature: MA Experiment ID: 20001450 Result: Up-regulated in Transcription
  misc_feature: MA Experiment 20001450 PARAMETER Experiment Name: At_Far-red-induction_P Parameter: Age (day) Value: 7
  misc_feature: MA Experiment 20001450 PARAMETER Experiment Name: At_Far-red-induction_P Parameter: Light Value: Far-red vs. White
  misc_feature: MA Experiment 20001450 PARAMETER Experiment Name: At_Far-red-induction_P Parameter: Organism Value: A. thaliana
  misc_feature: MA Experiment 20001450 PARAMETER Experiment Name: At_Far-red-induction_P Parameter: Plant Line Value: Columbia
  misc_feature: MA Experiment 20001450 PARAMETER Experiment Name: At_Far-red-induction_P Parameter: Timepoint (hr) Value: 8
  misc_feature: MA Experiment 20001450 PARAMETER Experiment Name: At_Far-red-induction_P Parameter: Tissue Value: Whole Plant
  misc_feature: MA Experiment ID: 20001556 Result: Down-regulated in Transcription
  misc_feature: MA Experiment 20001556 PARAMETER Experiment Name: At_Drought_Soil_Dry_P Parameter: Age (day) Value: 26
  misc_feature: MA Experiment 20001556 PARAMETER Experiment Name: At_Drought_Soil_Dry_P Parameter: Organism Value: A. thaliana
  misc_feature: MA Experiment 20001556 PARAMETER Experiment Name: At_Drought_Soil_Dry_P Parameter: Plant Line Value: WS
  misc_feature: MA Experiment 20001556 PARAMETER Experiment Name: At_Drought_Soil_Dry_P Parameter: Post Timepoint (hr) Value: None
  misc_feature: MA Experiment 20001556 PARAMETER Experiment Name: At_Drought_Soil_Dry_P Parameter: Post-Treatment Value: None
  misc_feature: MA Experiment 20001556 PARAMETER Experiment Name: At_Drought_Soil_Dry_P Parameter: Timepoint (day) Value: 12
  misc_feature: MA Experiment 20001556 PARAMETER Experiment Name: At_Drought_Soil_Dry_P Parameter: Treatment Value: Drought vs. No Drought
  misc_feature: MA Experiment ID: 20001560 Result: Down-regulated in Transcription
  misc_feature: MA Experiment 20001560 PARAMETER Experiment Name: At_Drought_Soil_Dry_P Parameter: Age (day) Value: 28
  misc_feature: MA Experiment 20001560 PARAMETER Experiment Name: At_Drought_Soil_Dry_P Parameter: Organism Value: A. thaliana
  misc_feature: MA Experiment 20001560 PARAMETER Experiment Name: At_Drought_Soil_Dry_P Parameter: Plant Line Value: WS
  misc_feature: MA Experiment 20001560 PARAMETER Experiment Name: At_Drought_Soil_Dry_P Parameter: Post Timepoint (hr) Value: None
  misc_feature: MA Experiment 20001560 PARAMETER Experiment Name: At_Drought_Soil_Dry_P Parameter: Post-Treatment Value: None
  misc_feature: MA Experiment 20001560 PARAMETER Experiment Name: At_Drought_Soil_Dry_P Parameter: Timepoint (day) Value: 14
  misc_feature: MA Experiment 20001560 PARAMETER Experiment Name: At_Drought_Soil_Dry_P Parameter: Treatment Value: Drought vs. No Drought
  misc_feature: MA Experiment ID: 20001757 Result: Down-regulated in Transcription
  misc_feature: MA Experiment 20001757 PARAMETER Experiment Name: At_50mM_NH4NO3_L-to-H_P Parameter: Timepoint (hr) Value: 6
  misc_feature: MA Experiment 20001757 PARAMETER Experiment Name: At_50mM_NH4NO3_L-to-H_P Parameter: Tissue Value: Leaf
  misc_feature: MA Experiment 20001757 PARAMETER Experiment Name: At_50mM_NH4NO3_L-to-H_P Parameter: Treatment Value: 50mM NH4NO3 vs 100mM Mannitol
  misc_feature: MA Experiment ID: 20001910 Result: Up-regulated in Transcription
  misc_feature: MA Experiment 20001910 PARAMETER Experiment Name: At_Drought_Reproduction_P Parameter: Age (day) Value: 37
  misc_feature: MA Experiment 20001910 PARAMETER Experiment Name: At_Drought_Reproduction_P Parameter: Organism Value: A. thaliana
  misc_feature: MA Experiment 20001910 PARAMETER Experiment Name: At_Drought_Reproduction_P Parameter: Plant Line Value: WS
  misc_feature: MA Experiment 20001910 PARAMETER Experiment Name: At_Drought_Reproduction_P Parameter: Timepoint (day) Value: 7
  misc_feature: MA Experiment 20001910 PARAMETER Experiment Name: At_Drought_Reproduction_P Parameter: Tissue Value: Flowers
  misc_feature: MA Experiment 20001910 PARAMETER Experiment Name: At_Drought_Reproduction_P Parameter: Treatment Value: Drought vs. No Drought
acctctaattcttctcactaaaaatatcaaaagctttcacattacaatatctccctctctctacacaaagctctctatgccacaagtcgatatagaagcctttgtttcttcagtatgcatcggtggctccgaccaccgcaagatcgtatgcgaaaccctcgccgacgactcaacgatcccaccttattacaacaactccgccgttagtccgagtgatttcccaccggaatcttatttcttgtcaaacgatgctcagctagagtggctcagcgacaacgccttctttgatcgtaaagactcacaaaaaggaaactctgggattctcaattctaatcccaactcgaatccaagctcgcaacggttcttactaaaatccaaagcgtcgatcatcggtttgcctaaaccgcagaaaacgtgtttcaacgaggcaaagcaacggagacacgcgggcaagaaccgggtcatcttgaaacgggtcgggtcaaggataaagacggatatttcgcttctggaaccttcttctcctaaagtctcttgcatcggtagagtgagatccagaagagaacgcagccgccgtatgcaccgtcaaaaatcaagtcgggtcgaaccggtaaaccgggttaagaaacccgggtttatggcgagtttcagagctattttcaggatcaaaggcggctgcaaagacgtgtcagcgcgtgagactcacacgtcgacgagaaacacacacgacatcaggagccgacttcctgcggaagctgatgagaagtcggtattcgacggcggagaaccggtggtacccggtttgggtgggatgacgcgtttcgcatctggtagaagagcggatttgttgggtggtggaggatgttgacgcggcggatgacaagtgtaatacatgtggggtccagttatatagtgttttaagtcccagggggaaagtagaagaaatagtactttagttgtcttgtctgatttttttgagtggaactcgttttgaaaagtcgttggtgatgacgtggcagctgatcaacgtttttattcagaaagaaacacggcaacgcgaaagcggtgatttcacacccaccgcactgtttttgtattcttctagtttccgttgtaaatagttcagtttaaatgtt

SEQ ID NO: 28886 - protein, 288 aa, Arabidopsis thaliana
  peptide (1)..(288): Ceres Seq. ID no. 12337740
  misc_feature (26)..(285): Homolog of NCBI NO: 15231297 NR Description: hypothetical protein
  misc_feature (26)..(288): Homolog of NCBI NO: 21537164 NR Description: unknown [Arabidopsis thaliana]
  misc_feature (26)..(288): Homolog of NCBI NO: 18404079 NR Description: expressed protein
PLILLTKNIKSFHITISPSLYTKLSMPQVDIEAFVSSVCIGGSDHRKIVCETLADDSTIPPYYNNSAVSPSDFPPESYFLSNDAQLEWLSDNAFFDRKDSQKGNSGILNSNPNSNPSSQRFLLKSKASIIGLPKPQKTCFNEAKQRRHAGKNRVILKRVGSRIKTDISLLEPSSPKVSCIGRVRSRRERSRRMHRQKSSRVEPVNRVKKPGFMASFRAIFRIKGGCKDVSARETHTSTRNTHDIRSRLPAEADEKSVFDGGEPVVPGLGGMTRFASGRRADLLGGGGC

SEQ ID NO: 28887 - protein, 263 aa, Arabidopsis thaliana
  peptide (1)..(263): Ceres Seq. ID no. 12337741
  misc_feature (1)..(260): Homolog of NCBI NO: 15231297 NR Description: hypothetical protein
  misc_feature (1)..(263): Homolog of NCBI NO: 21537164 NR Description: unknown [Arabidopsis thaliana]
  misc_feature (1)..(263): Homolog of NCBI NO: 18404079 NR Description: expressed protein
MPQVDIEAFVSSVCIGGSDHRKIVCETLADDSTIPPYYNNSAVSPSDFPPESYFLSNDAQLEWLSDNAFFDRKDSQKGNSGILNSNPNSNPSSQRFLLKSKASIIGLPKPQKTCFNEAKQRRHAGKNRVILKRVGSRIKTDISLLEPSSPKVSCIGRVRSRRERSRRMHRQKSSRVEPVNRVKKPGFMASFRAIFRIKGGCKDVSARETHTSTRNTHDIRSRLPAEADEKSVFDGGEPVVPGLGGMTRFASGRRADLLGGGGC

SEQ ID NO: 28888 - DNA, 4277 bp, Arabidopsis thaliana
  misc_feature (1)..(4277): Ceres Seq. ID no. 13491805
  misc_feature: MA Experiment ID: 108474 Result: Up-regulated in Transcription
  misc_feature: MA Experiment 108474 PARAMETER Experiment Name: At_Drought_Flowers_cDNA_P Parameter: Timepoint (hr) Value: null
  misc_feature: MA Experiment 108474 PARAMETER Experiment Name: At_Drought_Flowers_cDNA_P Parameter: Treatment Value: Drought vs. No Drought
  misc_feature: MA Experiment ID: 108488 Result: Up-regulated in Transcription
gtcccaacaatctgatcagaaaaaagtagacgaagaagaagaaattaagtcacttgaacaatggcgttggtccgaaatgcaaggccttgagcttctccctcataacaccaacaacaactcacgaagctccagagaaactcaccggaaatggataatgacggtggtgctcctcctcctccgccgacactagtggtggaagagcctaagaaagcagagattcgtggagttgcttttaaagagctattcagattcgccgacggattagattatgtattgatgggaattggctctgttggtgcttttgtccatggctgctctttacctctgtttcttcgattcttcgccgatcttgttaattcctttggttctaattctaataacgttgaaaagatgatggaagaagttctcaagtatgcgctttactttttagtggttggtgctgcaatctgggcttcctcttgggcagagatttcgtgttggatgtggagtggagagagacaaacaacgaagatgaggattaagtatttagaagcagctttgaatcaagacattcagttctttgatacagaagttcgaacttcagatgttgtcttcgccattaacaccgacgctgttatggttcaagacgccattagtgagaaacttggtaatttcatccattacatggcgacttttgtttctggattcatcgtgggtttcactgcggtgtggcaactagctttagtgactctcgcggtggttccgttgattgctgtgatcggaggaattcacaccactactctctctaaactatctaataagagtcaagagtctctttcacaagctggtaatatcgtcgaacagacagtggtacaaatcagggtagtgatggctttcgttggagaatcaagagcttcacaagcttattcatcagctttgaagattgctcagaagcttggttacaaaacaggtttagctaaaggaatgggacttggtgctacatacttcgttgtcttttgttgttacgctctcttgctttggtacgatggttatctagttcgccaccatttgaccaacggtggtctcgctattgccacaatgttcgccgttatgattggtggattggcattgggacaatcagcaccgagcatggctgcatttgccaaagcaaaggttgctgctgcaaagatctttagaatcattgatcacaaaccaacgatagagcgtaacagcgagtccggtgtggagttagactcagtcacgggtcttgtcgagcttaaaaatgtggacttttcgtatccgtcaaggccagatgttaagattcttaacaacttctgcctctctgttcctgctgggaagaccattgctttggttgggagcagtggttcaggaaaaagcacagtcgtttcgcttatagagcggttttacgacccgaactcaggacaagttttactagatgggcaagacctgaagacgctgaaactgagatggttaaggcaacagatagggctagtgagtcaagaacctgcattattcgccacttctatcaaggagaatatactcttaggccgtcctgacgcagatcaagtcgagatagaggaggctgctcgagtcgcaaatgctcattcctttatcatcaaactacctgatggcttcgacacacaggttggggagagaggattgcagctgtctggtgggcagaagcaaagaatagcgatagcaagagcgatgttgaagaacccggcgatacttctattagatgaggcgacgagtgcattggattctgaatcagagaagcttgtacaagaggctttggatcgtttcatgattggaaggactactctcatcattgctcatcgcctttctaccattcgaaaagctgaccttgttgctgtgctacagcaaggaagtgtctctgagattggaacgcatgatgagcttttttccaagggagaaaatggagtctatgctaagctaattaaaatgcaagaagcagctcacgaaaccgccatgagcaatgcaagaaagagtagcgcaagaccgtcgagtgctagaaactcggttagctcgccaataatgactcggaattcgtcgtatggaagatcaccttattcacggagactatccgatttctcaacttctgattttagcctctccattgacgcttcgtcctacccaaactatagaaacgagaagctggccttcaaggatcaagccaattcattctggcgactagctaaaatgaactctccagagtggaaatacgctttgctcggttcagtaggctctgtcatttgtggctcccttagtgcattcttcgcatatgtcctcagtgcagtcttaagcgtctactacaacccggaccacgaatacatgatcaaacagattgataagtactgttatctcttaatcggtctctcttccgcagcacttgtcttcaacacgctccagcattctttctgggacattgtgggtgagaatctgaccaagagagtccgtgagaagatgctgagcgctgtactcaagaatgagatggcttggtttgatcaagaggagaacgaaagtgcgagaatcgcagcaagattagctcttgatgctaataatgtgagatctgcgataggagatagaatatcggttattgtgcagaacacagcactgatgcttgttgcttgcactgccgggtttgttctacaatggagactcgcacttgtccttgtcgcagtcttccccgtagttgttgctgcaactgtcttacagaaaatgttcatgactggtttctcgggagacctggaagcggcacatgccaagggaacgcagcttgctggtgaagccatagctaatgtcaggacagttgctgcatttaactcggaggcaaagattgtccgtctctacactgcaaacctcgaaccaccattgaaacgatgcttctggaaaggacagatcgctggaagtggttatggtgtagctcagttctgtctttatgcatcttatgctctcgggctatggtacgcatcatggcttgtgaaacacggcatctctgacttctccaaaaccataagagtcttcatggttctgatggtctcagccaatggtgcagcagagacactcacactggctcctgatttcatcaaaggtggtcaagctatgcggtctgttttcgaacttcttgaccggaaaaccgagattgaacctgatgatcctgataccaccccggtcccagaccggttacgtggtgaagtcgagctcaaacatatcgatttctcttacccttcaaggccagacatccagattttccgtgaccttagccttcgtgctagagctggcaaaaccctagctcttgtgggtccaagcgggtgcggaaaaagctcagttatctccctcatccagagattctacgaaccttcctcaggccgagtcatgatcgacgggaaagacataaggaaatacaacctgaaagccataaggaaacacatagccatagtccctcaagagccgtgcttgttcggaactaccatttacgaaaacattgcatatggacatgaatgtgcgaccgaagcagagatcatacaagccgcgactctagccagtgcgcacaaattcatatccgcgctaccagaaggttacaaaacgtatgttggcgagagaggcgttcagctctcgggaggacagaaacagaggatcgcgatcgcacgtgccctcgtgaggaaagcagagatcatgctgcttgacggggctacaagcgctcttgatgcagagtccgagagatcagtccaagaagcattagaccaggcttgctctggtagaacatcaatagtcgtggctcataggctatctacaatcaggaacgcacacgtgatcgctgtcatcgatgatggaaaagtggctgaacaaggatcgcattcgcatcttctcaagaaccatcctgatggaatctacgcgcgaatgatacagttgcaaagatttacgcatacacaagtgattggtatgacgtcaggttcaagttctagggttaaggaagatgatgcttagtacttactactttggtcatatagaagaaaaaagaaggagagtaaaaaacaacaaacaccagaagatgtttctgataaaaaactctacgaactcatcattttctctttttttctttctgttttgattttggggttacttatttttggaactacgtttcagatttgatggtatagtattattattgtgtattatcataattaatctaatttttcacctctgtaatatccatttatatgccatatcaatctatgagcctctgcctttctagc

SEQ ID NO: 28889 - protein, 1286 aa, Arabidopsis thaliana
  peptide (1)..(1286): Ceres Seq. ID no. 13491806
  misc_feature (44)..(324): Pfam Name: ABC transporter transmembrane region Pfam Description: ABC transporter transmembrane region
  misc_feature (44)..(324): Pfam Name: ABC transporter transmembrane region Pfam Description: ABC transporter transmembrane region
  misc_feature (1)..(956): Homolog of NCBI NO: 18496818 NR Description: ABC transporter AbcB3 [Dictyostelium discoideum]
  misc_feature (801)..(1247): Homolog of NCBI NO: 25407562 NR Description: hypothetical protein AT4g18050 [imported] -
  misc_feature (27)..(797): Homolog of NCBI NO: 25407562 NR Description: hypothetical protein AT4g18050 [imported] -
  misc_feature (18)..(645): Homolog of NCBI NO: 15233244 NR Description: multidrug resistance P-glycoprotein, putative
  misc_feature (625)..(1261): Homolog of NCBI NO: 15233244 NR Description: multidrug resistance P-glycoprotein, putative
  misc_feature (1)..(956): Homolog of NCBI NO: 18496818 NR Description: ABC transporter AbcB3 [Dictyostelium discoideum]
  misc_feature (27)..(797): Homolog of NCBI NO: 25407562 NR Description: hypothetical protein AT4g18050 [imported] -
  misc_feature (625)..(1261): Homolog of NCBI NO: 15233244 NR Description: multidrug resistance P-glycoprotein, putative
  misc_feature (1)..(1262): Homolog of NCBI NO: 14715462 NR Description: CjMDR1 [Coptis japonica]
  misc_feature (528)..(1262): Homolog of NCBI NO: 15234323 NR Description: multidrug resistance P-glycoprotein, putative
  misc_feature (21)..(634): Homolog of NCBI NO: 15234323 NR Description: multidrug resistance P-glycoprotein, putative
  misc_feature (1)..(642): Homolog of NCBI NO: 27368853 NR Description: MDR-like ABC transporter [Oryza sativa (japonica
  misc_feature (605)..(1266): Homolog of NCBI NO: 27368853 NR Description: MDR-like ABC transporter [Oryza sativa (japonica
  misc_feature (18)..(645): Homolog of NCBI NO: 15233244 NR Description: multidrug resistance P-glycoprotein, putative
  misc_feature (801)..(1247): Homolog of NCBI NO: 25407562 NR Description: hypothetical protein AT4g18050 [imported] -
  misc_feature (605)..(1266): Homolog of NCBI NO: 27368853 NR Description: MDR-like ABC transporter [Oryza sativa (japonica
  misc_feature (1)..(642): Homolog of NCBI NO: 27368853 NR Description: MDR-like ABC transporter [Oryza sativa (japonica
  misc_feature (21)..(634): Homolog of NCBI NO: 15234323 NR Description: multidrug resistance P-glycoprotein, putative
  misc_feature (528)..(1262): Homolog of NCBI NO: 15234323 NR Description: multidrug resistance P-glycoprotein, putative
  misc_feature (1)..(1262): Homolog of NCBI NO: 14715462 NR Description: CjMDR1 [Coptis japonica]
MDNDGGAPPPPPTLVVEEPKKAEIRGVAFKELFRFADGLDYVLMGIGSVGAFVHGCSLPLFLRFFADLVNSFGSNSNNVEKMMEEVLKYALYFLVVGAAIWASSWAEISCWMWSGERQTTKMRIKYLEAALNQDIQFFDTEVRTSDVVFAINTDAVMVQDAISEKLGNFIHYMATFVSGFIVGFTAVWQLALVTLAVVPLIAVIGGIHTTTLSKLSNKSQESLSQAGNIVEQTVVQIRVVMAFVGESRASQAYSSALKIAQKLGYKTGLAKGMGLGATYFVVFCCYALLLWYDGYLVRHHLTNGGLAIATMFAVMIGGLALGQSAPSMAAFAKAKVAAAKIFRIIDHKPTIERNSESGVELDSVTGLVELKNVDFSYPSRPDVKILNNFCLSVPAGKTIALVGSSGSGKSTVVSLIERFYDPNSGQVLLDGQDLKTLKLRWLRQQIGLVSQEPALFATSIKENILLGRPDADQVEIEEAARVANAHSFIIKLPDGFDTQVGERGLQLSGGQKQRIAIARAMLKNPAILLLDEATSALDSESEKLVQEALDRFMIGRTTLIIAHRLSTIRKADLVAVLQQGSVSEIGTHDELFSKGENGVYAKLIKMQEAAHETAMSNARKSSARPSSARNSVSSPIMTRNSSYGRSPYSRRLSDFSTSDFSLSIDASSYPNYRNEKLAFKDQANSFWRLAKMNSPEWKYALLGSVGSVICGSLSAFFAYVLSAVLSVYYNPDHEYMIKQIDKYCYLLIGLSSAALVFNTLQHSFWDIVGENLTKRVREKMLSAVLKNEMAWFDQEENESARIAARLALDANNVRSAIGDRISVIVQNTALMLVACTAGFVLQWRLALVLVAVFPVVVAATVLQKMFMTGFSGDLEAAHAKGTQLAGEAIANVRTVAAFNSEAKIVRLYTANLEPPLKRCFWKGQIAGSGYGVAQFCLYASYALGLWYASWLVKHGISDFSKTIRVFMVLMVSANGAAETLTLAPDFIKGGQAMRSVFELLDRKTEIEPDDPDTTPVPDRLRGEVELKHIDFSYPSRPDIQIFRDLSLRARAGKTLALVGPSGCGKSSVISLIQRFYEPSSGRVMIDGKDIRKYNLKAIRKHIAIVPQEPCLFGTTIYENIAYGHECATEAEIIQAATLASAHKFISALPEGYKTYVGERGVQLSGGQKQRIAIARALVRKAEIMLLDGATSALDAESERSVQEALDQACSGRTSIVVAHRLSTIRNAHVIAVIDDGKVAEQGSHSHLLKNHPDGIYARMIQLQRFTHTQVIGMTSGSSSRVKEDDA

SEQ ID NO: 28890 - protein, 1243 aa, Arabidopsis thaliana
  peptide (1)..(1243): Ceres Seq. ID no. 13491807
  misc_feature (1)..(281): Pfam Name: ABC transporter transmembrane region Pfam Description: ABC transporter transmembrane region
  misc_feature (1)..(281): Pfam Name: ABC transporter transmembrane region Pfam Description: ABC transporter transmembrane region
  misc_feature (1)..(913): Homolog of NCBI NO: 18496818 NR Description: ABC transporter AbcB3 [Dictyostelium discoideum]
  misc_feature (758)..(1204): Homolog of NCBI NO: 25407562 NR Description: hypothetical protein AT4g18050 [imported] -
  misc_feature (1)..(754): Homolog of NCBI NO: 25407562 NR Description: hypothetical protein AT4g18050 [imported] -
  misc_feature (1)..(602): Homolog of NCBI NO: 15233244 NR Description: multidrug resistance P-glycoprotein, putative
  misc_feature (582)..(1218): Homolog of NCBI NO: 15233244 NR Description: multidrug resistance P-glycoprotein, putative
  misc_feature (1)..(913): Homolog of NCBI NO: 18496818 NR Description: ABC transporter AbcB3 [Dictyostelium discoideum]
  misc_feature (1)..(754): Homolog of NCBI NO: 25407562 NR Description: hypothetical protein AT4g18050 [imported] -
  misc_feature (582)..(1218): Homolog of NCBI NO: 15233244 NR Description: multidrug resistance P-glycoprotein, putative
  misc_feature (1)..(1219): Homolog of NCBI NO: 14715462 NR Description: CjMDR1 [Coptis japonica]
  misc_feature (485)..(1219): Homolog of NCBI NO: 15234323 NR Description: multidrug resistance P-glycoprotein, putative
  misc_feature (1)..(591): Homolog of NCBI NO: 15234323 NR Description: multidrug resistance P-glycoprotein, putative
  misc_feature (1)..(599): Homolog of NCBI NO: 27368853 NR Description: MDR-like ABC transporter [Oryza sativa (japonica
  misc_feature (562)..(1223): Homolog of NCBI NO: 27368853 NR Description: MDR-like ABC transporter [Oryza sativa (japonica
  misc_feature (1)..(602): Homolog of NCBI NO: 15233244 NR Description: multidrug resistance P-glycoprotein, putative
  misc_feature (758)..(1204): Homolog of NCBI NO: 25407562 NR Description: hypothetical protein AT4g18050 [imported] -
  misc_feature (562)..(1223): Homolog of NCBI NO: 27368853 NR Description: MDR-like ABC transporter [Oryza sativa (japonica
  misc_feature (1)..(599): Homolog of NCBI NO: 27368853 NR Description: MDR-like ABC transporter [Oryza sativa (japonica
  misc_feature (1)..(591): Homolog of NCBI NO: 15234323 NR Description: multidrug resistance P-glycoprotein, putative
  misc_feature (485)..(1219): Homolog of NCBI NO: 15234323 NR Description: multidrug resistance P-glycoprotein, putative
  misc_feature (1)..(1219): Homolog of NCBI NO: 14715462 NR Description: CjMDR1 [Coptis japonica]
MGIGSVGAFVHGCSLPLFLRFFADLVNSFGSNSNNVEKMMEEVLKYALYFLVVGAAIWASSWAEISCWMWSGERQTTKMRIKYLEAALNQDIQFFDTEVRTSDVVFAINTDAVMVQDAISEKLGNFIHYMATFVSGFIVGFTAVWQLALVTLAVVPLIAVIGGIHTTTLSKLSNKSQESLSQAGNIVEQTVVQIRVVMAFVGESRASQAYSSALKIAQKLGYKTGLAKGMGLGATYFVVFCCYALLLWYDGYLVRHHLTNGGLAIATMFAVMIGGLALGQSAPSMAAFAKAKVAAAKIFRIIDHKPTIERNSESGVELDSVTGLVELKNVDFSYPSRPDVKILNNFCLSVPAGKTIALVGSSGSGKSTVVSLIERFYDPNSGQVLLDGQDLKTLKLRWLRQQIGLVSQEPALFATSIKENILLGRPDADQVEIEEAARVANAHSFIIKLPDGFDTQVGERGLQLSGGQKQRIAIARAMLKNPAILLLDEATSALDSESEKLVQEALDRFMIGRTTLIIAHRLSTIRKADLVAVLQQGSVSEIGTHDELFSKGENGVYAKLIKMQEAAHETAMSNARKSSARPSSARNSVSSPIMTRNSSYGRSPYSRRLSDFSTSDFSLSIDASSYPNYRNEKLAFKDQANSFWRLAKMNSPEWKYALLGSVGSVICGSLSAFFAYVLSAVLSVYYNPDHEYMIKQIDKYCYLLIGLSSAALVFNTLQHSFWDIVGENLTKRVREKMLSAVLKNEMAWFDQEENESARIAARLALDANNVRSAIGDRISVIVQNTALMLVACTAGFVLQWRLALVLVAVFPVVVAATVLQKMFMTGFSGDLEAAHAKGTQLAGEAIANVRTVAAFNSEAKIVRLYTANLEPPLKRCFWKGQIAGSGYGVAQFCLYASYALGLWYASWLVKHGISDFSKTIRVFMVLMVSANGAAETLTLAPDFIKGGQAMRSVFELLDRKTEIEPDDPDTTPVPDRLRGEVELKHIDFSYPSRPDIQIFRDLSLRARAGKTLALVGPSGCGKSSVISLIQRFYEPSSGRVMIDGKDIRKYNLKAIRKHIAIVPQEPCLFGTTIYENIAYGHECATEAEIIQAATLASAHKFISALPEGYKTYVGERGVQLSGGQKQRIAIARALVRKAEIMLLDGATSALDAESERSVQEALDQACSGRTSIVVAHRLSTIRNAHVIAVIDDGKVAEQGSHSHLLKNHPDGIYARMIQLQRFTHTQVIGMTSGSSSRVKEDDA

SEQ ID NO: 28891 - protein, 1205 aa, Arabidopsis thaliana
  peptide (1)..(1205): Ceres Seq. ID no. 13491808
  misc_feature (1)..(243): Pfam Name: ABC transporter transmembrane region Pfam Description: ABC transporter transmembrane region
  misc_feature (1)..(243): Pfam Name: ABC transporter transmembrane region Pfam Description: ABC transporter transmembrane region
  misc_feature (1)..(875): Homolog of NCBI NO: 18496818 NR Description: ABC transporter AbcB3 [Dictyostelium discoideum]
  misc_feature (720)..(1166): Homolog of NCBI NO: 25407562 NR Description: hypothetical protein AT4g18050 [imported] -
  misc_feature (1)..(716): Homolog of NCBI NO: 25407562 NR Description: hypothetical protein AT4g18050 [imported] -
  misc_feature (1)..(564): Homolog of NCBI NO: 15233244 NR Description: multidrug resistance P-glycoprotein, putative
  misc_feature (544)..(1180): Homolog of NCBI NO: 15233244 NR Description: multidrug resistance P-glycoprotein, putative
  misc_feature (1)..(875): Homolog of NCBI NO: 18496818 NR Description: ABC transporter AbcB3 [Dictyostelium discoideum]
  misc_feature (1)..(716): Homolog of NCBI NO: 25407562 NR Description: hypothetical protein AT4g18050 [imported] -
  misc_feature (544)..(1180): Homolog of NCBI NO: 15233244 NR Description: multidrug resistance P-glycoprotein, putative
  misc_feature (1)..(1181): Homolog of NCBI NO: 14715462 NR Description: CjMDR1 [Coptis japonica]
  misc_feature (447)..(1181): Homolog of NCBI NO: 15234323 NR Description: multidrug resistance P-glycoprotein, putative
  misc_feature (1)..(553): Homolog of NCBI NO: 15234323 NR Description: multidrug resistance P-glycoprotein, putative
  misc_feature (1)..(561): Homolog of NCBI NO: 27368853 NR Description: MDR-like ABC transporter [Oryza sativa (japonica
  misc_feature (524)..(1185): Homolog of NCBI NO: 27368853 NR Description: MDR-like ABC transporter [Oryza sativa (japonica
  misc_feature (1)..(564): Homolog of NCBI NO: 15233244 NR Description: multidrug resistance P-glycoprotein, putative
  misc_feature (720)..(1166): Homolog of NCBI NO: 25407562 NR Description: hypothetical protein AT4g18050 [imported] -
  misc_feature (524)..(1185): Homolog of NCBI NO: 27368853 NR Description: MDR-like ABC transporter [Oryza sativa (japonica
  misc_feature (1)..(561): Homolog of NCBI NO: 27368853 NR Description: MDR-like ABC transporter [Oryza sativa (japonica
  misc_feature (1)..(553): Homolog of NCBI NO: 15234323 NR Description: multidrug resistance P-glycoprotein, putative
  misc_feature (447)..(1181): Homolog of NCBI NO: 15234323 NR Description: multidrug resistance P-glycoprotein, putative
  misc_feature (1)..(1181): Homolog of NCBI NO: 14715462 NR Description: CjMDR1 [Coptis japonica]
MMEEVLKYALYFLVVGAAIWASSWAEISCWMWSGERQTTKMRIKYLEAALNQDIQFFDTEVRTSDVVFAINTDAVMVQDAISEKLGNFIHYMATFVSGFIVGFTAVWQLALVTLAVVPLIAVIGGIHTTTLSKLSNKSQESLSQAGNIVEQTVVQIRVVMAFVGESRASQAYSSALKIAQKLGYKTGLAKGMGLGATYFVVFCCYALLLWYDGYLVRHHLTNGGLAIATMFAVMIGGLALGQSAPSMAAFAKAKVAAAKIFRIIDHKPTIERNSESGVELDSVTGLVELKNVDFSYPSRPDVKILNNFCLSVPAGKTIALVGSSGSGKSTVVSLIERFYDPNSGQVLLDGQDLKTLKLRWLRQQIGLVSQEPALFATSIKENILLGRPDADQVEIEEAARVANAHSFIIKLPDGFDTQVGERGLQLSGGQKQRIAIARAMLKNPAILLLDEATSALDSESEKLVQEALDRFMIGRTTLIIAHRLSTIRKADLVAVLQQGSVSEIGTHDELFSKGENGVYAKLIKMQEAAHETAMSNARKSSARPSSARNSVSSPIMTRNSSYGRSPYSRRLSDFSTSDFSLSIDASSYPNYRNEKLAFKDQANSFWRLAKMNSPEWKYALLGSVGSVICGSLSAFFAYVLSAVLSVYYNPDHEYMIKQIDKYCYLLIGLSSAALVFNTLQHSFWDIVGENLTKRVREKMLSAVLKNEMAWFDQEENESARIAARLALDANNVRSAIGDRISVIVQNTALMLVACTAGFVLQWRLALVLVAVFPVVVAATVLQKMFMTGFSGDLEAAHAKGTQLAGEAIANVRTVAAFNSEAKIVRLYTANLEPPLKRCFWKGQIAGSGYGVAQFCLYASYALGLWYASWLVKHGISDFSKTIRVFMVLMVSANGAAETLTLAPDFIKGGQAMRSVFELLDRKTEIEPDDPDTTPVPDRLRGEVELKHIDFSYPSRPDIQIFRDLSLRARAGKTLALVGPSGCGKSSVISLIQRFYEPSSGRVMIDGKDIRKYNLKAIRKHIAIVPQEPCLFGTTIYENIAYGHECATEAEIIQAATLASAHKFISALPEGYKTYVGERGVQLSGGQKQRIAIARALVRKAEIMLLDGATSALDAESERSVQEALDQACSGRTSIVVAHRLSTIRNAHVIAVIDDGKVAEQGSHSHLLKNHPDGIYARMIQLQRFTHTQVIGMTSGSSSRVKEDDA

SEQ ID NO: 28892 - DNA, 1657 bp, Arabidopsis thaliana
  misc_feature (1)..(1657): Ceres Seq. ID no. 12339523
  misc_feature: MA Experiment ID: 108434 Result: Up-regulated in Transcription
  misc_feature: MA Experiment 108434 PARAMETER Experiment Name: At_Root_Tips_cDNA_P Parameter: Tissue Value: Root Tips
  misc_feature: MA Experiment ID: 108462 Result: Down-regulated in Transcription
  misc_feature: MA Experiment 108462 PARAMETER Experiment Name: At_Germinating_Seeds_cDNA_P Parameter: Age (day) Value: 2 vs. 0
  misc_feature: MA Experiment 108462 PARAMETER Experiment Name: At_Germinating_Seeds_cDNA_P Parameter: Tissue Value: Germinating Seeds
  misc_feature: MA Experiment ID: 108463 Result: Down-regulated in Transcription
  misc_feature: MA Experiment 108463 PARAMETER Experiment Name: At_Germinating_Seeds_cDNA_P Parameter: Age (day) Value: 3 vs. 0
  misc_feature: MA Experiment 108463 PARAMETER Experiment Name: At_Germinating_Seeds_cDNA_P Parameter: Tissue Value: Germinating Seeds
  misc_feature: MA Experiment ID: 108464 Result: Down-regulated in Transcription
  misc_feature: MA Experiment 108464 PARAMETER Experiment Name: At_Germinating_Seeds_cDNA_P Parameter: Age (day) Value: 4 vs. 0
  misc_feature: MA Experiment 108464 PARAMETER Experiment Name: At_Germinating_Seeds_cDNA_P Parameter: Tissue Value: Germinating Seeds
  misc_feature: MA Experiment ID: 20000224 Result: Up-regulated in Transcription
  misc_feature: MA Experiment ID: 20000227 Result: Up-regulated in Transcription
  misc_feature: MA Experiment 20000227 PARAMETER Experiment Name: At_Root-Tips-vs-Tops_P Parameter: Tissue Value: Root Tips vs. Root Tops
  misc_feature: MA Experiment ID: 20000451 Result: Down-regulated in Transcription
  misc_feature: MA Experiment 20000451 PARAMETER Experiment Name: At_CS6879_Shoots-Roots_P Parameter: Age (day) Value: 14
  misc_feature: MA Experiment 20000451 PARAMETER Experiment Name: At_CS6879_Shoots-Roots_P Parameter: Organism Value: A. thaliana
  misc_feature: MA Experiment 20000451 PARAMETER Experiment Name: At_CS6879_Shoots-Roots_P Parameter: Plant Line Value: CS6879 vs. WS
  misc_feature: MA Experiment 20000451 PARAMETER Experiment Name: At_CS6879_Shoots-Roots_P Parameter: Tissue Value: Roots
  misc_feature: MA Experiment ID: 20000452 Result: Down-regulated in Transcription
  misc_feature: MA Experiment 20000452 PARAMETER Experiment Name: At_CS6879_Shoots-Roots_P Parameter: Age (day) Value: 14
  misc_feature: MA Experiment 20000452 PARAMETER Experiment Name: At_CS6879_Shoots-Roots_P Parameter: Organism Value: A. thaliana
  misc_feature: MA Experiment 20000452 PARAMETER Experiment Name: At_CS6879_Shoots-Roots_P Parameter: Plant Line Value: CS6879 vs. WS
  misc_feature: MA Experiment 20000452 PARAMETER Experiment Name: At_CS6879_Shoots-Roots_P Parameter: Tissue Value: Shoots
  misc_feature: MA Experiment ID: 20000573 Result: Down-regulated in Transcription
  misc_feature: MA Experiment 20000573 PARAMETER Experiment Name: At_100uM_ABA_Mutants__P Parameter: Organism Value: A. thaliana
  misc_feature: MA Experiment 20000573 PARAMETER Experiment Name: At_100uM_ABA_Mutants__P Parameter: Plant Line Value: CS22 vs. Ler wt
  misc_feature: MA Experiment 20000573 PARAMETER Experiment Name: At_100uM_ABA_Mutants__P Parameter: Timepoint (hr) Value: N/A
  misc_feature: MA Experiment 20000573 PARAMETER Experiment Name: At_100uM_ABA_Mutants__P Parameter: Tissue Value: Whole Plant
  misc_feature: MA Experiment 20000573 PARAMETER Experiment Name: At_100uM_ABA_Mutants__P Parameter: Treatment Value: None
  misc_feature: MA Experiment ID: 20000574 Result: Down-regulated in Transcription
  misc_feature: MA Experiment 20000574 PARAMETER Experiment Name: At_100uM_ABA_Mutants__P Parameter: Organism Value: A. thaliana
  misc_feature: MA Experiment 20000574 PARAMETER Experiment Name: At_100uM_ABA_Mutants__P Parameter: Plant Line Value: CS23 vs. Ler wt
  misc_feature: MA Experiment 20000574 PARAMETER Experiment Name: At_100uM_ABA_Mutants__P Parameter: Timepoint (hr) Value: N/A
  misc_feature: MA Experiment 20000574 PARAMETER Experiment Name: At_100uM_ABA_Mutants__P Parameter: Tissue Value: Whole Plant
  misc_feature: MA Experiment 20000574 PARAMETER Experiment Name: At_100uM_ABA_Mutants__P Parameter: Treatment Value: None
  misc_feature: MA Experiment ID: 20001557 Result: Up-regulated in Transcription
  misc_feature: MA Experiment 20001557 PARAMETER Experiment Name: At_Drought_Soil_Dry_P Parameter: Age (day) Value: 27
  misc_feature: MA Experiment 20001557 PARAMETER Experiment Name: At_Drought_Soil_Dry_P Parameter: Organism Value: A. thaliana
  misc_feature: MA Experiment 20001557 PARAMETER Experiment Name: At_Drought_Soil_Dry_P Parameter: Plant Line Value: WS
  misc_feature: MA Experiment 20001557 PARAMETER Experiment Name: At_Drought_Soil_Dry_P Parameter: Post Timepoint (hr) Value: 3
  misc_feature: MA Experiment 20001557 PARAMETER Experiment Name: At_Drought_Soil_Dry_P Parameter: Post-Treatment Value: Re-Water vs. No Drought
  misc_feature: MA Experiment 20001557 PARAMETER Experiment Name: At_Drought_Soil_Dry_P Parameter: Timepoint (day) Value: 13
  misc_feature: MA Experiment 20001557 PARAMETER Experiment Name: At_Drought_Soil_Dry_P Parameter: Treatment Value: Drought vs. No Drought
  misc_feature: MA Experiment ID: 20001558 Result: Up-regulated in Transcription
  misc_feature: MA Experiment 20001558 PARAMETER Experiment Name: At_Drought_Soil_Dry_P Parameter: Age (day) Value: 27
  misc_feature: MA Experiment 20001558 PARAMETER Experiment Name: At_Drought_Soil_Dry_P Parameter: Organism Value: A. thaliana
  misc_feature: MA Experiment 20001558 PARAMETER Experiment Name: At_Drought_Soil_Dry_P Parameter: Plant Line Value: WS
  misc_feature: MA Experiment 20001558 PARAMETER Experiment Name: At_Drought_Soil_Dry_P Parameter: Post Timepoint (hr) Value: 6
  misc_feature: MA Experiment 20001558 PARAMETER Experiment Name: At_Drought_Soil_Dry_P Parameter: Post-Treatment Value: Re-Water vs. No Drought
  misc_feature: MA Experiment 20001558 PARAMETER Experiment Name: At_Drought_Soil_Dry_P Parameter: Timepoint (day) Value: 13
  misc_feature: MA Experiment 20001558 PARAMETER Experiment Name: At_Drought_Soil_Dry_P Parameter: Treatment Value: Drought vs. No Drought
ctttttgtcgatttagccctaacctatacggctgctacatccagatttcctcatcctctattagggaagaagaaccaaaaccctaatcctatcttctcctcttataaatcgcttcaacaacagtttctttctcttctgatttgatccatgatttctcatctggaaccctagtttatacatccatcgggtgttactgttctttatctgggcaatcagtggtgtttttgttccttttgtatatctgtcgagacttctaggtgtgaaatcaaagcttgtttggtttatattgatcttggttttagctgaatcgttgttaagatggctggaggtggaaacaggagagatgaaggatcgatcacgatccagagcactaatttgtttgcagcattggacactcgtaagaagaagaagaagtctgacaaggcagggaagagcaaagggtcttctaagtcacgagagccagagaaggagcctgagcctcaggtctattgggctcctacgcctttgaaagttaagtcttgggctgatattgatgatgaagacgacgatgatgactattatgcaaccactgctcctcctcagtctggttggagtacttctctgccttcccatactgattccaaagacgttcatgttgaggaaagtgaaagtgaggaagatattcttgatgaaggtgatgatgatgtggaggaagagcaggaacaggaaacagaggtacaggttcatccagagcctgaggtgaagaaagctcctgaagttcctgcacctcctaaagaggcagagaggcaactttccaagaaagagaggaaaaagaaggaacttgctgagcttgaagctttgttggctgattttggagttgcccccaaggagaacaatggcctagaggaatctcaagaggctggacaagaaaagaaagaagatgtcaatggagagggagagaagaaggagaatgcagcaggtggggagtcaaaggcatcaaaaaagaagaaaaagaaggataagcagaaggaggtaaaagaatctcaagagcaacaagcaaacaacaatgccgatgctgtagatgaagctgctgggtctgaaccaactgaggaagaatctccaattgacgtcaaggaaaggataaagaagcttgcatccatgaagaagaagaagtcaggcaaagaggtggatgctgcagctaaagctgctgcggaggaggcagctgcaagacgtaagaagctggccgcggcaaagaagaaggagaagaatcactataaccaacagcctgtgcggtaaaatcctgaatcaccaccattttgatcttgatggaaatgcaaatatgaacatgtatttcgccgtatattgttcatatgagtctctgtcctaataaatcttttgaagggtctggttcttagagttaaagacattgaatcctttttctagtcttattacaatgaacaggctaaagacaaaactactctctggagattttcatttctttttgaacacctttgttttcttaatatcagaccttttttaggttcattatgtcttcaatcagcttcttatgtatggttcgatggtgttattttcttctttttttcgttcagttgcctgtgttttgattcatgccttgtcacaaaatcttttttggttatatgttccaaagtgattcccc

SEQ ID NO: 28893 - protein, 318 aa, Arabidopsis thaliana
  peptide (1)..(318): Ceres Seq. ID no. 12339524
  misc_feature (95)..(315): Pfam Name: Caldesmon Pfam Description: Caldesmon
  misc_feature (25)..(308): Homolog of NCBI NO: 23001116 NR Description: hypothetical protein [Magnetococcus sp. MC-1]
  misc_feature (25)..(301): Homolog of NCBI NO: 8096269 NR Description: KED [Nicotiana tabacum]
  misc_feature (107)..(318): Homolog of NCBI NO: 7522210 NR Description: hypothetical protein pAFD103 - apple tree
  misc_feature (1)..(130): Homolog of NCBI NO: 34906156 NR Description: P0509B06.15 [Oryza sativa (japonica
  misc_feature (108)..(318): Homolog of NCBI NO: 34906156 NR Description: P0509B06.15 [Oryza sativa (japonica
  misc_feature (1)..(318): Homolog of NCBI NO: 33620414 NR Description: M355 [Lilium longiflorum]
  misc_feature (1)..(318): Homolog of NCBI NO: 15233865 NR Description: putative protein; protein id: At4g32610.1
  misc_feature (1)..(318): Homolog of NCBI NO: 17529066 NR Description: unknown protein [Arabidopsis thaliana]
  misc_feature (1)..(318): Homolog of NCBI NO: 21537167 NR Description: unknown [Arabidopsis thaliana]
  misc_feature (1)..(318): Homolog of NCBI NO: 18400901 NR Description: expressed protein
MAGGGNRRDEGSITIQSTNLFAALDTRKKKKKSDKAGKSKGSSKSREPEKEPEPQVYWAPTPLKVKSWADIDDEDDDDDYYATTAPPQSGWSTSLPSHTDSKDVHVEESESEEDILDEGDDDVEEEQEQETEVQVHPEPEVKKAPEVPAPPKEAERQLSKKERKKKELAELEALLADFGVAPKENNGLEESQEAGQEKKEDVNGEGEKKENAAGGESKASKKKKKKDKQKEVKESQEQQANNNADAVDEAAGSEPTEEESPIDVKERIKKLASMKKKKSGKEVDAAAKAAAEEAAARRKKLAAAKKKEKNHYNQQPVR

SEQ ID NO: 28894 - DNA, 883 bp, Arabidopsis thaliana
  misc_feature (1)..(883): Ceres Seq. ID no. 13490436
  misc_feature: MA Experiment ID: 20000171 Result: Down-regulated in Transcription
  misc_feature: MA Experiment 20000171 PARAMETER Experiment Name: At_42deg_Heat_P Parameter: Age (day) Value: 14
  misc_feature: MA Experiment 20000171 PARAMETER Experiment Name: At_42deg_Heat_P Parameter: Organism Value: A. thaliana
  misc_feature: MA Experiment 20000171 PARAMETER Experiment Name: At_42deg_Heat_P Parameter: Plant Line Value: WS
  misc_feature: MA Experiment 20000171 PARAMETER Experiment Name: At_42deg_Heat_P Parameter: Temperature (deg C) Value: 42 vs. 22
  misc_feature: MA Experiment 20000171 PARAMETER Experiment Name: At_42deg_Heat_P Parameter: Timepoint (hr) Value: 1
  misc_feature: MA Experiment 20000171 PARAMETER Experiment Name: At_42deg_Heat_P Parameter: Tissue Value: Aerial
  misc_feature: MA Experiment ID: 20000173 Result: Down-regulated in Transcription
  misc_feature: MA Experiment 20000173 PARAMETER Experiment Name: At_42deg_Heat_P Parameter: Age (day) Value: 14
  misc_feature: MA Experiment 20000173 PARAMETER Experiment Name: At_42deg_Heat_P Parameter: Organism Value: A. thaliana
  misc_feature: MA Experiment 20000173 PARAMETER Experiment Name: At_42deg_Heat_P Parameter: Plant Line Value: WS
  misc_feature: MA Experiment 20000173 PARAMETER Experiment Name: At_42deg_Heat_P Parameter: Temperature (deg C) Value: 42 vs. 22
  misc_feature: MA Experiment 20000173 PARAMETER Experiment Name: At_42deg_Heat_P Parameter: Timepoint (hr) Value: 6
  misc_feature: MA Experiment 20000173 PARAMETER Experiment Name: At_42deg_Heat_P Parameter: Tissue Value: Aerial
  misc_feature: MA Experiment ID: 20000180 Result: Up-regulated in Transcription
  misc_feature: MA Experiment 20000180 PARAMETER Experiment Name: At_Germinating_Seeds_P Parameter: Age (hr) Value: 24 vs. 0
  misc_feature: MA Experiment 20000180 PARAMETER Experiment Name: At_Germinating_Seeds_P Parameter: Tissue Value: Germinating Seeds
  misc_feature: MA Experiment ID: 20001451 Result: Up-regulated in Transcription
  misc_feature: MA Experiment 20001451 PARAMETER Experiment Name: At_Far-red-induction_P Parameter: Age (day) Value: 7
  misc_feature: MA Experiment 20001451 PARAMETER Experiment Name: At_Far-red-induction_P Parameter: Light Value: Far-red vs. White
  misc_feature: MA Experiment 20001451 PARAMETER Experiment Name: At_Far-red-induction_P Parameter: Organism Value: A. thaliana
  misc_feature: MA Experiment 20001451 PARAMETER Experiment Name: At_Far-red-induction_P Parameter: Plant Line Value: Columbia
  misc_feature: MA Experiment 20001451 PARAMETER Experiment Name: At_Far-red-induction_P Parameter: Timepoint (hr) Value: 24
  misc_feature: MA Experiment 20001451 PARAMETER Experiment Name: At_Far-red-induction_P Parameter: Tissue Value: Whole Plant
  misc_feature: MA Experiment ID: 20001560 Result: Up-regulated in Transcription
  misc_feature: MA Experiment 20001560 PARAMETER Experiment Name: At_Drought_Soil_Dry_P Parameter: Age (day) Value: 28
  misc_feature: MA Experiment 20001560 PARAMETER Experiment Name: At_Drought_Soil_Dry_P Parameter: Organism Value: A. thaliana
  misc_feature: MA Experiment 20001560 PARAMETER Experiment Name: At_Drought_Soil_Dry_P Parameter: Plant Line Value: WS
  misc_feature: MA Experiment 20001560 PARAMETER Experiment Name: At_Drought_Soil_Dry_P Parameter: Post Timepoint (hr) Value: None
  misc_feature: MA Experiment 20001560 PARAMETER Experiment Name: At_Drought_Soil_Dry_P Parameter: Post-Treatment Value: None
  misc_feature: MA Experiment 20001560 PARAMETER Experiment Name: At_Drought_Soil_Dry_P Parameter: Timepoint (day) Value: 14
  misc_feature: MA Experiment 20001560 PARAMETER Experiment Name: At_Drought_Soil_Dry_P Parameter: Treatment Value: Drought vs. No Drought
  misc_feature: MA Experiment ID: 20001905 Result: Down-regulated in Transcription
  misc_feature: MA Experiment 20001905 PARAMETER Experiment Name: At_Drought_Reproduction_P Parameter: Age (day) Value: 40
  misc_feature: MA Experiment 20001905 PARAMETER Experiment Name: At_Drought_Reproduction_P Parameter: Organism Value: A. thaliana
  misc_feature: MA Experiment 20001905 PARAMETER Experiment Name: At_Drought_Reproduction_P Parameter: Plant Line Value: WS
  misc_feature: MA Experiment 20001905 PARAMETER Experiment Name: At_Drought_Reproduction_P Parameter: Timepoint (day) Value: 10
  misc_feature: MA Experiment 20001905 PARAMETER Experiment Name: At_Drought_Reproduction_P Parameter: Tissue Value: Rosettes
  misc_feature: MA Experiment 20001905 PARAMETER Experiment Name: At_Drought_Reproduction_P Parameter: Treatment Value: Drought vs. No Drought
actctacttattagcaaactactctctctttttcctctttctcagatctctctgtgatcacttatttcagagtctcaacgtttctctgttctctgtttttcctctgtttcatactgtgttttgagtagatcgattggaaacacaagaacaaacaaagagttcctttttctaagtatccaagaaggaaaaaaagaaactttatactgtttggttcttaggagtgattggttcatgtgtcggagattctgatgattgggtattagctccacataggttataagctgtgtagtattttttgaggtttatagacactatgagaagaggtagagggaaagggaagaagcagaatgcatctgctcgggaagatcgtggaagcggtgatgaagaaaagattccagcttacaggagaagaggaagaccacagaagccgatgaaagatgatttcgaagaggaagaagaagaagatgatgaagagatggtagagaaaatggaagtagaagatgaagatgaagagattgatgatggttcagtaacaagtaaagatttgaaggagagaaagaggaagatgtctaatggaagcaatactgatctgactgaagaagagaatggtttaggatcgaaaccaaacaccgatgattccacgagatcgacatctattgggtttagacaaaatggaagccggaggaaaagcaagccgagacgagctgctgaagctgtcgtggaatgtaacggagtttgagaaaccttcctgtgaagaactcccaagaaacagaatgacaaattgacctgaggcttgtttttttgcttttttctttcaagtttttgaagttgacaacttaggatctcttatggtgattcatgaaatcaatctgcattctctttc

SEQ ID NO: 28895 - protein, 141 aa, Arabidopsis thaliana
  peptide (1)..(141): Ceres Seq. ID no. 13490437
  misc_feature (1)..(128): Homolog of NCBI NO: 18410791 NR Description: expressed protein [Arabidopsis thaliana]
  misc_feature (1)..(128): Homolog of NCBI NO: 21553446 NR Description: unknown [Arabidopsis thaliana]
  misc_feature (1)..(138): Homolog of NCBI NO: 33088054 NR Description: unknown [Setaria italica]
  misc_feature (1)..(141): Homolog of NCBI NO: 15230905 NR Description: expressed protein [Arabidopsis thaliana]
  misc_feature (1)..(141): Homolog of NCBI NO: 21537173 NR Description: unknown [Arabidopsis thaliana]
  misc_feature (1)..(141): Homolog of NCBI NO: 18405905 NR Description: expressed protein [Arabidopsis thaliana]
MRRGRGKGKKQNASAREDRGSGDEEKIPAYRRRGRPQKPMKDDFEEEEEEDDEEMVEKMEVEDEDEEIDDGSVTSKDLKERKRKMSNGSNTDLTEEENGLGSKPNTDDSTRSTSIGFRQNGSRRKSKPRRAAEAVVECNGV

SEQ ID NO: 28896 - protein, 102 aa, Arabidopsis thaliana
  peptide (1)..(102): Ceres Seq. ID no. 13490438
  misc_feature (1)..(89): Homolog of NCBI NO: 18410791 NR Description: expressed protein [Arabidopsis thaliana]
  misc_feature (1)..(89): Homolog of NCBI NO: 21553446 NR Description: unknown [Arabidopsis thaliana]
  misc_feature (1)..(99): Homolog of NCBI NO: 33088054 NR Description: unknown [Setaria italica]
  misc_feature (1)..(102): Homolog of NCBI NO: 15230905 NR Description: expressed protein [Arabidopsis thaliana]
  misc_feature (1)..(102): Homolog of NCBI NO: 21537173 NR Description: unknown [Arabidopsis thaliana]
  misc_feature (1)..(102): Homolog of NCBI NO: 18405905 NR Description: expressed protein [Arabidopsis thaliana]
MKDDFEEEEEEDDEEMVEKMEVEDEDEEIDDGSVTSKDLKERKRKMSNGSNTDLTEEENGLGSKPNTDDSTRSTSIGFRQNGSRRKSKPRRAAEAVVECNGV

SEQ ID NO: 28897 - protein, 87 aa, Arabidopsis thaliana
  peptide (1)..(87): Ceres Seq. ID no. 13490439
  misc_feature (1)..(74): Homolog of NCBI NO: 18410791 NR Description: expressed protein [Arabidopsis thaliana]
  misc_feature (1)..(74): Homolog of NCBI NO: 21553446 NR Description: unknown [Arabidopsis thaliana]
  misc_feature (1)..(84): Homolog of NCBI NO: 33088054 NR Description: unknown [Setaria italica]
  misc_feature (1)..(87): Homolog of NCBI NO: 15230905 NR Description: expressed protein [Arabidopsis thaliana]
  misc_feature (1)..(87): Homolog of NCBI NO: 21537173 NR Description: unknown [Arabidopsis thaliana]
  misc_feature (1)..(87): Homolog of NCBI NO: 18405905 NR Description: expressed protein [Arabidopsis thaliana]
MVEKMEVEDEDEEIDDGSVTSKDLKERKRKMSNGSNTDLTEEENGLGSKPNTDDSTRSTSIGFRQNGSRRKSKPRRAAEAVVECNGV

SEQ ID NO: 28898 - DNA, 1559 bp, Arabidopsis thaliana
  misc_feature (1)..(1559): Ceres Seq. ID no. 13487605
  misc_feature: MA Experiment ID: 108595 Result: Up-regulated in Transcription
  misc_feature: MA Experiment 108595 PARAMETER Experiment Name: At_Ler-pi_Ovule_cDNA_P Parameter: Plant Line Value: null
  misc_feature: MA Experiment ID: 20000144 Result: Up-regulated in Transcription
  misc_feature: MA Experiment 20000144 PARAMETER Experiment Name: At_42deg_Heat_cDNA_P Parameter: Temperature (deg C) Value: 42 vs. 22
  misc_feature: MA Experiment 20000144 PARAMETER Experiment Name: At_42deg_Heat_cDNA_P Parameter: Timepoint (hr) Value: 1
  misc_feature: MA Experiment 20000144 PARAMETER Experiment Name: At_42deg_Heat_cDNA_P Parameter: Tissue Value: Aerial
  misc_feature: MA Experiment ID: 20000173 Result: Up-regulated in Transcription
  misc_feature: MA Experiment 20000173 PARAMETER Experiment Name: At_42deg_Heat_P Parameter: Age (day) Value: 14
  misc_feature: MA Experiment 20000173 PARAMETER Experiment Name: At_42deg_Heat_P Parameter: Organism Value: A. thaliana
  misc_feature: MA Experiment 20000173 PARAMETER Experiment Name: At_42deg_Heat_P Parameter: Plant Line Value: WS
  misc_feature: MA Experiment 20000173 PARAMETER Experiment Name: At_42deg_Heat_P Parameter: Temperature (deg C) Value: 42 vs. 22
  misc_feature: MA Experiment 20000173 PARAMETER Experiment Name: At_42deg_Heat_P Parameter: Timepoint (hr) Value: 6
  misc_feature: MA Experiment 20000173 PARAMETER Experiment Name: At_42deg_Heat_P Parameter: Tissue Value: Aerial
  misc_feature: MA Experiment ID: 20000437 Result: Up-regulated in Transcription
  misc_feature: MA Experiment 20000437 PARAMETER Experiment Name: At_Drought_P Parameter: Age (day) Value: 8
  misc_feature: MA Experiment 20000437 PARAMETER Experiment Name: At_Drought_P Parameter: Organism Value: A. thaliana
  misc_feature: MA Experiment 20000437 PARAMETER Experiment Name: At_Drought_P Parameter: Plant Line Value: WS
  misc_feature: MA Experiment 20000437 PARAMETER Experiment Name: At_Drought_P Parameter: Timepoint (hr) Value: 24
  misc_feature: MA Experiment 20000437 PARAMETER Experiment Name: At_Drought_P Parameter: Tissue Value: Whole Plant
  misc_feature: MA Experiment 20000437 PARAMETER Experiment Name: At_Drought_P Parameter: Treatment Value: Drought vs. No Drought
  misc_feature: MA Experiment ID: 20001905 Result: Up-regulated in Transcription
  misc_feature: MA Experiment 20001905 PARAMETER Experiment Name: At_Drought_Reproduction_P Parameter: Age (day) Value: 40
  misc_feature: MA Experiment 20001905 PARAMETER Experiment Name: At_Drought_Reproduction_P Parameter: Organism Value: A. thaliana
  misc_feature: MA Experiment 20001905 PARAMETER Experiment Name: At_Drought_Reproduction_P Parameter: Plant Line Value: WS
  misc_feature: MA Experiment 20001905 PARAMETER Experiment Name: At_Drought_Reproduction_P Parameter: Timepoint (day) Value: 10
  misc_feature: MA Experiment 20001905 PARAMETER Experiment Name: At_Drought_Reproduction_P Parameter: Tissue Value: Rosettes
  misc_feature: MA Experiment 20001905 PARAMETER Experiment Name: At_Drought_Reproduction_P Parameter: Treatment Value: Drought vs. No Drought
  misc_feature: Phenotype: ROSETTE LEAVES Shape-Oval
  misc_feature: Phenotype: ROSETTE LEAVES Shape-Oval
  misc_feature: Phenotype: ROSETTE LEAVES Wax-Glossy
  misc_feature: Phenotype: WHOLE PLANT Size-Small
  misc_feature: Phenotype: INFLORESCENCE Flowering Time-Late Flowering
  misc_feature: Phenotype: INFLORESCENCE Height-Short
  misc_feature: Phenotype: ROSETTE LEAVES Curled-Curled 3
  misc_feature: Phenotype: ROSETTE LEAVES Shape-Oval
  misc_feature: Phenotype: ROSETTE LEAVES Shape-Serrate
  misc_feature: Phenotype: INFLORESCENCE Flowering Time-Late Flowering
  misc_feature: Phenotype: INFLORESCENCE Height-Short
  misc_feature: Phenotype: ROSETTE LEAVES Curled-Curled 3
  misc_feature: Phenotype: ROSETTE LEAVES Shape-Oval
  misc_feature: Phenotype: ROSETTE LEAVES Shape-Serrate
  misc_feature: Phenotype: INFLORESCENCE Flowering Time-Late Flowering
  misc_feature: Phenotype: INFLORESCENCE Height-Short
  misc_feature: Phenotype: ROSETTE LEAVES Shape-Serrate
  misc_feature: Phenotype: ROSETTE LEAVES Other
  misc_feature: Phenotype: WHOLE PLANT Size-Large
  misc_feature: Phenotype: ROSETTE LEAVES Petiole Length-Short Petioles
  misc_feature: Phenotype: ROSETTE LEAVES Shape-Oval
  misc_feature: Phenotype: WHOLE PLANT Size-Large
  misc_feature: Phenotype: WHOLE PLANT Size-Large
  misc_feature: Phenotype: ROSETTE LEAVES Petiole Length-Short Petioles
  misc_feature: Phenotype: ROSETTE LEAVES Shape-Oval
  misc_feature: Phenotype: WHOLE PLANT Size-Large
  misc_feature: Phenotype: ROSETTE LEAVES Petiole Length-Short Petioles
  misc_feature: Phenotype: ROSETTE LEAVES Shape-Oval
  misc_feature: Phenotype: INFLORESCENCE Flowering Time-Late Flowering
  misc_feature: Phenotype: ROSETTE LEAVES Shape-Oval
  misc_feature: Phenotype: INFLORESCENCE Flowering Time-Late Flowering
  misc_feature: Phenotype: ROSETTE LEAVES Disorganized Rosette-Disorganized Rosette
  misc_feature: Phenotype: ROSETTE LEAVES Other
  misc_feature: Phenotype: INFLORESCENCE Flowering Time-Late Flowering
  misc_feature: Phenotype: ROSETTE LEAVES Shape-Oval
  misc_feature: Phenotype: ROSETTE LEAVES Shape-Oval
  misc_feature: Phenotype: WHOLE PLANT Size-Small
  misc_feature: Phenotype: INFLORESCENCE Flowering Time-Late Flowering
  misc_feature: Phenotype: INFLORESCENCE Height-Short
  misc_feature: Phenotype: ROSETTE LEAVES Curled-Curled 2
tgatgaaaaaaaaagctttgaaattctctctcgacaatggtgtcggaccaggatctagcgaaaggagtcgagactttgcttcgacaatccgaccctagctctctcacatcgttaagcagtattgttcagcagcttgaagctaagttagggttagacctcacggagaagacgactttcatcagagatcagatcaatatcctcctccgtgctcaccaaaacccttctgcctccgtcgcctccgcttcatccgtacaacaatctcaccctcctcctccgccgtcttctcaccagcagcagaatttgcattccggcgtcaatgttcctccgatggcgaaagggcatttcacacttagccatccttcgcaattctctgtttcttctcaatcacaacaatatccttcacatttcgctcttcagcctccttatcactcttatgacctaaatttccggcagccttatccggtttacatgccgccgcaacagcaccagcatcagcagcagtctccgcgacaacaacaatcctctgtgatgctctcacatggcgggaatgcttctctatctgttaatcaagccccaaaagaaagtgctccggctggaactaaaagaaagggtggtcctggaggactaaacaaagtctgtagggtttctccagaacttgaagtagttgttggtgaacctgctcttcctagaactgagattgtgaggcaattgtgggcttatataaggaagaataaccttcaagacccgagtaacaagcggaagatcatctgtgatgatgcgttgcgtgtggtttttgagactgattgcactgacatgttcaagatgaataagttgcttgctaagcatattctcccgcttgatccatcaaaggactctggtcaagcaaaaaaggcaaaaactgaggtggagactaagactgagaccaccgagcctattagttcaactgctattagttcaactgttacattatctgagccacttggtaagttctttggcactggtgagacggagatggcagacgaagagattattcgccgtgtttgggaatacataaaactcaacaatttagaggacccagtaaatccaatggctattcagtgtgatgaaaagctccgagatcttcttggatgtgaaagcatttcagctgtggggataaatgagatgctgaggcgccatatgtacaagcagtcgtgatatcttctggtctgacttaattaactaggaactactagtgtgtgtatctagggaacctacttatgactccttgctgtagaactctgatagggaagaaaagatccttttcacttttaacttcctttaatgctattttaatcttccgttgggttctttgttttagttggttgtgtatcgacatgcttaggttgatgttgtatttagtattgtaccgaaactctagtgttaagggtgaaacggcgcagatgttttgtattaaacgccattcacccatgaatgtcttaggaaaaaaaaactcatgtgtttaactatgttttccctgttggaaatatttgcatcctactgatagaaaaatcttattccct

SEQ ID NO: 28899 - protein, 385 aa, Arabidopsis thaliana
  peptide (1)..(385): Ceres Seq. ID no. 13487606
  misc_feature (280)..(382): Homolog of NCBI NO: 15222765 NR Description: hypothetical protein [Arabidopsis thaliana]
  misc_feature (175)..(298): Homolog of NCBI NO: 15222765 NR Description: hypothetical protein [Arabidopsis thaliana]
  misc_feature (1)..(59): Homolog of NCBI NO: 9280327 NR Description: gb|AAD43149.1~gene_id:K13E13.21~strong similarity
  misc_feature (181)..(383): Homolog of NCBI NO: 9280327 NR Description: gb|AAD43149.1~gene_id:K13E13.21~strong similarity
  misc_feature (1)..(59): Homolog of NCBI NO: 15230276 NR Description: hypothetical protein [Arabidopsis thaliana]
  misc_feature (189)..(383): Homolog of NCBI NO: 15230276 NR Description: hypothetical protein [Arabidopsis thaliana]
  misc_feature (169)..(385): Homolog of NCBI NO: 32488657 NR Description: OSJNBa0087O24.7 [Oryza sativa (japonica
  misc_feature (1)..(345): Homolog of NCBI NO: 7486830 NR Description: hypothetical protein T10I14.190 - Arabidopsis
  misc_feature (1)..(385): Homolog of NCBI NO: 21537175 NR Description: unknown [Arabidopsis thaliana]
  misc_feature (1)..(385): Homolog of NCBI NO: 18415906 NR Description: expressed protein [Arabidopsis thaliana]
MVSDQDLAKGVETLLRQSDPSSLTSLSSIVQQLEAKLGLDLTEKTTFIRDQINILLRAHQNPSASVASASSVQQSHPPPPPSSHQQQNLHSGVNVPPMAKGHFTLSHPSQFSVSSQSQQYPSHFALQPPYHSYDLNFRQPYPVYMPPQQHQHQQQSPRQQQSSVMLSHGGNASLSVNQAPKESAPAGTKRKGGPGGLNKVCRVSPELEVVVGEPALPRTEIVRQLWAYIRKNNLQDPSNKRKIICDDALRVVFETDCTDMFKMNKLLAKHILPLDPSKDSGQAKKAKTEVETKTETTEPISSTAISSTVTLSEPLGKFFGTGETEMADEEIIRRVWEYIKLNNLEDPVNPMAIQCDEKLRDLLGCESISAVGINEMLRRHMYKQS

SEQ ID NO: 28900 - protein, 288 aa, Arabidopsis thaliana
  peptide (1)..(288): Ceres Seq. ID no. 13487607
  misc_feature (183)..(285): Homolog of NCBI NO: 25405318 NR Description: hypothetical protein F13F21.4 [imported] -
  misc_feature (78)..(201): Homolog of NCBI NO: 25405318 NR Description: hypothetical protein F13F21.4 [imported] -
  misc_feature (183)..(285): Homolog of NCBI NO: 15222765 NR Description: hypothetical protein [Arabidopsis thaliana]
  misc_feature (78)..(201): Homolog of NCBI NO: 15222765 NR Description: hypothetical protein [Arabidopsis thaliana]
  misc_feature (84)..(286): Homolog of NCBI NO: 9280327 NR Description: gb|AAD43149.1~gene_id:K13E13.21~strong similarity
  misc_feature (92)..(286): Homolog of NCBI NO: 15230276 NR Description: hypothetical protein [Arabidopsis thaliana]
  misc_feature (72)..(288): Homolog of NCBI NO: 32488657 NR Description: OSJNBa0087O24.7 [Oryza sativa (japonica
  misc_feature (1)..(248): Homolog of NCBI NO: 7486830 NR Description: hypothetical protein T10I14.190 - Arabidopsis
  misc_feature (1)..(288): Homolog of NCBI NO: 21537175 NR Description: unknown [Arabidopsis thaliana]
  misc_feature (1)..(288): Homolog of NCBI NO: 18415906 NR Description: expressed protein [Arabidopsis thaliana]
MAKGHFTLSHPSQFSVSSQSQQYPSHFALQPPYHSYDLNFRQPYPVYMPPQQHQHQQQSPRQQQSSVMLSHGGNASLSVNQAPKESAPAGTKRKGGPGGLNKVCRVSPELEVVVGEPALPRTEIVRQLWAYIRKNNLQDPSNKRKIICDDALRVVFETDCTDMFKMNKLLAKHILPLDPSKDSGQAKKAKTEVETKTETTEPISSTAISSTVTLSEPLGKFFGTGETEMADEEIIRRVWEYIKLNNLEDPVNPMAIQCDEKLRDLLGCESISAVGINEMLRRHMYKQS

SEQ ID NO: 28901 - protein, 241 aa, Arabidopsis thaliana
  peptide (1)..(241): Ceres Seq. ID no. 13487608
  misc_feature (136)..(238): Homolog of NCBI NO: 25405318 NR Description: hypothetical protein F13F21.4 [imported] -
  misc_feature (31)..(154): Homolog of NCBI NO: 25405318 NR Description: hypothetical protein F13F21.4 [imported] -
  misc_feature (136)..(238): Homolog of NCBI NO: 15222765 NR Description: hypothetical protein [Arabidopsis thaliana]
  misc_feature (31)..(154): Homolog of NCBI NO: 15222765 NR Description: hypothetical protein [Arabidopsis thaliana]
  misc_feature (37)..(239): Homolog of NCBI NO: 9280327 NR Description: gb|AAD43149.1~gene_id:K13E13.21~strong similarity
  misc_feature (45)..(239): Homolog of NCBI NO: 15230276 NR Description: hypothetical protein [Arabidopsis thaliana]
  misc_feature (25)..(241): Homolog of NCBI NO: 32488657 NR Description: OSJNBa0087O24.7 [Oryza sativa (japonica
  misc_feature (1)..(201): Homolog of NCBI NO: 7486830 NR Description: hypothetical protein T10I14.190 - Arabidopsis
  misc_feature (1)..(241): Homolog of NCBI NO: 21537175 NR Description: unknown [Arabidopsis thaliana]
  misc_feature (1)..(241): Homolog of NCBI NO: 18415906 NR Description: expressed protein [Arabidopsis thaliana]
MPPQQHQHQQQSPRQQQSSVMLSHGGNASLSVNQAPKESAPAGTKRKGGPGGLNKVCRVSPELEVVVGEPALPRTEIVRQLWAYIRKNNLQDPSNKRKIICDDALRVVFETDCTDMFKMNKLLAKHILPLDPSKDSGQAKKAKTEVETKTETTEPISSTAISSTVTLSEPLGKFFGTGETEMADEEIIRRVWEYIKLNNLEDPVNPMAIQCDEKLRDLLGCESISAVGINEMLRRHMYKQS

SEQ ID NO: 28902 - DNA, 876 bp, Arabidopsis thaliana
  misc_feature (1)..(876): Ceres Seq. ID no. 12372150
  misc_feature: MA Experiment ID: 108434 Result: Up-regulated in Transcription
  misc_feature: MA Experiment 108434 PARAMETER Experiment Name: At_Root_Tips_cDNA_P Parameter: Tissue Value: Root Tips
  misc_feature: MA Experiment ID: 108462 Result: Down-regulated in Transcription
  misc_feature: MA Experiment 108462 PARAMETER Experiment Name: At_Germinating_Seeds_cDNA_P Parameter: Age (day) Value: 2 vs. 0
  misc_feature: MA Experiment 108462 PARAMETER Experiment Name: At_Germinating_Seeds_cDNA_P Parameter: Tissue Value: Germinating Seeds
  misc_feature: MA Experiment ID: 108463 Result: Down-regulated in Transcription
  misc_feature: MA Experiment 108463 PARAMETER Experiment Name: At_Germinating_Seeds_cDNA_P Parameter: Age (day) Value: 3 vs. 0
  misc_feature: MA Experiment 108463 PARAMETER Experiment Name: At_Germinating_Seeds_cDNA_P Parameter: Tissue Value: Germinating Seeds
  misc_feature: MA Experiment ID: 108561 Result: Down-regulated in Transcription
  misc_feature: MA Experiment 108561 PARAMETER Experiment Name: At_100uM_ABA_cDNA_P Parameter: Timepoint (hr) Value: 6
  misc_feature: MA Experiment 108561 PARAMETER Experiment Name: At_100uM_ABA_cDNA_P Parameter: Tissue Value: Aerial
  misc_feature: MA Experiment 108561 PARAMETER Experiment Name: At_100uM_ABA_cDNA_P Parameter: Treatment Value: 100uM ABA vs. No Treatment
  misc_feature: MA Experiment ID: 108585 Result: Down-regulated in Transcription
  misc_feature: MA Experiment 108585 PARAMETER Experiment Name: At_5mM_NaNP_cDNA_P Parameter: Timepoint (hr) Value: 6
  misc_feature: MA Experiment 108585 PARAMETER Experiment Name: At_5mM_NaNP_cDNA_P Parameter: Tissue Value: Aerial
  misc_feature: MA Experiment 108585 PARAMETER Experiment Name: At_5mM_NaNP_cDNA_P Parameter: Treatment Value: null
  misc_feature: MA Experiment ID: 108595 Result: Down-regulated in Transcription
  misc_feature: MA Experiment 108595 PARAMETER Experiment Name: At_Ler-pi_Ovule_cDNA_P Parameter: Plant Line Value: null
aatcattttgaagcagaaatcgatttccaaaatggctcttgttcaatccagaacttttccacacctcaacactccgttatcgccgattctatcctccctccatgctccgtcttctctctttatccggagggaaatccgaccggtagccgcgccgttctcctcctccaccgccggaaacttgcccttctcgccgttgacgcgtccgcgaaagcttctctgtcctccgcctcgcggcaagtttgtcagagaagattatcttgtgaagaaattgtcagctcaagaacttcaggaactggtgaaaggagataggaaggtgccgttgattgttgatttttatgcgacatggtgtggaccttgtatcttgatggcccaggaactagaaatgcttgcagtagagtatgagagcaatgcaataatcgtgaaagttgatacagatgatgagtacgagtttgcacgcgacatgcaggttcgagggttacctacattattcttcatcagtcctgacccaagcaaagatgcaatcaggacagaagggctaattccgttacagatgatgcacgatatcattgacaacgagatgtgaagtttttactgagaaaacacttttgtactctatgatttgaaaagaatcgtcgtaatttaggactggtaccgagttgtttgcatttgagatgtggtaagaatgtcatctaggtttcatagttgaagaatgtagtcttaagacatttgtttgtatgcactgttagtttccatacctaagtgaaaaggttagagctgttgatctggtcagatccaagttatgaggcacaactaaatctcggtccggtccatgtaatactgtagcttaaacttgaatgagagagatatgacgtcttt

SEQ ID NO: 28903 - protein, 193 aa, Arabidopsis thaliana
  peptide (1)..(193): Ceres Seq. ID no. 12372151
  misc_feature (104)..(190): Homolog of NCBI NO: 1093914 NR Description: thioredoxin
  misc_feature (104)..(190): Homolog of NCBI NO: 628902 NR Description: thioredoxin - Chloroflexus aurantiacus
  misc_feature (31)..(190): Homolog of NCBI NO: 21354 NR Description: thioredoxin M precursor (AA -67 to 114) [Spinacia
  misc_feature (83)..(168): Homolog of NCBI NO: 15594407 NR Description: thioredoxin (trxA) [Borrelia burgdorferi]
  misc_feature (100)..(190): Homolog of NCBI NO: 29346866 NR Description: thioredoxin (TRX) [Bacteroides thetaiotaomicron
  misc_feature (92)..(185): Homolog of NCBI NO: 21673615 NR Description: thioredoxin [Chlorobium tepidum TLS]
  misc_feature (75)..(193): Homolog of NCBI NO: 34904898 NR Description: similar to thioredoxin [Oryza sativa (japonica
  misc_feature (69)..(193): Homolog of NCBI NO: 8489792 NR Description: putative thioredoxin [Lycopersicon esculentum]
  misc_feature (11)..(193): Homolog of NCBI NO: 21537179 NR Description: thioredoxin, putative [Arabidopsis thaliana]
  misc_feature (11)..(193): Homolog of NCBI NO: 15230779 NR Description: thioredoxin, putative
IILKQKSISKMALVQSRTFPHLNTPLSPILSSLHAPSSLFIRREIRPVAAPFSSSTAGNLPFSPLTRPRKLLCPPPRGKFVREDYLVKKLSAQELQELVKGDRKVPLIVDFYATWCGPCILMAQELEMLAVEYESNAIIVKVDTDDEYEFARDMQVRGLPTLFFISPDPSKDAIRTEGLIPLQMMHDIIDNEM

SEQ ID NO: 28904 - protein, 183 aa, Arabidopsis thaliana
  peptide (1)..(183): Ceres Seq. ID no. 12372152
  misc_feature (94)..(180): Homolog of NCBI NO: 1093914 NR Description: thioredoxin
  misc_feature (94)..(180): Homolog of NCBI NO: 628902 NR Description: thioredoxin - Chloroflexus aurantiacus
  misc_feature (21)..(180): Homolog of NCBI NO: 21354 NR Description: thioredoxin M precursor (AA -67 to 114) [Spinacia
  misc_feature (73)..(158): Homolog of NCBI NO: 15594407 NR Description: thioredoxin (trxA) [Borrelia burgdorferi]
  misc_feature (90)..(180): Homolog of NCBI NO: 29346866 NR Description: thioredoxin (TRX) [Bacteroides thetaiotaomicron
  misc_feature (82)..(175): Homolog of NCBI NO: 21673615 NR Description: thioredoxin [Chlorobium tepidum TLS]
  misc_feature (65)..(183): Homolog of NCBI NO: 34904898 NR Description: similar to thioredoxin [Oryza sativa (japonica
  misc_feature (59)..(183): Homolog of NCBI NO: 8489792 NR Description: putative thioredoxin [Lycopersicon esculentum]
  misc_feature (1)..(183): Homolog of NCBI NO: 21537179 NR Description: thioredoxin, putative [Arabidopsis thaliana]
  misc_feature (1)..(183): Homolog of NCBI NO: 15230779 NR Description: thioredoxin, putative
MALVQSRTFPHLNTPLSPILSSLHAPSSLFIRREIRPVAAPFSSSTAGNLPFSPLTRPRKLLCPPPRGKFVREDYLVKKLSAQELQELVKGDRKVPLIVDFYATWCGPCILMAQELEMLAVEYESNAIIVKVDTDDEYEFARDMQVRGLPTLFFISPDPSKDAIRTEGLIPLQMMHDIIDNEM

SEQ ID NO: 28905 - protein, 102 aa, Arabidopsis thaliana
  peptide (1)..(102): Ceres Seq. ID no. 12372153
NHFEAEIDFQNGSCSIQNFSTPQHSVIADSILPPCSVFSLYPEGNPTGSRAVLLLHRRKLALLAVDASAKASLSSASRQVCQRRLSCEEIVSSRTSGTGERR

SEQ ID NO: 28906 - DNA, 1171 bp, Arabidopsis thaliana
  misc_feature (1)..(1171): Ceres Seq. ID no. 12397135
  misc_feature: MA Experiment ID: 108595 Result: Down-regulated in Transcription
  misc_feature: MA Experiment 108595 PARAMETER Experiment Name: At_Ler-pi_Ovule_cDNA_P Parameter: Plant Line Value: null
  misc_feature: MA Experiment ID: 108668 Result: Down-regulated in Transcription
  misc_feature: MA Experiment 108668 PARAMETER Experiment Name: At_2mM_SA_cDNA_P Parameter: Plant Line Value: WS
  misc_feature: MA Experiment 108668 PARAMETER Experiment Name: At_2mM_SA_cDNA_P Parameter: Timepoint (hr) Value: 6
  misc_feature: MA Experiment 108668 PARAMETER Experiment Name: At_2mM_SA_cDNA_P Parameter: Treatment Value: 2mM SA vs. No Treatment
  misc_feature: MA Experiment ID: 20000180 Result: Up-regulated in Transcription
  misc_feature: MA Experiment 20000180 PARAMETER Experiment Name: At_Germinating_Seeds_P Parameter: Age (hr) Value: 24 vs. 0
  misc_feature: MA Experiment 20000180 PARAMETER Experiment Name: At_Germinating_Seeds_P Parameter: Tissue Value: Germinating Seeds
  misc_feature: MA Experiment ID: 20000182 Result: Down-regulated in Transcription
  misc_feature: MA Experiment 20000182 PARAMETER Experiment Name: At_2mM_SA_P Parameter: Age (day) Value: 14
  misc_feature: MA Experiment 20000182 PARAMETER Experiment Name: At_2mM_SA_P Parameter: Organism Value: A. thaliana
  misc_feature: MA Experiment 20000182 PARAMETER Experiment Name: At_2mM_SA_P Parameter: Plant Line Value: WS
  misc_feature: MA Experiment 20000182 PARAMETER Experiment Name: At_2mM_SA_P Parameter: Timepoint (hr) Value: 6
  misc_feature: MA Experiment 20000182 PARAMETER Experiment Name: At_2mM_SA_P Parameter: Tissue Value: Aerial
  misc_feature: MA Experiment 20000182 PARAMETER Experiment Name: At_2mM_SA_P Parameter: Treatment Value: 2mM SA vs. No Treatment
  misc_feature: MA Experiment ID: 20000185 Result: Down-regulated in Transcription
  misc_feature: MA Experiment 20000185 PARAMETER Experiment Name: At_Roots__P Parameter: Age (day) Value: 7 vs. 21
  misc_feature: MA Experiment 20000185 PARAMETER Experiment Name: At_Roots__P Parameter: Organism Value: A. thaliana
  misc_feature: MA Experiment 20000185 PARAMETER Experiment Name: At_Roots__P Parameter: Tissue Value: Roots vs. Whole Plant
  misc_feature: MA Experiment ID: 20000264 Result: Down-regulated in Transcription
  misc_feature: MA Experiment 20000264 PARAMETER Experiment Name: At_Open_Flower_P Parameter: Age (day) Value: 21
  misc_feature: MA Experiment 20000264 PARAMETER Experiment Name: At_Open_Flower_P Parameter: Plant Line Value: WS
  misc_feature: MA Experiment 20000264 PARAMETER Experiment Name: At_Open_Flower_P Parameter: Tissue Value: Open Flower vs. Whole Plant
  misc_feature: MA Experiment ID: 20000286 Result: Down-regulated in Transcription
  misc_feature: MA Experiment 20000286 PARAMETER Experiment Name: At_Open_Flower_P Parameter: Age (day) Value: 21
  misc_feature: MA Experiment 20000286 PARAMETER Experiment Name: At_Open_Flower_P Parameter: Plant Line Value: WS
  misc_feature: MA Experiment 20000286 PARAMETER Experiment Name: At_Open_Flower_P Parameter: Tissue Value: Half Open vs. Whole Plant
  misc_feature: MA Experiment ID: 20000436 Result: Down-regulated in Transcription
  misc_feature: MA Experiment 20000436 PARAMETER Experiment Name: At_Drought_P Parameter: Age (day) Value: 7
  misc_feature: MA Experiment 20000436 PARAMETER Experiment Name: At_Drought_P Parameter: Organism Value: A. thaliana
  misc_feature: MA Experiment 20000436 PARAMETER Experiment Name: At_Drought_P Parameter: Plant Line Value: WS
  misc_feature: MA Experiment 20000436 PARAMETER Experiment Name: At_Drought_P Parameter: Timepoint (hr) Value: 12
  misc_feature: MA Experiment 20000436 PARAMETER Experiment Name: At_Drought_P Parameter: Tissue Value: Whole Plant
  misc_feature: MA Experiment 20000436 PARAMETER Experiment Name: At_Drought_P Parameter: Treatment Value: Drought vs. No Drought
  misc_feature: MA Experiment ID: 20000437 Result: Down-regulated in Transcription
  misc_feature: MA Experiment 20000437 PARAMETER Experiment Name: At_Drought_P Parameter: Age (day) Value: 8
  misc_feature: MA Experiment 20000437 PARAMETER Experiment Name: At_Drought_P Parameter: Organism Value: A. thaliana
  misc_feature: MA Experiment 20000437 PARAMETER Experiment Name: At_Drought_P Parameter: Plant Line Value: WS
  misc_feature: MA Experiment 20000437 PARAMETER Experiment Name: At_Drought_P Parameter: Timepoint (hr) Value: 24
  misc_feature: MA Experiment 20000437 PARAMETER Experiment Name: At_Drought_P Parameter: Tissue Value: Whole Plant
  misc_feature: MA Experiment 20000437 PARAMETER Experiment Name: At_Drought_P Parameter: Treatment Value: Drought vs. No Drought
  misc_feature: MA Experiment ID: 20000439 Result: Down-regulated in Transcription
  misc_feature: MA Experiment 20000439 PARAMETER Experiment Name: At_Roots__P Parameter: Age (day) Value: 14 vs. 21
  misc_feature: MA Experiment 20000439 PARAMETER Experiment Name: At_Roots__P Parameter: Organism Value: A. thaliana
  misc_feature: MA Experiment 20000439 PARAMETER Experiment Name: At_Roots__P Parameter: Tissue Value: Roots vs. Whole Plant
  misc_feature: MA Experiment ID: 20000794 Result: Down-regulated in Transcription
  misc_feature: MA Experiment 20000794 PARAMETER Experiment Name: At_Petals_P Parameter: Age (day) Value: 23-25 days
  misc_feature: MA Experiment 20000794 PARAMETER Experiment Name: At_Petals_P Parameter: Plant Line Value: WS
  misc_feature: MA Experiment 20000794 PARAMETER Experiment Name: At_Petals_P Parameter: Tissue Value: Petals vs. Whole plant
  misc_feature: MA Experiment ID: 20001757 Result: Up-regulated in Transcription
  misc_feature: MA Experiment 20001757 PARAMETER Experiment Name: At_50mM_NH4NO3_L-to-H_P Parameter: Timepoint (hr) Value: 6
  misc_feature: MA Experiment 20001757 PARAMETER Experiment Name: At_50mM_NH4NO3_L-to-H_P Parameter: Tissue Value: Leaf
  misc_feature: MA Experiment 20001757 PARAMETER Experiment Name: At_50mM_NH4NO3_L-to-H_P Parameter: Treatment Value: 50mM NH4NO3 vs 100mM Mannitol
  misc_feature: MA Experiment ID: 20001905 Result: Down-regulated in Transcription
  misc_feature: MA Experiment 20001905 PARAMETER Experiment Name: At_Drought_Reproduction_P Parameter: Age (day) Value: 40
  misc_feature: MA Experiment 20001905 PARAMETER Experiment Name: At_Drought_Reproduction_P Parameter: Organism Value: A. thaliana
  misc_feature: MA Experiment 20001905 PARAMETER Experiment Name: At_Drought_Reproduction_P Parameter: Plant Line Value: WS
  misc_feature: MA Experiment 20001905 PARAMETER Experiment Name: At_Drought_Reproduction_P Parameter: Timepoint (day) Value: 10
  misc_feature: MA Experiment 20001905 PARAMETER Experiment Name: At_Drought_Reproduction_P Parameter: Tissue Value: Rosettes
  misc_feature: MA Experiment 20001905 PARAMETER Experiment Name: At_Drought_Reproduction_P Parameter: Treatment Value: Drought vs. No Drought
  misc_feature: MA Experiment ID: 20001906 Result: Down-regulated in Transcription
  misc_feature: MA Experiment 20001906 PARAMETER Experiment Name: At_Drought_Reproduction_P Parameter: Age (day) Value: 35
  misc_feature: MA Experiment 20001906 PARAMETER Experiment Name: At_Drought_Reproduction_P Parameter: Organism Value: A. thaliana
  misc_feature: MA Experiment 20001906 PARAMETER Experiment Name: At_Drought_Reproduction_P Parameter: Plant Line Value: WS
  misc_feature: MA Experiment 20001906 PARAMETER Experiment Name: At_Drought_Reproduction_P Parameter: Timepoint (day) Value: 5
  misc_feature: MA Experiment 20001906 PARAMETER Experiment Name: At_Drought_Reproduction_P Parameter: Tissue Value: Siliques
  misc_feature: MA Experiment 20001906 PARAMETER Experiment Name: At_Drought_Reproduction_P Parameter: Treatment Value: Drought vs. No Drought
  misc_feature: MA Experiment ID: 20001907 Result: Down-regulated in Transcription
  misc_feature: MA Experiment 20001907 PARAMETER Experiment Name: At_Drought_Reproduction_P Parameter: Age (day) Value: 37
  misc_feature: MA Experiment 20001907 PARAMETER Experiment Name: At_Drought_Reproduction_P Parameter: Organism Value: A. thaliana
  misc_feature: MA Experiment 20001907 PARAMETER Experiment Name: At_Drought_Reproduction_P Parameter: Plant Line Value: WS
  misc_feature: MA Experiment 20001907 PARAMETER Experiment Name: At_Drought_Reproduction_P Parameter: Timepoint (day) Value: 7
  misc_feature: MA Experiment 20001907 PARAMETER Experiment Name: At_Drought_Reproduction_P Parameter: Tissue Value: Siliques
  misc_feature: MA Experiment 20001907 PARAMETER Experiment Name: At_Drought_Reproduction_P Parameter: Treatment Value: Drought vs. No Drought
  misc_feature: MA Experiment ID: 20001911 Result: Down-regulated in Transcription
  misc_feature: MA Experiment 20001911 PARAMETER Experiment Name: At_Drought_Reproduction_P Parameter: Age (day) Value: 40
  misc_feature: MA Experiment 20001911 PARAMETER Experiment Name: At_Drought_Reproduction_P Parameter: Organism Value: A. thaliana
  misc_feature: MA Experiment 20001911 PARAMETER Experiment Name: At_Drought_Reproduction_P Parameter: Plant Line Value: WS
  misc_feature: MA Experiment 20001911 PARAMETER Experiment Name: At_Drought_Reproduction_P Parameter: Timepoint (day) Value: 10
  misc_feature: MA Experiment 20001911 PARAMETER Experiment Name: At_Drought_Reproduction_P Parameter: Tissue Value: Flowers
  misc_feature: MA Experiment 20001911 PARAMETER Experiment Name: At_Drought_Reproduction_P Parameter: Treatment Value: Drought vs. No Drought
aagaagaaaaaacttgttcgaggcttcgaagaatgtcgatgttaatggctgtcaaaacaacttcactctgttgtagcagcttaaaccttacagcttcaccaacattccgacggaacccacgcgcggcgagattggtgaatccgacagcgagaatccaaacacgttttcatcgcctgattgaagaacaaggcattgtgcttatgcctggatgctacgatgccttatccgcggctattgtgcagcaaaccggattctccgctggttttatatccggttacgccttatccgcttctctcctgggaaaacccgatttcggtttgctaacaccaccggagatggctgcgacggcaaggtcggtgtgtgcgtcagctcctaatatacccatcattgcagatgctgataccggtggaggaaatgcgctaaacattcaaagaaccgtaaaggatttgattgcagctggtgctgctggttgcttccttgaggaccaagcatggccaaagaagtgtggtcatatgcgtggtaaacaggtgataccagcagaagaacatgccgcaaaaatagcatcagctcgagatgctattggagactctgacttcttccttgtcgcaagaacagacgtgcgtgctacttctgcaaaatcagggcttgaagacgccattgcacgtgttaatctatacatggaggcaggagctgatgcttcctttgtagaggcaccaagagacgacgatgagctcaaggaaattggaaaacgcacaaaaggttatagagtttgcaacatgattgaaggaggagtcacaccattacacacgcctgatgagcttaaagaaatgggattccacttgatagttcacccccttaccgcactctatgcatcgactcgagctctggtcgatgttctcaagactcttaaagaaaacggtagcactcgagatcacttgcaaaagatggctacttttgaggaattcaatagtttggtggatttagattcgtggtttgagcttgaagctcgctattcaaacctcagaaacgctcttgggacaaccaaatcatgaagatagggacatttttttttttttttggaactctctcaagcaatggtctcatcaataatgtaactattgccgttgttagaaaaacgtatttaagtatattaatgggccttaatggtgtt

SEQ ID NO: 28907 - protein, 349 aa, Arabidopsis thaliana
  peptide (1)..(349): Ceres Seq. ID no. 12397136
  misc_feature (127)..(205): Pfam Name: Isocitrate lyase family Pfam Description: Isocitrate lyase family
  misc_feature (42)..(325): Homolog of NCBI NO: 16082233 NR Description: probable carboxyphosphonoenolpyruvate
  misc_feature (59)..(339): Homolog of NCBI NO: 18312827 NR Description: carboxyphosphonoenolpyruvate phosphonomutase
  misc_feature (54)..(339): Homolog of NCBI NO: 17229355 NR Description: carboxyphosphonoenolpyruvate phosphonomutase
  misc_feature (54)..(338): Homolog of NCBI NO: 23043034 NR Description: hypothetical protein [Trichodesmium erythraeum
  misc_feature (78)..(348): Homolog of NCBI NO: 25324627 NR Description: F24J8.7 protein - Arabidopsis thaliana
  misc_feature (48)..(339): Homolog of NCBI NO: 6831519 NR Description: PUTATIVE CARBOXYVINYL-CARBOXYPHOSPHONATE (CARBOXYPHOSPHONOENOLPYRUVATE PHOSPHONOMUTASE) (CPEP
  misc_feature (11)..(348): Homolog of NCBI NO: 30687359 NR Description: expressed protein [Arabidopsis thaliana]
  misc_feature (15)..(349): Homolog of NCBI NO: 6831518 NR Description: Putative carboxyvinyl-carboxyphosphonate (Carboxyphosphonoenolpyruvate phosphonomutase) (CPEP
  misc_feature (13)..(349): Homolog of NCBI NO: 18252195 NR Description: putative carboxyphosphonoenolpyruvate mutase
  misc_feature (11)..(349): Homolog of NCBI NO: 18411340 NR Description: carboxyphosphonoenolpyruvate mutase, putative
EEKTCSRLRRMSMLMAVKTTSLCCSSLNLTASPTFRRNPRAARLVNPTARIQTRFHRLIEEQGIVLMPGCYDALSAAIVQQTGFSAGFISGYALSASLLGKPDFGLLTPPEMAATARSVCASAPNIPIIADADTGGGNALNIQRTVKDLIAAGAAGCFLEDQAWPKKCGHMRGKQVIPAEEHAAKIASARDAIGDSDFFLVARTDVRATSAKSGLEDAIARVNLYMEAGADASFVEAPRDDDELKEIGKRTKGYRVCNMIEGGVTPLHTPDELKEMGFHLIVHPLTALYASTRALVDVLKTLKENGSTRDHLQKMATFEEFNSLVDLDSWFELEARYSNLRNALGTTKS

SEQ ID NO: 28908 - protein, 339 aa, Arabidopsis thaliana
  peptide (1)..(339): Ceres Seq. ID no. 12397137
  misc_feature (117)..(195): Pfam Name: Isocitrate lyase family Pfam Description: Isocitrate lyase family
  misc_feature (32)..(315): Homolog of NCBI NO: 16082233 NR Description: probable carboxyphosphonoenolpyruvate
  misc_feature (49)..(329): Homolog of NCBI NO: 18312827 NR Description: carboxyphosphonoenolpyruvate phosphonomutase
  misc_feature (44)..(329): Homolog of NCBI NO: 17229355 NR Description: carboxyphosphonoenolpyruvate phosphonomutase
  misc_feature (44)..(328): Homolog of NCBI NO: 23043034 NR Description: hypothetical protein [Trichodesmium erythraeum
  misc_feature (68)..(338): Homolog of NCBI NO: 25324627 NR Description: F24J8.7 protein - Arabidopsis thaliana
  misc_feature (38)..(329): Homolog of NCBI NO: 6831519 NR Description: PUTATIVE CARBOXYVINYL-CARBOXYPHOSPHONATE (CARBOXYPHOSPHONOENOLPYRUVATE PHOSPHONOMUTASE) (CPEP
  misc_feature (1)..(338): Homolog of NCBI NO: 30687359 NR Description: expressed protein [Arabidopsis thaliana]
  misc_feature (5)..(339): Homolog of NCBI NO: 6831518 NR Description: Putative carboxyvinyl-carboxyphosphonate (Carboxyphosphonoenolpyruvate phosphonomutase) (CPEP
  misc_feature (3)..(339): Homolog of NCBI NO: 18252195 NR Description: putative carboxyphosphonoenolpyruvate mutase
  misc_feature (1)..(339): Homolog of NCBI NO: 18411340 NR Description: carboxyphosphonoenolpyruvate mutase, putative
MSMLMAVKTTSLCCSSLNLTASPTFRRNPRAARLVNPTARIQTRFHRLIEEQGIVLMPGCYDALSAAIVQQTGFSAGFISGYALSASLLGKPDFGLLTPPEMAATARSVCASAPNIPIIADADTGGGNALNIQRTVKDLIAAGAAGCFLEDQAWPKKCGHMRGKQVIPAEEHAAKIASARDAIGDSDFFLVARTDVRATSAKSGLEDAIARVNLYMEAGADASFVEAPRDDDELKEIGKRTKGYRVCNMIEGGVTPLHTPDELKEMGFHLIVHPLTALYASTRALVDVLKTLKENGSTRDHLQKMATFEEFNSLVDLDSWFELEARYSNLRNALGTTKS

SEQ ID NO: 28909 - protein, 337 aa, Arabidopsis thaliana
  peptide (1)..(337): Ceres Seq. ID no. 12397138
  misc_feature (115)..(193): Pfam Name: Isocitrate lyase family Pfam Description: Isocitrate lyase family
  misc_feature (30)..(313): Homolog of NCBI NO: 16082233 NR Description: probable carboxyphosphonoenolpyruvate
  misc_feature (47)..(327): Homolog of NCBI NO: 18312827 NR Description: carboxyphosphonoenolpyruvate phosphonomutase
  misc_feature (42)..(327): Homolog of NCBI NO: 17229355 NR Description: carboxyphosphonoenolpyruvate phosphonomutase
  misc_feature (42)..(326): Homolog of NCBI NO: 23043034 NR Description: hypothetical protein [Trichodesmium erythraeum
  misc_feature (66)..(336): Homolog of NCBI NO: 25324627 NR Description: F24J8.7 protein - Arabidopsis thaliana
  misc_feature (36)..(327): Homolog of NCBI NO: 6831519 NR Description: PUTATIVE CARBOXYVINYL-CARBOXYPHOSPHONATE (CARBOXYPHOSPHONOENOLPYRUVATE PHOSPHONOMUTASE) (CPEP
  misc_feature (1)..(336): Homolog of NCBI NO: 30687359 NR Description: expressed protein [Arabidopsis thaliana]
  misc_feature (3)..(337): Homolog of NCBI NO: 6831518 NR Description: Putative carboxyvinyl-carboxyphosphonate (Carboxyphosphonoenolpyruvate phosphonomutase) (CPEP
  misc_feature (1)..(337): Homolog of NCBI NO: 18252195 NR Description: putative carboxyphosphonoenolpyruvate mutase
  misc_feature (1)..(337): Homolog of NCBI NO: 18411340 NR Description: carboxyphosphonoenolpyruvate mutase, putative
MLMAVKTTSLCCSSLNLTASPTFRRNPRAARLVNPTARIQTRFHRLIEEQGIVLMPGCYDALSAAIVQQTGFSAGFISGYALSASLLGKPDFGLLTPPEMAATARSVCASAPNIPIIADADTGGGNALNIQRTVKDLIAAGAAGCFLEDQAWPKKCGHMRGKQVIPAEEHAAKIASARDAIGDSDFFLVARTDVRATSAKSGLEDAIARVNLYMEAGADASFVEAPRDDDELKEIGKRTKGYRVCNMIEGGVTPLHTPDELKEMGFHLIVHPLTALYASTRALVDVLKTLKENGSTRDHLQKMATFEEFNSLVDLDSWFELEARYSNLRNALGTTKS

SEQ ID NO: 28910 - DNA, 1982 bp, Arabidopsis thaliana
  misc_feature (1)..(1982): Ceres Seq. ID no. 13494341
  misc_feature: MA Experiment ID: 20000173 Result: Down-regulated in Transcription
  misc_feature: MA Experiment 20000173 PARAMETER Experiment Name: At_42deg_Heat_P Parameter: Age (day) Value: 14
  misc_feature: MA Experiment 20000173 PARAMETER Experiment Name: At_42deg_Heat_P Parameter: Organism Value: A. thaliana
  misc_feature: MA Experiment 20000173 PARAMETER Experiment Name: At_42deg_Heat_P Parameter: Plant Line Value: WS
  misc_feature: MA Experiment 20000173 PARAMETER Experiment Name: At_42deg_Heat_P Parameter: Temperature (deg C) Value: 42 vs. 22
  misc_feature: MA Experiment 20000173 PARAMETER Experiment Name: At_42deg_Heat_P Parameter: Timepoint (hr) Value: 6
  misc_feature: MA Experiment 20000173 PARAMETER Experiment Name: At_42deg_Heat_P Parameter: Tissue Value: Aerial
  misc_feature: MA Experiment ID: 20000234 Result: Up-regulated in Transcription
  misc_feature: MA Experiment 20000234 PARAMETER Experiment Name: At_Siliques_P Parameter: Age (day) Value: 21
  misc_feature: MA Experiment 20000234 PARAMETER Experiment Name: At_Siliques_P Parameter: Organism Value: A. thaliana
  misc_feature: MA Experiment 20000234 PARAMETER Experiment Name: At_Siliques_P Parameter: Plant Line Value: WS
  misc_feature: MA Experiment 20000234 PARAMETER Experiment Name: At_Siliques_P Parameter: Tissue Value: Less Than 5mm Siliques vs. Whole Plant
  misc_feature: MA Experiment ID: 20001451 Result: Down-regulated in Transcription
  misc_feature: MA Experiment 20001451 PARAMETER Experiment Name: At_Far-red-induction_P Parameter: Age (day) Value: 7
  misc_feature: MA Experiment 20001451 PARAMETER Experiment Name: At_Far-red-induction_P Parameter: Light Value: Far-red vs. White
  misc_feature: MA Experiment 20001451 PARAMETER Experiment Name: At_Far-red-induction_P Parameter: Organism Value: A. thaliana
  misc_feature: MA Experiment 20001451 PARAMETER Experiment Name: At_Far-red-induction_P Parameter: Plant Line Value: Columbia
  misc_feature: MA Experiment 20001451 PARAMETER Experiment Name: At_Far-red-induction_P Parameter: Timepoint (hr) Value: 24
  misc_feature: MA Experiment 20001451 PARAMETER Experiment Name: At_Far-red-induction_P Parameter: Tissue Value: Whole Plant
gtcttccgttgcgtgagatattattgaacggtgtttgttattcggagaagaagaagaagaagaactgaagaagcatattcgacggtcaccaccaaacctcttccgtcggattttcactctccgtttatcgaacatctgagatctctctccacttccgtcaccgaagatgcattccagtcatcttcttctcgaggagccgatcaggatggcttcaatcctcgagccttccaaatctagtttcttcccggcattgactaagatcgtcggaactctaggtcctaaatcccgatccgtcgaggctctctccggctgtctcaaagccggcatgtctgtggctcgatttgatttctcgtggggagatgctgattatcaccaggagacacttgataatttgaaagttgctgtgaggagcactaagaagctttgtgctgttatgcttgatactgttggacctgagctacaagttattaacaaatctgagaaagctattactttgaaagctgatggccttgtaactttgacaccgaatcaagatcaagaagcttcttctgaagttcttcccattaatttcaatggacttgccaaggcagtgaagaaaggagacaccatcttcgttgggcaatacctattcactggtagtgaaacaacttcagtttggctcgaggttgatgaagttaaaggagatgatgtcatttgcctttcaaggaatgctgctactctggctggttctttgttcactttacactcctctcaagttcacattgatctcccaacgcttacagagaaggataaggaggttataagcacatggggagttcaaaataaaatcgattttctctcattgtcttattgtcgtcatgctgaggatgttcgccagacccgtgaaatgcttaaaaagttgggcgacctctctcaaacacaaatatttgctaagattgagaacgtagagggactaacccacttcgatgagattctacaagaagctgatggcattattctttctcgtgggaatttgggtatagatttacccccggaaaaggtgtttttgtttcaaaaggctgctctttacaagtgcaacatggctggaaagccagctgttcttacccgtgttgttgacagtatgactgacaacttgcgaccaactcgtgctgaggccacggatgttgctaatgctgttttagatggaagtgatgcaattcttcttggtgctgagacccttcgtggattgtaccctgttgagacaatatcaactgttggtaggatctgtgctgaggcagaaaaggttttcaatcaagatttgtactttaagaagactgtcaagtatgttggagaaccaatgactcacttggaatcgattgcttcttcagctgtacgggcagccattaaggttaaggcatccgtaattatatgcttcacctcttctggaagagcagccagattgattgccaaatacaggccaacgatgccggttatttctgttgtcattccccgggttaagacaaatcaactgaaatggagctttagtggagcttttgaggcgaggcagtcacttattgtcagaggcctcttccctatgcttgctgaccctcgtcaccctgcggaatctacaagtgcgacaaacgagtcagtcctgaaggttgctctagaccatgggaagcatgctggagtaatcaagtcgcatgacagagtagtggtgtgtcagaaagttggtgatgcatctgtggttaagatcattgagcttgaggattaacttttgcctcgcaaaaacattatataattggctgcattttgggttgccttgaattgatgataactcccaatgccggagtgaaaatattatctccgggacttctggtttctttttgtatacttaggagatttgatgtctctaaggtttcagctatatttgattaccttcaaatgtacgcatatgataaaagtatacaatgcctagcaattttataataagctgttacattccc

SEQ ID NO: 28911 - protein, 527 aa, Arabidopsis thaliana
  peptide (1)..(527): Ceres Seq. ID no. 13494342
  misc_feature (394)..(524): Pfam Name: Pyruvate kinase, alpha/beta domain Pfam Description: Pyruvate kinase, alpha/beta domain
  misc_feature (54)..(527): Homolog of NCBI NO: 25287747 NR Description: probable pyruvate kinase [imported] - Arabidopsis
  misc_feature (37)..(527): Homolog of NCBI NO: 20562907 NR Description: pyruvate kinase-like [Deschampsia antarctica]
  misc_feature (1)..(527): Homolog of NCBI NO: 23308151 NR Description: At2g36580/F1O11.21 [Arabidopsis thaliana]
  misc_feature (1)..(527): Homolog of NCBI NO: 21537122 NR Description: putative pyruvate kinase [Arabidopsis thaliana]
  misc_feature (1)..(527): Homolog of NCBI NO: 18404169 NR Description: pyruvate kinase, putative [Arabidopsis thaliana]
  misc_feature (14)..(527): Homolog of NCBI NO: 11260409 NR Description: pyruvate kinase-like protein - Arabidopsis
  misc_feature (1)..(527): Homolog of NCBI NO: 18409740 NR Description: pyruvate kinase, putative [Arabidopsis thaliana]
MHSSHLLLEEPIRMASILEPSKSSFFPALTKIVGTLGPKSRSVEALSGCLKAGMSVARFDFSWGDADYHQETLDNLKVAVRSTKKLCAVMLDTVGPELQVINKSEKAITLKADGLVTLTPNQDQEASSEVLPINFNGLAKAVKKGDTIFVGQYLFTGSETTSVWLEVDEVKGDDVICLSRNAATLAGSLFTLHSSQVHIDLPTLTEKDKEVISTWGVQNKIDFLSLSYCRHAEDVRQTREMLKKLGDLSQTQIFAKIENVEGLTHFDEILQEADGIILSRGNLGIDLPPEKVFLFQKAALYKCNMAGKPAVLTRVVDSMTDNLRPTRAEATDVANAVLDGSDAILLGAETLRGLYPVETISTVGRICAEAEKVFNQDLYFKKTVKYVGEPMTHLESIASSAVRAAIKVKASVIICFTSSGRAARLIAKYRPTMPVISVVIPRVKTNQLKWSFSGAFEARQSLIVRGLFPMLADPRHPAESTSATNESVLKVALDHGKHAGVIKSHDRVVVCQKVGDASVVKIIELED

SEQ ID NO: 28912 - protein, 514 aa, Arabidopsis thaliana
  peptide (1)..(514): Ceres Seq. ID no. 13494343
  misc_feature (381)..(511): Pfam Name: Pyruvate kinase, alpha/beta domain Pfam Description: Pyruvate kinase, alpha/beta domain
  misc_feature (41)..(514): Homolog of NCBI NO: 25287747 NR Description: probable pyruvate kinase [imported] - Arabidopsis
  misc_feature (24)..(514): Homolog of NCBI NO: 20562907 NR Description: pyruvate kinase-like [Deschampsia antarctica]
  misc_feature (1)..(514): Homolog of NCBI NO: 23308151 NR Description: At2g36580/F1O11.21 [Arabidopsis thaliana]
  misc_feature (1)..(514): Homolog of NCBI NO: 21537122 NR Description: putative pyruvate kinase [Arabidopsis thaliana]
  misc_feature (1)..(514): Homolog of NCBI NO: 18404169 NR Description: pyruvate kinase, putative [Arabidopsis thaliana]
  misc_feature (1)..(514): Homolog of NCBI NO: 11260409 NR Description: pyruvate kinase-like protein - Arabidopsis
  misc_feature (1)..(514): Homolog of NCBI NO: 18409740 NR Description: pyruvate kinase, putative [Arabidopsis thaliana]
MASILEPSKSSFFPALTKIVGTLGPKSRSVEALSGCLKAGMSVARFDFSWGDADYHQETLDNLKVAVRSTKKLCAVMLDTVGPELQVINKSEKAITLKADGLVTLTPNQDQEASSEVLPINFNGLAKAVKKGDTIFVGQYLFTGSETTSVWLEVDEVKGDDVICLSRNAATLAGSLFTLHSSQVHIDLPTLTEKDKEVISTWGVQNKIDFLSLSYCRHAEDVRQTREMLKKLGDLSQTQIFAKIENVEGLTHFDEILQEADGIILSRGNLGIDLPPEKVFLFQKAALYKCNMAGKPAVLTRVVDSMTDNLRPTRAEATDVANAVLDGSDAILLGAETLRGLYPVETISTVGRICAEAEKVFNQDLYFKKTVKYVGEPMTHLESIASSAVRAAIKVKASVIICFTSSGRAARLIAKYRPTMPVISVVIPRVKTNQLKWSFSGAFEARQSLIVRGLFPMLADPRHPAESTSATNESVLKVALDHGKHAGVIKSHDRVVVCQKVGDASVVKIIELED

SEQ ID NO: 28913 - protein, 474 aa, Arabidopsis thaliana
  peptide (1)..(474): Ceres Seq. ID no. 13494344
  misc_feature (341)..(471): Pfam Name: Pyruvate kinase, alpha/beta domain Pfam Description: Pyruvate kinase, alpha/beta domain
  misc_feature (1)..(474): Homolog of NCBI NO: 25287747 NR Description: probable pyruvate kinase [imported] - Arabidopsis
  misc_feature (1)..(474): Homolog of NCBI NO: 20562907 NR Description: pyruvate kinase-like [Deschampsia antarctica]
  misc_feature (1)..(474): Homolog of NCBI NO: 23308151 NR Description: At2g36580/F1O11.21 [Arabidopsis thaliana]
  misc_feature (1)..(474): Homolog of NCBI NO: 21537122 NR Description: putative pyruvate kinase [Arabidopsis thaliana]
  misc_feature (1)..(474): Homolog of NCBI NO: 18404169 NR Description: pyruvate kinase, putative [Arabidopsis thaliana]
  misc_feature (1)..(474): Homolog of NCBI NO: 11260409 NR Description: pyruvate kinase-like protein - Arabidopsis
  misc_feature (1)..(474): Homolog of NCBI NO: 18409740 NR Description: pyruvate kinase, putative [Arabidopsis thaliana]
MSVARFDFSWGDADYHQETLDNLKVAVRSTKKLCAVMLDTVGPELQVINKSEKAITLKADGLVTLTPNQDQEASSEVLPINFNGLAKAVKKGDTIFVGQYLFTGSETTSVWLEVDEVKGDDVICLSRNAATLAGSLFTLHSSQVHIDLPTLTEKDKEVISTWGVQNKIDFLSLSYCRHAEDVRQTREMLKKLGDLSQTQIFAKIENVEGLTHFDEILQEADGIILSRGNLGIDLPPEKVFLFQKAALYKCNMAGKPAVLTRVVDSMTDNLRPTRAEATDVANAVLDGSDAILLGAETLRGLYPVETISTVGRICAEAEKVFNQDLYFKKTVKYVGEPMTHLESIASSAVRAAIKVKASVIICFTSSGRAARLIAKYRPTMPVISVVIPRVKTNQLKWSFSGAFEARQSLIVRGLFPMLADPRHPAESTSATNESVLKVALDHGKHAGVIKSHDRVVVCQKVGDASVVKIIELED

SEQ ID NO: 28914 - DNA, 1106 bp, Arabidopsis thaliana
  misc_feature (1)..(1106): Ceres Seq. ID no. 12396876
  misc_feature: MA Experiment ID: 108435 Result: Down-regulated in Transcription
  misc_feature: MA Experiment 108435 PARAMETER Experiment Name: At_stm_Mutants_cDNA_P Parameter: Plant Line Value: wt Landsburg vs stm
  misc_feature: MA Experiment 108435 PARAMETER Experiment Name: At_stm_Mutants_cDNA_P Parameter: Tissue Value: Shoot Apical Meristem Region
  misc_feature: MA Experiment ID: 108462 Result: Up-regulated in Transcription
  misc_feature: MA Experiment 108462 PARAMETER Experiment Name: At_Germinating_Seeds_cDNA_P Parameter: Age (day) Value: 2 vs. 0
  misc_feature: MA Experiment 108462 PARAMETER Experiment Name: At_Germinating_Seeds_cDNA_P Parameter: Tissue Value: Germinating Seeds
  misc_feature: MA Experiment ID: 108463 Result: Up-regulated in Transcription
  misc_feature: MA Experiment 108463 PARAMETER Experiment Name: At_Germinating_Seeds_cDNA_P Parameter: Age (day) Value: 3 vs. 0
  misc_feature: MA Experiment 108463 PARAMETER Experiment Name: At_Germinating_Seeds_cDNA_P Parameter: Tissue Value: Germinating Seeds
  misc_feature: MA Experiment ID: 108473 Result: Down-regulated in Transcription
  misc_feature: MA Experiment 108473 PARAMETER Experiment Name: At_Drought_Flowers_cDNA_P Parameter: Timepoint (hr) Value: 7 d
  misc_feature: MA Experiment 108473 PARAMETER Experiment Name: At_Drought_Flowers_cDNA_P Parameter: Tissue Value: Flower
  misc_feature: MA Experiment 108473 PARAMETER Experiment Name: At_Drought_Flowers_cDNA_P Parameter: Treatment Value: Drought vs. No Drought
  misc_feature: MA Experiment ID: 108573 Result: Down-regulated in Transcription
  misc_feature: MA Experiment 108573 PARAMETER Experiment Name: At_Drought_cDNA_P Parameter: Timepoint (hr) Value: 6
  misc_feature: MA Experiment 108573 PARAMETER Experiment Name: At_Drought_cDNA_P Parameter: Tissue Value: Aerial
  misc_feature: MA Experiment 108573 PARAMETER Experiment Name: At_Drought_cDNA_P Parameter: Treatment Value: Drought vs. No Drought
  misc_feature: MA Experiment ID: 108595 Result: Down-regulated in Transcription
  misc_feature: MA Experiment 108595 PARAMETER Experiment Name: At_Ler-pi_Ovule_cDNA_P Parameter: Plant Line Value: null
  misc_feature: MA Experiment ID: 108607 Result: Down-regulated in Transcription
  misc_feature: MA Experiment 108607 PARAMETER Experiment Name: At_100uM_ABA_cDNA_P Parameter: Timepoint (hr) Value: 4
  misc_feature: MA Experiment 108607 PARAMETER Experiment Name: At_100uM_ABA_cDNA_P Parameter: Tissue Value: Aerial
  misc_feature: MA Experiment 108607 PARAMETER Experiment Name: At_100uM_ABA_cDNA_P Parameter: Treatment Value: 100uM ABA vs. No Treatment
  misc_feature: MA Experiment ID: 108668 Result: Down-regulated in Transcription
  misc_feature: MA Experiment 108668 PARAMETER Experiment Name: At_2mM_SA_cDNA_P Parameter: Plant Line Value: WS
  misc_feature: MA Experiment 108668 PARAMETER Experiment Name: At_2mM_SA_cDNA_P Parameter: Timepoint (hr) Value: 6
  misc_feature: MA Experiment 108668 PARAMETER Experiment Name: At_2mM_SA_cDNA_P Parameter: Treatment Value: 2mM SA vs. No Treatment
  misc_feature: MA Experiment ID: 20000069 Result: Down-regulated in Transcription
  misc_feature: MA Experiment 20000069 PARAMETER Experiment Name: At_100uM_ABA_Mutants_cDNA_P Parameter: Plant Line Value: CS23
  misc_feature: MA Experiment 20000069 PARAMETER Experiment Name: At_100uM_ABA_Mutants_cDNA_P Parameter: Timepoint (hr) Value: 6
  misc_feature: MA Experiment 20000069 PARAMETER Experiment Name: At_100uM_ABA_Mutants_cDNA_P Parameter: Tissue Value: Aerial
  misc_feature: MA Experiment 20000069 PARAMETER Experiment Name: At_100uM_ABA_Mutants_cDNA_P Parameter: Treatment Value: 100uM ABA vs. No Treatment
  misc_feature: MA Experiment ID: 20000070 Result: Down-regulated in Transcription
  misc_feature: MA Experiment 20000070 PARAMETER Experiment Name: At_100uM_ABA_Mutants_cDNA_P Parameter: Plant Line Value: CS24
  misc_feature: MA Experiment 20000070 PARAMETER Experiment Name: At_100uM_ABA_Mutants_cDNA_P Parameter: Timepoint (hr) Value: 6
  misc_feature: MA Experiment 20000070 PARAMETER Experiment Name: At_100uM_ABA_Mutants_cDNA_P Parameter: Tissue Value: Aerial
  misc_feature: MA Experiment 20000070 PARAMETER Experiment Name: At_100uM_ABA_Mutants_cDNA_P Parameter: Treatment Value: 100uM ABA vs. No Treatment
  misc_feature: MA Experiment ID: 20000071 Result: Down-regulated in Transcription
  misc_feature: MA Experiment 20000071 PARAMETER Experiment Name: At_100uM_ABA_Mutants_cDNA_P Parameter: Plant Line Value: CS8104
  misc_feature: MA Experiment 20000071 PARAMETER Experiment Name: At_100uM_ABA_Mutants_cDNA_P Parameter: Timepoint (hr) Value: 6
  misc_feature: MA Experiment 20000071 PARAMETER Experiment Name: At_100uM_ABA_Mutants_cDNA_P Parameter: Tissue Value: Aerial
  misc_feature: MA Experiment 20000071 PARAMETER Experiment Name: At_100uM_ABA_Mutants_cDNA_P Parameter: Treatment Value: 100uM ABA vs. No Treatment
  misc_feature: MA Experiment ID: 20000072 Result: Down-regulated in Transcription
  misc_feature: MA Experiment 20000072 PARAMETER Experiment Name: At_100uM_ABA_Mutants_cDNA_P Parameter: Plant Line Value: CS8105
  misc_feature: MA Experiment 20000072 PARAMETER Experiment Name: At_100uM_ABA_Mutants_cDNA_P Parameter: Timepoint (hr) Value: 6
  misc_feature: MA Experiment 20000072 PARAMETER Experiment Name: At_100uM_ABA_Mutants_cDNA_P Parameter: Tissue Value: Aerial
  misc_feature: MA Experiment 20000072 PARAMETER Experiment Name: At_100uM_ABA_Mutants_cDNA_P Parameter: Treatment Value: 100uM ABA vs. No Treatment
  misc_feature: MA Experiment ID: 20000087 Result: Down-regulated in Transcription
  misc_feature: MA Experiment 20000087 PARAMETER Experiment Name: At_100uM_ABA_Mutants_cDNA_P Parameter: Plant Line Value: WS
  misc_feature: MA Experiment 20000087 PARAMETER Experiment Name: At_100uM_ABA_Mutants_cDNA_P Parameter: Timepoint (hr) Value: 6
  misc_feature: MA Experiment 20000087 PARAMETER Experiment Name: At_100uM_ABA_Mutants_cDNA_P Parameter: Tissue Value: Aerial
  misc_feature: MA Experiment 20000087 PARAMETER Experiment Name: At_100uM_ABA_Mutants_cDNA_P Parameter: Treatment Value: 100uM ABA vs. No Treatment
  misc_feature: MA Experiment ID: 20000089 Result: Down-regulated in Transcription
  misc_feature: MA Experiment ID: 20000090 Result: Down-regulated in Transcription
  misc_feature: MA Experiment ID: 20000112 Result: Down-regulated in Transcription
  misc_feature: MA Experiment 20000112 PARAMETER Experiment Name: At_42deg_Heat_cDNA_P Parameter: Temperature (deg C) Value: 42 vs. 22
  misc_feature: MA Experiment 20000112 PARAMETER Experiment Name: At_42deg_Heat_cDNA_P Parameter: Timepoint (hr) Value: 2
  misc_feature: MA Experiment 20000112 PARAMETER Experiment Name: At_42deg_Heat_cDNA_P Parameter: Tissue Value: Aerial
  misc_feature: MA Experiment ID: 20000117 Result: Down-regulated in Transcription
  misc_feature: MA Experiment 20000117 PARAMETER Experiment Name: At_100uM_ABA_Mutants_cDNA_P Parameter: Plant Line Value: Columbia
  misc_feature: MA Experiment 20000117 PARAMETER Experiment Name: At_100uM_ABA_Mutants_cDNA_P Parameter: Timepoint (hr) Value: 6
  misc_feature: MA Experiment 20000117 PARAMETER Experiment Name: At_100uM_ABA_Mutants_cDNA_P Parameter: Tissue Value: Aerial
  misc_feature: MA Experiment 20000117 PARAMETER Experiment Name: At_100uM_ABA_Mutants_cDNA_P Parameter: Treatment Value: 100uM ABA vs. No Treatment
  misc_feature: MA Experiment ID: 20000182 Result: Down-regulated in Transcription
  misc_feature: MA Experiment 20000182 PARAMETER Experiment Name: At_2mM_SA_P Parameter: Age (day) Value: 14
  misc_feature: MA Experiment 20000182 PARAMETER Experiment Name: At_2mM_SA_P Parameter: Organism Value: A. thaliana
  misc_feature: MA Experiment 20000182 PARAMETER Experiment Name: At_2mM_SA_P Parameter: Plant Line Value: WS
  misc_feature: MA Experiment 20000182 PARAMETER Experiment Name: At_2mM_SA_P Parameter: Timepoint (hr) Value: 6
  misc_feature: MA Experiment 20000182 PARAMETER Experiment Name: At_2mM_SA_P Parameter: Tissue Value: Aerial
  misc_feature: MA Experiment 20000182 PARAMETER Experiment Name: At_2mM_SA_P Parameter: Treatment Value: 2mM SA vs. No Treatment
  misc_feature: MA Experiment ID: 20000185 Result: Down-regulated in Transcription
  misc_feature: MA Experiment 20000185 PARAMETER Experiment Name: At_Roots__P Parameter: Age (day) Value: 7 vs. 21
  misc_feature: MA Experiment 20000185 PARAMETER Experiment Name: At_Roots__P Parameter: Organism Value: A. thaliana
  misc_feature: MA Experiment 20000185 PARAMETER Experiment Name: At_Roots__P Parameter: Tissue Value: Roots vs. Whole Plant
  misc_feature: MA Experiment ID: 20000224 Result: Down-regulated in Transcription
  misc_feature: MA Experiment ID: 20000264 Result: Down-regulated in Transcription
  misc_feature: MA Experiment 20000264 PARAMETER Experiment Name: At_Open_Flower_P Parameter: Age (day) Value: 21
  misc_feature: MA Experiment 20000264 PARAMETER Experiment Name: At_Open_Flower_P Parameter: Plant Line Value: WS
  misc_feature: MA Experiment 20000264 PARAMETER Experiment Name: At_Open_Flower_P Parameter: Tissue Value: Open Flower vs. Whole Plant
  misc_feature: MA Experiment ID: 20000267 Result: Down-regulated in Transcription
  misc_feature: MA Experiment 20000267 PARAMETER Experiment Name: At_Drought_P Parameter: Age (day) Value: 7
  misc_feature: MA Experiment 20000267 PARAMETER Experiment Name: At_Drought_P Parameter: Organism Value: A. thaliana
  misc_feature: MA Experiment 20000267 PARAMETER Experiment Name: At_Drought_P Parameter: Plant Line Value: WS
  misc_feature: MA Experiment 20000267 PARAMETER Experiment Name: At_Drought_P Parameter: Timepoint (hr) Value: 6
  misc_feature: MA Experiment 20000267 PARAMETER Experiment Name: At_Drought_P Parameter: Tissue Value: Whole Plant
  misc_feature: MA Experiment 20000267 PARAMETER Experiment Name: At_Drought_P Parameter: Treatment Value: Drought vs. No Drought
  misc_feature: MA Experiment ID: 20000268 Result: Down-regulated in Transcription
  misc_feature: MA Experiment 20000268 PARAMETER Experiment Name: At_100mM_NaCl__P Parameter: Age (day) Value: 14
  misc_feature: MA Experiment 20000268 PARAMETER Experiment Name: At_100mM_NaCl__P Parameter: Organism Value: A. thaliana
  misc_feature: MA Experiment 20000268 PARAMETER Experiment Name: At_100mM_NaCl__P Parameter: Plant Line Value: WS
  misc_feature: MA Experiment 20000268 PARAMETER Experiment Name: At_100mM_NaCl__P Parameter: Timepoint (hr) Value: 6
  misc_feature: MA Experiment 20000268 PARAMETER Experiment Name: At_100mM_NaCl__P Parameter: Tissue Value: Whole Plant
  misc_feature: MA Experiment 20000268 PARAMETER Experiment Name: At_100mM_NaCl__P Parameter: Treatment Value: 100mM NaCl vs. No Treatment
  misc_feature: MA Experiment ID: 20000436 Result: Down-regulated in Transcription
  misc_feature: MA Experiment 20000436 PARAMETER Experiment Name: At_Drought_P Parameter: Age (day) Value: 7
  misc_feature: MA Experiment 20000436 PARAMETER Experiment Name: At_Drought_P Parameter: Organism Value: A. thaliana
  misc_feature: MA Experiment 20000436 PARAMETER Experiment Name: At_Drought_P Parameter: Plant Line Value: WS
  misc_feature: MA Experiment 20000436 PARAMETER Experiment Name: At_Drought_P Parameter: Timepoint (hr) Value: 12
  misc_feature: MA Experiment 20000436 PARAMETER Experiment Name: At_Drought_P Parameter: Tissue Value: Whole Plant
  misc_feature: MA Experiment 20000436 PARAMETER Experiment Name: At_Drought_P Parameter: Treatment Value: Drought vs. No Drought
  misc_feature: MA Experiment ID: 20000437 Result: Down-regulated in Transcription
  misc_feature: MA Experiment 20000437 PARAMETER Experiment Name: At_Drought_P Parameter: Age (day) Value: 8
  misc_feature: MA Experiment 20000437 PARAMETER Experiment Name: At_Drought_P Parameter: Organism Value: A. thaliana
  misc_feature: MA Experiment 20000437 PARAMETER Experiment Name: At_Drought_P Parameter: Plant Line Value: WS
  misc_feature: MA Experiment 20000437 PARAMETER Experiment Name: At_Drought_P Parameter: Timepoint (hr) Value: 24
  misc_feature: MA Experiment 20000437 PARAMETER Experiment Name: At_Drought_P Parameter: Tissue Value: Whole Plant
  misc_feature: MA Experiment 20000437 PARAMETER Experiment Name: At_Drought_P Parameter: Treatment Value: Drought vs. No Drought
  misc_feature: MA Experiment ID: 20000439 Result: Down-regulated in Transcription
  misc_feature: MA Experiment 20000439 PARAMETER Experiment Name: At_Roots__P Parameter: Age (day) Value: 14 vs. 21
  misc_feature: MA Experiment 20000439 PARAMETER Experiment Name: At_Roots__P Parameter: Organism Value: A. thaliana
  misc_feature: MA Experiment 20000439 PARAMETER Experiment Name: At_Roots__P Parameter: Tissue Value: Roots vs. Whole Plant
  misc_feature: MA Experiment ID: 20000441 Result: Up-regulated in Transcription
  misc_feature: MA Experiment 20000441 PARAMETER Experiment Name: At_1uM_BR-BRZ__P Parameter: Tissue Value: Shoot Apices
  misc_feature: MA Experiment 20000441 PARAMETER Experiment Name: At_1uM_BR-BRZ__P Parameter: Treatment Value: 1uM BR vs. No Treatment
  misc_feature: MA Experiment ID: 20000443 Result: Up-regulated in Transcription
  misc_feature: MA Experiment 20000443 PARAMETER Experiment Name: At_1uM_BR-BRZ__P Parameter: Tissue Value: Shoot Apices
  misc_feature: MA Experiment 20000443 PARAMETER Experiment Name: At_1uM_BR-BRZ__P Parameter: Treatment Value: 1uM BRZ vs. No Treatment
  misc_feature: MA Experiment ID: 20000456 Result: Down-regulated in Transcription
  misc_feature: MA Experiment 20000456 PARAMETER Experiment Name: At_100uM_BA_P Parameter: Age (day) Value: 14
  misc_feature: MA Experiment 20000456 PARAMETER Experiment Name: At_100uM_BA_P Parameter: Organism Value: A. thaliana
  misc_feature: MA Experiment 20000456 PARAMETER Experiment Name: At_100uM_BA_P Parameter: Plant Line Value: WS
  misc_feature: MA Experiment 20000456 PARAMETER Experiment Name: At_100uM_BA_P Parameter: Timepoint (hr) Value: 6
  misc_feature: MA Experiment 20000456 PARAMETER Experiment Name: At_100uM_BA_P Parameter: Tissue Value: Aerial
  misc_feature: MA Experiment 20000456 PARAMETER Experiment Name: At_100uM_BA_P Parameter: Treatment Value: 100uM BA vs. No Treatment
  misc_feature: MA Experiment ID: 20000496 Result: Down-regulated in Transcription
  misc_feature: MA Experiment 20000496 PARAMETER Experiment Name: At_Guard_Cells_P Parameter: Harvest Date Value: 7/19/2002
  misc_feature: MA Experiment 20000496 PARAMETER Experiment Name: At_Guard_Cells_P Parameter: Organism Value: Canola
  misc_feature: MA Experiment 20000496 PARAMETER Experiment Name: At_Guard_Cells_P Parameter: Tissue Value: Guard Cells vs. Leaves
  misc_feature: MA Experiment ID: 20000794 Result: Down-regulated in Transcription
  misc_feature: MA Experiment 20000794 PARAMETER Experiment Name: At_Petals_P Parameter: Age (day) Value: 23-25 days
  misc_feature: MA Experiment 20000794 PARAMETER Experiment Name: At_Petals_P Parameter: Plant Line Value: WS
  misc_feature: MA Experiment 20000794 PARAMETER Experiment Name: At_Petals_P Parameter: Tissue Value: Petals vs. Whole plant
  misc_feature: MA Experiment ID: 20001247 Result: Up-regulated in Transcription
  misc_feature: MA Experiment 20001247 PARAMETER Experiment Name: At_Far-red-induction_P Parameter: Age (day) Value: 7
  misc_feature: MA Experiment 20001247 PARAMETER Experiment Name: At_Far-red-induction_P Parameter: Light Value: Far-red vs. White
  misc_feature: MA Experiment 20001247 PARAMETER Experiment Name: At_Far-red-induction_P Parameter: Organism Value: A. thaliana
  misc_feature: MA Experiment 20001247 PARAMETER Experiment Name: At_Far-red-induction_P Parameter: Plant Line Value: Columbia
  misc_feature: MA Experiment 20001247 PARAMETER Experiment Name: At_Far-red-induction_P Parameter: Timepoint (hr) Value: 1
  misc_feature: MA Experiment 20001247 PARAMETER Experiment Name: At_Far-red-induction_P Parameter: Tissue Value: Whole Plant
  misc_feature: MA Experiment ID: 20001450 Result: Up-regulated in Transcription
  misc_feature: MA Experiment 20001450 PARAMETER Experiment Name: At_Far-red-induction_P Parameter: Age (day) Value: 7
  misc_feature: MA Experiment 20001450 PARAMETER Experiment Name: At_Far-red-induction_P Parameter: Light Value: Far-red vs. White
  misc_feature: MA Experiment 20001450 PARAMETER Experiment Name: At_Far-red-induction_P Parameter: Organism Value: A. thaliana
  misc_feature: MA Experiment 20001450 PARAMETER Experiment Name: At_Far-red-induction_P Parameter: Plant Line Value: Columbia
  misc_feature: MA Experiment 20001450 PARAMETER Experiment Name: At_Far-red-induction_P Parameter: Timepoint (hr) Value: 8
  misc_feature: MA Experiment 20001450 PARAMETER Experiment Name: At_Far-red-induction_P Parameter: Tissue Value: Whole Plant
  misc_feature: MA Experiment ID: 20001451 Result: Up-regulated in Transcription
  misc_feature: MA Experiment 20001451 PARAMETER Experiment Name: At_Far-red-induction_P Parameter: Age (day) Value: 7
  misc_feature: MA Experiment 20001451 PARAMETER Experiment Name: At_Far-red-induction_P Parameter: Light Value: Far-red vs. White
  misc_feature: MA Experiment 20001451 PARAMETER Experiment Name: At_Far-red-induction_P Parameter: Organism Value: A. thaliana
  misc_feature: MA Experiment 20001451 PARAMETER Experiment Name: At_Far-red-induction_P Parameter: Plant Line Value: Columbia
  misc_feature: MA Experiment 20001451 PARAMETER Experiment Name: At_Far-red-induction_P Parameter: Timepoint (hr) Value: 24
  misc_feature: MA Experiment 20001451 PARAMETER Experiment Name: At_Far-red-induction_P Parameter: Tissue Value: Whole Plant
  misc_feature: MA Experiment ID: 20001554 Result: Down-regulated in Transcription
  misc_feature: MA Experiment 20001554 PARAMETER Experiment Name: At_Drought_Soil_Dry_P Parameter: Age (day) Value: 21
  misc_feature: MA Experiment 20001554 PARAMETER Experiment Name: At_Drought_Soil_Dry_P Parameter: Organism Value: A. thaliana
  misc_feature: MA Experiment 20001554 PARAMETER Experiment Name: At_Drought_Soil_Dry_P Parameter: Plant Line Value: WS
  misc_feature: MA Experiment 20001554 PARAMETER Experiment Name: At_Drought_Soil_Dry_P Parameter: Post Timepoint (hr) Value: None
  misc_feature: MA Experiment 20001554 PARAMETER Experiment Name: At_Drought_Soil_Dry_P Parameter: Post-Treatment Value: None
  misc_feature: MA Experiment 20001554 PARAMETER Experiment Name: At_Drought_Soil_Dry_P Parameter: Timepoint (day) Value: 7
  misc_feature: MA Experiment 20001554 PARAMETER Experiment Name: At_Drought_Soil_Dry_P Parameter: Treatment Value: Drought vs. No Drought
  misc_feature: MA Experiment ID: 20001555 Result: Down-regulated in Transcription
  misc_feature: MA Experiment 20001555 PARAMETER Experiment Name: At_Drought_Soil_Dry_P Parameter: Age (day) Value: 24
  misc_feature: MA Experiment 20001555 PARAMETER Experiment Name: At_Drought_Soil_Dry_P Parameter: Organism Value: A. thaliana
  misc_feature: MA Experiment 20001555 PARAMETER Experiment Name: At_Drought_Soil_Dry_P Parameter: Plant Line Value: WS
  misc_feature: MA Experiment 20001555 PARAMETER Experiment Name: At_Drought_Soil_Dry_P Parameter: Post Timepoint (hr) Value: None
  misc_feature: MA Experiment 20001555 PARAMETER Experiment Name: At_Drought_Soil_Dry_P Parameter: Post-Treatment Value: None
  misc_feature: MA Experiment 20001555 PARAMETER Experiment Name: At_Drought_Soil_Dry_P Parameter: Timepoint (day) Value: 10
  misc_feature: MA Experiment 20001555 PARAMETER Experiment Name: At_Drought_Soil_Dry_P Parameter: Treatment Value: Drought vs. No Drought
  misc_feature: MA Experiment ID: 20001556 Result: Down-regulated in Transcription
  misc_feature: MA Experiment 20001556 PARAMETER Experiment Name: At_Drought_Soil_Dry_P Parameter: Age (day) Value: 26
  misc_feature: MA Experiment 20001556 PARAMETER Experiment Name: At_Drought_Soil_Dry_P Parameter: Organism Value: A. thaliana
  misc_feature: MA Experiment 20001556 PARAMETER Experiment Name: At_Drought_Soil_Dry_P Parameter: Plant Line Value: WS
  misc_feature: MA Experiment 20001556 PARAMETER Experiment Name: At_Drought_Soil_Dry_P Parameter: Post Timepoint (hr) Value: None
  misc_feature: MA Experiment 20001556 PARAMETER Experiment Name: At_Drought_Soil_Dry_P Parameter: Post-Treatment Value: None
  misc_feature: MA Experiment 20001556 PARAMETER Experiment Name: At_Drought_Soil_Dry_P Parameter: Timepoint (day) Value: 12
  misc_feature: MA Experiment 20001556 PARAMETER Experiment Name: At_Drought_Soil_Dry_P Parameter: Treatment Value: Drought vs. No Drought
  misc_feature: MA Experiment ID: 20001557 Result: Down-regulated in Transcription
  misc_feature: MA Experiment 20001557 PARAMETER Experiment Name: At_Drought_Soil_Dry_P Parameter: Age (day) Value: 27
  misc_feature: MA Experiment 20001557 PARAMETER Experiment Name: At_Drought_Soil_Dry_P Parameter: Organism Value: A. thaliana
  misc_feature: MA Experiment 20001557 PARAMETER Experiment Name: At_Drought_Soil_Dry_P Parameter: Plant Line Value: WS
  misc_feature: MA Experiment 20001557 PARAMETER Experiment Name: At_Drought_Soil_Dry_P Parameter: Post Timepoint (hr) Value: 3
  misc_feature: MA Experiment 20001557 PARAMETER Experiment Name: At_Drought_Soil_Dry_P Parameter: Post-Treatment Value: Re-Water vs. No Drought
  misc_feature: MA Experiment 20001557 PARAMETER Experiment Name: At_Drought_Soil_Dry_P Parameter: Timepoint (day) Value: 13
  misc_feature: MA Experiment 20001557 PARAMETER Experiment Name: At_Drought_Soil_Dry_P Parameter: Treatment Value: Drought vs. No Drought
  misc_feature: MA Experiment ID: 20001559 Result: Down-regulated in Transcription
  misc_feature: MA Experiment 20001559 PARAMETER Experiment Name: At_Drought_Soil_Dry_P Parameter: Age (day) Value: 28
  misc_feature: MA Experiment 20001559 PARAMETER Experiment Name: At_Drought_Soil_Dry_P Parameter: Organism Value: A. thaliana
  misc_feature: MA Experiment 20001559 PARAMETER Experiment Name: At_Drought_Soil_Dry_P Parameter: Plant Line Value: WS
  misc_feature: MA Experiment 20001559 PARAMETER Experiment Name: At_Drought_Soil_Dry_P Parameter: Post Timepoint (hr) Value: 29
  misc_feature: MA Experiment 20001559 PARAMETER Experiment Name: At_Drought_Soil_Dry_P Parameter: Post-Treatment Value: Re-Water vs. No Drought
  misc_feature: MA Experiment 20001559 PARAMETER Experiment Name: At_Drought_Soil_Dry_P Parameter: Timepoint (day) Value: 14
  misc_feature: MA Experiment 20001559 PARAMETER Experiment Name: At_Drought_Soil_Dry_P Parameter: Treatment Value: Drought vs. No Drought
  misc_feature: MA Experiment ID: 20001560 Result: Up-regulated in Transcription
  misc_feature: MA Experiment 20001560 PARAMETER Experiment Name: At_Drought_Soil_Dry_P Parameter: Age (day) Value: 28
  misc_feature: MA Experiment 20001560 PARAMETER Experiment Name: At_Drought_Soil_Dry_P Parameter: Organism Value: A. thaliana
  misc_feature: MA Experiment 20001560 PARAMETER Experiment Name: At_Drought_Soil_Dry_P Parameter: Plant Line Value: WS
  misc_feature: MA Experiment 20001560 PARAMETER Experiment Name: At_Drought_Soil_Dry_P Parameter: Post Timepoint (hr) Value: None
  misc_feature: MA Experiment 20001560 PARAMETER Experiment Name: At_Drought_Soil_Dry_P Parameter: Post-Treatment Value: None
  misc_feature: MA Experiment 20001560 PARAMETER Experiment Name: At_Drought_Soil_Dry_P Parameter: Timepoint (day) Value: 14
  misc_feature: MA Experiment 20001560 PARAMETER Experiment Name: At_Drought_Soil_Dry_P Parameter: Treatment Value: Drought vs. No Drought
  misc_feature: MA Experiment ID: 20001761 Result: Up-regulated in Transcription
  misc_feature: MA Experiment 20001761 PARAMETER Experiment Name: At_50mM_NH4NO3_L-to-H_P Parameter: Timepoint (hr) Value: 4
  misc_feature: MA Experiment 20001761 PARAMETER Experiment Name: At_50mM_NH4NO3_L-to-H_P Parameter: Tissue Value: Siliques
  misc_feature: MA Experiment 20001761 PARAMETER Experiment Name: At_50mM_NH4NO3_L-to-H_P Parameter: Treatment Value: 50mM NH4NO3 vs 100mM Mannitol
  misc_feature: MA Experiment ID: 20001904 Result: Down-regulated in Transcription
  misc_feature: MA Experiment 20001904 PARAMETER Experiment Name: At_Drought_Reproduction_P Parameter: Age (day) Value: 37
  misc_feature: MA Experiment 20001904 PARAMETER Experiment Name: At_Drought_Reproduction_P Parameter: Organism Value: A. thaliana
  misc_feature: MA Experiment 20001904 PARAMETER Experiment Name: At_Drought_Reproduction_P Parameter: Plant Line Value: WS
  misc_feature: MA Experiment 20001904 PARAMETER Experiment Name: At_Drought_Reproduction_P Parameter: Timepoint (day) Value: 7
  misc_feature: MA Experiment 20001904 PARAMETER Experiment Name: At_Drought_Reproduction_P Parameter: Tissue Value: Rosettes
  misc_feature: MA Experiment 20001904 PARAMETER Experiment Name: At_Drought_Reproduction_P Parameter: Treatment Value: Drought vs. No Drought
  misc_feature: MA Experiment ID: 20001906 Result: Down-regulated in Transcription
  misc_feature: MA Experiment 20001906 PARAMETER Experiment Name: At_Drought_Reproduction_P Parameter: Age (day) Value: 35
  misc_feature: MA Experiment 20001906 PARAMETER Experiment Name: At_Drought_Reproduction_P Parameter: Organism Value: A. thaliana
  misc_feature: MA Experiment 20001906 PARAMETER Experiment Name: At_Drought_Reproduction_P Parameter: Plant Line Value: WS
  misc_feature: MA Experiment 20001906 PARAMETER Experiment Name: At_Drought_Reproduction_P Parameter: Timepoint (day) Value: 5
  misc_feature: MA Experiment 20001906 PARAMETER Experiment Name: At_Drought_Reproduction_P Parameter: Tissue Value: Siliques
  misc_feature: MA Experiment 20001906 PARAMETER Experiment Name: At_Drought_Reproduction_P Parameter: Treatment Value: Drought vs. No Drought
  misc_feature: MA Experiment ID: 20001907 Result: Down-regulated in Transcription
  misc_feature: MA Experiment 20001907 PARAMETER Experiment Name: At_Drought_Reproduction_P Parameter: Age (day) Value: 37
  misc_feature: MA Experiment 20001907 PARAMETER Experiment Name: At_Drought_Reproduction_P Parameter: Organism Value: A. thaliana
  misc_feature: MA Experiment 20001907 PARAMETER Experiment Name: At_Drought_Reproduction_P Parameter: Plant Line Value: WS
  misc_feature: MA Experiment 20001907 PARAMETER Experiment Name: At_Drought_Reproduction_P Parameter: Timepoint (day) Value: 7
  misc_feature: MA Experiment 20001907 PARAMETER Experiment Name: At_Drought_Reproduction_P Parameter: Tissue Value: Siliques
  misc_feature: MA Experiment 20001907 PARAMETER Experiment Name: At_Drought_Reproduction_P Parameter: Treatment Value: Drought vs. No Drought
  misc_feature: MA Experiment ID: 20001908 Result: Down-regulated in Transcription
  misc_feature: MA Experiment 20001908 PARAMETER Experiment Name: At_Drought_Reproduction_P Parameter: Age (day) Value: 40
  misc_feature: MA Experiment 20001908 PARAMETER Experiment Name: At_Drought_Reproduction_P Parameter: Organism Value: A. thaliana
  misc_feature: MA Experiment 20001908 PARAMETER Experiment Name: At_Drought_Reproduction_P Parameter: Plant Line Value: WS
  misc_feature: MA Experiment 20001908 PARAMETER Experiment Name: At_Drought_Reproduction_P Parameter: Timepoint (day) Value: 10
  misc_feature: MA Experiment 20001908 PARAMETER Experiment Name: At_Drought_Reproduction_P Parameter: Tissue Value: Siliques
  misc_feature: MA Experiment 20001908 PARAMETER Experiment Name: At_Drought_Reproduction_P Parameter: Treatment Value: Drought vs. No Drought
  misc_feature: MA Experiment ID: 20001910 Result: Down-regulated in Transcription
  misc_feature: MA Experiment 20001910 PARAMETER Experiment Name: At_Drought_Reproduction_P Parameter: Age (day) Value: 37
  misc_feature: MA Experiment 20001910 PARAMETER Experiment Name: At_Drought_Reproduction_P Parameter: Organism Value: A. thaliana
  misc_feature: MA Experiment 20001910 PARAMETER Experiment Name: At_Drought_Reproduction_P Parameter: Plant Line Value: WS
  misc_feature: MA Experiment 20001910 PARAMETER Experiment Name: At_Drought_Reproduction_P Parameter: Timepoint (day) Value: 7
  misc_feature: MA Experiment 20001910 PARAMETER Experiment Name: At_Drought_Reproduction_P Parameter: Tissue Value: Flowers
  misc_feature: MA Experiment 20001910 PARAMETER Experiment Name: At_Drought_Reproduction_P Parameter: Treatment Value: Drought vs. No Drought
  misc_feature: MA Experiment ID: 20001911 Result: Down-regulated in Transcription
  misc_feature: MA Experiment 20001911 PARAMETER Experiment Name: At_Drought_Reproduction_P Parameter: Age (day) Value: 40
  misc_feature: MA Experiment 20001911 PARAMETER Experiment Name: At_Drought_Reproduction_P Parameter: Organism Value: A. thaliana
  misc_feature: MA Experiment 20001911 PARAMETER Experiment Name: At_Drought_Reproduction_P Parameter: Plant Line Value: WS
  misc_feature: MA Experiment 20001911 PARAMETER Experiment Name: At_Drought_Reproduction_P Parameter: Timepoint (day) Value: 10
  misc_feature: MA Experiment 20001911 PARAMETER Experiment Name: At_Drought_Reproduction_P Parameter: Tissue Value: Flowers
  misc_feature: MA Experiment 20001911 PARAMETER Experiment Name: At_Drought_Reproduction_P Parameter: Treatment Value: Drought vs. No Drought
acttttacaactaactcataagtaaaacacagacagtttttagatggctaagatatattccccttcttttcccggtactctctgtctttgcatttttactctcttgacgctaatgttcattcgggtttccgctcgacccgcgacattcgtcgaggatttcaaagccgcctggtcggaatctcacatccgtcaaatggaagacggaaaagctatccagctcgtccttgatcagagcactggatgtggatttgcttccaaaagaaaatatctattcggacgagtgagcatgaagatcaaactcattcccggagactctgccggtacggtcaccgctttctacatgaactccgatacggccacggtgagagacgagctagattttgagttcttgggaaacagaagtggtcaaccttactcagtgcaaacaaacatatttgctcatggcaaaggagatagagaacaaagagttaatctttggttcgacccatctatggattaccacacttacactatcttatggtcacacaaacacattgttttttacgtagacgatgtgccaataagagaatacaaaaacaacgaagccaagaacatagcttacccaacatcacaacctatgggagtatactcaacattatgggaagcagatgactgggcaacacgtggtggattagagaaaattgattggagcaaagctccattttatgcttattacaaagatttcgacatcgaaggttgtcctgttcctggaccaaccttttgtccatcgaaccctcataattggtgggaaggttatgcctatcagtctcttaacgccgttgaagctcgacgttaccggtgggttagagtaaaccatatggtttatgattattgtactgaccggtctaggtttcctgtcccaccacccgagtgtcgtgcttgaaaataattgcatacgtacgttgcaatgatcatgtttcgtcttgtacgagattttatatataaattgtgggaaaatgtggattgtattgtcctcttacgcaattgtgcagacgtacgtgagtgtgtatagatataattgtgatttgtggttatttgaaatttttataaacatagatgaattctgc

SEQ ID NO: 28915 - protein, 292 aa, Arabidopsis thaliana
  peptide (1)..(292): Ceres Seq. ID no. 12396877
  misc_feature (35)..(217): Pfam Name: Glycosyl hydrolases family 16 Pfam Description: Glycosyl hydrolases family 16
  misc_feature (35)..(291): Homolog of NCBI NO: 950299 NR Description: xyloglucan endotransglycosylase precursor
  misc_feature (12)..(291): Homolog of NCBI NO: 15240733 NR Description: xyloglucan endotransglycosylase (EXGT-A4)
  misc_feature (17)..(290): Homolog of NCBI NO: 5070246 NR Description: xyloglucan endo-transglycosylase-like protein
  misc_feature (15)..(290): Homolog of NCBI NO: 30841326 NR Description: xyloglucan endotransglycosylase [Gossypium
  misc_feature (12)..(292): Homolog of NCBI NO: 21553421 NR Description: endo-xyloglucan transferase-like protein
  misc_feature (12)..(292): Homolog of NCBI NO: 15235714 NR Description: xyloglucan endotransglycosylase, putative
  misc_feature (17)..(290): Homolog of NCBI NO: 7447418 NR Description: probable endo-xyloglucan transferase - upland
  misc_feature (24)..(292): Homolog of NCBI NO: 7447407 NR Description: xyloglucan endo-1,4-beta-D-glucanase (EC 3.2.1.-)
  misc_feature (1)..(292): Homolog of NCBI NO: 21537188 NR Description: xyloglucan endo-transglycosylase-like protein
  misc_feature (1)..(292): Homolog of NCBI NO: 18424986 NR Description: xyloglucan endotransglycosylase, putative
MAKIYSPSFPGTLCLCIFTLLTLMFIRVSARPATFVEDFKAAWSESHIRQMEDGKAIQLVLDQSTGCGFASKRKYLFGRVSMKIKLIPGDSAGTVTAFYMNSDTATVRDELDFEFLGNRSGQPYSVQTNIFAHGKGDREQRVNLWFDPSMDYHTYTILWSHKHIVFYVDDVPIREYKNNEAKNIAYPTSQPMGVYSTLWEADDWATRGGLEKIDWSKAPFYAYYKDFDIEGCPVPGPTFCPSNPHNWWEGYAYQSLNAVEARRYRWVRVNHMVYDYCTDRSRFPVPPPECRA

SEQ ID NO: 28916 - protein, 269 aa, Arabidopsis thaliana
  peptide (1)..(269): Ceres Seq. ID no. 12396878
  misc_feature (12)..(194): Pfam Name: Glycosyl hydrolases family 16 Pfam Description: Glycosyl hydrolases family 16
  misc_feature (12)..(268): Homolog of NCBI NO: 950299 NR Description: xyloglucan endotransglycosylase precursor
  misc_feature (1)..(268): Homolog of NCBI NO: 15240733 NR Description: xyloglucan endotransglycosylase (EXGT-A4)
  misc_feature (1)..(267): Homolog of NCBI NO: 5070246 NR Description: xyloglucan endo-transglycosylase-like protein
  misc_feature (1)..(267): Homolog of NCBI NO: 30841326 NR Description: xyloglucan endotransglycosylase [Gossypium
  misc_feature (1)..(269): Homolog of NCBI NO: 21553421 NR Description: endo-xyloglucan transferase-like protein
  misc_feature (1)..(269): Homolog of NCBI NO: 15235714 NR Description: xyloglucan endotransglycosylase, putative
  misc_feature (1)..(267): Homolog of NCBI NO: 7447418 NR Description: probable endo-xyloglucan transferase - upland
  misc_feature (1)..(269): Homolog of NCBI NO: 7447407 NR Description: xyloglucan endo-1,4-beta-D-glucanase (EC 3.2.1.-)
  misc_feature (1)..(269): Homolog of NCBI NO: 21537188 NR Description: xyloglucan endo-transglycosylase-like protein
  misc_feature (1)..(269): Homolog of NCBI NO: 18424986 NR Description: xyloglucan endotransglycosylase, putative
MFIRVSARPATFVEDFKAAWSESHIRQMEDGKAIQLVLDQSTGCGFASKRKYLFGRVSMKIKLIPGDSAGTVTAFYMNSDTATVRDELDFEFLGNRSGQPYSVQTNIFAHGKGDREQRVNLWFDPSMDYHTYTILWSHKHIVFYVDDVPIREYKNNEAKNIAYPTSQPMGVYSTLWEADDWATRGGLEKIDWSKAPFYAYYKDFDIEGCPVPGPTFCPSNPHNWWEGYAYQSLNAVEARRYRWVRVNHMVYDYCTDRSRFPVPPPECRA

SEQ ID NO: 28917 - protein, 242 aa, Arabidopsis thaliana
  peptide (1)..(242): Ceres Seq. ID no. 12396879
  misc_feature (1)..(167): Pfam Name: Glycosyl hydrolases family 16 Pfam Description: Glycosyl hydrolases family 16
  misc_feature (1)..(241): Homolog of NCBI NO: 950299 NR Description: xyloglucan endotransglycosylase precursor
  misc_feature (1)..(241): Homolog of NCBI NO: 15240733 NR Description: xyloglucan endotransglycosylase (EXGT-A4)
  misc_feature (1)..(240): Homolog of NCBI NO: 5070246 NR Description: xyloglucan endo-transglycosylase-like protein
  misc_feature (1)..(240): Homolog of NCBI NO: 30841326 NR Description: xyloglucan endotransglycosylase [Gossypium
  misc_feature (1)..(242): Homolog of NCBI NO: 21553421 NR Description: endo-xyloglucan transferase-like protein
  misc_feature (1)..(242): Homolog of NCBI NO: 15235714 NR Description: xyloglucan endotransglycosylase, putative
  misc_feature (1)..(240): Homolog of NCBI NO: 7447418 NR Description: probable endo-xyloglucan transferase - upland
  misc_feature (1)..(242): Homolog of NCBI NO: 7447407 NR Description: xyloglucan endo-1,4-beta-D-glucanase (EC 3.2.1.-)
  misc_feature (1)..(242): Homolog of NCBI NO: 21537188 NR Description: xyloglucan endo-transglycosylase-like protein
  misc_feature (1)..(242): Homolog of NCBI NO: 18424986 NR Description: xyloglucan endotransglycosylase, putative
MEDGKAIQLVLDQSTGCGFASKRKYLFGRVSMKIKLIPGDSAGTVTAFYMNSDTATVRDELDFEFLGNRSGQPYSVQTNIFAHGKGDREQRVNLWFDPSMDYHTYTILWSHKHIVFYVDDVPIREYKNNEAKNIAYPTSQPMGVYSTLWEADDWATRGGLEKIDWSKAPFYAYYKDFDIEGCPVPGPTFCPSNPHNWWEGYAYQSLNAVEARRYRWVRVNHMVYDYCTDRSRFPVPPPECRA

SEQ ID NO: 28918 - DNA, 643 bp, Arabidopsis thaliana; identical to SEQ ID NO: 24196
  misc_feature (1)..(643): Ceres Seq. ID no. 13645876
  misc_feature: MA Experiment ID: 108435 Result: Down-regulated in Transcription
  misc_feature: MA Experiment 108435 PARAMETER Experiment Name: At_stm_Mutants_cDNA_P Parameter: Plant Line Value: wt Landsburg vs stm
  misc_feature: MA Experiment 108435 PARAMETER Experiment Name: At_stm_Mutants_cDNA_P Parameter: Tissue Value: Shoot Apical Meristem Region
  misc_feature: MA Experiment ID: 108573 Result: Down-regulated in Transcription
  misc_feature: MA Experiment 108573 PARAMETER Experiment Name: At_Drought_cDNA_P Parameter: Timepoint (hr) Value: 6
  misc_feature: MA Experiment 108573 PARAMETER Experiment Name: At_Drought_cDNA_P Parameter: Tissue Value: Aerial
  misc_feature: MA Experiment 108573 PARAMETER Experiment Name: At_Drought_cDNA_P Parameter: Treatment Value: Drought vs. No Drought
  misc_feature: MA Experiment ID: 108595 Result: Down-regulated in Transcription
  misc_feature: MA Experiment 108595 PARAMETER Experiment Name: At_Ler-pi_Ovule_cDNA_P Parameter: Plant Line Value: null
  misc_feature: MA Experiment ID: 20000185 Result: Down-regulated in Transcription
  misc_feature: MA Experiment 20000185 PARAMETER Experiment Name: At_Roots__P Parameter: Age (day) Value: 7 vs. 21
  misc_feature: MA Experiment 20000185 PARAMETER Experiment Name: At_Roots__P Parameter: Organism Value: A. thaliana
  misc_feature: MA Experiment 20000185 PARAMETER Experiment Name: At_Roots__P Parameter: Tissue Value: Roots vs. Whole Plant
  misc_feature: MA Experiment ID: 20000437 Result: Down-regulated in Transcription
  misc_feature: MA Experiment 20000437 PARAMETER Experiment Name: At_Drought_P Parameter: Age (day) Value: 8
  misc_feature: MA Experiment 20000437 PARAMETER Experiment Name: At_Drought_P Parameter: Organism Value: A. thaliana
  misc_feature: MA Experiment 20000437 PARAMETER Experiment Name: At_Drought_P Parameter: Plant Line Value: WS
  misc_feature: MA Experiment 20000437 PARAMETER Experiment Name: At_Drought_P Parameter: Timepoint (hr) Value: 24
  misc_feature: MA Experiment 20000437 PARAMETER Experiment Name: At_Drought_P Parameter: Tissue Value: Whole Plant
  misc_feature: MA Experiment 20000437 PARAMETER Experiment Name: At_Drought_P Parameter: Treatment Value: Drought vs. No Drought
  misc_feature: MA Experiment ID: 20000439 Result: Down-regulated in Transcription
  misc_feature: MA Experiment 20000439 PARAMETER Experiment Name: At_Roots__P Parameter: Age (day) Value: 14 vs. 21
  misc_feature: MA Experiment 20000439 PARAMETER Experiment Name: At_Roots__P Parameter: Organism Value: A. thaliana
  misc_feature: MA Experiment 20000439 PARAMETER Experiment Name: At_Roots__P Parameter: Tissue Value: Roots vs. Whole Plant
  misc_feature: MA Experiment ID: 20000794 Result: Down-regulated in Transcription
  misc_feature: MA Experiment 20000794 PARAMETER Experiment Name: At_Petals_P Parameter: Age (day) Value: 23-25 days
  misc_feature: MA Experiment 20000794 PARAMETER Experiment Name: At_Petals_P Parameter: Plant Line Value: WS
  misc_feature: MA Experiment 20000794 PARAMETER Experiment Name: At_Petals_P Parameter: Tissue Value: Petals vs. Whole plant
  misc_feature: MA Experiment ID: 20001757 Result: Up-regulated in Transcription
  misc_feature: MA Experiment 20001757 PARAMETER Experiment Name: At_50mM_NH4NO3_L-to-H_P Parameter: Timepoint (hr) Value: 6
  misc_feature: MA Experiment 20001757 PARAMETER Experiment Name: At_50mM_NH4NO3_L-to-H_P Parameter: Tissue Value: Leaf
  misc_feature: MA Experiment 20001757 PARAMETER Experiment Name: At_50mM_NH4NO3_L-to-H_P Parameter: Treatment Value: 50mM NH4NO3 vs 100mM Mannitol

SEQ ID NO: 28919 - protein, 144 aa, Arabidopsis thaliana; identical to SEQ ID NO: 24197
  peptide (1)..(144): Ceres Seq. ID no. 13645877
  misc_feature (50)..(117): Pfam Name: Ribosomal protein L31 Pfam Description: Ribosomal protein L31
  misc_feature (50)..(117): Pfam Name: Ribosomal protein L31 Pfam Description: Ribosomal protein L31
  misc_feature (50)..(113): Homolog of NCBI NO: 33241133 NR Description: Ribosomal protein L31
  misc_feature (50)..(117): Homolog of NCBI NO: 17231678 NR Description: 50S ribosomal protein L31 [Nostoc sp. PCC 7120]
  misc_feature (50)..(113): Homolog of NCBI NO: 33862086 NR Description: 50S ribosomal protein L31
  misc_feature (50)..(143): Homolog of NCBI NO: 23042796 NR Description: hypothetical protein [Trichodesmium erythraeum
  misc_feature (50)..(118): Homolog of NCBI NO: 11467741 NR Description: ribosomal protein L31 [Guillardia theta]
  misc_feature (50)..(113): Homolog of NCBI NO: 33241133 NR Description: Ribosomal protein L31
  misc_feature (50)..(113): Homolog of NCBI NO: 33862086 NR Description: 50S ribosomal protein L31
  misc_feature (50)..(118): Homolog of NCBI NO: 11467741 NR Description: ribosomal protein L31 [Guillardia theta]
  misc_feature (1)..(144): Homolog of NCBI NO: 18410833 NR Description: chloroplast 50S ribosomal protein L31 -related
  misc_feature (46)..(144): Homolog of NCBI NO: 3885513 NR Description: similar to chloroplast 50S ribosomal protein L31
  misc_feature (24)..(118): Homolog of NCBI NO: 34912982 NR Description: putative chloroplast 50S ribosomal protein L31
  misc_feature (50)..(119): Homolog of NCBI NO: 32307564 NR Description: ribosomal protein rpL31 [Bigelowiella natans]
  misc_feature (50)..(144): Homolog of NCBI NO: 22297654 NR Description: 50S ribosomal protein L31 [Thermosynechococcus
  misc_feature (50)..(143): Homolog of NCBI NO: 23042796 NR Description: hypothetical protein [Trichodesmium erythraeum
  misc_feature (50)..(117): Homolog of NCBI NO: 17231678 NR Description: 50S ribosomal protein L31 [Nostoc sp. PCC 7120]
  misc_feature (50)..(144): Homolog of NCBI NO: 22297654 NR Description: 50S ribosomal protein L31 [Thermosynechococcus
  misc_feature (50)..(119): Homolog of NCBI NO: 32307564 NR Description: ribosomal protein rpL31 [Bigelowiella natans]
  misc_feature (24)..(118): Homolog of NCBI NO: 34912982 NR Description: putative chloroplast 50S ribosomal protein L31
  misc_feature (46)..(144): Homolog of NCBI NO: 3885513 NR Description: similar to chloroplast 50S ribosomal protein L31
  misc_feature (1)..(144): Homolog of NCBI NO: 18410833 NR Description: chloroplast 50S ribosomal protein L31 -related

SEQ ID NO: 28920 - protein, 119 aa, Arabidopsis thaliana; identical to SEQ ID NO: 24198
  peptide (1)..(119): Ceres Seq. ID no. 13645878
  misc_feature (25)..(92): Pfam Name: Ribosomal protein L31 Pfam Description: Ribosomal protein L31
  misc_feature (25)..(92): Pfam Name: Ribosomal protein L31 Pfam Description: Ribosomal protein L31
  misc_feature (25)..(88): Homolog of NCBI NO: 33241133 NR Description: Ribosomal protein L31
  misc_feature (25)..(92): Homolog of NCBI NO: 17231678 NR Description: 50S ribosomal protein L31 [Nostoc sp. PCC 7120]
  misc_feature (25)..(88): Homolog of NCBI NO: 33862086 NR Description: 50S ribosomal protein L31
  misc_feature (25)..(118): Homolog of NCBI NO: 23042796 NR Description: hypothetical protein [Trichodesmium erythraeum
  misc_feature (25)..(93): Homolog of NCBI NO: 11467741 NR Description: ribosomal protein L31 [Guillardia theta]
  misc_feature (25)..(88): Homolog of NCBI NO: 33241133 NR Description: Ribosomal protein L31
  misc_feature (25)..(88): Homolog of NCBI NO: 33862086 NR Description: 50S ribosomal protein L31
  misc_feature (25)..(93): Homolog of NCBI NO: 11467741 NR Description: ribosomal protein L31 [Guillardia theta]
  misc_feature (1)..(119): Homolog of NCBI NO: 18410833 NR Description: chloroplast 50S ribosomal protein L31 -related
  misc_feature (21)..(119): Homolog of NCBI NO: 3885513 NR Description: similar to chloroplast 50S ribosomal protein L31
  misc_feature (1)..(93): Homolog of NCBI NO: 34912982 NR Description: putative chloroplast 50S ribosomal protein L31
  misc_feature (25)..(94): Homolog of NCBI NO: 32307564 NR Description: ribosomal protein rpL31 [Bigelowiella natans]
  misc_feature (25)..(119): Homolog of NCBI NO: 22297654 NR Description: 50S ribosomal protein L31 [Thermosynechococcus
  misc_feature (25)..(118): Homolog of NCBI NO: 23042796 NR Description: hypothetical protein [Trichodesmium erythraeum
  misc_feature (25)..(92): Homolog of NCBI NO: 17231678 NR Description: 50S ribosomal protein L31 [Nostoc sp. PCC 7120]
  misc_feature (25)..(119): Homolog of NCBI NO: 22297654 NR Description: 50S ribosomal protein L31 [Thermosynechococcus
  misc_feature (25)..(94): Homolog of NCBI NO: 32307564 NR Description: ribosomal protein rpL31 [Bigelowiella natans]
  misc_feature (1)..(93): Homolog of NCBI NO: 34912982 NR Description: putative chloroplast 50S ribosomal protein L31
  misc_feature (21)..(119): Homolog of NCBI NO: 3885513 NR Description: similar to chloroplast 50S ribosomal protein L31
  misc_feature (1)..(119): Homolog of NCBI NO: 18410833 NR Description: chloroplast 50S ribosomal protein L31 -related

SEQ ID NO: 28921 - protein, 74 aa, Arabidopsis thaliana; identical to SEQ ID NO: 24199
  peptide (1)..(74): Ceres Seq. ID no. 13645879
  misc_feature (1)..(43): Homolog of NCBI NO: 33241133 NR Description: Ribosomal protein L31
  misc_feature (1)..(47): Homolog of NCBI NO: 17231678 NR Description: 50S ribosomal protein L31 [Nostoc sp. PCC 7120]
  misc_feature (1)..(43): Homolog of NCBI NO: 33862086 NR Description: 50S ribosomal protein L31
  misc_feature (1)..(73): Homolog of NCBI NO: 23042796 NR Description: hypothetical protein [Trichodesmium erythraeum
  misc_feature (1)..(48): Homolog of NCBI NO: 11467741 NR Description: ribosomal protein L31 [Guillardia theta]
  misc_feature (1)..(74): Homolog of NCBI NO: 22297654 NR Description: 50S ribosomal protein L31 [Thermosynechococcus
  misc_feature (1)..(49): Homolog of NCBI NO: 32307564 NR Description: ribosomal protein rpL31 [Bigelowiella natans]
  misc_feature (1)..(48): Homolog of NCBI NO: 34912982 NR Description: putative chloroplast 50S ribosomal protein L31
  misc_feature (1)..(74): Homolog of NCBI NO: 3885513 NR Description: similar to chloroplast 50S ribosomal protein L31
  misc_feature (1)..(74): Homolog of NCBI NO: 18410833 NR Description: chloroplast 50S ribosomal protein L31 -related
  misc_feature (1)..(43): Homolog of NCBI NO: 33241133 NR Description: Ribosomal protein L31
  misc_feature (1)..(47): Homolog of NCBI NO: 17231678 NR Description: 50S ribosomal protein L31 [Nostoc sp. PCC 7120]
  misc_feature (1)..(43): Homolog of NCBI NO: 33862086 NR Description: 50S ribosomal protein L31
  misc_feature (1)..(73): Homolog of NCBI NO: 23042796 NR Description: hypothetical protein [Trichodesmium erythraeum
  misc_feature (1)..(48): Homolog of NCBI NO: 11467741 NR Description: ribosomal protein L31 [Guillardia theta]
  misc_feature (1)..(74): Homolog of NCBI NO: 22297654 NR Description: 50S ribosomal protein L31 [Thermosynechococcus
  misc_feature (1)..(49): Homolog of NCBI NO: 32307564 NR Description: ribosomal protein rpL31 [Bigelowiella natans]
  misc_feature (1)..(48): Homolog of NCBI NO: 34912982 NR Description: putative chloroplast 50S ribosomal protein L31
  misc_feature (1)..(74): Homolog of NCBI NO: 3885513 NR Description: similar to chloroplast 50S ribosomal protein L31
  misc_feature (1)..(74): Homolog of NCBI NO: 18410833 NR Description: chloroplast 50S ribosomal protein L31 -related

SEQ ID NO: 28922 - DNA, 997 bp, Arabidopsis thaliana
  misc_feature (1)..(997): Ceres Seq. ID no. 13488106
  misc_feature: MA Experiment ID: 108462 Result: Up-regulated in Transcription
  misc_feature: MA Experiment 108462 PARAMETER Experiment Name: At_Germinating_Seeds_cDNA_P Parameter: Age (day) Value: 2 vs. 0
  misc_feature: MA Experiment 108462 PARAMETER Experiment Name: At_Germinating_Seeds_cDNA_P Parameter: Tissue Value: Germinating Seeds
  misc_feature: MA Experiment ID: 108463 Result: Up-regulated in Transcription
  misc_feature: MA Experiment 108463 PARAMETER Experiment Name: At_Germinating_Seeds_cDNA_P Parameter: Age (day) Value: 3 vs. 0
  misc_feature: MA Experiment 108463 PARAMETER Experiment Name: At_Germinating_Seeds_cDNA_P Parameter: Tissue Value: Germinating Seeds
  misc_feature: MA Experiment ID: 108464 Result: Up-regulated in Transcription
  misc_feature: MA Experiment 108464 PARAMETER Experiment Name: At_Germinating_Seeds_cDNA_P Parameter: Age (day) Value: 4 vs. 0
  misc_feature: MA Experiment 108464 PARAMETER Experiment Name: At_Germinating_Seeds_cDNA_P Parameter: Tissue Value: Germinating Seeds
  misc_feature: MA Experiment ID: 108489 Result: Down-regulated in Transcription
  misc_feature: MA Experiment ID: 108585 Result: Down-regulated in Transcription
  misc_feature: MA Experiment 108585 PARAMETER Experiment Name: At_5mM_NaNP_cDNA_P Parameter: Timepoint (hr) Value: 6
  misc_feature: MA Experiment 108585 PARAMETER Experiment Name: At_5mM_NaNP_cDNA_P Parameter: Tissue Value: Aerial
  misc_feature: MA Experiment 108585 PARAMETER Experiment Name: At_5mM_NaNP_cDNA_P Parameter: Treatment Value: null
  misc_feature: MA Experiment ID: 108595 Result: Down-regulated in Transcription
  misc_feature: MA Experiment 108595 PARAMETER Experiment Name: At_Ler-pi_Ovule_cDNA_P Parameter: Plant Line Value: null
  misc_feature: MA Experiment ID: 20000070 Result: Down-regulated in Transcription
  misc_feature: MA Experiment 20000070 PARAMETER Experiment Name: At_100uM_ABA_Mutants_cDNA_P Parameter: Plant Line Value: CS24
  misc_feature: MA Experiment 20000070 PARAMETER Experiment Name: At_100uM_ABA_Mutants_cDNA_P Parameter: Timepoint (hr) Value: 6
  misc_feature: MA Experiment 20000070 PARAMETER Experiment Name: At_100uM_ABA_Mutants_cDNA_P Parameter: Tissue Value: Aerial
  misc_feature: MA Experiment 20000070 PARAMETER Experiment Name: At_100uM_ABA_Mutants_cDNA_P Parameter: Treatment Value: 100uM ABA vs. No Treatment
  misc_feature: MA Experiment ID: 20000071 Result: Down-regulated in Transcription
  misc_feature: MA Experiment 20000071 PARAMETER Experiment Name: At_100uM_ABA_Mutants_cDNA_P Parameter: Plant Line Value: CS8104
  misc_feature: MA Experiment 20000071 PARAMETER Experiment Name: At_100uM_ABA_Mutants_cDNA_P Parameter: Timepoint (hr) Value: 6
  misc_feature: MA Experiment 20000071 PARAMETER Experiment Name: At_100uM_ABA_Mutants_cDNA_P Parameter: Tissue Value: Aerial
  misc_feature: MA Experiment 20000071 PARAMETER Experiment Name: At_100uM_ABA_Mutants_cDNA_P Parameter: Treatment Value: 100uM ABA vs. No Treatment
  misc_feature: MA Experiment ID: 20000180 Result: Up-regulated in Transcription
  misc_feature: MA Experiment 20000180 PARAMETER Experiment Name: At_Germinating_Seeds_P Parameter: Age (hr) Value: 24 vs. 0
  misc_feature: MA Experiment 20000180 PARAMETER Experiment Name: At_Germinating_Seeds_P Parameter: Tissue Value: Germinating Seeds
  misc_feature: MA Experiment ID: 20000184 Result: Up-regulated in Transcription
  misc_feature: MA Experiment 20000184 PARAMETER Experiment Name: At_Shoots__P Parameter: Age (day) Value: 7
  misc_feature: MA Experiment 20000184 PARAMETER Experiment Name: At_Shoots__P Parameter: Tissue Value: Shoots vs. Whole Plant
  misc_feature: MA Experiment ID: 20000185 Result: Down-regulated in Transcription
  misc_feature: MA Experiment 20000185 PARAMETER Experiment Name: At_Roots__P Parameter: Age (day) Value: 7 vs. 21
  misc_feature: MA Experiment 20000185 PARAMETER Experiment Name: At_Roots__P Parameter: Organism Value: A. thaliana
  misc_feature: MA Experiment 20000185 PARAMETER Experiment Name: At_Roots__P Parameter: Tissue Value: Roots vs. Whole Plant
  misc_feature: MA Experiment ID: 20000438 Result: Up-regulated in Transcription
  misc_feature: MA Experiment 20000438 PARAMETER Experiment Name: At_Shoots__P Parameter: Age (day) Value: 14
  misc_feature: MA Experiment 20000438 PARAMETER Experiment Name: At_Shoots__P Parameter: Tissue Value: Shoots vs. Whole Plant
  misc_feature: MA Experiment ID: 20000439 Result: Down-regulated in Transcription
  misc_feature: MA Experiment 20000439 PARAMETER Experiment Name: At_Roots__P Parameter: Age (day) Value: 14 vs. 21
  misc_feature: MA Experiment 20000439 PARAMETER Experiment Name: At_Roots__P Parameter: Organism Value: A. thaliana
  misc_feature: MA Experiment 20000439 PARAMETER Experiment Name: At_Roots__P Parameter: Tissue Value: Roots vs. Whole Plant
  misc_feature: MA Experiment ID: 20001248 Result: Down-regulated in Transcription
  misc_feature: MA Experiment 20001248 PARAMETER Experiment Name: At_Far-red-induction_P Parameter: Age (day) Value: 7
  misc_feature: MA Experiment 20001248 PARAMETER Experiment Name: At_Far-red-induction_P Parameter: Light Value: Far-red vs. White
  misc_feature: MA Experiment 20001248 PARAMETER Experiment Name: At_Far-red-induction_P Parameter: Organism Value: A. thaliana
  misc_feature: MA Experiment 20001248 PARAMETER Experiment Name: At_Far-red-induction_P Parameter: Plant Line Value: Columbia
  misc_feature: MA Experiment 20001248 PARAMETER Experiment Name: At_Far-red-induction_P Parameter: Timepoint (hr) Value: 4
  misc_feature: MA Experiment 20001248 PARAMETER Experiment Name: At_Far-red-induction_P Parameter: Tissue Value: Whole Plant
  misc_feature: MA Experiment ID: 20001450 Result: Down-regulated in Transcription
  misc_feature: MA Experiment 20001450 PARAMETER Experiment Name: At_Far-red-induction_P Parameter: Age (day) Value: 7
  misc_feature: MA Experiment 20001450 PARAMETER Experiment Name: At_Far-red-induction_P Parameter: Light Value: Far-red vs. White
  misc_feature: MA Experiment 20001450 PARAMETER Experiment Name: At_Far-red-induction_P Parameter: Organism Value: A. thaliana
  misc_feature: MA Experiment 20001450 PARAMETER Experiment Name: At_Far-red-induction_P Parameter: Plant Line Value: Columbia
  misc_feature: MA Experiment 20001450 PARAMETER Experiment Name: At_Far-red-induction_P Parameter: Timepoint (hr) Value: 8
  misc_feature: MA Experiment 20001450 PARAMETER Experiment Name: At_Far-red-induction_P Parameter: Tissue Value: Whole Plant
  misc_feature: MA Experiment ID: 20001557 Result: Down-regulated in Transcription
  misc_feature: MA Experiment 20001557 PARAMETER Experiment Name: At_Drought_Soil_Dry_P Parameter: Age (day) Value: 27
  misc_feature: MA Experiment 20001557 PARAMETER Experiment Name: At_Drought_Soil_Dry_P Parameter: Organism Value: A. thaliana
  misc_feature: MA Experiment 20001557 PARAMETER Experiment Name: At_Drought_Soil_Dry_P Parameter: Plant Line Value: WS
  misc_feature: MA Experiment 20001557 PARAMETER Experiment Name: At_Drought_Soil_Dry_P Parameter: Post Timepoint (hr) Value: 3
  misc_feature: MA Experiment 20001557 PARAMETER Experiment Name: At_Drought_Soil_Dry_P Parameter: Post-Treatment Value: Re-Water vs. No Drought
  misc_feature: MA Experiment 20001557 PARAMETER Experiment Name: At_Drought_Soil_Dry_P Parameter: Timepoint (day) Value: 13
  misc_feature: MA Experiment 20001557 PARAMETER Experiment Name: At_Drought_Soil_Dry_P Parameter: Treatment Value: Drought vs. No Drought
  misc_feature: MA Experiment ID: 20001558 Result: Down-regulated in Transcription
  misc_feature: MA Experiment 20001558 PARAMETER Experiment Name: At_Drought_Soil_Dry_P Parameter: Age (day) Value: 27
  misc_feature: MA Experiment 20001558 PARAMETER Experiment Name: At_Drought_Soil_Dry_P Parameter: Organism Value: A. thaliana
  misc_feature: MA Experiment 20001558 PARAMETER Experiment Name: At_Drought_Soil_Dry_P Parameter: Plant Line Value: WS
  misc_feature: MA Experiment 20001558 PARAMETER Experiment Name: At_Drought_Soil_Dry_P Parameter: Post Timepoint (hr) Value: 6
  misc_feature: MA Experiment 20001558 PARAMETER Experiment Name: At_Drought_Soil_Dry_P Parameter: Post-Treatment Value: Re-Water vs. No Drought
  misc_feature: MA Experiment 20001558 PARAMETER Experiment Name: At_Drought_Soil_Dry_P Parameter: Timepoint (day) Value: 13
  misc_feature: MA Experiment 20001558 PARAMETER Experiment Name: At_Drought_Soil_Dry_P Parameter: Treatment Value: Drought vs. No Drought
  misc_feature: MA Experiment ID: 20001904 Result: Down-regulated in Transcription
  misc_feature: MA Experiment 20001904 PARAMETER Experiment Name: At_Drought_Reproduction_P Parameter: Age (day) Value: 37
  misc_feature: MA Experiment 20001904 PARAMETER Experiment Name: At_Drought_Reproduction_P Parameter: Organism Value: A. thaliana
  misc_feature: MA Experiment 20001904 PARAMETER Experiment Name: At_Drought_Reproduction_P Parameter: Plant Line Value: WS
  misc_feature: MA Experiment 20001904 PARAMETER Experiment Name: At_Drought_Reproduction_P Parameter: Timepoint (day) Value: 7
  misc_feature: MA Experiment 20001904 PARAMETER Experiment Name: At_Drought_Reproduction_P Parameter: Tissue Value: Rosettes
  misc_feature: MA Experiment 20001904 PARAMETER Experiment Name: At_Drought_Reproduction_P Parameter: Treatment Value: Drought vs. No Drought
  misc_feature: MA Experiment ID: 20001905 Result: Down-regulated in Transcription
  misc_feature: MA Experiment 20001905 PARAMETER Experiment Name: At_Drought_Reproduction_P Parameter: Age (day) Value: 40
  misc_feature: MA Experiment 20001905 PARAMETER Experiment Name: At_Drought_Reproduction_P Parameter: Organism Value: A. thaliana
  misc_feature: MA Experiment 20001905 PARAMETER Experiment Name: At_Drought_Reproduction_P Parameter: Plant Line Value: WS
  misc_feature: MA Experiment 20001905 PARAMETER Experiment Name: At_Drought_Reproduction_P Parameter: Timepoint (day) Value: 10
  misc_feature: MA Experiment 20001905 PARAMETER Experiment Name: At_Drought_Reproduction_P Parameter: Tissue Value: Rosettes
  misc_feature: MA Experiment 20001905 PARAMETER Experiment Name: At_Drought_Reproduction_P Parameter: Treatment Value: Drought vs. No Drought
  misc_feature: MA Experiment ID: 20001906 Result: Down-regulated in Transcription
  misc_feature: MA Experiment 20001906 PARAMETER Experiment Name: At_Drought_Reproduction_P Parameter: Age (day) Value: 35
  misc_feature: MA Experiment 20001906 PARAMETER Experiment Name: At_Drought_Reproduction_P Parameter: Organism Value: A. thaliana
  misc_feature: MA Experiment 20001906 PARAMETER Experiment Name: At_Drought_Reproduction_P Parameter: Plant Line Value: WS
  misc_feature: MA Experiment 20001906 PARAMETER Experiment Name: At_Drought_Reproduction_P Parameter: Timepoint (day) Value: 5
  misc_feature: MA Experiment 20001906 PARAMETER Experiment Name: At_Drought_Reproduction_P Parameter: Tissue Value: Siliques
  misc_feature: MA Experiment 20001906 PARAMETER Experiment Name: At_Drought_Reproduction_P Parameter: Treatment Value: Drought vs. No Drought
  misc_feature: MA Experiment ID: 20001908 Result: Down-regulated in Transcription
  misc_feature: MA Experiment 20001908 PARAMETER Experiment Name: At_Drought_Reproduction_P Parameter: Age (day) Value: 40
  misc_feature: MA Experiment 20001908 PARAMETER Experiment Name: At_Drought_Reproduction_P Parameter: Organism Value: A. thaliana
  misc_feature: MA Experiment 20001908 PARAMETER Experiment Name: At_Drought_Reproduction_P Parameter: Plant Line Value: WS
  misc_feature: MA Experiment 20001908 PARAMETER Experiment Name: At_Drought_Reproduction_P Parameter: Timepoint (day) Value: 10
  misc_feature: MA Experiment 20001908 PARAMETER Experiment Name: At_Drought_Reproduction_P Parameter: Tissue Value: Siliques
  misc_feature: MA Experiment 20001908 PARAMETER Experiment Name: At_Drought_Reproduction_P Parameter: Treatment Value: Drought vs. No Drought
aatggaaatacactccgatgactacttcttccttcctcctccctgcttctcctccctcagccgcctttctccggcggcgcttcttccgccactcctggctttcctctaagatccaccaccgtcttccccaagttatgaatgattccacgaggactgaagtatccattgataaatcagaagtagacaagcttgttgacaagattgattttggggaattatgcaacgattttgagtgcacaagtagtccgcaggtggaatccacagctagacaacttgttcgcgacattcttgaaatcagagaaggaaatcgtgcctttgcatgctatgcagtttccgttaaatataaggatccggttagaagttttacaggtcgtgagaagtacaaaagaccaatgtggataactagtggattagagaatcctaccgtgacggtacaagagatggtaatgttatcgaccagcgtcttgcgaattaaatggacagtgaaaggaaaaccaaaatctattcttgctgctgtaagtggagatttgatagtaaaagtcaaatctgaatttactcttaaccagattagtgggcaagtgtttgagcatgaagagtcttgggacttatcttcatcatcccctattgctcaagcctatttctggacatcccgccgcctctttgctgcttctgaatccgcaaaagatgtcgccgatgtcacaaaagacttgaccgccaatttgacaactcgaaaagaggacacagatatatatcgcgatccaaccgatccaaataagtttttccaaagagacaacagctttgagagagatgtgtatcaaattgcactgtttctagccattgtctattttgttgtacagttcttgaagaacacaatctagttaccttctctcccatcctctataacagatatgtaaatgcctatatattgttgtatatgatctgtaaaaaaaaactgaacaagaaaagagatgtgtttgtttgtgttggaagaaagact

SEQ ID NO: 28923 - protein, 291 aa, Arabidopsis thaliana
  peptide (1)..(291): Ceres Seq. ID no. 13488107
  misc_feature (56)..(291): Homolog of NCBI NO: 34906888 NR Description: P0470A12.24 [Oryza sativa (japonica
  misc_feature (45)..(258): Homolog of NCBI NO: 25404541 NR Description: hypothetical protein T23K8.14 [imported] -
  misc_feature (6)..(291): Homolog of NCBI NO: 22330431 NR Description: expressed protein [Arabidopsis thaliana]
WKYTPMTTSSFLLPASPPSAAFLRRRFFRHSWLSSKIHHRLPQVMNDSTRTEVSIDKSEVDKLVDKIDFGELCNDFECTSSPQVESTARQLVRDILEIREGNRAFACYAVSVKYKDPVRSFTGREKYKRPMWITSGLENPTVTVQEMVMLSTSVLRIKWTVKGKPKSILAAVSGDLIVKVKSEFTLNQISGQVFEHEESWDLSSSSPIAQAYFWTSRRLFAASESAKDVADVTKDLTANLTTRKEDTDIYRDPTDPNKFFQRDNSFERDVYQIALFLAIVYFVVQFLKNTI

SEQ ID NO: 28924 - protein, 286 aa, Arabidopsis thaliana
  peptide (1)..(286): Ceres Seq. ID no. 13488108
  misc_feature (51)..(286): Homolog of NCBI NO: 34906888 NR Description: P0470A12.24 [Oryza sativa (japonica
  misc_feature (40)..(253): Homolog of NCBI NO: 25404541 NR Description: hypothetical protein T23K8.14 [imported] -
  misc_feature (1)..(286): Homolog of NCBI NO: 22330431 NR Description: expressed protein [Arabidopsis thaliana]
MTTSSFLLPASPPSAAFLRRRFFRHSWLSSKIHHRLPQVMNDSTRTEVSIDKSEVDKLVDKIDFGELCNDFECTSSPQVESTARQLVRDILEIREGNRAFACYAVSVKYKDPVRSFTGREKYKRPMWITSGLENPTVTVQEMVMLSTSVLRIKWTVKGKPKSILAAVSGDLIVKVKSEFTLNQISGQVFEHEESWDLSSSSPIAQAYFWTSRRLFAASESAKDVADVTKDLTANLTTRKEDTDIYRDPTDPNKFFQRDNSFERDVYQIALFLAIVYFVVQFLKNTI

SEQ ID NO: 28925 - protein, 247 aa, Arabidopsis thaliana
  peptide (1)..(247): Ceres Seq. ID no. 13488109
  misc_feature (12)..(247): Homolog of NCBI NO: 34906888 NR Description: P0470A12.24 [Oryza sativa (japonica
  misc_feature (1)..(214): Homolog of NCBI NO: 25404541 NR Description: hypothetical protein T23K8.14 [imported] -
  misc_feature (1)..(247): Homolog of NCBI NO: 22330431 NR Description: expressed protein [Arabidopsis thaliana]
MNDSTRTEVSIDKSEVDKLVDKIDFGELCNDFECTSSPQVESTARQLVRDILEIREGNRAFACYAVSVKYKDPVRSFTGREKYKRPMWITSGLENPTVTVQEMVMLSTSVLRIKWTVKGKPKSILAAVSGDLIVKVKSEFTLNQISGQVFEHEESWDLSSSSPIAQAYFWTSRRLFAASESAKDVADVTKDLTANLTTRKEDTDIYRDPTDPNKFFQRDNSFERDVYQIALFLAIVYFVVQFLKNTI

SEQ ID NO: 28926 - DNA, 1486 bp, Arabidopsis thaliana
  misc_feature (1)..(1486): Ceres Seq. ID no. 13499724
  misc_feature: MA Experiment ID: 108434 Result: Down-regulated in Transcription
  misc_feature: MA Experiment 108434 PARAMETER Experiment Name: At_Root_Tips_cDNA_P Parameter: Tissue Value: Root Tips
  misc_feature: MA Experiment ID: 108461 Result: Down-regulated in Transcription
  misc_feature: MA Experiment 108461 PARAMETER Experiment Name: At_Germinating_Seeds_cDNA_P Parameter: Age (day) Value: 1 vs. 0
  misc_feature: MA Experiment 108461 PARAMETER Experiment Name: At_Germinating_Seeds_cDNA_P Parameter: Tissue Value: Germinating Seeds
  misc_feature: MA Experiment ID: 108462 Result: Down-regulated in Transcription
  misc_feature: MA Experiment 108462 PARAMETER Experiment Name: At_Germinating_Seeds_cDNA_P Parameter: Age (day) Value: 2 vs. 0
  misc_feature: MA Experiment 108462 PARAMETER Experiment Name: At_Germinating_Seeds_cDNA_P Parameter: Tissue Value: Germinating Seeds
  misc_feature: MA Experiment ID: 108463 Result: Down-regulated in Transcription
  misc_feature: MA Experiment 108463 PARAMETER Experiment Name: At_Germinating_Seeds_cDNA_P Parameter: Age (day) Value: 3 vs. 0
  misc_feature: MA Experiment 108463 PARAMETER Experiment Name: At_Germinating_Seeds_cDNA_P Parameter: Tissue Value: Germinating Seeds
  misc_feature: MA Experiment ID: 108464 Result: Down-regulated in Transcription
  misc_feature: MA Experiment 108464 PARAMETER Experiment Name: At_Germinating_Seeds_cDNA_P Parameter: Age (day) Value: 4 vs. 0
  misc_feature: MA Experiment 108464 PARAMETER Experiment Name: At_Germinating_Seeds_cDNA_P Parameter: Tissue Value: Germinating Seeds
  misc_feature: MA Experiment ID: 108473 Result: Up-regulated in Transcription
  misc_feature: MA Experiment 108473 PARAMETER Experiment Name: At_Drought_Flowers_cDNA_P Parameter: Timepoint (hr) Value: 7 d
  misc_feature: MA Experiment 108473 PARAMETER Experiment Name: At_Drought_Flowers_cDNA_P Parameter: Tissue Value: Flower
  misc_feature: MA Experiment 108473 PARAMETER Experiment Name: At_Drought_Flowers_cDNA_P Parameter: Treatment Value: Drought vs. No Drought
  misc_feature: MA Experiment ID: 108474 Result: Up-regulated in Transcription
  misc_feature: MA Experiment 108474 PARAMETER Experiment Name: At_Drought_Flowers_cDNA_P Parameter: Timepoint (hr) Value: null
  misc_feature: MA Experiment 108474 PARAMETER Experiment Name: At_Drought_Flowers_cDNA_P Parameter: Treatment Value: Drought vs. No Drought
  misc_feature: MA Experiment ID: 108489 Result: Up-regulated in Transcription
  misc_feature: MA Experiment ID: 108561 Result: Up-regulated in Transcription
  misc_feature: MA Experiment 108561 PARAMETER Experiment Name: At_100uM_ABA_cDNA_P Parameter: Timepoint (hr) Value: 6
  misc_feature: MA Experiment 108561 PARAMETER Experiment Name: At_100uM_ABA_cDNA_P Parameter: Tissue Value: Aerial
  misc_feature: MA Experiment 108561 PARAMETER Experiment Name: At_100uM_ABA_cDNA_P Parameter: Treatment Value: 100uM ABA vs. No Treatment
  misc_feature: MA Experiment ID: 108572 Result: Up-regulated in Transcription
  misc_feature: MA Experiment 108572 PARAMETER Experiment Name: At_Drought_cDNA_P Parameter: Timepoint (hr) Value: 1
  misc_feature: MA Experiment 108572 PARAMETER Experiment Name: At_Drought_cDNA_P Parameter: Tissue Value: Aerial
  misc_feature: MA Experiment 108572 PARAMETER Experiment Name: At_Drought_cDNA_P Parameter: Treatment Value: Drought vs. No Drought
  misc_feature: MA Experiment ID: 108573 Result: Up-regulated in Transcription
  misc_feature: MA Experiment 108573 PARAMETER Experiment Name: At_Drought_cDNA_P Parameter: Timepoint (hr) Value: 6
  misc_feature: MA Experiment 108573 PARAMETER Experiment Name: At_Drought_cDNA_P Parameter: Tissue Value: Aerial
  misc_feature: MA Experiment 108573 PARAMETER Experiment Name: At_Drought_cDNA_P Parameter: Treatment Value: Drought vs. No Drought
  misc_feature: MA Experiment ID: 108605 Result: Up-regulated in Transcription
  misc_feature: MA Experiment 108605 PARAMETER Experiment Name: At_100uM_ABA_cDNA_P Parameter: Timepoint (hr) Value: 6
  misc_feature: MA Experiment 108605 PARAMETER Experiment Name: At_100uM_ABA_cDNA_P Parameter: Tissue Value: Aerial
  misc_feature: MA Experiment 108605 PARAMETER Experiment Name: At_100uM_ABA_cDNA_P Parameter: Treatment Value: 100uM ABA vs. No Treatment
  misc_feature: MA Experiment ID: 108667 Result: Up-regulated in Transcription
  misc_feature: MA Experiment 108667 PARAMETER Experiment Name: At_2mM_SA_cDNA_P Parameter: Plant Line Value: WS
  misc_feature: MA Experiment 108667 PARAMETER Experiment Name: At_2mM_SA_cDNA_P Parameter: Timepoint (hr) Value: 1
  misc_feature: MA Experiment 108667 PARAMETER Experiment Name: At_2mM_SA_cDNA_P Parameter: Treatment Value: 2mM SA vs. No Treatment
  misc_feature: MA Experiment ID: 20000069 Result: Up-regulated in Transcription
  misc_feature: MA Experiment 20000069 PARAMETER Experiment Name: At_100uM_ABA_Mutants_cDNA_P Parameter: Plant Line Value: CS23
  misc_feature: MA Experiment 20000069 PARAMETER Experiment Name: At_100uM_ABA_Mutants_cDNA_P Parameter: Timepoint (hr) Value: 6
  misc_feature: MA Experiment 20000069 PARAMETER Experiment Name: At_100uM_ABA_Mutants_cDNA_P Parameter: Tissue Value: Aerial
  misc_feature: MA Experiment 20000069 PARAMETER Experiment Name: At_100uM_ABA_Mutants_cDNA_P Parameter: Treatment Value: 100uM ABA vs. No Treatment
  misc_feature: MA Experiment ID: 20000070 Result: Up-regulated in Transcription
  misc_feature: MA Experiment 20000070 PARAMETER Experiment Name: At_100uM_ABA_Mutants_cDNA_P Parameter: Plant Line Value: CS24
  misc_feature: MA Experiment 20000070 PARAMETER Experiment Name: At_100uM_ABA_Mutants_cDNA_P Parameter: Timepoint (hr) Value: 6
  misc_feature: MA Experiment 20000070 PARAMETER Experiment Name: At_100uM_ABA_Mutants_cDNA_P Parameter: Tissue Value: Aerial
  misc_feature: MA Experiment 20000070 PARAMETER Experiment Name: At_100uM_ABA_Mutants_cDNA_P Parameter: Treatment Value: 100uM ABA vs. No Treatment
  misc_feature: MA Experiment ID: 20000071 Result: Up-regulated in Transcription
  misc_feature: MA Experiment 20000071 PARAMETER Experiment Name: At_100uM_ABA_Mutants_cDNA_P Parameter: Plant Line Value: CS8104
  misc_feature: MA Experiment 20000071 PARAMETER Experiment Name: At_100uM_ABA_Mutants_cDNA_P Parameter: Timepoint (hr) Value: 6
  misc_feature: MA Experiment 20000071 PARAMETER Experiment Name: At_100uM_ABA_Mutants_cDNA_P Parameter: Tissue Value: Aerial
  misc_feature: MA Experiment 20000071 PARAMETER Experiment Name: At_100uM_ABA_Mutants_cDNA_P Parameter: Treatment Value: 100uM ABA vs. No Treatment
  misc_feature: MA Experiment ID: 20000072 Result: Up-regulated in Transcription
  misc_feature: MA Experiment 20000072 PARAMETER Experiment Name: At_100uM_ABA_Mutants_cDNA_P Parameter: Plant Line Value: CS8105
  misc_feature: MA Experiment 20000072 PARAMETER Experiment Name: At_100uM_ABA_Mutants_cDNA_P Parameter: Timepoint (hr) Value: 6
  misc_feature: MA Experiment 20000072 PARAMETER Experiment Name: At_100uM_ABA_Mutants_cDNA_P Parameter: Tissue Value: Aerial
  misc_feature: MA Experiment 20000072 PARAMETER Experiment Name: At_100uM_ABA_Mutants_cDNA_P Parameter: Treatment Value: 100uM ABA vs. No Treatment
  misc_feature: MA Experiment ID: 20000088 Result: Up-regulated in Transcription
  misc_feature: MA Experiment 20000088 PARAMETER Experiment Name: At_100uM_ABA_Mutants_cDNA_P Parameter: Plant Line Value: Landsberg
  misc_feature: MA Experiment 20000088 PARAMETER Experiment Name: At_100uM_ABA_Mutants_cDNA_P Parameter: Timepoint (hr) Value: 6
  misc_feature: MA Experiment 20000088 PARAMETER Experiment Name: At_100uM_ABA_Mutants_cDNA_P Parameter: Tissue Value: Aerial
  misc_feature: MA Experiment 20000088 PARAMETER Experiment Name: At_100uM_ABA_Mutants_cDNA_P Parameter: Treatment Value: 100uM ABA vs. No Treatment
  misc_feature: MA Experiment ID: 20000169 Result: Up-regulated in Transcription
  misc_feature: MA Experiment 20000169 PARAMETER Experiment Name: At_100uM_ABA_P Parameter: Age (day) Value: 14
  misc_feature: MA Experiment 20000169 PARAMETER Experiment Name: At_100uM_ABA_P Parameter: Organism Value: A. thaliana
  misc_feature: MA Experiment 20000169 PARAMETER Experiment Name: At_100uM_ABA_P Parameter: Plant Line Value: WS
  misc_feature: MA Experiment 20000169 PARAMETER Experiment Name: At_100uM_ABA_P Parameter: Timepoint (hr) Value: 6
  misc_feature: MA Experiment 20000169 PARAMETER Experiment Name: At_100uM_ABA_P Parameter: Tissue Value: Aerial
  misc_feature: MA Experiment 20000169 PARAMETER Experiment Name: At_100uM_ABA_P Parameter: Treatment Value: 100uM ABA vs. No Treatment
  misc_feature: MA Experiment ID: 20000180 Result: Down-regulated in Transcription
  misc_feature: MA Experiment 20000180 PARAMETER Experiment Name: At_Germinating_Seeds_P Parameter: Age (hr) Value: 24 vs. 0
  misc_feature: MA Experiment 20000180 PARAMETER Experiment Name: At_Germinating_Seeds_P Parameter: Tissue Value: Germinating Seeds
  misc_feature: MA Experiment ID: 20000227 Result: Down-regulated in Transcription
  misc_feature: MA Experiment 20000227 PARAMETER Experiment Name: At_Root-Tips-vs-Tops_P Parameter: Tissue Value: Root Tips vs. Root Tops
  misc_feature: MA Experiment ID: 20000234 Result: Down-regulated in Transcription
  misc_feature: MA Experiment 20000234 PARAMETER Experiment Name: At_Siliques_P Parameter: Age (day) Value: 21
  misc_feature: MA Experiment 20000234 PARAMETER Experiment Name: At_Siliques_P Parameter: Organism Value: A. thaliana
  misc_feature: MA Experiment 20000234 PARAMETER Experiment Name: At_Siliques_P Parameter: Plant Line Value: WS
  misc_feature: MA Experiment 20000234 PARAMETER Experiment Name: At_Siliques_P Parameter: Tissue Value: Less Than 5mm Siliques vs. Whole Plant
  misc_feature: MA Experiment ID: 20000235 Result: Down-regulated in Transcription
  misc_feature: MA Experiment 20000235 PARAMETER Experiment Name: At_Siliques_P Parameter: Age (day) Value: 21
  misc_feature: MA Experiment 20000235 PARAMETER Experiment Name: At_Siliques_P Parameter: Organism Value: A. thaliana
  misc_feature: MA Experiment 20000235 PARAMETER Experiment Name: At_Siliques_P Parameter: Plant Line Value: WS
  misc_feature: MA Experiment 20000235 PARAMETER Experiment Name: At_Siliques_P Parameter: Tissue Value: 5-10mm Siliques vs. Whole Plant
  misc_feature: MA Experiment ID: 20000264 Result: Down-regulated in Transcription
  misc_feature: MA Experiment 20000264 PARAMETER Experiment Name: At_Open_Flower_P Parameter: Age (day) Value: 21
  misc_feature: MA Experiment 20000264 PARAMETER Experiment Name: At_Open_Flower_P Parameter: Plant Line Value: WS
  misc_feature: MA Experiment 20000264 PARAMETER Experiment Name: At_Open_Flower_P Parameter: Tissue Value: Open Flower vs. Whole Plant
  misc_feature: MA Experiment ID: 20000265 Result: Down-regulated in Transcription
  misc_feature: MA Experiment 20000265 PARAMETER Experiment Name: At_Open_Flower_P Parameter: Age (day) Value: 21
  misc_feature: MA Experiment 20000265 PARAMETER Experiment Name: At_Open_Flower_P Parameter: Plant Line Value: WS
  misc_feature: MA Experiment 20000265 PARAMETER Experiment Name: At_Open_Flower_P Parameter: Tissue Value: Closed Flower vs. Whole Plant
  misc_feature: MA Experiment ID: 20000286 Result: Down-regulated in Transcription
  misc_feature: MA Experiment 20000286 PARAMETER Experiment Name: At_Open_Flower_P Parameter: Age (day) Value: 21
  misc_feature: MA Experiment 20000286 PARAMETER Experiment Name: At_Open_Flower_P Parameter: Plant Line Value: WS
  misc_feature: MA Experiment 20000286 PARAMETER Experiment Name: At_Open_Flower_P Parameter: Tissue Value: Half Open vs. Whole Plant
  misc_feature: MA Experiment ID: 20000437 Result: Up-regulated in Transcription
  misc_feature: MA Experiment 20000437 PARAMETER Experiment Name: At_Drought_P Parameter: Age (day) Value: 8
  misc_feature: MA Experiment 20000437 PARAMETER Experiment Name: At_Drought_P Parameter: Organism Value: A. thaliana
  misc_feature: MA Experiment 20000437 PARAMETER Experiment Name: At_Drought_P Parameter: Plant Line Value: WS
  misc_feature: MA Experiment 20000437 PARAMETER Experiment Name: At_Drought_P Parameter: Timepoint (hr) Value: 24
  misc_feature: MA Experiment 20000437 PARAMETER Experiment Name: At_Drought_P Parameter: Tissue Value: Whole Plant
  misc_feature: MA Experiment 20000437 PARAMETER Experiment Name: At_Drought_P Parameter: Treatment Value: Drought vs. No Drought
  misc_feature: MA Experiment ID: 20000438 Result: Down-regulated in Transcription
  misc_feature: MA Experiment 20000438 PARAMETER Experiment Name: At_Shoots__P Parameter: Age (day) Value: 14
  misc_feature: MA Experiment 20000438 PARAMETER Experiment Name: At_Shoots__P Parameter: Tissue Value: Shoots vs. Whole Plant
  misc_feature: MA Experiment ID: 20000441 Result: Up-regulated in Transcription
  misc_feature: MA Experiment 20000441 PARAMETER Experiment Name: At_1uM_BR-BRZ__P Parameter: Tissue Value: Shoot Apices
  misc_feature: MA Experiment 20000441 PARAMETER Experiment Name: At_1uM_BR-BRZ__P Parameter: Treatment Value: 1uM BR vs. No Treatment
  misc_feature: MA Experiment ID: 20000455 Result: Up-regulated in Transcription
  misc_feature: MA Experiment 20000455 PARAMETER Experiment Name: At_100uM_ABA_P Parameter: Age (day) Value: 16
  misc_feature: MA Experiment 20000455 PARAMETER Experiment Name: At_100uM_ABA_P Parameter: Organism Value: A. thaliana
  misc_feature: MA Experiment 20000455 PARAMETER Experiment Name: At_100uM_ABA_P Parameter: Plant Line Value: WS
  misc_feature: MA Experiment 20000455 PARAMETER Experiment Name: At_100uM_ABA_P Parameter: Timepoint (hr) Value: 48
  misc_feature: MA Experiment 20000455 PARAMETER Experiment Name: At_100uM_ABA_P Parameter: Tissue Value: Aerial
  misc_feature: MA Experiment 20000455 PARAMETER Experiment Name: At_100uM_ABA_P Parameter: Treatment Value: 100uM ABA vs. No Treatment
  misc_feature: MA Experiment ID: 20000495 Result: Down-regulated in Transcription
  misc_feature: MA Experiment 20000495 PARAMETER Experiment Name: At_Guard_Cells_P Parameter: Harvest Date Value: 8/2/2002
  misc_feature: MA Experiment 20000495 PARAMETER Experiment Name: At_Guard_Cells_P Parameter: Organism Value: A. thaliana
  misc_feature: MA Experiment 20000495 PARAMETER Experiment Name: At_Guard_Cells_P Parameter: Tissue Value: Guard Cells vs. Leaves
  misc_feature: MA Experiment ID: 20000709 Result: Up-regulated in Transcription
  misc_feature: MA Experiment 20000709 PARAMETER Experiment Name: At_15mM_NH4NO3_L-to-H_P Parameter: Age (hr) Value: 14
  misc_feature: MA Experiment 20000709 PARAMETER Experiment Name: At_15mM_NH4NO3_L-to-H_P Parameter: Organism Value: A. thaliana
  misc_feature: MA Experiment 20000709 PARAMETER Experiment Name: At_15mM_NH4NO3_L-to-H_P Parameter: Plant Line Value: WS
  misc_feature: MA Experiment 20000709 PARAMETER Experiment Name: At_15mM_NH4NO3_L-to-H_P Parameter: Timepoint (hr) Value: 4
  misc_feature: MA Experiment 20000709 PARAMETER Experiment Name: At_15mM_NH4NO3_L-to-H_P Parameter: Tissue Value: Aerial
  misc_feature: MA Experiment 20000709 PARAMETER Experiment Name: At_15mM_NH4NO3_L-to-H_P Parameter: Treatment Value: 15mM NH4NO3 vs. 30mM Mannitol
  misc_feature: MA Experiment ID: 20000794 Result: Down-regulated in Transcription
  misc_feature: MA Experiment 20000794 PARAMETER Experiment Name: At_Petals_P Parameter: Age (day) Value: 23-25 days
  misc_feature: MA Experiment 20000794 PARAMETER Experiment Name: At_Petals_P Parameter: Plant Line Value: WS
  misc_feature: MA Experiment 20000794 PARAMETER Experiment Name: At_Petals_P Parameter: Tissue Value: Petals vs. Whole plant
  misc_feature: MA Experiment ID: 20001458 Result: Up-regulated in Transcription
  misc_feature: MA Experiment 20001458 PARAMETER Experiment Name: At_50mM_NH4NO3_L-to-H_P Parameter: Age (day) Value: Undefined
  misc_feature: MA Experiment 20001458 PARAMETER Experiment Name: At_50mM_NH4NO3_L-to-H_P Parameter: Organism Value: Undefined
  misc_feature: MA Experiment 20001458 PARAMETER Experiment Name: At_50mM_NH4NO3_L-to-H_P Parameter: Plant Line Value: Undefined
  misc_feature: MA Experiment 20001458 PARAMETER Experiment Name: At_50mM_NH4NO3_L-to-H_P Parameter: Timepoint (hr) Value: 2
  misc_feature: MA Experiment 20001458 PARAMETER Experiment Name: At_50mM_NH4NO3_L-to-H_P Parameter: Tissue Value: Siliques
  misc_feature: MA Experiment 20001458 PARAMETER Experiment Name: At_50mM_NH4NO3_L-to-H_P Parameter: Treatment Value: 50mM NH4NO3 vs. 100mM Manitol
  misc_feature: MA Experiment ID: 20001556 Result: Up-regulated in Transcription
  misc_feature: MA Experiment 20001556 PARAMETER Experiment Name: At_Drought_Soil_Dry_P Parameter: Age (day) Value: 26
  misc_feature: MA Experiment 20001556 PARAMETER Experiment Name: At_Drought_Soil_Dry_P Parameter: Organism Value: A. thaliana
  misc_feature: MA Experiment 20001556 PARAMETER Experiment Name: At_Drought_Soil_Dry_P Parameter: Plant Line Value: WS
  misc_feature: MA Experiment 20001556 PARAMETER Experiment Name: At_Drought_Soil_Dry_P Parameter: Post Timepoint (hr) Value: None
  misc_feature: MA Experiment 20001556 PARAMETER Experiment Name: At_Drought_Soil_Dry_P Parameter: Post-Treatment Value: None
  misc_feature: MA Experiment 20001556 PARAMETER Experiment Name: At_Drought_Soil_Dry_P Parameter: Timepoint (day) Value: 12
  misc_feature: MA Experiment 20001556 PARAMETER Experiment Name: At_Drought_Soil_Dry_P Parameter: Treatment Value: Drought vs. No Drought
  misc_feature: MA Experiment ID: 20001557 Result: Up-regulated in Transcription
  misc_feature: MA Experiment 20001557 PARAMETER Experiment Name: At_Drought_Soil_Dry_P Parameter: Age (day) Value: 27
  misc_feature: MA Experiment 20001557 PARAMETER Experiment Name: At_Drought_Soil_Dry_P Parameter: Organism Value: A. thaliana
  misc_feature: MA Experiment 20001557 PARAMETER Experiment Name: At_Drought_Soil_Dry_P Parameter: Plant Line Value: WS
  misc_feature: MA Experiment 20001557 PARAMETER Experiment Name: At_Drought_Soil_Dry_P Parameter: Post Timepoint (hr) Value: 3
  misc_feature: MA Experiment 20001557 PARAMETER Experiment Name: At_Drought_Soil_Dry_P Parameter: Post-Treatment Value: Re-Water vs. No Drought
  misc_feature: MA Experiment 20001557 PARAMETER Experiment Name: At_Drought_Soil_Dry_P Parameter: Timepoint (day) Value: 13
  misc_feature: MA Experiment 20001557 PARAMETER Experiment Name: At_Drought_Soil_Dry_P Parameter: Treatment Value: Drought vs. No Drought
  misc_feature: MA Experiment ID: 20001558 Result: Up-regulated in Transcription
  misc_feature: MA Experiment 20001558 PARAMETER Experiment Name: At_Drought_Soil_Dry_P Parameter: Age (day) Value: 27
  misc_feature: MA Experiment 20001558 PARAMETER Experiment Name: At_Drought_Soil_Dry_P Parameter: Organism Value: A. thaliana
  misc_feature: MA Experiment 20001558 PARAMETER Experiment Name: At_Drought_Soil_Dry_P Parameter: Plant Line Value: WS
  misc_feature: MA Experiment 20001558 PARAMETER Experiment Name: At_Drought_Soil_Dry_P Parameter: Post Timepoint (hr) Value: 6
  misc_feature: MA Experiment 20001558 PARAMETER Experiment Name: At_Drought_Soil_Dry_P Parameter: Post-Treatment Value: Re-Water vs. No Drought
  misc_feature: MA Experiment 20001558 PARAMETER Experiment Name: At_Drought_Soil_Dry_P Parameter: Timepoint (day) Value: 13
  misc_feature: MA Experiment 20001558 PARAMETER Experiment Name: At_Drought_Soil_Dry_P Parameter: Treatment Value: Drought vs. No Drought
  misc_feature: MA Experiment ID: 20001559 Result: Up-regulated in Transcription
  misc_feature: MA Experiment 20001559 PARAMETER Experiment Name: At_Drought_Soil_Dry_P Parameter: Age (day) Value: 28
  misc_feature: MA Experiment 20001559 PARAMETER Experiment Name: At_Drought_Soil_Dry_P Parameter: Organism Value: A. thaliana
  misc_feature: MA Experiment 20001559 PARAMETER Experiment Name: At_Drought_Soil_Dry_P Parameter: Plant Line Value: WS
  misc_feature: MA Experiment 20001559 PARAMETER Experiment Name: At_Drought_Soil_Dry_P Parameter: Post Timepoint (hr) Value: 29
  misc_feature: MA Experiment 20001559 PARAMETER Experiment Name: At_Drought_Soil_Dry_P Parameter: Post-Treatment Value: Re-Water vs. No Drought
  misc_feature: MA Experiment 20001559 PARAMETER Experiment Name: At_Drought_Soil_Dry_P Parameter: Timepoint (day) Value: 14
  misc_feature: MA Experiment 20001559 PARAMETER Experiment Name: At_Drought_Soil_Dry_P Parameter: Treatment Value: Drought vs. No Drought
  misc_feature: MA Experiment ID: 20001904 Result: Up-regulated in Transcription
  misc_feature: MA Experiment 20001904 PARAMETER Experiment Name: At_Drought_Reproduction_P Parameter: Age (day) Value: 37
  misc_feature: MA Experiment 20001904 PARAMETER Experiment Name: At_Drought_Reproduction_P Parameter: Organism Value: A. thaliana
  misc_feature: MA Experiment 20001904 PARAMETER Experiment Name: At_Drought_Reproduction_P Parameter: Plant Line Value: WS
  misc_feature: MA Experiment 20001904 PARAMETER Experiment Name: At_Drought_Reproduction_P Parameter: Timepoint (day) Value: 7
  misc_feature: MA Experiment 20001904 PARAMETER Experiment Name: At_Drought_Reproduction_P Parameter: Tissue Value: Rosettes
  misc_feature: MA Experiment 20001904 PARAMETER Experiment Name: At_Drought_Reproduction_P Parameter: Treatment Value: Drought vs. No Drought
  misc_feature: MA Experiment ID: 20001905 Result: Up-regulated in Transcription
  misc_feature: MA Experiment 20001905 PARAMETER Experiment Name: At_Drought_Reproduction_P Parameter: Age (day) Value: 40
  misc_feature: MA Experiment 20001905 PARAMETER Experiment Name: At_Drought_Reproduction_P Parameter: Organism Value: A. thaliana
  misc_feature: MA Experiment 20001905 PARAMETER Experiment Name: At_Drought_Reproduction_P Parameter: Plant Line Value: WS
  misc_feature: MA Experiment 20001905 PARAMETER Experiment Name: At_Drought_Reproduction_P Parameter: Timepoint (day) Value: 10
  misc_feature: MA Experiment 20001905 PARAMETER Experiment Name: At_Drought_Reproduction_P Parameter: Tissue Value: Rosettes
  misc_feature: MA Experiment 20001905 PARAMETER Experiment Name: At_Drought_Reproduction_P Parameter: Treatment Value: Drought vs. No Drought
  misc_feature: MA Experiment ID: 20001911 Result: Up-regulated in Transcription
  misc_feature: MA Experiment 20001911 PARAMETER Experiment Name: At_Drought_Reproduction_P Parameter: Age (day) Value: 40
  misc_feature: MA Experiment 20001911 PARAMETER Experiment Name: At_Drought_Reproduction_P Parameter: Organism Value: A. thaliana
  misc_feature: MA Experiment 20001911 PARAMETER Experiment Name: At_Drought_Reproduction_P Parameter: Plant Line Value: WS
  misc_feature: MA Experiment 20001911 PARAMETER Experiment Name: At_Drought_Reproduction_P Parameter: Timepoint (day) Value: 10
  misc_feature: MA Experiment 20001911 PARAMETER Experiment Name: At_Drought_Reproduction_P Parameter: Tissue Value: Flowers
  misc_feature: MA Experiment 20001911 PARAMETER Experiment Name: At_Drought_Reproduction_P Parameter: Treatment Value: Drought vs. No Drought
tgaacatcgtcatctctaacaatggcgccttctccgatcatcttctccgttcttcttctcttcatcttctcactctcatcatctgctcaaacacctttccgtcccaaagctctccttctcccagtaacaaaagaccaatctaccctccagtacacaaccgtcatcaaccaacgcacacctctcgtccccgcttccgtcgtcttcgacctcggtggtcgagaactctgggtcgactgcgacaaaggctacgtctcctccacttaccagtctcctcgctgcaactccgccgtctgctcacgtgccggctccacaagctgcggcacatgcttctcccctccgagacctggctgtagtaacaacacttgcggcggcattccggataacaccgttaccggtaccgcaacttccggcgaatttgctttagacgttgtgtctatccagtccactaacggatccaatccgggcagggtcgttaaaatcccaaatttgatcttcgattgtggagcaacgtttcttcttaaaggactcgctaaaggaaccgttggtatggcgggaatgggacgtcacaacatcggtttaccgtcgcaattcgccgccgcgtttagcttccaccgtaaattcgccgtctgtctaacttccggtaaaggcgtcgccttcttcggcaacggaccttacgttttccttcccggaatccagatctcaagtctccaaacgacgccccttctcatcaatccggtcagcactgcttctgcgttttcacaaggtgagaaatcctcagagtactttatcggcgtgacggcgattcaaatcgtcgagaaaacagttccgatcaatccaacgctattgaagattaacgcaagtaccggtatcggaggaaccaaaatcagctccgtcaatccttacacggtgttggagtcatcgatctacaatgcttttacgtcggagttcgttaaacaagcagcggcgaggagcatcaagagagtagcgtcggtgaaaccgttcggcgcgtgtttcagcacgaagaacgtcggcgtgacgcgcctaggatacgccgtgccggagattgagcttgtgcttcatagcaaagacgtcgtttggaggatatttggagccaactcgatggtgagtgtcagtgatgacgtcatctgtttgggtttcgttgacggaggagtcaacgcaagaacctctgttgtgattggagggtttcagttggaggataatttgatcgaatttgatttggcgagtaacaaatttgggtttagttccacgttattgggccgtcaaactaactgcgccaacttcaatttcacttccactgcttgattaaattagttgatccgttttctttttttaaaactgttttttagtggttattatattatgtttgatgtgattaataaagagccaatggaatcattatttggcatttttttaatcaatttatttgaataaattatgtaatgagtgaattttatttgatacatct

SEQ ID NO: 28927 - protein, 433 aa, Arabidopsis thaliana
  peptide (1)..(433): Ceres Seq. ID no. 13499725
  misc_feature (21)..(415): Pfam Name: Eukaryotic aspartyl protease Pfam Description: Eukaryotic aspartyl protease
  misc_feature (6)..(431): Homolog of NCBI NO: 1401240 NR Description: 7S seed globulin precursor
  misc_feature (20)..(426): Homolog of NCBI NO: 99969 NR Description: conglutin gamma precursor - narrow-leaved blue
  misc_feature (20)..(426): Homolog of NCBI NO: 662366 NR Description: conglutin gamma [Lupinus angustifolius]
  misc_feature (6)..(426): Homolog of NCBI NO: 11191819 NR Description: conglutin gamma [Lupinus albus]
  misc_feature (7)..(431): Homolog of NCBI NO: 7488910 NR Description: dermal glycoprotein precursor, extracellular -
  misc_feature (1)..(431): Homolog of NCBI NO: 27372527 NR Description: xyloglucan-specific fungal endoglucanase
  misc_feature (1)..(433): Homolog of NCBI NO: 32482806 NR Description: putative xyloglucanase inhibitor [Solanum
  misc_feature (1)..(433): Homolog of NCBI NO: 18379072 NR Description: expressed protein [Arabidopsis thaliana]
  misc_feature (1)..(433): Homolog of NCBI NO: 21537233 NR Description: EDGP precursor [Arabidopsis thaliana]
  misc_feature (1)..(433): Homolog of NCBI NO: 15218740 NR Description: expressed protein [Arabidopsis thaliana]
MAPSPIIFSVLLLFIFSLSSSAQTPFRPKALLLPVTKDQSTLQYTTVINQRTPLVPASVVFDLGGRELWVDCDKGYVSSTYQSPRCNSAVCSRAGSTSCGTCFSPPRPGCSNNTCGGIPDNTVTGTATSGEFALDVVSIQSTNGSNPGRVVKIPNLIFDCGATFLLKGLAKGTVGMAGMGRHNIGLPSQFAAAFSFHRKFAVCLTSGKGVAFFGNGPYVFLPGIQISSLQTTPLLINPVSTASAFSQGEKSSEYFIGVTAIQIVEKTVPINPTLLKINASTGIGGTKISSVNPYTVLESSIYNAFTSEFVKQAAARSIKRVASVKPFGACFSTKNVGVTRLGYAVPEIELVLHSKDVVWRIFGANSMVSVSDDVICLGFVDGGVNARTSVVIGGFQLEDNLIEFDLASNKFGFSSTLLGRQTNCANFNFTSTA

SEQ ID NO: 28928 - protein, 258 aa, Arabidopsis thaliana
  peptide (1)..(258): Ceres Seq. ID no. 13499726
  misc_feature (1)..(240): Pfam Name: Eukaryotic aspartyl protease Pfam Description: Eukaryotic aspartyl protease
  misc_feature (1)..(256): Homolog of NCBI NO: 1401240 NR Description: 7S seed globulin precursor
  misc_feature (1)..(251): Homolog of NCBI NO: 99969 NR Description: conglutin gamma precursor - narrow-leaved blue
  misc_feature (1)..(251): Homolog of NCBI NO: 662366 NR Description: conglutin gamma [Lupinus angustifolius]
  misc_feature (1)..(251): Homolog of NCBI NO: 11191819 NR Description: conglutin gamma [Lupinus albus]
  misc_feature (1)..(256): Homolog of NCBI NO: 7488910 NR Description: dermal glycoprotein precursor, extracellular -
  misc_feature (1)..(256): Homolog of NCBI NO: 27372527 NR Description: xyloglucan-specific fungal endoglucanase
  misc_feature (1)..(258): Homolog of NCBI NO: 32482806 NR Description: putative xyloglucanase inhibitor [Solanum
  misc_feature (1)..(258): Homolog of NCBI NO: 18379072 NR Description: expressed protein [Arabidopsis thaliana]
  misc_feature (1)..(258): Homolog of NCBI NO: 21537233 NR Description: EDGP precursor [Arabidopsis thaliana]
  misc_feature (1)..(258): Homolog of NCBI NO: 15218740 NR Description: expressed protein [Arabidopsis thaliana]
MAGMGRHNIGLPSQFAAAFSFHRKFAVCLTSGKGVAFFGNGPYVFLPGIQISSLQTTPLLINPVSTASAFSQGEKSSEYFIGVTAIQIVEKTVPINPTLLKINASTGIGGTKISSVNPYTVLESSIYNAFTSEFVKQAAARSIKRVASVKPFGACFSTKNVGVTRLGYAVPEIELVLHSKDVVWRIFGANSMVSVSDDVICLGFVDGGVNARTSVVIGGFQLEDNLIEFDLASNKFGFSSTLLGRQTNCANFNFTSTA

SEQ ID NO: 28929 - protein, 255 aa, Arabidopsis thaliana
  peptide (1)..(255): Ceres Seq. ID no. 13499727
  misc_feature (1)..(237): Pfam Name: Eukaryotic aspartyl protease Pfam Description: Eukaryotic aspartyl protease
  misc_feature (1)..(253): Homolog of NCBI NO: 1401240 NR Description: 7S seed globulin precursor
  misc_feature (1)..(248): Homolog of NCBI NO: 99969 NR Description: conglutin gamma precursor - narrow-leaved blue
  misc_feature (1)..(248): Homolog of NCBI NO: 662366 NR Description: conglutin gamma [Lupinus angustifolius]
  misc_feature (1)..(248): Homolog of NCBI NO: 11191819 NR Description: conglutin gamma [Lupinus albus]
  misc_feature (1)..(253): Homolog of NCBI NO: 7488910 NR Description: dermal glycoprotein precursor, extracellular -
  misc_feature (1)..(253): Homolog of NCBI NO: 27372527 NR Description: xyloglucan-specific fungal endoglucanase
  misc_feature (1)..(255): Homolog of NCBI NO: 32482806 NR Description: putative xyloglucanase inhibitor [Solanum
  misc_feature (1)..(255): Homolog of NCBI NO: 18379072 NR Description: expressed protein [Arabidopsis thaliana]
  misc_feature (1)..(255): Homolog of NCBI NO: 21537233 NR Description: EDGP precursor [Arabidopsis thaliana]
  misc_feature (1)..(255): Homolog of NCBI NO: 15218740 NR Description: expressed protein [Arabidopsis thaliana]
MGRHNIGLPSQFAAAFSFHRKFAVCLTSGKGVAFFGNGPYVFLPGIQISSLQTTPLLINPVSTASAFSQGEKSSEYFIGVTAIQIVEKTVPINPTLLKINASTGIGGTKISSVNPYTVLESSIYNAFTSEFVKQAAARSIKRVASVKPFGACFSTKNVGVTRLGYAVPEIELVLHSKDVVWRIFGANSMVSVSDDVICLGFVDGGVNARTSVVIGGFQLEDNLIEFDLASNKFGFSSTLLGRQTNCANFNFTSTA

SEQ ID NO: 28930 - DNA, 1084 bp, Arabidopsis thaliana
  misc_feature (1)..(1084): Ceres Seq. ID no. 13490650
  misc_feature: MA Experiment ID: 108434 Result: Up-regulated in Transcription
  misc_feature: MA Experiment 108434 PARAMETER Experiment Name: At_Root_Tips_cDNA_P Parameter: Tissue Value: Root Tips
  misc_feature: MA Experiment ID: 108462 Result: Down-regulated in Transcription
  misc_feature: MA Experiment 108462 PARAMETER Experiment Name: At_Germinating_Seeds_cDNA_P Parameter: Age (day) Value: 2 vs. 0
  misc_feature: MA Experiment 108462 PARAMETER Experiment Name: At_Germinating_Seeds_cDNA_P Parameter: Tissue Value: Germinating Seeds
  misc_feature: MA Experiment ID: 108463 Result: Down-regulated in Transcription
  misc_feature: MA Experiment 108463 PARAMETER Experiment Name: At_Germinating_Seeds_cDNA_P Parameter: Age (day) Value: 3 vs. 0
  misc_feature: MA Experiment 108463 PARAMETER Experiment Name: At_Germinating_Seeds_cDNA_P Parameter: Tissue Value: Germinating Seeds
  misc_feature: MA Experiment ID: 108573 Result: Up-regulated in Transcription
  misc_feature: MA Experiment 108573 PARAMETER Experiment Name: At_Drought_cDNA_P Parameter: Timepoint (hr) Value: 6
  misc_feature: MA Experiment 108573 PARAMETER Experiment Name: At_Drought_cDNA_P Parameter: Tissue Value: Aerial
  misc_feature: MA Experiment 108573 PARAMETER Experiment Name: At_Drought_cDNA_P Parameter: Treatment Value: Drought vs. No Drought
  misc_feature: MA Experiment ID: 108585 Result: Up-regulated in Transcription
  misc_feature: MA Experiment 108585 PARAMETER Experiment Name: At_5mM_NaNP_cDNA_P Parameter: Timepoint (hr) Value: 6
  misc_feature: MA Experiment 108585 PARAMETER Experiment Name: At_5mM_NaNP_cDNA_P Parameter: Tissue Value: Aerial
  misc_feature: MA Experiment 108585 PARAMETER Experiment Name: At_5mM_NaNP_cDNA_P Parameter: Treatment Value: null
  misc_feature: MA Experiment ID: 20000179 Result: Down-regulated in Transcription
  misc_feature: MA Experiment 20000179 PARAMETER Experiment Name: At_Germinating_Seeds_P Parameter: Age (hr) Value: 6 vs. 0
  misc_feature: MA Experiment 20000179 PARAMETER Experiment Name: At_Germinating_Seeds_P Parameter: Tissue Value: Germinating Seeds
  misc_feature: MA Experiment ID: 20000182 Result: Up-regulated in Transcription
  misc_feature: MA Experiment 20000182 PARAMETER Experiment Name: At_2mM_SA_P Parameter: Age (day) Value: 14
  misc_feature: MA Experiment 20000182 PARAMETER Experiment Name: At_2mM_SA_P Parameter: Organism Value: A. thaliana
  misc_feature: MA Experiment 20000182 PARAMETER Experiment Name: At_2mM_SA_P Parameter: Plant Line Value: WS
  misc_feature: MA Experiment 20000182 PARAMETER Experiment Name: At_2mM_SA_P Parameter: Timepoint (hr) Value: 6
  misc_feature: MA Experiment 20000182 PARAMETER Experiment Name: At_2mM_SA_P Parameter: Tissue Value: Aerial
  misc_feature: MA Experiment 20000182 PARAMETER Experiment Name: At_2mM_SA_P Parameter: Treatment Value: 2mM SA vs. No Treatment
  misc_feature: MA Experiment ID: 20000224 Result: Down-regulated in Transcription
ggcttgaaggaaaagaaaagttttgtttctgaactttcgtctctataaaccctttcgacgacgagtgaagaagaaagcgagacgaagaagcaaagatgttcagaaaccaatacgacacagatgttacgacatggagtccaacaggtcgtttattccaagtggaatacgccatggaagcagtgaagcaaggatctgcagcaattggactcagatctcgttctcatgtcgttctcgcttgtgttaacaaagctcaatcggagctttcttcgcatcagaggaagatctttaaagtcgatgaccatatcggtgttgcaatcgctggtctcacagccgacggtcgtgtattgtctcggtatatgagatcggaatcgattaatcactcttttacttatgagtctcctcttcctgttggtcgtctcgttgttcatcttgctgataaagctcaggtctgtacccaacgatcatggaaacgaccctatggtgttggtttgctggtaggtggattggatgagtctggagcccacctttactacaactgtcccagcggaaactactttgagtaccaagcttttgctattggatcccgttcccaagcagcaaagacctatctggaacgcaggtttgagagctttggggattcttctagagaagatctgatcaaagatgctattttggctgttagggagacattgcaaggggaaacactgaagagttctctctgcacagttgctattctaggagtcgatgaaccgttccacttcctggaccaggaagcaatacagaaagtgatcgacacatttgagaaagtgccagaggaagaggaagcagaaggcgaggctggtgagggtgaggccgaagctgccggggctgcaccagcagaacaaggtggtggtggtgcaggtgaccaagacgtggctccaatggaaatgtaaggcttgtgtgtgtaacgctggatggaactattttatttcgatgttagttggatttttactttgcaaaatggctgcgggtttagattatatgcttgagaagttgaaaccatttcgtcattttaactcaatagctgccatcaagactttctctc

SEQ ID NO: 28931 - protein, 278 aa, Arabidopsis thaliana
  peptide (1)..(278): Ceres Seq. ID no. 15219202
  misc_feature (29)..(214): Pfam Name: Proteasome A-type and B-type Pfam Description: Proteasome A-type and B-type
  misc_feature (1)..(245): Homolog of NCBI NO: 12229911 NR Description: Proteasome subunit alpha type 1 (Proteasome
  misc_feature (1)..(256): Homolog of NCBI NO: 33563282 NR Description: proteasome (prosome, macropain) subunit, alpha
  misc_feature (6)..(162): Homolog of NCBI NO: 14594923 NR Description: putative alpha6 proteasome subunit [Nicotiana
  misc_feature (1)..(262): Homolog of NCBI NO: 1709758 NR Description: Proteasome subunit alpha type 1 (20S proteasome subunit F) (20S proteasome subunit alpha-6) (Proteasome component
  misc_feature (1)..(278): Homolog of NCBI NO: 22947842 NR Description: 20S proteasome alpha 6 subunit [Nicotiana
  misc_feature (11)..(278): Homolog of NCBI NO: 2511586 NR Description: multicatalytic endopeptidase [Arabidopsis
  misc_feature (1)..(278): Homolog of NCBI NO: 15220151 NR Description: 20S proteasome alpha subunit F2 (PAF2)
  misc_feature (1)..(278): Homolog of NCBI NO: 15239061 NR Description: 20S proteasome alpha subunit F1 (PAF1)
  misc_feature (1)..(278): Homolog of NCBI NO: 25290066 NR Description: C 3.4.25.1 proteasome endopeptidase complex ()
  misc_feature (1)..(278): Homolog of NCBI NO: 21537234 NR Description: 20S proteasome subunit PAF1 [Arabidopsis thaliana]
MFRNQYDTDVTTWSPTGRLFQVEYAMEAVKQGSAAIGLRSRSHVVLACVNKAQSELSSHQRKIFKVDDHIGVAIAGLTADGRVLSRYMRSESINHSFTYESPLPVGRLVVHLADKAQVCTQRSWKRPYGVGLLVGGLDESGAHLYYNCPSGNYFEYQAFAIGSRSQAAKTYLERRFESFGDSSREDLIKDAILAVRETLQGETLKSSLCTVAILGVDEPFHFLDQEAIQKVIDTFEKVPEEEEAEGEAGEGEAEAAGAAPAEQGGGGAGDQDVAPMEM

SEQ ID NO: 28932 - protein, 253 aa, Arabidopsis thaliana
  peptide (1)..(253): Ceres Seq. ID no. 15219203
  misc_feature (4)..(189): Pfam Name: Proteasome A-type and B-type Pfam Description: Proteasome A-type and B-type
  misc_feature (1)..(220): Homolog of NCBI NO: 12229911 NR Description: Proteasome subunit alpha type 1 (Proteasome
  misc_feature (1)..(231): Homolog of NCBI NO: 33563282 NR Description: proteasome (prosome, macropain) subunit, alpha
  misc_feature (1)..(137): Homolog of NCBI NO: 14594923 NR Description: putative alpha6 proteasome subunit [Nicotiana
  misc_feature (1)..(237): Homolog of NCBI NO: 1709758 NR Description: Proteasome subunit alpha type 1 (20S proteasome subunit F) (20S proteasome subunit alpha-6) (Proteasome component
  misc_feature (1)..(253): Homolog of NCBI NO: 22947842 NR Description: 20S proteasome alpha 6 subunit [Nicotiana
  misc_feature (1)..(253): Homolog of NCBI NO: 2511586 NR Description: multicatalytic endopeptidase [Arabidopsis
  misc_feature (1)..(253): Homolog of NCBI NO: 15220151 NR Description: 20S proteasome alpha subunit F2 (PAF2)
  misc_feature (1)..(253): Homolog of NCBI NO: 15239061 NR Description: 20S proteasome alpha subunit F1 (PAF1)
  misc_feature (1)..(253): Homolog of NCBI NO: 25290066 NR Description: C 3.4.25.1 proteasome endopeptidase complex ()
  misc_feature (1)..(253): Homolog of NCBI NO: 21537234 NR Description: 20S proteasome subunit PAF1 [Arabidopsis thaliana]
MEAVKQGSAAIGLRSRSHVVLACVNKAQSELSSHQRKIFKVDDHIGVAIAGLTADGRVLSRYMRSESINHSFTYESPLPVGRLVVHLADKAQVCTQRSWKRPYGVGLLVGGLDESGAHLYYNCPSGNYFEYQAFAIGSRSQAAKTYLERRFESFGDSSREDLIKDAILAVRETLQGETLKSSLCTVAILGVDEPFHFLDQEAIQKVIDTFEKVPEEEEAEGEAGEGEAEAAGAAPAEQGGGGAGDQDVAPMEM

SEQ ID NO: 28933 - protein, 191 aa, Arabidopsis thaliana
  peptide (1)..(191): Ceres Seq. ID no. 15219204
  misc_feature (1)..(127): Pfam Name: Proteasome A-type and B-type Pfam Description: Proteasome A-type and B-type
  misc_feature (1)..(158): Homolog of NCBI NO: 12229911 NR Description: Proteasome subunit alpha type 1 (Proteasome
  misc_feature (1)..(169): Homolog of NCBI NO: 33563282 NR Description: proteasome (prosome, macropain) subunit, alpha
  misc_feature (1)..(75): Homolog of NCBI NO: 14594923 NR Description: putative alpha6 proteasome subunit [Nicotiana
  misc_feature (1)..(175): Homolog of NCBI NO: 1709758 NR Description: Proteasome subunit alpha type 1 (20S proteasome subunit F) (20S proteasome subunit alpha-6) (Proteasome component
  misc_feature (1)..(191): Homolog of NCBI NO: 22947842 NR Description: 20S proteasome alpha 6 subunit [Nicotiana
  misc_feature (1)..(191): Homolog of NCBI NO: 2511586 NR Description: multicatalytic endopeptidase [Arabidopsis
  misc_feature (1)..(191): Homolog of NCBI NO: 15220151 NR Description: 20S proteasome alpha subunit F2 (PAF2)
  misc_feature (1)..(191): Homolog of NCBI NO: 15239061 NR Description: 20S proteasome alpha subunit F1 (PAF1)
  misc_feature (1)..(191): Homolog of NCBI NO: 25290066 NR Description: C 3.4.25.1 proteasome endopeptidase complex ()
  misc_feature (1)..(191): Homolog of NCBI NO: 21537234 NR Description: 20S proteasome subunit PAF1 [Arabidopsis thaliana]
MRSESINHSFTYESPLPVGRLVVHLADKAQVCTQRSWKRPYGVGLLVGGLDESGAHLYYNCPSGNYFEYQAFAIGSRSQAAKTYLERRFESFGDSSREDLIKDAILAVRETLQGETLKSSLCTVAILGVDEPFHFLDQEAIQKVIDTFEKVPEEEEAEGEAGEGEAEAAGAAPAEQGGGGAGDQDVAPMEM

SEQ ID NO: 28934 - DNA, 570 bp, Arabidopsis thaliana
  misc_feature (1)..(570): Ceres Seq. ID no. 12359958
  misc_feature: MA Experiment ID: 108433 Result: Down-regulated in Transcription
  misc_feature: MA Experiment 108433 PARAMETER Experiment Name: At_rhl_Mutant2_cDNA_P Parameter: Age (day) Value: 7
  misc_feature: MA Experiment 108433 PARAMETER Experiment Name: At_rhl_Mutant2_cDNA_P Parameter: Organism Value: A. thaliana
  misc_feature: MA Experiment 108433 PARAMETER Experiment Name: At_rhl_Mutant2_cDNA_P Parameter: Plant Line Value: rhl Mutant vs. wt landsburg
  misc_feature: MA Experiment 108433 PARAMETER Experiment Name: At_rhl_Mutant2_cDNA_P Parameter: Tissue Value: Roots
  misc_feature: MA Experiment ID: 108434 Result: Down-regulated in Transcription
  misc_feature: MA Experiment 108434 PARAMETER Experiment Name: At_Root_Tips_cDNA_P Parameter: Tissue Value: Root Tips
  misc_feature: MA Experiment ID: 20000184 Result: Up-regulated in Transcription
  misc_feature: MA Experiment 20000184 PARAMETER Experiment Name: At_Shoots__P Parameter: Age (day) Value: 7
  misc_feature: MA Experiment 20000184 PARAMETER Experiment Name: At_Shoots__P Parameter: Tissue Value: Shoots vs. Whole Plant
  misc_feature: MA Experiment ID: 20000185 Result: Up-regulated in Transcription
  misc_feature: MA Experiment 20000185 PARAMETER Experiment Name: At_Roots__P Parameter: Age (day) Value: 7 vs. 21
  misc_feature: MA Experiment 20000185 PARAMETER Experiment Name: At_Roots__P Parameter: Organism Value: A. thaliana
  misc_feature: MA Experiment 20000185 PARAMETER Experiment Name: At_Roots__P Parameter: Tissue Value: Roots vs. Whole Plant
  misc_feature: MA Experiment ID: 20000227 Result: Down-regulated in Transcription
  misc_feature: MA Experiment 20000227 PARAMETER Experiment Name: At_Root-Tips-vs-Tops_P Parameter: Tissue Value: Root Tips vs. Root Tops
  misc_feature: MA Experiment ID: 20000234 Result: Down-regulated in Transcription
  misc_feature: MA Experiment 20000234 PARAMETER Experiment Name: At_Siliques_P Parameter: Age (day) Value: 21
  misc_feature: MA Experiment 20000234 PARAMETER Experiment Name: At_Siliques_P Parameter: Organism Value: A. thaliana
  misc_feature: MA Experiment 20000234 PARAMETER Experiment Name: At_Siliques_P Parameter: Plant Line Value: WS
  misc_feature: MA Experiment 20000234 PARAMETER Experiment Name: At_Siliques_P Parameter: Tissue Value: Less Than 5mm Siliques vs. Whole Plant
  misc_feature: MA Experiment ID: 20000265 Result: Down-regulated in Transcription
  misc_feature: MA Experiment 20000265 PARAMETER Experiment Name: At_Open_Flower_P Parameter: Age (day) Value: 21
  misc_feature: MA Experiment 20000265 PARAMETER Experiment Name: At_Open_Flower_P Parameter: Plant Line Value: WS
  misc_feature: MA Experiment 20000265 PARAMETER Experiment Name: At_Open_Flower_P Parameter: Tissue Value: Closed Flower vs. Whole Plant
  misc_feature: MA Experiment ID: 20000269 Result: Down-regulated in Transcription
  misc_feature: MA Experiment 20000269 PARAMETER Experiment Name: At_1mM_KNO3_L-vs-H_Roots_P Parameter: Age (day) Value: 7,10,12
  misc_feature: MA Experiment 20000269 PARAMETER Experiment Name: At_1mM_KNO3_L-vs-H_Roots_P Parameter: Organism Value: A. thaliana
  misc_feature: MA Experiment 20000269 PARAMETER Experiment Name: At_1mM_KNO3_L-vs-H_Roots_P Parameter: Plant Line Value: WS
  misc_feature: MA Experiment 20000269 PARAMETER Experiment Name: At_1mM_KNO3_L-vs-H_Roots_P Parameter: Timepoint (day) Value: 7,10,12
  misc_feature: MA Experiment 20000269 PARAMETER Experiment Name: At_1mM_KNO3_L-vs-H_Roots_P Parameter: Tissue Value: Roots
  misc_feature: MA Experiment 20000269 PARAMETER Experiment Name: At_1mM_KNO3_L-vs-H_Roots_P Parameter: Treatment Value: 1mM KNO3 vs. 50mM KNO3
  misc_feature: MA Experiment ID: 20000286 Result: Down-regulated in Transcription
  misc_feature: MA Experiment 20000286 PARAMETER Experiment Name: At_Open_Flower_P Parameter: Age (day) Value: 21
  misc_feature: MA Experiment 20000286 PARAMETER Experiment Name: At_Open_Flower_P Parameter: Plant Line Value: WS
  misc_feature: MA Experiment 20000286 PARAMETER Experiment Name: At_Open_Flower_P Parameter: Tissue Value: Half Open vs. Whole Plant
  misc_feature: MA Experiment ID: 20000308 Result: Up-regulated in Transcription
  misc_feature: MA Experiment 20000308 PARAMETER Experiment Name: At_100mM_NaCl__P Parameter: Age (day) Value: 17
  misc_feature: MA Experiment 20000308 PARAMETER Experiment Name: At_100mM_NaCl__P Parameter: Organism Value: A. thaliana
  misc_feature: MA Experiment 20000308 PARAMETER Experiment Name: At_100mM_NaCl__P Parameter: Plant Line Value: WS
  misc_feature: MA Experiment 20000308 PARAMETER Experiment Name: At_100mM_NaCl__P Parameter: Timepoint (hr) Value: 72
  misc_feature: MA Experiment 20000308 PARAMETER Experiment Name: At_100mM_NaCl__P Parameter: Tissue Value: Whole Plant
  misc_feature: MA Experiment 20000308 PARAMETER Experiment Name: At_100mM_NaCl__P Parameter: Treatment Value: 100mM NaCl vs. No Treatment
  misc_feature: MA Experiment ID: 20000437 Result: Up-regulated in Transcription
  misc_feature: MA Experiment 20000437 PARAMETER Experiment Name: At_Drought_P Parameter: Age (day) Value: 8
  misc_feature: MA Experiment 20000437 PARAMETER Experiment Name: At_Drought_P Parameter: Organism Value: A. thaliana
  misc_feature: MA Experiment 20000437 PARAMETER Experiment Name: At_Drought_P Parameter: Plant Line Value: WS
  misc_feature: MA Experiment 20000437 PARAMETER Experiment Name: At_Drought_P Parameter: Timepoint (hr) Value: 24
  misc_feature: MA Experiment 20000437 PARAMETER Experiment Name: At_Drought_P Parameter: Tissue Value: Whole Plant
  misc_feature: MA Experiment 20000437 PARAMETER Experiment Name: At_Drought_P Parameter: Treatment Value: Drought vs. No Drought
  misc_feature: MA Experiment ID: 20000438 Result: Up-regulated in Transcription
  misc_feature: MA Experiment 20000438 PARAMETER Experiment Name: At_Shoots__P Parameter: Age (day) Value: 14
  misc_feature: MA Experiment 20000438 PARAMETER Experiment Name: At_Shoots__P Parameter: Tissue Value: Shoots vs. Whole Plant
  misc_feature: MA Experiment ID: 20000439 Result: Up-regulated in Transcription
  misc_feature: MA Experiment 20000439 PARAMETER Experiment Name: At_Roots__P Parameter: Age (day) Value: 14 vs. 21
  misc_feature: MA Experiment 20000439 PARAMETER Experiment Name: At_Roots__P Parameter: Organism Value: A. thaliana
  misc_feature: MA Experiment 20000439 PARAMETER Experiment Name: At_Roots__P Parameter: Tissue Value: Roots vs. Whole Plant
  misc_feature: MA Experiment ID: 20000460 Result: Up-regulated in Transcription
  misc_feature: MA Experiment 20000460 PARAMETER Experiment Name: At_10percent_PEG_P Parameter: Age (day) Value: 12
  misc_feature: MA Experiment 20000460 PARAMETER Experiment Name: At_10percent_PEG_P Parameter: Organism Value: A. thaliana
  misc_feature: MA Experiment 20000460 PARAMETER Experiment Name: At_10percent_PEG_P Parameter: Plant Line Value: WS
  misc_feature: MA Experiment 20000460 PARAMETER Experiment Name: At_10percent_PEG_P Parameter: Timepoint (day) Value: 12
  misc_feature: MA Experiment 20000460 PARAMETER Experiment Name: At_10percent_PEG_P Parameter: Tissue Value: Whole Plant
  misc_feature: MA Experiment 20000460 PARAMETER Experiment Name: At_10percent_PEG_P Parameter: Treatment Value: 10percent PEG vs. No Treatment
  misc_feature: MA Experiment ID: 20000574 Result: Up-regulated in Transcription
  misc_feature: MA Experiment 20000574 PARAMETER Experiment Name: At_100uM_ABA_Mutants__P Parameter: Organism Value: A. thaliana
  misc_feature: MA Experiment 20000574 PARAMETER Experiment Name: At_100uM_ABA_Mutants__P Parameter: Plant Line Value: CS23 vs. Ler wt
  misc_feature: MA Experiment 20000574 PARAMETER Experiment Name: At_100uM_ABA_Mutants__P Parameter: Timepoint (hr) Value: N/A
  misc_feature: MA Experiment 20000574 PARAMETER Experiment Name: At_100uM_ABA_Mutants__P Parameter: Tissue Value: Whole Plant
  misc_feature: MA Experiment 20000574 PARAMETER Experiment Name: At_100uM_ABA_Mutants__P Parameter: Treatment Value: None
  misc_feature: MA Experiment ID: 20000575 Result: Up-regulated in Transcription
  misc_feature: MA Experiment 20000575 PARAMETER Experiment Name: At_100uM_ABA_Mutants__P Parameter: Organism Value: A. thaliana
  misc_feature: MA Experiment 20000575 PARAMETER Experiment Name: At_100uM_ABA_Mutants__P Parameter: Plant Line Value: CS22
  misc_feature: MA Experiment 20000575 PARAMETER Experiment Name: At_100uM_ABA_Mutants__P Parameter: Timepoint (hr) Value: 6
  misc_feature: MA Experiment 20000575 PARAMETER Experiment Name: At_100uM_ABA_Mutants__P Parameter: Tissue Value: Whole Plant
  misc_feature: MA Experiment 20000575 PARAMETER Experiment Name: At_100uM_ABA_Mutants__P Parameter: Treatment Value: 1uM ABA vs. No Treatment
  misc_feature: MA Experiment ID: 20000576 Result: Up-regulated in Transcription
  misc_feature: MA Experiment 20000576 PARAMETER Experiment Name: At_100uM_ABA_Mutants__P Parameter: Organism Value: A. thaliana
  misc_feature: MA Experiment 20000576 PARAMETER Experiment Name: At_100uM_ABA_Mutants__P Parameter: Plant Line Value: CS23
  misc_feature: MA Experiment 20000576 PARAMETER Experiment Name: At_100uM_ABA_Mutants__P Parameter: Timepoint (hr) Value: 6
  misc_feature: MA Experiment 20000576 PARAMETER Experiment Name: At_100uM_ABA_Mutants__P Parameter: Tissue Value: Whole Plant
  misc_feature: MA Experiment 20000576 PARAMETER Experiment Name: At_100uM_ABA_Mutants__P Parameter: Treatment Value: 1uM ABA vs. No Treatment
  misc_feature: MA Experiment ID: 20001451 Result: Up-regulated in Transcription
  misc_feature: MA Experiment 20001451 PARAMETER Experiment Name: At_Far-red-induction_P Parameter: Age (day) Value: 7
  misc_feature: MA Experiment 20001451 PARAMETER Experiment Name: At_Far-red-induction_P Parameter: Light Value: Far-red vs. White
  misc_feature: MA Experiment 20001451 PARAMETER Experiment Name: At_Far-red-induction_P Parameter: Organism Value: A. thaliana
  misc_feature: MA Experiment 20001451 PARAMETER Experiment Name: At_Far-red-induction_P Parameter: Plant Line Value: Columbia
  misc_feature: MA Experiment 20001451 PARAMETER Experiment Name: At_Far-red-induction_P Parameter: Timepoint (hr) Value: 24
  misc_feature: MA Experiment 20001451 PARAMETER Experiment Name: At_Far-red-induction_P Parameter: Tissue Value: Whole Plant
aaactcatcacttacttaacatactaagagagttattagatcttgaaaaacatggcttccaaggctttgattctgttgggtctcttcgcaattcttctggtggtctccgaagtttctgccgcaaggcagtcgggcatggtgaagccagagagtgaggaaactgtgcaacctgaaggttatcacggaggacatggtggtcacggagggggaggccactacggaggaggaggccacgggcatggaggacacaacggaggagggggccacggacttgacggatacggaggaggacatggaggacactacggaggaggaggaggacactacggaggaggaggaggccacggtggtggtggacactatggaggtggaggacaccatggaggaggaggtcacgggctgaacgaacctgttcagacgaagccgggtgtttaaaagttataactatcaaataaattcaccatgcataattgcatctctatatacacttatgtcttatatgtatccatcaaaataaaccatggtgagtttgtaatgcagttccttcagaaatgtgtggaataatgtttc

SEQ ID NO: 28935 - protein, 127 aa, Arabidopsis thaliana
  peptide (1)..(127): Ceres Seq. ID no. 12359959
  misc_feature (42)..(126): Pfam Name: Herpesvirus latent membrane protein 1 (LMP1) Pfam Description: Herpesvirus latent membrane protein 1 (LMP1)
  misc_feature (1)..(126): Homolog of NCBI NO: 18266043 NR Description: glycine-rich protein [Brassica oleracea]
  misc_feature (1)..(114): Homolog of NCBI NO: 81625 NR Description: glycine-rich protein 3 precursor - Arabidopsis
  misc_feature (1)..(114): Homolog of NCBI NO: 259447 NR Description: glycine-rich protein; atGRP [Arabidopsis thaliana]
  misc_feature (4)..(116): Homolog of NCBI NO: 7488799 NR Description: dormancy-associated protein 2 - garden pea
  misc_feature (1)..(116): Homolog of NCBI NO: 15224548 NR Description: putative glycine-rich protein
  misc_feature (1)..(127): Homolog of NCBI NO: 9957568 NR Description: antimicrobial peptide shep-GRP [Capsella
  misc_feature (1)..(127): Homolog of NCBI NO: 30678191 NR Description: glycine-rich protein [Arabidopsis thaliana]
  misc_feature (1)..(127): Homolog of NCBI NO: 21536606 NR Description: putative glycine-rich protein [Arabidopsis
  misc_feature (1)..(127): Homolog of NCBI NO: 15224540 NR Description: putative glycine-rich protein
  misc_feature (1)..(127): Homolog of NCBI NO: 15224547 NR Description: putative glycine-rich protein; protein id:
MASKALILLGLFAILLVVSEVSAARQSGMVKPESEETVQPEGYHGGHGGHGGGGHYGGGGHGHGGHNGGGGHGLDGYGGGHGGHYGGGGGHYGGGGGHGGGGHYGGGGHHGGGGHGLNEPVQTKPGV

SEQ ID NO: 28936 - protein, 99 aa, Arabidopsis thaliana
  peptide (1)..(99): Ceres Seq. ID no. 12359960
  misc_feature (14)..(98): Pfam Name: Herpesvirus latent membrane protein 1 (LMP1) Pfam Description: Herpesvirus latent membrane protein 1 (LMP1)
  misc_feature (1)..(98): Homolog of NCBI NO: 18266043 NR Description: glycine-rich protein [Brassica oleracea]
  misc_feature (1)..(86): Homolog of NCBI NO: 81625 NR Description: glycine-rich protein 3 precursor - Arabidopsis
  misc_feature (1)..(86): Homolog of NCBI NO: 259447 NR Description: glycine-rich protein; atGRP [Arabidopsis thaliana]
  misc_feature (1)..(88): Homolog of NCBI NO: 7488799 NR Description: dormancy-associated protein 2 - garden pea
  misc_feature (1)..(88): Homolog of NCBI NO: 15224548 NR Description: putative glycine-rich protein
  misc_feature (1)..(99): Homolog of NCBI NO: 9957568 NR Description: antimicrobial peptide shep-GRP [Capsella
  misc_feature (1)..(99): Homolog of NCBI NO: 30678191 NR Description: glycine-rich protein [Arabidopsis thaliana]
  misc_feature (1)..(99): Homolog of NCBI NO: 21536606 NR Description: putative glycine-rich protein [Arabidopsis
  misc_feature (1)..(99): Homolog of NCBI NO: 15224540 NR Description: putative glycine-rich protein
  misc_feature (1)..(99): Homolog of NCBI NO: 15224547 NR Description: putative glycine-rich protein; protein id:
MVKPESEETVQPEGYHGGHGGHGGGGHYGGGGHGHGGHNGGGGHGLDGYGGGHGGHYGGGGGHYGGGGGHGGGGHYGGGGHHGGGGHGLNEPVQTKPGV

SEQ ID NO: 28937 - protein, 70 aa, Arabidopsis thaliana
  peptide (1)..(70): Ceres Seq. ID no. 12359961
  misc_feature (1)..(64): Pfam Name: ELM2 domain Pfam Description: ELM2 domain
MVVTEGEATTEEEATGMEDTTEEGATDLTDTEEDMEDTTEEEEDTTEEEEATVVVDTMEVEDTMEEEVTG

SEQ ID NO: 28938 - DNA, 1160 bp, Arabidopsis thaliana
  misc_feature (1)..(1160): Ceres Seq. ID no. 13490472
  misc_feature: MA Experiment ID: 108434 Result: Down-regulated in Transcription
  misc_feature: MA Experiment 108434 PARAMETER Experiment Name: At_Root_Tips_cDNA_P Parameter: Tissue Value: Root Tips
  misc_feature: MA Experiment ID: 108461 Result: Up-regulated in Transcription
  misc_feature: MA Experiment 108461 PARAMETER Experiment Name: At_Germinating_Seeds_cDNA_P Parameter: Age (day) Value: 1 vs. 0
  misc_feature: MA Experiment 108461 PARAMETER Experiment Name: At_Germinating_Seeds_cDNA_P Parameter: Tissue Value: Germinating Seeds
  misc_feature: MA Experiment ID: 108462 Result: Up-regulated in Transcription
  misc_feature: MA Experiment 108462 PARAMETER Experiment Name: At_Germinating_Seeds_cDNA_P Parameter: Age (day) Value: 2 vs. 0
  misc_feature: MA Experiment 108462 PARAMETER Experiment Name: At_Germinating_Seeds_cDNA_P Parameter: Tissue Value: Germinating Seeds
  misc_feature: MA Experiment ID: 108463 Result: Up-regulated in Transcription
  misc_feature: MA Experiment 108463 PARAMETER Experiment Name: At_Germinating_Seeds_cDNA_P Parameter: Age (day) Value: 3 vs. 0
  misc_feature: MA Experiment 108463 PARAMETER Experiment Name: At_Germinating_Seeds_cDNA_P Parameter: Tissue Value: Germinating Seeds
  misc_feature: MA Experiment ID: 108464 Result: Up-regulated in Transcription
  misc_feature: MA Experiment 108464 PARAMETER Experiment Name: At_Germinating_Seeds_cDNA_P Parameter: Age (day) Value: 4 vs. 0
  misc_feature: MA Experiment 108464 PARAMETER Experiment Name: At_Germinating_Seeds_cDNA_P Parameter: Tissue Value: Germinating Seeds
  misc_feature: MA Experiment ID: 108501 Result: Up-regulated in Transcription
  misc_feature: MA Experiment 108501 PARAMETER Experiment Name: At_ap2_floral_buds_cDNA_P Parameter: Plant Line Value: ap2 (Ler.)
  misc_feature: MA Experiment 108501 PARAMETER Experiment Name: At_ap2_floral_buds_cDNA_P Parameter: Tissue Value: Closed Flower
  misc_feature: MA Experiment ID: 108579 Result: Down-regulated in Transcription
  misc_feature: MA Experiment 108579 PARAMETER Experiment Name: At_4deg_Cold_cDNA_P Parameter: Temperature (deg C) Value: 4 vs. 22
  misc_feature: MA Experiment 108579 PARAMETER Experiment Name: At_4deg_Cold_cDNA_P Parameter: Timepoint (hr) Value: 6
  misc_feature: MA Experiment 108579 PARAMETER Experiment Name: At_4deg_Cold_cDNA_P Parameter: Tissue Value: Aerial
  misc_feature: MA Experiment ID: 108667 Result: Down-regulated in Transcription
  misc_feature: MA Experiment 108667 PARAMETER Experiment Name: At_2mM_SA_cDNA_P Parameter: Plant Line Value: WS
  misc_feature: MA Experiment 108667 PARAMETER Experiment Name: At_2mM_SA_cDNA_P Parameter: Timepoint (hr) Value: 1
  misc_feature: MA Experiment 108667 PARAMETER Experiment Name: At_2mM_SA_cDNA_P Parameter: Treatment Value: 2mM SA vs. No Treatment
  misc_feature: MA Experiment ID: 20000111 Result: Down-regulated in Transcription
  misc_feature: MA Experiment 20000111 PARAMETER Experiment Name: At_42deg_Heat_cDNA_P Parameter: Temperature (deg C) Value: 42 vs. 22
  misc_feature: MA Experiment 20000111 PARAMETER Experiment Name: At_42deg_Heat_cDNA_P Parameter: Timepoint (hr) Value: 6
  misc_feature: MA Experiment 20000111 PARAMETER Experiment Name: At_42deg_Heat_cDNA_P Parameter: Tissue Value: Aerial
  misc_feature: MA Experiment ID: 20000113 Result: Down-regulated in Transcription
  misc_feature: MA Experiment 20000113 PARAMETER Experiment Name: At_42deg_Heat_cDNA_P Parameter: Temperature (deg C) Value: 42 vs. 22
  misc_feature: MA Experiment 20000113 PARAMETER Experiment Name: At_42deg_Heat_cDNA_P Parameter: Timepoint (hr) Value: 8
  misc_feature: MA Experiment 20000113 PARAMETER Experiment Name: At_42deg_Heat_cDNA_P Parameter: Tissue Value: Aerial
  misc_feature: MA Experiment ID: 20000144 Result: Down-regulated in Transcription
  misc_feature: MA Experiment 20000144 PARAMETER Experiment Name: At_42deg_Heat_cDNA_P Parameter: Temperature (deg C) Value: 42 vs. 22
  misc_feature: MA Experiment 20000144 PARAMETER Experiment Name: At_42deg_Heat_cDNA_P Parameter: Timepoint (hr) Value: 1
  misc_feature: MA Experiment 20000144 PARAMETER Experiment Name: At_42deg_Heat_cDNA_P Parameter: Tissue Value: Aerial
  misc_feature: MA Experiment ID: 20000180 Result: Up-regulated in Transcription
  misc_feature: MA Experiment 20000180 PARAMETER Experiment Name: At_Germinating_Seeds_P Parameter: Age (hr) Value: 24 vs. 0
  misc_feature: MA Experiment 20000180 PARAMETER Experiment Name: At_Germinating_Seeds_P Parameter: Tissue Value: Germinating Seeds
  misc_feature: MA Experiment ID: 20000184 Result: Down-regulated in Transcription
  misc_feature: MA Experiment 20000184 PARAMETER Experiment Name: At_Shoots__P Parameter: Age (day) Value: 7
  misc_feature: MA Experiment 20000184 PARAMETER Experiment Name: At_Shoots__P Parameter: Tissue Value: Shoots vs. Whole Plant
  misc_feature: MA Experiment ID: 20000185 Result: Down-regulated in Transcription
  misc_feature: MA Experiment 20000185 PARAMETER Experiment Name: At_Roots__P Parameter: Age (day) Value: 7 vs. 21
  misc_feature: MA Experiment 20000185 PARAMETER Experiment Name: At_Roots__P Parameter: Organism Value: A. thaliana
  misc_feature: MA Experiment 20000185 PARAMETER Experiment Name: At_Roots__P Parameter: Tissue Value: Roots vs. Whole Plant
  misc_feature: MA Experiment ID: 20000224 Result: Up-regulated in Transcription
  misc_feature: MA Experiment ID: 20000439 Result: Down-regulated in Transcription
  misc_feature: MA Experiment 20000439 PARAMETER Experiment Name: At_Roots__P Parameter: Age (day) Value: 14 vs. 21
  misc_feature: MA Experiment 20000439 PARAMETER Experiment Name: At_Roots__P Parameter: Organism Value: A. thaliana
  misc_feature: MA Experiment 20000439 PARAMETER Experiment Name: At_Roots__P Parameter: Tissue Value: Roots vs. Whole Plant
  misc_feature: MA Experiment ID: 20001247 Result: Up-regulated in Transcription
  misc_feature: MA Experiment 20001247 PARAMETER Experiment Name: At_Far-red-induction_P Parameter: Age (day) Value: 7
  misc_feature: MA Experiment 20001247 PARAMETER Experiment Name: At_Far-red-induction_P Parameter: Light Value: Far-red vs. White
  misc_feature: MA Experiment 20001247 PARAMETER Experiment Name: At_Far-red-induction_P Parameter: Organism Value: A. thaliana
  misc_feature: MA Experiment 20001247 PARAMETER Experiment Name: At_Far-red-induction_P Parameter: Plant Line Value: Columbia
  misc_feature: MA Experiment 20001247 PARAMETER Experiment Name: At_Far-red-induction_P Parameter: Timepoint (hr) Value: 1
  misc_feature: MA Experiment 20001247 PARAMETER Experiment Name: At_Far-red-induction_P Parameter: Tissue Value: Whole Plant
  misc_feature: MA Experiment ID: 20001450 Result: Up-regulated in Transcription
  misc_feature: MA Experiment 20001450 PARAMETER Experiment Name: At_Far-red-induction_P Parameter: Age (day) Value: 7
  misc_feature: MA Experiment 20001450 PARAMETER Experiment Name: At_Far-red-induction_P Parameter: Light Value: Far-red vs. White
  misc_feature: MA Experiment 20001450 PARAMETER Experiment Name: At_Far-red-induction_P Parameter: Organism Value: A. thaliana
  misc_feature: MA Experiment 20001450 PARAMETER Experiment Name: At_Far-red-induction_P Parameter: Plant Line Value: Columbia
  misc_feature: MA Experiment 20001450 PARAMETER Experiment Name: At_Far-red-induction_P Parameter: Timepoint (hr) Value: 8
  misc_feature: MA Experiment 20001450 PARAMETER Experiment Name: At_Far-red-induction_P Parameter: Tissue Value: Whole Plant
  misc_feature: MA Experiment ID: 20001451 Result: Up-regulated in Transcription
  misc_feature: MA Experiment 20001451 PARAMETER Experiment Name: At_Far-red-induction_P Parameter: Age (day) Value: 7
  misc_feature: MA Experiment 20001451 PARAMETER Experiment Name: At_Far-red-induction_P Parameter: Light Value: Far-red vs. White
  misc_feature: MA Experiment 20001451 PARAMETER Experiment Name: At_Far-red-induction_P Parameter: Organism Value: A. thaliana
  misc_feature: MA Experiment 20001451 PARAMETER Experiment Name: At_Far-red-induction_P Parameter: Plant Line Value: Columbia
  misc_feature: MA Experiment 20001451 PARAMETER Experiment Name: At_Far-red-induction_P Parameter: Timepoint (hr) Value: 24
  misc_feature: MA Experiment 20001451 PARAMETER Experiment Name: At_Far-red-induction_P Parameter: Tissue Value: Whole Plant
  misc_feature: MA Experiment ID: 20001906 Result: Down-regulated in Transcription
  misc_feature: MA Experiment 20001906 PARAMETER Experiment Name: At_Drought_Reproduction_P Parameter: Age (day) Value: 35
  misc_feature: MA Experiment 20001906 PARAMETER Experiment Name: At_Drought_Reproduction_P Parameter: Organism Value: A. thaliana
  misc_feature: MA Experiment 20001906 PARAMETER Experiment Name: At_Drought_Reproduction_P Parameter: Plant Line Value: WS
  misc_feature: MA Experiment 20001906 PARAMETER Experiment Name: At_Drought_Reproduction_P Parameter: Timepoint (day) Value: 5
  misc_feature: MA Experiment 20001906 PARAMETER Experiment Name: At_Drought_Reproduction_P Parameter: Tissue Value: Siliques
  misc_feature: MA Experiment 20001906 PARAMETER Experiment Name: At_Drought_Reproduction_P Parameter: Treatment Value: Drought vs. No Drought
aaaaattctctctttctctcttcttcgaaattcttcctcctctttttctgcagaaactatccaaaaatctcttcgttttcacaatttctcattattaaaaaaaaaactttaaattcttcttcttcaagaaaaaatggcggtggatcttttatcggaaaattctaatatgagtccaagaatctcattttcacgtgacttttgtcaatcagacgcaataccaatcgagaaacgtcccttaagatcatcaaactcgaaaccatcaagcctcaattcaagcatagatttcgatttctgcattcccggcggcgtaaattccggcgaaagcttcgatcaaggttcttggtccgccgatgaactcttctctaacggcaaaatcttaccaacggaaatcaagaaaaaaccagaaccgggtaaaaaagaaccagaaccaaaaccggttaaatctaaaccggattcaagaaaacagaggaaacaaccaaacgaagaacaacaagaagacgacgtgataatcacgacggaggagaaaaccaatacgaagtcgttttgggggtttaagagaagcagtagtttaaactgtggaagtacttatggacggagtttatgtccgttaccattactaaaccggagtaattcaaccggttcaacgtcgagtaaacagaaacagagcagctcaaggaaacataacgagcatgttaagttacaacaatcttcatcgttgtcttcttcttcttctgcttcgtcttctttgagtaataatggtttttcgaaaccaccattgaagaaaagctatggaggttatagttatggtagccatggtggtggtgggattagagtgagtccggttataaacgttgttccttctgggaatttgtttggttttggttcaatgttttctggtaatggaagagacaagaacaagaaaagataaaaaaaatgtaagaatagatatgtttctggttttactgttttattcttctgatttgttcttcttcttgttctctgaactctgaagattttctgacagtgtgttttgtggatcccatgccagtattattttttagactattgtggtgtaattgtgttttgtttgatttgttagtttgtgttctattcatgtttaaatctagattttttttttaataagaggctgctaatttcag

SEQ ID NO: 28939 - protein, 264 aa, Arabidopsis thaliana
  peptide (1)..(264): Ceres Seq. ID no. 13490473
  misc_feature (97)..(263): Homolog of NCBI NO: 15229617 NR Description: hypothetical protein [Arabidopsis thaliana]
  misc_feature (15)..(193): Homolog of NCBI NO: 15221963 NR Description: hypothetical protein [Arabidopsis thaliana]
  misc_feature (192)..(264): Homolog of NCBI NO: 15240881 NR Description: hypothetical protein [Arabidopsis thaliana]
  misc_feature (6)..(92): Homolog of NCBI NO: 15240881 NR Description: hypothetical protein [Arabidopsis thaliana]
  misc_feature (1)..(264): Homolog of NCBI NO: 18408679 NR Description: expressed protein [Arabidopsis thaliana]
MAVDLLSENSNMSPRISFSRDFCQSDAIPIEKRPLRSSNSKPSSLNSSIDFDFCIPGGVNSGESFDQGSWSADELFSNGKILPTEIKKKPEPGKKEPEPKPVKSKPDSRKQRKQPNEEQQEDDVIITTEEKTNTKSFWGFKRSSSLNCGSTYGRSLCPLPLLNRSNSTGSTSSKQKQSSSRKHNEHVKLQQSSSLSSSSSASSSLSNNGFSKPPLKKSYGGYSYGSHGGGGIRVSPVINVVPSGNLFGFGSMFSGNGRDKNKKR

SEQ ID NO: 28940 - protein, 253 aa, Arabidopsis thaliana
  peptide (1)..(253): Ceres Seq. ID no. 13490474
  misc_feature (86)..(252): Homolog of NCBI NO: 15229617 NR Description: hypothetical protein [Arabidopsis thaliana]
  misc_feature (4)..(182): Homolog of NCBI NO: 15221963 NR Description: hypothetical protein [Arabidopsis thaliana]
  misc_feature (181)..(253): Homolog of NCBI NO: 15240881 NR Description: hypothetical protein [Arabidopsis thaliana]
  misc_feature (1)..(81): Homolog of NCBI NO: 15240881 NR Description: hypothetical protein [Arabidopsis thaliana]
  misc_feature (1)..(253): Homolog of NCBI NO: 18408679 NR Description: expressed protein [Arabidopsis thaliana]
MSPRISFSRDFCQSDAIPIEKRPLRSSNSKPSSLNSSIDFDFCIPGGVNSGESFDQGSWSADELFSNGKILPTEIKKKPEPGKKEPEPKPVKSKPDSRKQRKQPNEEQQEDDVIITTEEKTNTKSFWGFKRSSSLNCGSTYGRSLCPLPLLNRSNSTGSTSSKQKQSSSRKHNEHVKLQQSSSLSSSSSASSSLSNNGFSKPPLKKSYGGYSYGSHGGGGIRVSPVINVVPSGNLFGFGSMFSGNGRDKNKKR

SEQ ID NO: 28941 - DNA, 2064 bp, Arabidopsis thaliana
  misc_feature (1)..(2064): Ceres Seq. ID no. 13490559
  misc_feature: MA Experiment ID: 108569 Result: Up-regulated in Transcription
  misc_feature: MA Experiment 108569 PARAMETER Experiment Name: At_0.001%_MeJA__cDNA_P Parameter: Timepoint (hr) Value: 6
  misc_feature: MA Experiment 108569 PARAMETER Experiment Name: At_0.001%_MeJA__cDNA_P Parameter: Tissue Value: Aerial
  misc_feature: MA Experiment 108569 PARAMETER Experiment Name: At_0.001%_MeJA__cDNA_P Parameter: Treatment Value: 0.001% MeJA vs. No Treatment
  misc_feature: MA Experiment ID: 20000171 Result: Up-regulated in Transcription
  misc_feature: MA Experiment 20000171 PARAMETER Experiment Name: At_42deg_Heat_P Parameter: Age (day) Value: 14
  misc_feature: MA Experiment 20000171 PARAMETER Experiment Name: At_42deg_Heat_P Parameter: Organism Value: A. thaliana
  misc_feature: MA Experiment 20000171 PARAMETER Experiment Name: At_42deg_Heat_P Parameter: Plant Line Value: WS
  misc_feature: MA Experiment 20000171 PARAMETER Experiment Name: At_42deg_Heat_P Parameter: Temperature (deg C) Value: 42 vs. 22
  misc_feature: MA Experiment 20000171 PARAMETER Experiment Name: At_42deg_Heat_P Parameter: Timepoint (hr) Value: 1
  misc_feature: MA Experiment 20000171 PARAMETER Experiment Name: At_42deg_Heat_P Parameter: Tissue Value: Aerial
  misc_feature: MA Experiment ID: 20000180 Result: Up-regulated in Transcription
  misc_feature: MA Experiment 20000180 PARAMETER Experiment Name: At_Germinating_Seeds_P Parameter: Age (hr) Value: 24 vs. 0
  misc_feature: MA Experiment 20000180 PARAMETER Experiment Name: At_Germinating_Seeds_P Parameter: Tissue Value: Germinating Seeds
  misc_feature: MA Experiment ID: 20000224 Result: Down-regulated in Transcription
  misc_feature: MA Experiment ID: 20000439 Result: Up-regulated in Transcription
  misc_feature: MA Experiment 20000439 PARAMETER Experiment Name: At_Roots__P Parameter: Age (day) Value: 14 vs. 21
  misc_feature: MA Experiment 20000439 PARAMETER Experiment Name: At_Roots__P Parameter: Organism Value: A. thaliana
  misc_feature: MA Experiment 20000439 PARAMETER Experiment Name: At_Roots__P Parameter: Tissue Value: Roots vs. Whole Plant
  misc_feature: MA Experiment ID: 20001555 Result: Up-regulated in Transcription
  misc_feature: MA Experiment 20001555 PARAMETER Experiment Name: At_Drought_Soil_Dry_P Parameter: Age (day) Value: 24
  misc_feature: MA Experiment 20001555 PARAMETER Experiment Name: At_Drought_Soil_Dry_P Parameter: Organism Value: A. thaliana
  misc_feature: MA Experiment 20001555 PARAMETER Experiment Name: At_Drought_Soil_Dry_P Parameter: Plant Line Value: WS
  misc_feature: MA Experiment 20001555 PARAMETER Experiment Name: At_Drought_Soil_Dry_P Parameter: Post Timepoint (hr) Value: None
  misc_feature: MA Experiment 20001555 PARAMETER Experiment Name: At_Drought_Soil_Dry_P Parameter: Post-Treatment Value: None
  misc_feature: MA Experiment 20001555 PARAMETER Experiment Name: At_Drought_Soil_Dry_P Parameter: Timepoint (day) Value: 10
  misc_feature: MA Experiment 20001555 PARAMETER Experiment Name: At_Drought_Soil_Dry_P Parameter: Treatment Value: Drought vs. No Drought
gttctaacactttgattgattctgaaatctggattcgtctcctccattaaacatctctcgtctgataacaccgatccatctctttctttctctctccgtcgactctcgttcttaaagatgaaagctttctacgtattcgttgttgctcttcttctcaccttgaattataggggagaagcaagtggttctgttttcttcattgatggatccaacaatcaatatcttcgtccacgatcatccagtgaggcacttcccatgtcgcctgttgaaatatctgcagcagtgtctgccttgttgggttttgcaccttcagcaactttgacagctgatggctcatccaagttgaacaagattctaaaacctaatccatttgagaggcctcgcgctgcttttgtgctagaaatcgctggagctgatgatatgcttttggaaacctcccctagtcattctttcttgggcaatgccataaggagcagtattaagtctgattcgtacaaagctgatactgaacttccagacaatgaagtggttgttgtgtctgtcaatgaaccctcctctgatgtgactgacaaggacattaatgattttgcatcttggttgggtggatcatatgttgctggagctgaaccatcgtctggattgttgagtatccctctggctgggggtgctaatgtggagttcaatttggaaaaggaagcagagaggaaatttgcattgaaccttttgggtctatatcagaatatcagacaggcagtcagcgtttatgacgatttatctcatggtattgacagaactgccgaattaacggttggacgctttggtggtatcgatgctttagcacaggagtatggacaaggtatggctaagcaagggatggatgtattactttccacattatcaaagctattcaatctgttggagacatctcataaaggccaaattgttggggttatcgtccttgatgagagagtaaaccaagaatcagaaaatcttttgaactttgggtcttcccgttcatctgcacgctcaatggtggaagtggagggaattccaagtgcagccattatcgctgaggttatacttgttaggctgactcttgcatggttgactggaatcattcttctcattgcaactatccttggggtatacttccttatgaacatgcctttgacgaaggatactcttctatattcaaatgtaaagctcgactaagaaatgaaacagagcttcaaaacggcaaaaggacactgattttctctacaggtcgttcgtttacatatttttgtgtgtatcaagccgtgtttctcaactggccgcctttgaaaccggtgtcatttgaatgtttaaagagaaggatgaaacttttggtggtcagagcagttgatgtgttatgtgtatattgccatattggttgcattctcgacttataattattttctttcttacatacattttgagtctcagtcctaataataaaagaccactttggacacttgatgtgtatcttctgtctctgtaagagcttttgatcatgaatctgaatatattattgcaaccaaaaaaaaaaaaaaaaactaaaaaaaaaaaaaaattagtttcttagaagttacaaaatcaaagatcagaaccaaagagcctaaagatgatgaagggaagcaagtcttacacggagtattcgtcatctttctcaacagatgaatttggttatgatcagaaccgttcaaactcctataacttcaatgggccttgtatcaacacagatccggagatgaaaagaaagaagagagttgcttcttataatctttttgccacggaggaaaagctcaagagtactctcaagaacagtttcaaatggatcaagaacaaattctcaggcgatgataatagtatccggtacaacgtctagattagtccactttgctcctgatctttttatttcttcctttttattacactaagatcttagtgaaacttaacatgtaaataaagtgtgtgagattgtgtatgtgtgtgtgtgtgtctaaagttttgtatgttactcaaatggaaatgtcaatttgcttt

SEQ ID NO: 28942 - protein, 364 aa, Arabidopsis thaliana
  peptide (1)..(364): Ceres Seq. ID no. 13490560
  misc_feature (252)..(364): Homolog of NCBI NO: 40716478 NR Description: putative membrane protein type I [Musa acuminata]
  misc_feature (1)..(364): Homolog of NCBI NO: 15230073 NR Description: type 1 membrane protein -related [Arabidopsis
MKAFYVFVVALLLTLNYRGEASGSVFFIDGSNNQYLRPRSSSEALPMSPVEISAAVSALLGFAPSATLTADGSSKLNKILKPNPFERPRAAFVLEIAGADDMLLETSPSHSFLGNAIRSSIKSDSYKADTELPDNEVVVVSVNEPSSDVTDKDINDFASWLGGSYVAGAEPSSGLLSIPLAGGANVEFNLEKEAERKFALNLLGLYQNIRQAVSVYDDLSHGIDRTAELTVGRFGGIDALAQEYGQGMAKQGMDVLLSTLSKLFNLLETSHKGQIVGVIVLDERVNQESENLLNFGSSRSSARSMVEVEGIPSAAIIAEVILVRLTLAWLTGIILLIATILGVYFLMNMPLTKDTLLYSNVKLD

SEQ ID NO: 28943 - protein, 318 aa, Arabidopsis thaliana
  peptide (1)..(318): Ceres Seq. ID no. 13490561
  misc_feature (206)..(318): Homolog of NCBI NO: 40716478 NR Description: putative membrane protein type I [Musa acuminata]
  misc_feature (1)..(318): Homolog of NCBI NO: 15230073 NR Description: type 1 membrane protein -related [Arabidopsis
MSPVEISAAVSALLGFAPSATLTADGSSKLNKILKPNPFERPRAAFVLEIAGADDMLLETSPSHSFLGNAIRSSIKSDSYKADTELPDNEVVVVSVNEPSSDVTDKDINDFASWLGGSYVAGAEPSSGLLSIPLAGGANVEFNLEKEAERKFALNLLGLYQNIRQAVSVYDDLSHGIDRTAELTVGRFGGIDALAQEYGQGMAKQGMDVLLSTLSKLFNLLETSHKGQIVGVIVLDERVNQESENLLNFGSSRSSARSMVEVEGIPSAAIIAEVILVRLTLAWLTGIILLIATILGVYFLMNMPLTKDTLLYSNVKLD

SEQ ID NO: 28944 - protein, 263 aa, Arabidopsis thaliana
  peptide (1)..(263): Ceres Seq. ID no. 13490562
  misc_feature (151)..(263): Homolog of NCBI NO: 40716478 NR Description: putative membrane protein type I [Musa acuminata]
  misc_feature (1)..(263): Homolog of NCBI NO: 15230073 NR Description: type 1 membrane protein -related [Arabidopsis
MLLETSPSHSFLGNAIRSSIKSDSYKADTELPDNEVVVVSVNEPSSDVTDKDINDFASWLGGSYVAGAEPSSGLLSIPLAGGANVEFNLEKEAERKFALNLLGLYQNIRQAVSVYDDLSHGIDRTAELTVGRFGGIDALAQEYGQGMAKQGMDVLLSTLSKLFNLLETSHKGQIVGVIVLDERVNQESENLLNFGSSRSSARSMVEVEGIPSAAIIAEVILVRLTLAWLTGIILLIATILGVYFLMNMPLTKDTLLYSNVKLD

SEQ ID NO: 28945 - DNA, 1337 bp, Arabidopsis thaliana
  misc_feature (1)..(1337): Ceres Seq. ID no. 12325072
  misc_feature: MA Experiment ID: 108569 Result: Up-regulated in Transcription
  misc_feature: MA Experiment 108569 PARAMETER Experiment Name: At_0.001%_MeJA__cDNA_P Parameter: Timepoint (hr) Value: 6
  misc_feature: MA Experiment 108569 PARAMETER Experiment Name: At_0.001%_MeJA__cDNA_P Parameter: Tissue Value: Aerial
  misc_feature: MA Experiment 108569 PARAMETER Experiment Name: At_0.001%_MeJA__cDNA_P Parameter: Treatment Value: 0.001% MeJA vs. No Treatment
atatattaaaccactgtaactgtaatttattgtttcgccgtcccggaatgttcctgttgaaatccattttcgctgattttttttcttccgtctcttcttcagcttcgaccattttcgtcttcttcattcagtgttgagtcctcgtttacctgtgagctcgaagaaagtgacgatcaatgggaaccctaggcagagcattttactcggtcggtttttggatccgtgagactggtcaagctcttgatcgcctcggttgtcgccttcaaggcaaaaattacttccgagaacaactgtcaaggcatcggacattgatgaatgtatttgataaggctccgattgtggacaaggacgcttttgtggcaccaagcgcctcagttattggggacgttcacattggaagaggatcgtccatttggtatggatgcgtattacgaggcgatgtgaacaccgtaagtgttgggtcaggaactaatattcaggacaactcacttgtgcatgtagcaaaatcaaacttaagcgggaaggtgcacccaaccataattggagacaatgtaaccattggtcatagtgctgttttacatggatgtactgttgaggatgagacctttattgggatgggtgcgacacttcttgatggggtcgttgttgaaaagcatgggatggttgctgctggtgcgcttgtacgacaaaacaccagaattccttctggagaggtatggggaggaaacccagcaaggttcctcaggaagctcactgatgaggaaattgcttttatctctcagtcagcaacaaactactcaaacctcgcacaggctcacgctgcagagaatgcaaagccattaaatgtgattgagttcgagaaggttctacgcaagaagcatgctctaaaggacgaggagtatgactcaatgctcggaatagtgagagaaactccaccagagcttaacctccctaacaacatactgcctgataaagaaaccaagcgtccttctaatctgaactgatttttcaggggtatgttttctggccgaagccctacagtatgagatactcaaggggattatgtttcggtctctggtttgaataatggcaggtagagtacattagggtagacggatttacagcttttggagaagctctgttcaacattttttcatggtttcttagggagtattattgtctaatcaaacttcgtatgttatcacttcggtcttttgaacgtaagaatcaagttcatgaaacatgagtgaatattagtctgatgcatgtgcgtatgcaaaaatccatgtgcgccgatgttgctaggcaagcatgaagaataaagatccaaactggat

SEQ ID NO: 28946 - protein, 275 aa, Arabidopsis thaliana
  peptide (1)..(275): Ceres Seq. ID no. 12325073
  misc_feature (70)..(87): Pfam Name: Bacterial transferase hexapeptide (three repeats) Pfam Description: Bacterial transferase hexapeptide (three
  misc_feature (59)..(249): Homolog of NCBI NO: 40218049 NR Description: putative gamma carbonic anhydrase [Chlamydomonas
  misc_feature (46)..(259): Homolog of NCBI NO: 10177532 NR Description: ferripyochelin-binding protein-like [Arabidopsis
  misc_feature (1)..(256): Homolog of NCBI NO: 34902506 NR Description: P0581F09.11 [Oryza sativa (japonica
  misc_feature (1)..(269): Homolog of NCBI NO: 34904754 NR Description: putative transcription factor APFI
  misc_feature (1)..(259): Homolog of NCBI NO: 18425082 NR Description: ferripyochelin-binding protein-like
  misc_feature (1)..(264): Homolog of NCBI NO: 13507025 NR Description: transcription factor APFI [Arabidopsis thaliana]
  misc_feature (1)..(264): Homolog of NCBI NO: 15220153 NR Description: Unknown protein
  misc_feature (39)..(275): Homolog of NCBI NO: 8778427 NR Description: F18O14.34 [Arabidopsis thaliana]
  misc_feature (1)..(275): Homolog of NCBI NO: 18394761 NR Description: expressed protein
  misc_feature (1)..(275): Homolog of NCBI NO: 21537242 NR Description: unknown [Arabidopsis thaliana]
MGTLGRAFYSVGFWIRETGQALDRLGCRLQGKNYFREQLSRHRTLMNVFDKAPIVDKDAFVAPSASVIGDVHIGRGSSIWYGCVLRGDVNTVSVGSGTNIQDNSLVHVAKSNLSGKVHPTIIGDNVTIGHSAVLHGCTVEDETFIGMGATLLDGVVVEKHGMVAAGALVRQNTRIPSGEVWGGNPARFLRKLTDEEIAFISQSATNYSNLAQAHAAENAKPLNVIEFEKVLRKKHALKDEEYDSMLGIVRETPPELNLPNNILPDKETKRPSNLN

SEQ ID NO: 28947 - protein, 230 aa, Arabidopsis thaliana
  peptide (1)..(230): Ceres Seq. ID no. 12325074
  misc_feature (25)..(42): Pfam Name: Bacterial transferase hexapeptide (three repeats) Pfam Description: Bacterial transferase hexapeptide (three
  misc_feature (14)..(204): Homolog of NCBI NO: 40218049 NR Description: putative gamma carbonic anhydrase [Chlamydomonas
  misc_feature (1)..(214): Homolog of NCBI NO: 10177532 NR Description: ferripyochelin-binding protein-like [Arabidopsis
  misc_feature (1)..(211): Homolog of NCBI NO: 34902506 NR Description: P0581F09.11 [Oryza sativa (japonica
  misc_feature (1)..(224): Homolog of NCBI NO: 34904754 NR Description: putative transcription factor APFI
  misc_feature (1)..(214): Homolog of NCBI NO: 18425082 NR Description: ferripyochelin-binding protein-like
  misc_feature (1)..(219): Homolog of NCBI NO: 13507025 NR Description: transcription factor APFI [Arabidopsis thaliana]
  misc_feature (1)..(219): Homolog of NCBI NO: 15220153 NR Description: Unknown protein
  misc_feature (1)..(230): Homolog of NCBI NO: 8778427 NR Description: F18O14.34 [Arabidopsis thaliana]
  misc_feature (1)..(230): Homolog of NCBI NO: 18394761 NR Description: expressed protein
  misc_feature (1)..(230): Homolog of NCBI NO: 21537242 NR Description: unknown [Arabidopsis thaliana]
MNVFDKAPIVDKDAFVAPSASVIGDVHIGRGSSIWYGCVLRGDVNTVSVGSGTNIQDNSLVHVAKSNLSGKVHPTIIGDNVTIGHSAVLHGCTVEDETFIGMGATLLDGVVVEKHGMVAAGALVRQNTRIPSGEVWGGNPARFLRKLTDEEIAFISQSATNYSNLAQAHAAENAKPLNVIEFEKVLRKKHALKDEEYDSMLGIVRETPPELNLPNNILPDKETKRPSNLN

SEQ ID NO: 28948 - DNA, 1088 bp, Arabidopsis thaliana
  misc_feature (1)..(1088): Ceres Seq. ID no. 13490620
  misc_feature: MA Experiment ID: 108434 Result: Up-regulated in Transcription
  misc_feature: MA Experiment 108434 PARAMETER Experiment Name: At_Root_Tips_cDNA_P Parameter: Tissue Value: Root Tips
  misc_feature: MA Experiment ID: 108461 Result: Up-regulated in Transcription
  misc_feature: MA Experiment 108461 PARAMETER Experiment Name: At_Germinating_Seeds_cDNA_P Parameter: Age (day) Value: 1 vs. 0
  misc_feature: MA Experiment 108461 PARAMETER Experiment Name: At_Germinating_Seeds_cDNA_P Parameter: Tissue Value: Germinating Seeds
  misc_feature: MA Experiment ID: 108462 Result: Up-regulated in Transcription
  misc_feature: MA Experiment 108462 PARAMETER Experiment Name: At_Germinating_Seeds_cDNA_P Parameter: Age (day) Value: 2 vs. 0
  misc_feature: MA Experiment 108462 PARAMETER Experiment Name: At_Germinating_Seeds_cDNA_P Parameter: Tissue Value: Germinating Seeds
  misc_feature: MA Experiment ID: 108464 Result: Up-regulated in Transcription
  misc_feature: MA Experiment 108464 PARAMETER Experiment Name: At_Germinating_Seeds_cDNA_P Parameter: Age (day) Value: 4 vs. 0
  misc_feature: MA Experiment 108464 PARAMETER Experiment Name: At_Germinating_Seeds_cDNA_P Parameter: Tissue Value: Germinating Seeds
  misc_feature: MA Experiment ID: 108501 Result: Down-regulated in Transcription
  misc_feature: MA Experiment 108501 PARAMETER Experiment Name: At_ap2_floral_buds_cDNA_P Parameter: Plant Line Value: ap2 (Ler.)
  misc_feature: MA Experiment 108501 PARAMETER Experiment Name: At_ap2_floral_buds_cDNA_P Parameter: Tissue Value: Closed Flower
  misc_feature: MA Experiment ID: 108572 Result: Up-regulated in Transcription
  misc_feature: MA Experiment 108572 PARAMETER Experiment Name: At_Drought_cDNA_P Parameter: Timepoint (hr) Value: 1
  misc_feature: MA Experiment 108572 PARAMETER Experiment Name: At_Drought_cDNA_P Parameter: Tissue Value: Aerial
  misc_feature: MA Experiment 108572 PARAMETER Experiment Name: At_Drought_cDNA_P Parameter: Treatment Value: Drought vs. No Drought
  misc_feature: MA Experiment ID: 108573 Result: Up-regulated in Transcription
  misc_feature: MA Experiment 108573 PARAMETER Experiment Name: At_Drought_cDNA_P Parameter: Timepoint (hr) Value: 6
  misc_feature: MA Experiment 108573 PARAMETER Experiment Name: At_Drought_cDNA_P Parameter: Tissue Value: Aerial
  misc_feature: MA Experiment 108573 PARAMETER Experiment Name: At_Drought_cDNA_P Parameter: Treatment Value: Drought vs. No Drought
  misc_feature: MA Experiment ID: 108579 Result: Down-regulated in Transcription
  misc_feature: MA Experiment 108579 PARAMETER Experiment Name: At_4deg_Cold_cDNA_P Parameter: Temperature (deg C) Value: 4 vs. 22
  misc_feature: MA Experiment 108579 PARAMETER Experiment Name: At_4deg_Cold_cDNA_P Parameter: Timepoint (hr) Value: 6
  misc_feature: MA Experiment 108579 PARAMETER Experiment Name: At_4deg_Cold_cDNA_P Parameter: Tissue Value: Aerial
  misc_feature: MA Experiment ID: 108595 Result: Down-regulated in Transcription
  misc_feature: MA Experiment 108595 PARAMETER Experiment Name: At_Ler-pi_Ovule_cDNA_P Parameter: Plant Line Value: null
  misc_feature: MA Experiment ID: 108608 Result: Up-regulated in Transcription
  misc_feature: MA Experiment 108608 PARAMETER Experiment Name: At_100uM_ABA_cDNA_P Parameter: Timepoint (hr) Value: 1
  misc_feature: MA Experiment 108608 PARAMETER Experiment Name: At_100uM_ABA_cDNA_P Parameter: Tissue Value: Aerial
  misc_feature: MA Experiment 108608 PARAMETER Experiment Name: At_100uM_ABA_cDNA_P Parameter: Treatment Value: 100uM ABA vs. No Treatment
  misc_feature: MA Experiment ID: 20000166 Result: Up-regulated in Transcription
  misc_feature: MA Experiment 20000166 PARAMETER Experiment Name: At_100uM_ABA_P Parameter: Age (day) Value: 14
  misc_feature: MA Experiment 20000166 PARAMETER Experiment Name: At_100uM_ABA_P Parameter: Organism Value: A. thaliana
  misc_feature: MA Experiment 20000166 PARAMETER Experiment Name: At_100uM_ABA_P Parameter: Plant Line Value: WS
  misc_feature: MA Experiment 20000166 PARAMETER Experiment Name: At_100uM_ABA_P Parameter: Timepoint (hr) Value: 1
  misc_feature: MA Experiment 20000166 PARAMETER Experiment Name: At_100uM_ABA_P Parameter: Tissue Value: Aerial
  misc_feature: MA Experiment 20000166 PARAMETER Experiment Name: At_100uM_ABA_P Parameter: Treatment Value: 100uM ABA vs. No Treatment
  misc_feature: MA Experiment ID: 20000179 Result: Up-regulated in Transcription
  misc_feature: MA Experiment 20000179 PARAMETER Experiment Name: At_Germinating_Seeds_P Parameter: Age (hr) Value: 6 vs. 0
  misc_feature: MA Experiment 20000179 PARAMETER Experiment Name: At_Germinating_Seeds_P Parameter: Tissue Value: Germinating Seeds
  misc_feature: MA Experiment ID: 20000180 Result: Up-regulated in Transcription
  misc_feature: MA Experiment 20000180 PARAMETER Experiment Name: At_Germinating_Seeds_P Parameter: Age (hr) Value: 24 vs. 0
  misc_feature: MA Experiment 20000180 PARAMETER Experiment Name: At_Germinating_Seeds_P Parameter: Tissue Value: Germinating Seeds
  misc_feature: MA Experiment ID: 20000224 Result: Down-regulated in Transcription
  misc_feature: MA Experiment ID: 20000451 Result: Down-regulated in Transcription
  misc_feature: MA Experiment 20000451 PARAMETER Experiment Name: At_CS6879_Shoots-Roots_P Parameter: Age (day) Value: 14
  misc_feature: MA Experiment 20000451 PARAMETER Experiment Name: At_CS6879_Shoots-Roots_P Parameter: Organism Value: A. thaliana
  misc_feature: MA Experiment 20000451 PARAMETER Experiment Name: At_CS6879_Shoots-Roots_P Parameter: Plant Line Value: CS6879 vs. WS
  misc_feature: MA Experiment 20000451 PARAMETER Experiment Name: At_CS6879_Shoots-Roots_P Parameter: Tissue Value: Roots
  misc_feature: MA Experiment ID: 20000452 Result: Down-regulated in Transcription
  misc_feature: MA Experiment 20000452 PARAMETER Experiment Name: At_CS6879_Shoots-Roots_P Parameter: Age (day) Value: 14
  misc_feature: MA Experiment 20000452 PARAMETER Experiment Name: At_CS6879_Shoots-Roots_P Parameter: Organism Value: A. thaliana
  misc_feature: MA Experiment 20000452 PARAMETER Experiment Name: At_CS6879_Shoots-Roots_P Parameter: Plant Line Value: CS6879 vs. WS
  misc_feature: MA Experiment 20000452 PARAMETER Experiment Name: At_CS6879_Shoots-Roots_P Parameter: Tissue Value: Shoots
  misc_feature: MA Experiment ID: 20001557 Result: Down-regulated in Transcription
  misc_feature: MA Experiment 20001557 PARAMETER Experiment Name: At_Drought_Soil_Dry_P Parameter: Age (day) Value: 27
  misc_feature: MA Experiment 20001557 PARAMETER Experiment Name: At_Drought_Soil_Dry_P Parameter: Organism Value: A. thaliana
  misc_feature: MA Experiment 20001557 PARAMETER Experiment Name: At_Drought_Soil_Dry_P Parameter: Plant Line Value: WS
  misc_feature: MA Experiment 20001557 PARAMETER Experiment Name: At_Drought_Soil_Dry_P Parameter: Post Timepoint (hr) Value: 3
  misc_feature: MA Experiment 20001557 PARAMETER Experiment Name: At_Drought_Soil_Dry_P Parameter: Post-Treatment Value: Re-Water vs. No Drought
  misc_feature: MA Experiment 20001557 PARAMETER Experiment Name: At_Drought_Soil_Dry_P Parameter: Timepoint (day) Value: 13
  misc_feature: MA Experiment 20001557 PARAMETER Experiment Name: At_Drought_Soil_Dry_P Parameter: Treatment Value: Drought vs. No Drought
  misc_feature: MA Experiment ID: 20001558 Result: Down-regulated in Transcription
  misc_feature: MA Experiment 20001558 PARAMETER Experiment Name: At_Drought_Soil_Dry_P Parameter: Age (day) Value: 27
  misc_feature: MA Experiment 20001558 PARAMETER Experiment Name: At_Drought_Soil_Dry_P Parameter: Organism Value: A. thaliana
  misc_feature: MA Experiment 20001558 PARAMETER Experiment Name: At_Drought_Soil_Dry_P Parameter: Plant Line Value: WS
  misc_feature: MA Experiment 20001558 PARAMETER Experiment Name: At_Drought_Soil_Dry_P Parameter: Post Timepoint (hr) Value: 6
  misc_feature: MA Experiment 20001558 PARAMETER Experiment Name: At_Drought_Soil_Dry_P Parameter: Post-Treatment Value: Re-Water vs. No Drought
  misc_feature: MA Experiment 20001558 PARAMETER Experiment Name: At_Drought_Soil_Dry_P Parameter: Timepoint (day) Value: 13
  misc_feature: MA Experiment 20001558 PARAMETER Experiment Name: At_Drought_Soil_Dry_P Parameter: Treatment Value: Drought vs. No Drought
ctcatcattttctcgtttgctccatttttttcttctttctgcaaattttattttcccgagaaaatcatcactgagaaaaatgctcgctgtgtttgagaagacggtggcgaatagccctgaagctttacagagtccacactcgtctgagtctgctttcgcgttgaaagatggatctctcgctactcatttcgcttccgtgaatcccaactccgtcacgcttaacttcggatcttctggatttgttgcttactctcttgataatcctgatcctcgtgttcctagattatttgctgtggtggatgatattttctgtctcttccaaggacacattgagaacctaccgtttctgaagcagcagtatggactgaacaaaatcacaaacgaggccatcattgtgattgaggcttacaggacactacgtgatcgaggtccttaccctgtggacaaagttgttagagatttccatggaaagtttgcgtttatactcttcgatagcgtcaagaaaactgtctttgctgctgctgacgccgatgggagtgtgccgttcttctggggaaccgatgctgaagggcaccttgtgttttctgataacaccgagatggtgaagaaaggttgcgccaaatcttatggtcctttccctaaaggttgtttctttacgtcgtcgggtggattgaggagctttgagcacccaaagaacgagttgaagccagtgccgagagtggacagctcaggtgacgtgtgtggtgcaaccttcaaggttgacgctgagactaagagagagggtaccaaaatgcctagagtcgatagctcccaaaattgggccggtcatatctaaaccggaaatcatacacaaatcacaagctcagcatcttctccctcttgtcttgtcccctctctttcgttacatgtttgagttacattgagaaaataatttcaaaccacaatgttctaaacgcgtttatgtacatgtttgaggtgggatttggaaaggatgtcgagttttgtgaaactttggaattacgagactactagacttttgtttctctgtttacgtttcttaaatcaataaataaataagtttttattcc

SEQ ID NO: 28949 - protein, 277 aa, Arabidopsis thaliana
  peptide (1)..(277): Ceres Seq. ID no. 13490621
  misc_feature (27)..(274): Homolog of NCBI NO: 18416995 NR Description: expressed protein [Arabidopsis thaliana]
  misc_feature (27)..(274): Homolog of NCBI NO: 18400774 NR Description: expressed protein [Arabidopsis thaliana]
  misc_feature (27)..(276): Homolog of NCBI NO: 32352176 NR Description: hypothetical protein [Oryza sativa (japonica
  misc_feature (26)..(276): Homolog of NCBI NO: 30017570 NR Description: unknown protein [Oryza sativa (japonica
  misc_feature (27)..(277): Homolog of NCBI NO: 15228883 NR Description: expressed protein [Arabidopsis thaliana]
  misc_feature (27)..(277): Homolog of NCBI NO: 20340249 NR Description: aluminum-induced protein-like protein
  misc_feature (27)..(277): Homolog of NCBI NO: 15239993 NR Description: aluminum-induced protein-related [Arabidopsis
SSFSRLLHFFLLSANFIFPRKSSLRKMLAVFEKTVANSPEALQSPHSSESAFALKDGSLATHFASVNPNSVTLNFGSSGFVAYSLDNPDPRVPRLFAVVDDIFCLFQGHIENLPFLKQQYGLNKITNEAIIVIEAYRTLRDRGPYPVDKVVRDFHGKFAFILFDSVKKTVFAAADADGSVPFFWGTDAEGHLVFSDNTEMVKKGCAKSYGPFPKGCFFTSSGGLRSFEHPKNELKPVPRVDSSGDVCGATFKVDAETKREGTKMPRVDSSQNWAGHI

SEQ ID NO: 28950 - protein, 251 aa, Arabidopsis thaliana
  peptide (1)..(251): Ceres Seq. ID no. 13490622
  misc_feature (1)..(248): Homolog of NCBI NO: 18416995 NR Description: expressed protein [Arabidopsis thaliana]
  misc_feature (1)..(248): Homolog of NCBI NO: 18400774 NR Description: expressed protein [Arabidopsis thaliana]
  misc_feature (1)..(250): Homolog of NCBI NO: 32352176 NR Description: hypothetical protein [Oryza sativa (japonica
  misc_feature (1)..(250): Homolog of NCBI NO: 30017570 NR Description: unknown protein [Oryza sativa (japonica
  misc_feature (1)..(251): Homolog of NCBI NO: 15228883 NR Description: expressed protein [Arabidopsis thaliana]
  misc_feature (1)..(251): Homolog of NCBI NO: 20340249 NR Description: aluminum-induced protein-like protein
  misc_feature (1)..(251): Homolog of NCBI NO: 15239993 NR Description: aluminum-induced protein-related [Arabidopsis
MLAVFEKTVANSPEALQSPHSSESAFALKDGSLATHFASVNPNSVTLNFGSSGFVAYSLDNPDPRVPRLFAVVDDIFCLFQGHIENLPFLKQQYGLNKITNEAIIVIEAYRTLRDRGPYPVDKVVRDFHGKFAFILFDSVKKTVFAAADADGSVPFFWGTDAEGHLVFSDNTEMVKKGCAKSYGPFPKGCFFTSSGGLRSFEHPKNELKPVPRVDSSGDVCGATFKVDAETKREGTKMPRVDSSQNWAGHI

SEQ ID NO: 28951 - DNA, 944 bp, Arabidopsis thaliana
  misc_feature (1)..(944): Ceres Seq. ID no. 12334417
  misc_feature: MA Experiment ID: 108434 Result: Down-regulated in Transcription
  misc_feature: MA Experiment 108434 PARAMETER Experiment Name: At_Root_Tips_cDNA_P Parameter: Tissue Value: Root Tips
  misc_feature: MA Experiment ID: 108435 Result: Down-regulated in Transcription
  misc_feature: MA Experiment 108435 PARAMETER Experiment Name: At_stm_Mutants_cDNA_P Parameter: Plant Line Value: wt Landsburg vs stm
  misc_feature: MA Experiment 108435 PARAMETER Experiment Name: At_stm_Mutants_cDNA_P Parameter: Tissue Value: Shoot Apical Meristem Region
  misc_feature: MA Experiment ID: 108579 Result: Down-regulated in Transcription
  misc_feature: MA Experiment 108579 PARAMETER Experiment Name: At_4deg_Cold_cDNA_P Parameter: Temperature (deg C) Value: 4 vs. 22
  misc_feature: MA Experiment 108579 PARAMETER Experiment Name: At_4deg_Cold_cDNA_P Parameter: Timepoint (hr) Value: 6
  misc_feature: MA Experiment 108579 PARAMETER Experiment Name: At_4deg_Cold_cDNA_P Parameter: Tissue Value: Aerial
  misc_feature: MA Experiment ID: 108585 Result: Down-regulated in Transcription
  misc_feature: MA Experiment 108585 PARAMETER Experiment Name: At_5mM_NaNP_cDNA_P Parameter: Timepoint (hr) Value: 6
  misc_feature: MA Experiment 108585 PARAMETER Experiment Name: At_5mM_NaNP_cDNA_P Parameter: Tissue Value: Aerial
  misc_feature: MA Experiment 108585 PARAMETER Experiment Name: At_5mM_NaNP_cDNA_P Parameter: Treatment Value: null
  misc_feature: MA Experiment ID: 108595 Result: Down-regulated in Transcription
  misc_feature: MA Experiment 108595 PARAMETER Experiment Name: At_Ler-pi_Ovule_cDNA_P Parameter: Plant Line Value: null
  misc_feature: MA Experiment ID: 20000030 Result: Up-regulated in Transcription
  misc_feature: MA Experiment 20000030 PARAMETER Experiment Name: At_CS6630_Roots_cDNA_P Parameter: Plant Line Value: CS6630 vs. WS
  misc_feature: MA Experiment 20000030 PARAMETER Experiment Name: At_CS6630_Roots_cDNA_P Parameter: Tissue Value: Roots
  misc_feature: MA Experiment ID: 20000111 Result: Down-regulated in Transcription
  misc_feature: MA Experiment 20000111 PARAMETER Experiment Name: At_42deg_Heat_cDNA_P Parameter: Temperature (deg C) Value: 42 vs. 22
  misc_feature: MA Experiment 20000111 PARAMETER Experiment Name: At_42deg_Heat_cDNA_P Parameter: Timepoint (hr) Value: 6
  misc_feature: MA Experiment 20000111 PARAMETER Experiment Name: At_42deg_Heat_cDNA_P Parameter: Tissue Value: Aerial
  misc_feature: MA Experiment ID: 20000113 Result: Down-regulated in Transcription
  misc_feature: MA Experiment 20000113 PARAMETER Experiment Name: At_42deg_Heat_cDNA_P Parameter: Temperature (deg C) Value: 42 vs. 22
  misc_feature: MA Experiment 20000113 PARAMETER Experiment Name: At_42deg_Heat_cDNA_P Parameter: Timepoint (hr) Value: 8
  misc_feature: MA Experiment 20000113 PARAMETER Experiment Name: At_42deg_Heat_cDNA_P Parameter: Tissue Value: Aerial
  misc_feature: MA Experiment ID: 20000173 Result: Down-regulated in Transcription
  misc_feature: MA Experiment 20000173 PARAMETER Experiment Name: At_42deg_Heat_P Parameter: Age (day) Value: 14
  misc_feature: MA Experiment 20000173 PARAMETER Experiment Name: At_42deg_Heat_P Parameter: Organism Value: A. thaliana
  misc_feature: MA Experiment 20000173 PARAMETER Experiment Name: At_42deg_Heat_P Parameter: Plant Line Value: WS
  misc_feature: MA Experiment 20000173 PARAMETER Experiment Name: At_42deg_Heat_P Parameter: Temperature (deg C) Value: 42 vs. 22
  misc_feature: MA Experiment 20000173 PARAMETER Experiment Name: At_42deg_Heat_P Parameter: Timepoint (hr) Value: 6
  misc_feature: MA Experiment 20000173 PARAMETER Experiment Name: At_42deg_Heat_P Parameter: Tissue Value: Aerial
  misc_feature: MA Experiment ID: 20000179 Result: Up-regulated in Transcription
  misc_feature: MA Experiment 20000179 PARAMETER Experiment Name: At_Germinating_Seeds_P Parameter: Age (hr) Value: 6 vs. 0
  misc_feature: MA Experiment 20000179 PARAMETER Experiment Name: At_Germinating_Seeds_P Parameter: Tissue Value: Germinating Seeds
  misc_feature: MA Experiment ID: 20000184 Result: Down-regulated in Transcription
  misc_feature: MA Experiment 20000184 PARAMETER Experiment Name: At_Shoots__P Parameter: Age (day) Value: 7
  misc_feature: MA Experiment 20000184 PARAMETER Experiment Name: At_Shoots__P Parameter: Tissue Value: Shoots vs. Whole Plant
  misc_feature: MA Experiment ID: 20000185 Result: Down-regulated in Transcription
  misc_feature: MA Experiment 20000185 PARAMETER Experiment Name: At_Roots__P Parameter: Age (day) Value: 7 vs. 21
  misc_feature: MA Experiment 20000185 PARAMETER Experiment Name: At_Roots__P Parameter: Organism Value: A. thaliana
  misc_feature: MA Experiment 20000185 PARAMETER Experiment Name: At_Roots__P Parameter: Tissue Value: Roots vs. Whole Plant
  misc_feature: MA Experiment ID: 20000227 Result: Down-regulated in Transcription
  misc_feature: MA Experiment 20000227 PARAMETER Experiment Name: At_Root-Tips-vs-Tops_P Parameter: Tissue Value: Root Tips vs. Root Tops
  misc_feature: MA Experiment ID: 20000234 Result: Down-regulated in Transcription
  misc_feature: MA Experiment 20000234 PARAMETER Experiment Name: At_Siliques_P Parameter: Age (day) Value: 21
  misc_feature: MA Experiment 20000234 PARAMETER Experiment Name: At_Siliques_P Parameter: Organism Value: A. thaliana
  misc_feature: MA Experiment 20000234 PARAMETER Experiment Name: At_Siliques_P Parameter: Plant Line Value: WS
  misc_feature: MA Experiment 20000234 PARAMETER Experiment Name: At_Siliques_P Parameter: Tissue Value: Less Than 5mm Siliques vs. Whole Plant
  misc_feature: MA Experiment ID: 20000264 Result: Down-regulated in Transcription
  misc_feature: MA Experiment 20000264 PARAMETER Experiment Name: At_Open_Flower_P Parameter: Age (day) Value: 21
  misc_feature: MA Experiment 20000264 PARAMETER Experiment Name: At_Open_Flower_P Parameter: Plant Line Value: WS
  misc_feature: MA Experiment 20000264 PARAMETER Experiment Name: At_Open_Flower_P Parameter: Tissue Value: Open Flower vs. Whole Plant
  misc_feature: MA Experiment ID: 20000439 Result: Down-regulated in Transcription
  misc_feature: MA Experiment 20000439 PARAMETER Experiment Name: At_Roots__P Parameter: Age (day) Value: 14 vs. 21
  misc_feature: MA Experiment 20000439 PARAMETER Experiment Name: At_Roots__P Parameter: Organism Value: A. thaliana
  misc_feature: MA Experiment 20000439 PARAMETER Experiment Name: At_Roots__P Parameter: Tissue Value: Roots vs. Whole Plant
  misc_feature: MA Experiment ID: 20000495 Result: Down-regulated in Transcription
  misc_feature: MA Experiment 20000495 PARAMETER Experiment Name: At_Guard_Cells_P Parameter: Harvest Date Value: 8/2/2002
  misc_feature: MA Experiment 20000495 PARAMETER Experiment Name: At_Guard_Cells_P Parameter: Organism Value: A. thaliana
  misc_feature: MA Experiment 20000495 PARAMETER Experiment Name: At_Guard_Cells_P Parameter: Tissue Value: Guard Cells vs. Leaves
attgcgaattttaattgatcactctctctctctatctctgttcaaacatctctcccaaagtaggtagaagaagatggggacgacgttagatgtatcaagagcagagctagcacttgtggtaatgtatttgaacaaagcagaggcaagagataagttatgcagagctatacagtatggttccaagttcttgagtggtggacaacctggtactgctcaaaatgttgacaaatctactagcttagcaagaaaagtcttccgtcttttcaagtttgtgaatgacttgcatggtcttatcagtcctgtgcctaaaggaactcctcttcctcttgttttacttggaaagtcgaagaacgcacttttatctacattcttgttcctggatcaaattgtctggcttgggagatcaggaatatataagaacaaagaacgagctgagttacttggacgtatatctctcttctgctggatgggatcttctgtctgcacaactttagtcgaggttggtgagatgggaaggctttcttcatcaatgaagaagatcgaaaagggactcaagaatggaaacaagtatcaggatgaggattatcgtgctaagctaaaaaaatcaaacgagaggtcacttgctttgatcaaatcagctatggacattgttgtagcagctggtcttcttcagttagctccaacgaagatcactcctcgtgtcaccggagcttttggattcatcacctccatcatttcttgttaccagttgcttccgacacgccccaagatcaaaacaccctgaagtcaatcgaggaagctggtgttaaggagaaagtcatttcagaaagtttctgttcttcttattattaaggaaattcactgctgttataaaacatcgtataaaatacttatttgcaggaattacggttattataaatttatgcctcagattcttgatacgc

SEQ ID NO: 28952 - protein, 236 aa, Arabidopsis thaliana; identical to SEQ ID NO: 28883
  peptide (1)..(236): Ceres Seq. ID no. 12334418
  misc_feature (12)..(227): Pfam Name: Peroxisomal biogenesis factor 11 (PEX11) Pfam Description: Peroxisomal biogenesis factor 11 (PEX11)
  misc_feature (132)..(236): Homolog of NCBI NO: 14335058 NR Description: At2g45740/F4I18.28 [Arabidopsis thaliana]
  misc_feature (3)..(225): Homolog of NCBI NO: 34898026 NR Description: ESTs AU064537(E31904),AU082147(E31904) correspond a region of the predicted gene.~Similar to Arabidopsis thaliana
  misc_feature (3)..(234): Homolog of NCBI NO: 25553559 NR Description: OSJNBa0038F22.7 [Oryza sativa (japonica
  misc_feature (3)..(234): Homolog of NCBI NO: 8489788 NR Description: unknown [Lycopersicon esculentum]
  misc_feature (3)..(236): Homolog of NCBI NO: 11358250 NR Description: hypothetical protein T27I15_160 - Arabidopsis
  misc_feature (3)..(234): Homolog of NCBI NO: 18378887 NR Description: expressed protein
  misc_feature (3)..(236): Homolog of NCBI NO: 30695340 NR Description: expressed protein [Arabidopsis thaliana]
  misc_feature (1)..(231): Homolog of NCBI NO: 7486466 NR Description: hypothetical protein At2g45740 [imported] -
  misc_feature (1)..(236): Homolog of NCBI NO: 18406877 NR Description: expressed protein

SEQ ID NO: 28953 - protein, 220 aa, Arabidopsis thaliana; identical to SEQ ID NO: 28884
  peptide (1)..(220): Ceres Seq. ID no. 12334419
  misc_feature (1)..(211): Pfam Name: Peroxisomal biogenesis factor 11 (PEX11) Pfam Description: Peroxisomal biogenesis factor 11 (PEX11)
  misc_feature (116)..(220): Homolog of NCBI NO: 14335058 NR Description: At2g45740/F4I18.28 [Arabidopsis thaliana]
  misc_feature (1)..(209): Homolog of NCBI NO: 34898026 NR Description: ESTs AU064537(E31904),AU082147(E31904) correspond a region of the predicted gene.~Similar to Arabidopsis thaliana
  misc_feature (1)..(218): Homolog of NCBI NO: 25553559 NR Description: OSJNBa0038F22.7 [Oryza sativa (japonica
  misc_feature (1)..(218): Homolog of NCBI NO: 8489788 NR Description: unknown [Lycopersicon esculentum]
  misc_feature (1)..(220): Homolog of NCBI NO: 11358250 NR Description: hypothetical protein T27I15_160 - Arabidopsis
  misc_feature (1)..(218): Homolog of NCBI NO: 18378887 NR Description: expressed protein
  misc_feature (1)..(220): Homolog of NCBI NO: 30695340 NR Description: expressed protein [Arabidopsis thaliana]
  misc_feature (1)..(215): Homolog of NCBI NO: 7486466 NR Description: hypothetical protein At2g45740 [imported] -
  misc_feature (1)..(220): Homolog of NCBI NO: 18406877 NR Description: expressed protein

SEQ ID NO: 28954 - DNA, 1212 bp, Arabidopsis thaliana
  misc_feature (1)..(1212): Ceres Seq. ID no. 12422769
  misc_feature: MA Experiment ID: 108434 Result: Down-regulated in Transcription
  misc_feature: MA Experiment 108434 PARAMETER Experiment Name: At_Root_Tips_cDNA_P Parameter: Tissue Value: Root Tips
  misc_feature: MA Experiment ID: 108573 Result: Up-regulated in Transcription
  misc_feature: MA Experiment 108573 PARAMETER Experiment Name: At_Drought_cDNA_P Parameter: Timepoint (hr) Value: 6
  misc_feature: MA Experiment 108573 PARAMETER Experiment Name: At_Drought_cDNA_P Parameter: Tissue Value: Aerial
  misc_feature: MA Experiment 108573 PARAMETER Experiment Name: At_Drought_cDNA_P Parameter: Treatment Value: Drought vs. No Drought
  misc_feature: MA Experiment ID: 108595 Result: Down-regulated in Transcription
  misc_feature: MA Experiment 108595 PARAMETER Experiment Name: At_Ler-pi_Ovule_cDNA_P Parameter: Plant Line Value: null
  misc_feature: MA Experiment ID: 20000224 Result: Down-regulated in Transcription
gaagctcttgaaatttcctctcttcttcttttgcttgagctttaggttttgagagcaaagaaaaacgaagacgcgtcaaaggtactgaaatgtgtctattgcttcttgcttctggtttatgggtccctgcgacattttgagagtgttgtttggtttaggtgtctggtgtattgcttatataactgttgcaatctttgcgtcttttagaatctttcactgtatttgttaatttcaagagcttttgtggagaggttctgcttgcttgctacaatgggttacgcccagctagttattggtccagcaggcagtggaaagtcaacttattgctcgtctttgtatgaacattgtgaaactatcggtcgaacaatgcatgttgttaaccttgatcctgctgcggagatcttcaactatcctgtggctatggatatcagagaacttatttctttggaagatgtgatggaggatctaaagcttggtcctaatggtgcccttatgtattgcatggagtatcttgaggatagcttacatgattgggtggatgaagaattggagaactacagggatgacgattaccttatctttgattgtccaggccagatagagctgtttacacatgttcctgtgctcaagaactttgtggagcatttgaagcagaagaacttcaacgtctgtgttgtttatctgcttgattcacagttcatcacagatgtaaccaagtttatcagtggttgcatgtcatctctcgctgcaatgatccagcttgaattaccacatgtcaacatcctctcaaaaatggacctcttgcaggacaaaagcaacattgatgattacttgaatccggagcctcgcacattgctagcagagttaaacaaaaggatgggtcctcaatatgcaaaactaaacaaagccttgattgagatggtgggagagtatgggatggtgaatttcatacccattaacttgaggaaagaaaagagcattcaatatgttctgtcgcaaatcgacgtctgtattcagtttggagaagatgctgatgtgaacatcaaagatgatgacgattttagtgacgatggtcctgacctataattgttatattcggtttctacaacttttgttaaaagtctaaacaagcttggtctcattgttcttgtcagttaccaatggcgtttgtgagaacttttgttgaatatcaaaagccttcaatgtgagacg

SEQ ID NO: 28955 - protein, 271 aa, Arabidopsis thaliana
  peptide (1)..(271): Ceres Seq. ID no. 12422770
  misc_feature (7)..(250): Pfam Name: Conserved hypothetical ATP binding protein Pfam Description: Conserved hypothetical ATP binding protein
  misc_feature (1)..(256): Homolog of NCBI NO: 39587465 NR Description: Hypothetical protein CBG23047 [Caenorhabditis
  misc_feature (3)..(271): Homolog of NCBI NO: 21410245 NR Description: protein x 0004 [Homo sapiens]
  misc_feature (6)..(261): Homolog of NCBI NO: 6323272 NR Description: Protein required for cell viability; Ylr243wp
  misc_feature (3)..(255): Homolog of NCBI NO: 21312642 NR Description: RIKEN cDNA A930018B01 [Mus musculus]
  misc_feature (1)..(256): Homolog of NCBI NO: 17556506 NR Description: ATP-binding protein like (31.0 kD)
  misc_feature (3)..(255): Homolog of NCBI NO: 34872358 NR Description: similar to RIKEN cDNA A930018B01 [Rattus
  misc_feature (3)..(256): Homolog of NCBI NO: 37606123 NR Description: SI:zK83D9.3 (novel protein similar to human x
  misc_feature (59)..(271): Homolog of NCBI NO: 7487264 NR Description: hypothetical protein T20K18.140 - Arabidopsis
  misc_feature (1)..(266): Homolog of NCBI NO: 18071342 NR Description: putative ATP(GTP)-binding protein
  misc_feature (1)..(271): Homolog of NCBI NO: 18413871 NR Description: putative protein
MGYAQLVIGPAGSGKSTYCSSLYEHCETIGRTMHVVNLDPAAEIFNYPVAMDIRELISLEDVMEDLKLGPNGALMYCMEYLEDSLHDWVDEELENYRDDDYLIFDCPGQIELFTHVPVLKNFVEHLKQKNFNVCVVYLLDSQFITDVTKFISGCMSSLAAMIQLELPHVNILSKMDLLQDKSNIDDYLNPEPRTLLAELNKRMGPQYAKLNKALIEMVGEYGMVNFIPINLRKEKSIQYVLSQIDVCIQFGEDADVNIKDDDDFSDDGPDL

SEQ ID NO: 28956 - protein, 239 aa, Arabidopsis thaliana
  peptide (1)..(239): Ceres Seq. ID no. 12422771
  misc_feature (1)..(218): Pfam Name: Conserved hypothetical ATP binding protein Pfam Description: Conserved hypothetical ATP binding protein
  misc_feature (1)..(224): Homolog of NCBI NO: 39587465 NR Description: Hypothetical protein CBG23047 [Caenorhabditis
  misc_feature (1)..(239): Homolog of NCBI NO: 21410245 NR Description: protein x 0004 [Homo sapiens]
  misc_feature (1)..(229): Homolog of NCBI NO: 6323272 NR Description: Protein required for cell viability; Ylr243wp
  misc_feature (1)..(223): Homolog of NCBI NO: 21312642 NR Description: RIKEN cDNA A930018B01 [Mus musculus]
  misc_feature (1)..(224): Homolog of NCBI NO: 17556506 NR Description: ATP-binding protein like (31.0 kD)
  misc_feature (1)..(223): Homolog of NCBI NO: 34872358 NR Description: similar to RIKEN cDNA A930018B01 [Rattus
  misc_feature (1)..(224): Homolog of NCBI NO: 37606123 NR Description: SI:zK83D9.3 (novel protein similar to human x
  misc_feature (27)..(239): Homolog of NCBI NO: 7487264 NR Description: hypothetical protein T20K18.140 - Arabidopsis
  misc_feature (1)..(234): Homolog of NCBI NO: 18071342 NR Description: putative ATP(GTP)-binding protein
  misc_feature (1)..(239): Homolog of NCBI NO: 18413871 NR Description: putative protein
MHVVNLDPAAEIFNYPVAMDIRELISLEDVMEDLKLGPNGALMYCMEYLEDSLHDWVDEELENYRDDDYLIFDCPGQIELFTHVPVLKNFVEHLKQKNFNVCVVYLLDSQFITDVTKFISGCMSSLAAMIQLELPHVNILSKMDLLQDKSNIDDYLNPEPRTLLAELNKRMGPQYAKLNKALIEMVGEYGMVNFIPINLRKEKSIQYVLSQIDVCIQFGEDADVNIKDDDDFSDDGPDL

SEQ ID NO: 28957 - protein, 221 aa, Arabidopsis thaliana
  peptide (1)..(221): Ceres Seq. ID no. 12422772
  misc_feature (1)..(200): Pfam Name: Conserved hypothetical ATP binding protein Pfam Description: Conserved hypothetical ATP binding protein
  misc_feature (1)..(206): Homolog of NCBI NO: 39587465 NR Description: Hypothetical protein CBG23047 [Caenorhabditis
  misc_feature (1)..(221): Homolog of NCBI NO: 21410245 NR Description: protein x 0004 [Homo sapiens]
  misc_feature (1)..(211): Homolog of NCBI NO: 6323272 NR Description: Protein required for cell viability; Ylr243wp
  misc_feature (1)..(205): Homolog of NCBI NO: 21312642 NR Description: RIKEN cDNA A930018B01 [Mus musculus]
  misc_feature (1)..(206): Homolog of NCBI NO: 17556506 NR Description: ATP-binding protein like (31.0 kD)
  misc_feature (1)..(205): Homolog of NCBI NO: 34872358 NR Description: similar to RIKEN cDNA A930018B01 [Rattus
  misc_feature (1)..(206): Homolog of NCBI NO: 37606123 NR Description: SI:zK83D9.3 (novel protein similar to human x
  misc_feature (9)..(221): Homolog of NCBI NO: 7487264 NR Description: hypothetical protein T20K18.140 - Arabidopsis
  misc_feature (1)..(216): Homolog of NCBI NO: 18071342 NR Description: putative ATP(GTP)-binding protein
  misc_feature (1)..(221): Homolog of NCBI NO: 18413871 NR Description: putative protein
MDIRELISLEDVMEDLKLGPNGALMYCMEYLEDSLHDWVDEELENYRDDDYLIFDCPGQIELFTHVPVLKNFVEHLKQKNFNVCVVYLLDSQFITDVTKFISGCMSSLAAMIQLELPHVNILSKMDLLQDKSNIDDYLNPEPRTLLAELNKRMGPQYAKLNKALIEMVGEYGMVNFIPINLRKEKSIQYVLSQIDVCIQFGEDADVNIKDDDDFSDDGPDL

SEQ ID NO: 28958 - DNA, 1363 bp, Arabidopsis thaliana
  misc_feature (1)..(1363): Ceres Seq. ID no. 13486775
  misc_feature: MA Experiment ID: 108434 Result: Down-regulated in Transcription
  misc_feature: MA Experiment 108434 PARAMETER Experiment Name: At_Root_Tips_cDNA_P Parameter: Tissue Value: Root Tips
  misc_feature: MA Experiment ID: 108435 Result: Down-regulated in Transcription
  misc_feature: MA Experiment 108435 PARAMETER Experiment Name: At_stm_Mutants_cDNA_P Parameter: Plant Line Value: wt Landsburg vs stm
  misc_feature: MA Experiment 108435 PARAMETER Experiment Name: At_stm_Mutants_cDNA_P Parameter: Tissue Value: Shoot Apical Meristem Region
  misc_feature: MA Experiment ID: 108462 Result: Up-regulated in Transcription
  misc_feature: MA Experiment 108462 PARAMETER Experiment Name: At_Germinating_Seeds_cDNA_P Parameter: Age (day) Value: 2 vs. 0
  misc_feature: MA Experiment 108462 PARAMETER Experiment Name: At_Germinating_Seeds_cDNA_P Parameter: Tissue Value: Germinating Seeds
  misc_feature: MA Experiment ID: 108463 Result: Up-regulated in Transcription
  misc_feature: MA Experiment 108463 PARAMETER Experiment Name: At_Germinating_Seeds_cDNA_P Parameter: Age (day) Value: 3 vs. 0
  misc_feature: MA Experiment 108463 PARAMETER Experiment Name: At_Germinating_Seeds_cDNA_P Parameter: Tissue Value: Germinating Seeds
  misc_feature: MA Experiment ID: 108469 Result: Down-regulated in Transcription
  misc_feature: MA Experiment ID: 108573 Result: Up-regulated in Transcription
  misc_feature: MA Experiment 108573 PARAMETER Experiment Name: At_Drought_cDNA_P Parameter: Timepoint (hr) Value: 6
  misc_feature: MA Experiment 108573 PARAMETER Experiment Name: At_Drought_cDNA_P Parameter: Tissue Value: Aerial
  misc_feature: MA Experiment 108573 PARAMETER Experiment Name: At_Drought_cDNA_P Parameter: Treatment Value: Drought vs. No Drought
  misc_feature: MA Experiment ID: 108585 Result: Up-regulated in Transcription
  misc_feature: MA Experiment 108585 PARAMETER Experiment Name: At_5mM_NaNP_cDNA_P Parameter: Timepoint (hr) Value: 6
  misc_feature: MA Experiment 108585 PARAMETER Experiment Name: At_5mM_NaNP_cDNA_P Parameter: Tissue Value: Aerial
  misc_feature: MA Experiment 108585 PARAMETER Experiment Name: At_5mM_NaNP_cDNA_P Parameter: Treatment Value: null
  misc_feature: MA Experiment ID: 108595 Result: Down-regulated in Transcription
  misc_feature: MA Experiment 108595 PARAMETER Experiment Name: At_Ler-pi_Ovule_cDNA_P Parameter: Plant Line Value: null
  misc_feature: MA Experiment ID: 20000071 Result: Up-regulated in Transcription
  misc_feature: MA Experiment 20000071 PARAMETER Experiment Name: At_100uM_ABA_Mutants_cDNA_P Parameter: Plant Line Value: CS8104
  misc_feature: MA Experiment 20000071 PARAMETER Experiment Name: At_100uM_ABA_Mutants_cDNA_P Parameter: Timepoint (hr) Value: 6
  misc_feature: MA Experiment 20000071 PARAMETER Experiment Name: At_100uM_ABA_Mutants_cDNA_P Parameter: Tissue Value: Aerial
  misc_feature: MA Experiment 20000071 PARAMETER Experiment Name: At_100uM_ABA_Mutants_cDNA_P Parameter: Treatment Value: 100uM ABA vs. No Treatment
  misc_feature: MA Experiment ID: 20000185 Result: Down-regulated in Transcription
  misc_feature: MA Experiment 20000185 PARAMETER Experiment Name: At_Roots__P Parameter: Age (day) Value: 7 vs. 21
  misc_feature: MA Experiment 20000185 PARAMETER Experiment Name: At_Roots__P Parameter: Organism Value: A. thaliana
  misc_feature: MA Experiment 20000185 PARAMETER Experiment Name: At_Roots__P Parameter: Tissue Value: Roots vs. Whole Plant
  misc_feature: MA Experiment ID: 20000224 Result: Up-regulated in Transcription
  misc_feature: MA Experiment ID: 20000437 Result: Up-regulated in Transcription
  misc_feature: MA Experiment 20000437 PARAMETER Experiment Name: At_Drought_P Parameter: Age (day) Value: 8
  misc_feature: MA Experiment 20000437 PARAMETER Experiment Name: At_Drought_P Parameter: Organism Value: A. thaliana
  misc_feature: MA Experiment 20000437 PARAMETER Experiment Name: At_Drought_P Parameter: Plant Line Value: WS
  misc_feature: MA Experiment 20000437 PARAMETER Experiment Name: At_Drought_P Parameter: Timepoint (hr) Value: 24
  misc_feature: MA Experiment 20000437 PARAMETER Experiment Name: At_Drought_P Parameter: Tissue Value: Whole Plant
  misc_feature: MA Experiment 20000437 PARAMETER Experiment Name: At_Drought_P Parameter: Treatment Value: Drought vs. No Drought
  misc_feature: MA Experiment ID: 20000439 Result: Down-regulated in Transcription
  misc_feature: MA Experiment 20000439 PARAMETER Experiment Name: At_Roots__P Parameter: Age (day) Value: 14 vs. 21
  misc_feature: MA Experiment 20000439 PARAMETER Experiment Name: At_Roots__P Parameter: Organism Value: A. thaliana
  misc_feature: MA Experiment 20000439 PARAMETER Experiment Name: At_Roots__P Parameter: Tissue Value: Roots vs. Whole Plant
  misc_feature: MA Experiment ID: 20000445 Result: Up-regulated in Transcription
  misc_feature: MA Experiment 20000445 PARAMETER Experiment Name: At_100uM_NAA__P Parameter: Age (day) Value: 14
  misc_feature: MA Experiment 20000445 PARAMETER Experiment Name: At_100uM_NAA__P Parameter: Organism Value: A. thaliana
  misc_feature: MA Experiment 20000445 PARAMETER Experiment Name: At_100uM_NAA__P Parameter: Plant Line Value: WS
  misc_feature: MA Experiment 20000445 PARAMETER Experiment Name: At_100uM_NAA__P Parameter: Timepoint (hr) Value: 6
  misc_feature: MA Experiment 20000445 PARAMETER Experiment Name: At_100uM_NAA__P Parameter: Tissue Value: Aerial
  misc_feature: MA Experiment 20000445 PARAMETER Experiment Name: At_100uM_NAA__P Parameter: Treatment Value: 100uM NAA vs. No Treatment
  misc_feature: MA Experiment ID: 20000451 Result: Down-regulated in Transcription
  misc_feature: MA Experiment 20000451 PARAMETER Experiment Name: At_CS6879_Shoots-Roots_P Parameter: Age (day) Value: 14
  misc_feature: MA Experiment 20000451 PARAMETER Experiment Name: At_CS6879_Shoots-Roots_P Parameter: Organism Value: A. thaliana
  misc_feature: MA Experiment 20000451 PARAMETER Experiment Name: At_CS6879_Shoots-Roots_P Parameter: Plant Line Value: CS6879 vs. WS
  misc_feature: MA Experiment 20000451 PARAMETER Experiment Name: At_CS6879_Shoots-Roots_P Parameter: Tissue Value: Roots
  misc_feature: MA Experiment ID: 20000452 Result: Up-regulated in Transcription
  misc_feature: MA Experiment 20000452 PARAMETER Experiment Name: At_CS6879_Shoots-Roots_P Parameter: Age (day) Value: 14
  misc_feature: MA Experiment 20000452 PARAMETER Experiment Name: At_CS6879_Shoots-Roots_P Parameter: Organism Value: A. thaliana
  misc_feature: MA Experiment 20000452 PARAMETER Experiment Name: At_CS6879_Shoots-Roots_P Parameter: Plant Line Value: CS6879 vs. WS
  misc_feature: MA Experiment 20000452 PARAMETER Experiment Name: At_CS6879_Shoots-Roots_P Parameter: Tissue Value: Shoots
  misc_feature: MA Experiment ID: 20000456 Result: Up-regulated in Transcription
  misc_feature: MA Experiment 20000456 PARAMETER Experiment Name: At_100uM_BA_P Parameter: Age (day) Value: 14
  misc_feature: MA Experiment 20000456 PARAMETER Experiment Name: At_100uM_BA_P Parameter: Organism Value: A. thaliana
  misc_feature: MA Experiment 20000456 PARAMETER Experiment Name: At_100uM_BA_P Parameter: Plant Line Value: WS
  misc_feature: MA Experiment 20000456 PARAMETER Experiment Name: At_100uM_BA_P Parameter: Timepoint (hr) Value: 6
  misc_feature: MA Experiment 20000456 PARAMETER Experiment Name: At_100uM_BA_P Parameter: Tissue Value: Aerial
  misc_feature: MA Experiment 20000456 PARAMETER Experiment Name: At_100uM_BA_P Parameter: Treatment Value: 100uM BA vs. No Treatment
  misc_feature: MA Experiment ID: 20001911 Result: Up-regulated in Transcription
  misc_feature: MA Experiment 20001911 PARAMETER Experiment Name: At_Drought_Reproduction_P Parameter: Age (day) Value: 40
  misc_feature: MA Experiment 20001911 PARAMETER Experiment Name: At_Drought_Reproduction_P Parameter: Organism Value: A. thaliana
  misc_feature: MA Experiment 20001911 PARAMETER Experiment Name: At_Drought_Reproduction_P Parameter: Plant Line Value: WS
  misc_feature: MA Experiment 20001911 PARAMETER Experiment Name: At_Drought_Reproduction_P Parameter: Timepoint (day) Value: 10
  misc_feature: MA Experiment 20001911 PARAMETER Experiment Name: At_Drought_Reproduction_P Parameter: Tissue Value: Flowers
  misc_feature: MA Experiment 20001911 PARAMETER Experiment Name: At_Drought_Reproduction_P Parameter: Treatment Value: Drought vs. No Drought
aaaattgaatcttcctcttcttcttgagtcttcagaacaacaacaaaaaacagaatcttgaaagaaagaaaaaaagaaaaaaacatgacagagaattctgaaaaaatcgatcgtttaaacgatctcacgacttttatctcgacgaagacaggagtgaaaggactcgtcgatgccgaaataaccgaagttcctagcatgtttcatgtcccttcttctattttatcaaacaacagaccttctgatatctccggcttaaacctcaccgtcccaatcatcgacctaggagatcgtaacacatcttcaagaaacgttgtcatttcgaagatcaaagacgcagctgagaattggggatttttccaagtgatcaatcatgatgttcctttaactgttcttgaagagatcaaagagagtgttcgaaggtttcatgaacaagatccagttgtcaagaaccaatatcttcctaccgataacaacaagagatttgtttataacaatgatttcgatctctatcattcttctcctttgaattggagagactctttcacttgttatattgctccagatcctccgaatccagaggaaatcccactagcttgcaggagtgcggcgatcgaatacacgaagcatgtaatggaattaggagctgtgctcttccaacttctctcagaagctttaggtttagactctgaggcacttaagaggattgattgtcttaagggtttgtttatgctctgccattactatccaccttgcccacaacctgacctaactttaggtataagtaaacacaccgacaactctttcctcacgcttcttcttcaagaccaaatcggtggtcttcaagttcttcatgaagattattgggtcgatgtccctcctgtacctggagctcttgttgtcaacattggtgatttcatgcagctgataacgaacgataagttcttgagcgtggagcatagggtacgaccgaacaaagatagaccgcggatttcagttgcgtgcttctttagctcgagtctttctccaaattccacggtttatggaccgattaaagatcttttgtctgatgaaaaccctgctaagtacaaagatatcaccataccagagtacactgcaggatttcttgcgagcatttttgatgaaaagtcgtatttgactaattacatgatatgaagaaaatacttgtccgagtgcaaaatatatatttgtgcgttttgcatatgttacgctacattttctttgtacccgctatagagttcctcaaccattgtaccaataagaaaaaatgttttctacttcatgcttaaaacagcattctaggcttgtagctaacaagtcaaactataagttatctttttcaaac

SEQ ID NO: 28959 - protein, 362 aa, Arabidopsis thaliana
  peptide (1)..(362): Ceres Seq. ID no. 13486776
  misc_feature (211)..(310): Pfam Name: 2OG-Fe(II) oxygenase superfamily Pfam Description: 2OG-Fe(II) oxygenase superfamily
  misc_feature (2)..(346): Homolog of NCBI NO: 15221544 NR Description: 2-oxoglutarate-dependent dioxygenase, putative
  misc_feature (9)..(362): Homolog of NCBI NO: 15221545 NR Description: 2-oxoglutarate-dependent dioxygenase, putative
  misc_feature (8)..(357): Homolog of NCBI NO: 30679748 NR Description: 2-oxoglutarate-dependent dioxygenase, putative
  misc_feature (31)..(362): Homolog of NCBI NO: 15219718 NR Description: 2-oxoglutarate-dependent dioxygenase, putative
  misc_feature (5)..(362): Homolog of NCBI NO: 15219715 NR Description: 2-oxoglutarate-dependent dioxygenase, putative
  misc_feature (1)..(362): Homolog of NCBI NO: 15238458 NR Description: 2-oxoglutarate-dependent dioxygenase, putative
  misc_feature (1)..(362): Homolog of NCBI NO: 15238459 NR Description: oxidoreductase, 2OG-Fe(II) oxygenase family
  misc_feature (1)..(362): Homolog of NCBI NO: 15239868 NR Description: 2-oxoglutarate-dependent dioxygenase, putative
  misc_feature (1)..(362): Homolog of NCBI NO: 15239870 NR Description: 2-oxoglutarate-dependent dioxygenase, putative
  misc_feature (1)..(362): Homolog of NCBI NO: 14596165 NR Description: 1-aminocyclopropane-1-carboxylate oxidase
MTENSEKIDRLNDLTTFISTKTGVKGLVDAEITEVPSMFHVPSSILSNNRPSDISGLNLTVPIIDLGDRNTSSRNVVISKIKDAAENWGFFQVINHDVPLTVLEEIKESVRRFHEQDPVVKNQYLPTDNNKRFVYNNDFDLYHSSPLNWRDSFTCYIAPDPPNPEEIPLACRSAAIEYTKHVMELGAVLFQLLSEALGLDSEALKRIDCLKGLFMLCHYYPPCPQPDLTLGISKHTDNSFLTLLLQDQIGGLQVLHEDYWVDVPPVPGALVVNIGDFMQLITNDKFLSVEHRVRPNKDRPRISVACFFSSSLSPNSTVYGPIKDLLSDENPAKYKDITIPEYTAGFLASIFDEKSYLTNYMI

SEQ ID NO: 28960 - protein, 325 aa, Arabidopsis thaliana
  peptide (1)..(325): Ceres Seq. ID no. 13486777
  misc_feature (174)..(273): Pfam Name: 2OG-Fe(II) oxygenase superfamily Pfam Description: 2OG-Fe(II) oxygenase superfamily
  misc_feature (1)..(309): Homolog of NCBI NO: 15221544 NR Description: 2-oxoglutarate-dependent dioxygenase, putative
  misc_feature (1)..(325): Homolog of NCBI NO: 15221545 NR Description: 2-oxoglutarate-dependent dioxygenase, putative
  misc_feature (1)..(320): Homolog of NCBI NO: 30679748 NR Description: 2-oxoglutarate-dependent dioxygenase, putative
  misc_feature (1)..(325): Homolog of NCBI NO: 15219718 NR Description: 2-oxoglutarate-dependent dioxygenase, putative
  misc_feature (1)..(325): Homolog of NCBI NO: 15219715 NR Description: 2-oxoglutarate-dependent dioxygenase, putative
  misc_feature (1)..(325): Homolog of NCBI NO: 15238458 NR Description: 2-oxoglutarate-dependent dioxygenase, putative
  misc_feature (1)..(325): Homolog of NCBI NO: 15238459 NR Description: oxidoreductase, 2OG-Fe(II) oxygenase family
  misc_feature (1)..(325): Homolog of NCBI NO: 15239868 NR Description: 2-oxoglutarate-dependent dioxygenase, putative
  misc_feature (1)..(325): Homolog of NCBI NO: 15239870 NR Description: 2-oxoglutarate-dependent dioxygenase, putative
  misc_feature (1)..(325): Homolog of NCBI NO: 14596165 NR Description: 1-aminocyclopropane-1-carboxylate oxidase
MFHVPSSILSNNRPSDISGLNLTVPIIDLGDRNTSSRNVVISKIKDAAENWGFFQVINHDVPLTVLEEIKESVRRFHEQDPVVKNQYLPTDNNKRFVYNNDFDLYHSSPLNWRDSFTCYIAPDPPNPEEIPLACRSAAIEYTKHVMELGAVLFQLLSEALGLDSEALKRIDCLKGLFMLCHYYPPCPQPDLTLGISKHTDNSFLTLLLQDQIGGLQVLHEDYWVDVPPVPGALVVNIGDFMQLITNDKFLSVEHRVRPNKDRPRISVACFFSSSLSPNSTVYGPIKDLLSDENPAKYKDITIPEYTAGFLASIFDEKSYLTNYMI

SEQ ID NO: 28961 - DNA, 747 bp, Arabidopsis thaliana
  misc_feature (1)..(747): Ceres Seq. ID no. 12738788
  misc_feature: MA Experiment ID: 108434 Result: Down-regulated in Transcription
  misc_feature: MA Experiment 108434 PARAMETER Experiment Name: At_Root_Tips_cDNA_P Parameter: Tissue Value: Root Tips
  misc_feature: MA Experiment ID: 108488 Result: Down-regulated in Transcription
  misc_feature: MA Experiment ID: 108573 Result: Up-regulated in Transcription
  misc_feature: MA Experiment 108573 PARAMETER Experiment Name: At_Drought_cDNA_P Parameter: Timepoint (hr) Value: 6
  misc_feature: MA Experiment 108573 PARAMETER Experiment Name: At_Drought_cDNA_P Parameter: Tissue Value: Aerial
  misc_feature: MA Experiment 108573 PARAMETER Experiment Name: At_Drought_cDNA_P Parameter: Treatment Value: Drought vs. No Drought
  misc_feature: MA Experiment ID: 108585 Result: Up-regulated in Transcription
  misc_feature: MA Experiment 108585 PARAMETER Experiment Name: At_5mM_NaNP_cDNA_P Parameter: Timepoint (hr) Value: 6
  misc_feature: MA Experiment 108585 PARAMETER Experiment Name: At_5mM_NaNP_cDNA_P Parameter: Tissue Value: Aerial
  misc_feature: MA Experiment 108585 PARAMETER Experiment Name: At_5mM_NaNP_cDNA_P Parameter: Treatment Value: null
  misc_feature: MA Experiment ID: 108605 Result: Up-regulated in Transcription
  misc_feature: MA Experiment 108605 PARAMETER Experiment Name: At_100uM_ABA_cDNA_P Parameter: Timepoint (hr) Value: 6
  misc_feature: MA Experiment 108605 PARAMETER Experiment Name: At_100uM_ABA_cDNA_P Parameter: Tissue Value: Aerial
  misc_feature: MA Experiment 108605 PARAMETER Experiment Name: At_100uM_ABA_cDNA_P Parameter: Treatment Value: 100uM ABA vs. No Treatment
  misc_feature: MA Experiment ID: 108607 Result: Up-regulated in Transcription
  misc_feature: MA Experiment 108607 PARAMETER Experiment Name: At_100uM_ABA_cDNA_P Parameter: Timepoint (hr) Value: 4
  misc_feature: MA Experiment 108607 PARAMETER Experiment Name: At_100uM_ABA_cDNA_P Parameter: Tissue Value: Aerial
  misc_feature: MA Experiment 108607 PARAMETER Experiment Name: At_100uM_ABA_cDNA_P Parameter: Treatment Value: 100uM ABA vs. No Treatment
  misc_feature: MA Experiment ID: 20000069 Result: Up-regulated in Transcription
  misc_feature: MA Experiment 20000069 PARAMETER Experiment Name: At_100uM_ABA_Mutants_cDNA_P Parameter: Plant Line Value: CS23
  misc_feature: MA Experiment 20000069 PARAMETER Experiment Name: At_100uM_ABA_Mutants_cDNA_P Parameter: Timepoint (hr) Value: 6
  misc_feature: MA Experiment 20000069 PARAMETER Experiment Name: At_100uM_ABA_Mutants_cDNA_P Parameter: Tissue Value: Aerial
  misc_feature: MA Experiment 20000069 PARAMETER Experiment Name: At_100uM_ABA_Mutants_cDNA_P Parameter: Treatment Value: 100uM ABA vs. No Treatment
  misc_feature: MA Experiment ID: 20000070 Result: Up-regulated in Transcription
  misc_feature: MA Experiment 20000070 PARAMETER Experiment Name: At_100uM_ABA_Mutants_cDNA_P Parameter: Plant Line Value: CS24
  misc_feature: MA Experiment 20000070 PARAMETER Experiment Name: At_100uM_ABA_Mutants_cDNA_P Parameter: Timepoint (hr) Value: 6
  misc_feature: MA Experiment 20000070 PARAMETER Experiment Name: At_100uM_ABA_Mutants_cDNA_P Parameter: Tissue Value: Aerial
  misc_feature: MA Experiment 20000070 PARAMETER Experiment Name: At_100uM_ABA_Mutants_cDNA_P Parameter: Treatment Value: 100uM ABA vs. No Treatment
  misc_feature: MA Experiment ID: 20000071 Result: Up-regulated in Transcription
  misc_feature: MA Experiment 20000071 PARAMETER Experiment Name: At_100uM_ABA_Mutants_cDNA_P Parameter: Plant Line Value: CS8104
  misc_feature: MA Experiment 20000071 PARAMETER Experiment Name: At_100uM_ABA_Mutants_cDNA_P Parameter: Timepoint (hr) Value: 6
  misc_feature: MA Experiment 20000071 PARAMETER Experiment Name: At_100uM_ABA_Mutants_cDNA_P Parameter: Tissue Value: Aerial
  misc_feature: MA Experiment 20000071 PARAMETER Experiment Name: At_100uM_ABA_Mutants_cDNA_P Parameter: Treatment Value: 100uM ABA vs. No Treatment
  misc_feature: MA Experiment ID: 20000087 Result: Up-regulated in Transcription
  misc_feature: MA Experiment 20000087 PARAMETER Experiment Name: At_100uM_ABA_Mutants_cDNA_P Parameter: Plant Line Value: WS
  misc_feature: MA Experiment 20000087 PARAMETER Experiment Name: At_100uM_ABA_Mutants_cDNA_P Parameter: Timepoint (hr) Value: 6
  misc_feature: MA Experiment 20000087 PARAMETER Experiment Name: At_100uM_ABA_Mutants_cDNA_P Parameter: Tissue Value: Aerial
  misc_feature: MA Experiment 20000087 PARAMETER Experiment Name: At_100uM_ABA_Mutants_cDNA_P Parameter: Treatment Value: 100uM ABA vs. No Treatment
  misc_feature: MA Experiment ID: 20000088 Result: Up-regulated in Transcription
  misc_feature: MA Experiment 20000088 PARAMETER Experiment Name: At_100uM_ABA_Mutants_cDNA_P Parameter: Plant Line Value: Landsberg
  misc_feature: MA Experiment 20000088 PARAMETER Experiment Name: At_100uM_ABA_Mutants_cDNA_P Parameter: Timepoint (hr) Value: 6
  misc_feature: MA Experiment 20000088 PARAMETER Experiment Name: At_100uM_ABA_Mutants_cDNA_P Parameter: Tissue Value: Aerial
  misc_feature: MA Experiment 20000088 PARAMETER Experiment Name: At_100uM_ABA_Mutants_cDNA_P Parameter: Treatment Value: 100uM ABA vs. No Treatment
  misc_feature: MA Experiment ID: 20000117 Result: Up-regulated in Transcription
  misc_feature: MA Experiment 20000117 PARAMETER Experiment Name: At_100uM_ABA_Mutants_cDNA_P Parameter: Plant Line Value: Columbia
  misc_feature: MA Experiment 20000117 PARAMETER Experiment Name: At_100uM_ABA_Mutants_cDNA_P Parameter: Timepoint (hr) Value: 6
  misc_feature: MA Experiment 20000117 PARAMETER Experiment Name: At_100uM_ABA_Mutants_cDNA_P Parameter: Tissue Value: Aerial
  misc_feature: MA Experiment 20000117 PARAMETER Experiment Name: At_100uM_ABA_Mutants_cDNA_P Parameter: Treatment Value: 100uM ABA vs. No Treatment
  misc_feature: MA Experiment ID: 20000437 Result: Up-regulated in Transcription
  misc_feature: MA Experiment 20000437 PARAMETER Experiment Name: At_Drought_P Parameter: Age (day) Value: 8
  misc_feature: MA Experiment 20000437 PARAMETER Experiment Name: At_Drought_P Parameter: Organism Value: A. thaliana
  misc_feature: MA Experiment 20000437 PARAMETER Experiment Name: At_Drought_P Parameter: Plant Line Value: WS
  misc_feature: MA Experiment 20000437 PARAMETER Experiment Name: At_Drought_P Parameter: Timepoint (hr) Value: 24
  misc_feature: MA Experiment 20000437 PARAMETER Experiment Name: At_Drought_P Parameter: Tissue Value: Whole Plant
  misc_feature: MA Experiment 20000437 PARAMETER Experiment Name: At_Drought_P Parameter: Treatment Value: Drought vs. No Drought
  misc_feature: MA Experiment ID: 20000496 Result: Up-regulated in Transcription
  misc_feature: MA Experiment 20000496 PARAMETER Experiment Name: At_Guard_Cells_P Parameter: Harvest Date Value: 7/19/2002
  misc_feature: MA Experiment 20000496 PARAMETER Experiment Name: At_Guard_Cells_P Parameter: Organism Value: Canola
  misc_feature: MA Experiment 20000496 PARAMETER Experiment Name: At_Guard_Cells_P Parameter: Tissue Value: Guard Cells vs. Leaves
  misc_feature: MA Experiment ID: 20001906 Result: Up-regulated in Transcription
  misc_feature: MA Experiment 20001906 PARAMETER Experiment Name: At_Drought_Reproduction_P Parameter: Age (day) Value: 35
  misc_feature: MA Experiment 20001906 PARAMETER Experiment Name: At_Drought_Reproduction_P Parameter: Organism Value: A. thaliana
  misc_feature: MA Experiment 20001906 PARAMETER Experiment Name: At_Drought_Reproduction_P Parameter: Plant Line Value: WS
  misc_feature: MA Experiment 20001906 PARAMETER Experiment Name: At_Drought_Reproduction_P Parameter: Timepoint (day) Value: 5
  misc_feature: MA Experiment 20001906 PARAMETER Experiment Name: At_Drought_Reproduction_P Parameter: Tissue Value: Siliques
  misc_feature: MA Experiment 20001906 PARAMETER Experiment Name: At_Drought_Reproduction_P Parameter: Treatment Value: Drought vs. No Drought
aaaacaaccccttgagatttccgaagatcatcaaatccaaaaccctagaaaccgaacaaaagaagctaggactattcaatggcgtcgaaaagaattaacaaagagcttagggacttgcaaagagatcctcctgtgtcctgcagtgcaggtcctacgggagatgatatgttccaatggcaagcaactatcatgggtccagcagatagcccgtttgccggaggtgtgtttcttgttaccattcacttcccaccagattaccctttcaagccaccaaaggttgccttccggaccaaggtttatcacccaaacatcaacagtaatggaagtatctgtcttgacattctgaaagagcagtggagccctgcacttaccgtatccaaggttcttctgtcgatatgctcattgctgacggatccaaaccctgacgatcctttggttcctgaaatagcgcacatctacaagacagaccgagtcaagtacgagtccacagctcaatcctggactcagaagtatgcaatgggatgataacaagcaataatacccaccaccagtacattgcgtattaaacaggagaaataagaaagaaagaaaaaaactcagtttggcttttactttggctacttttgcttattagttttttttttttaattatatcttgaaactgtgtgttgggtgtgtacatgagctttatgccttatttgaaacattgagatcttgcaaatgcttttaagccaataatccgctacc

SEQ ID NO: 28962 - protein, 148 aa, Arabidopsis thaliana; identical to SEQ ID NO: 28390
  peptide (1)..(148): Ceres Seq. ID no. 12738789
  misc_feature (1)..(148): Homolog of NCBI NO: 18408001 NR Description: E2, ubiquitin-conjugating enzyme, putative
  misc_feature (1)..(148): Homolog of NCBI NO: 456568 NR Description: ubiquitin conjugating enzyme
  misc_feature (1)..(148): Homolog of NCBI NO: 5762457 NR Description: ubiquitin-conjugating enzyme UBC2
  misc_feature (1)..(148): Homolog of NCBI NO: 18423829 NR Description: E2, ubiquitin-conjugating enzyme, putative

SEQ ID NO: 28963 - protein, 119 aa, Arabidopsis thaliana; identical to SEQ ID NO: 28391
  peptide (1)..(119): Ceres Seq. ID no. 12738790
  misc_feature (1)..(119): Homolog of NCBI NO: 18408001 NR Description: E2, ubiquitin-conjugating enzyme, putative
  misc_feature (1)..(119): Homolog of NCBI NO: 456568 NR Description: ubiquitin conjugating enzyme
  misc_feature (1)..(119): Homolog of NCBI NO: 5762457 NR Description: ubiquitin-conjugating enzyme UBC2
  misc_feature (1)..(119): Homolog of NCBI NO: 18423829 NR Description: E2, ubiquitin-conjugating enzyme, putative

SEQ ID NO: 28964 - protein, 114 aa, Arabidopsis thaliana
  peptide (1)..(114): Ceres Seq. ID no. 12738791
KQPLEISEDHQIQNPRNRTKEARTIQWRRKELTKSLGTCKEILLCPAVQVLREMICSNGKQLSWVQQIARLPEVCFLLPFTSHQITLSSHQRLPSGPRFITQTSTVMEVSVLTF

SEQ ID NO: 28965 - DNA, 1653 bp, Arabidopsis thaliana
  misc_feature (1)..(1653): Ceres Seq. ID no. 12422791
  misc_feature: MA Experiment ID: 108434 Result: Up-regulated in Transcription
  misc_feature: MA Experiment 108434 PARAMETER Experiment Name: At_Root_Tips_cDNA_P Parameter: Tissue Value: Root Tips
  misc_feature: MA Experiment ID: 108462 Result: Down-regulated in Transcription
  misc_feature: MA Experiment 108462 PARAMETER Experiment Name: At_Germinating_Seeds_cDNA_P Parameter: Age (day) Value: 2 vs. 0
  misc_feature: MA Experiment 108462 PARAMETER Experiment Name: At_Germinating_Seeds_cDNA_P Parameter: Tissue Value: Germinating Seeds
  misc_feature: MA Experiment ID: 108463 Result: Down-regulated in Transcription
  misc_feature: MA Experiment 108463 PARAMETER Experiment Name: At_Germinating_Seeds_cDNA_P Parameter: Age (day) Value: 3 vs. 0
  misc_feature: MA Experiment 108463 PARAMETER Experiment Name: At_Germinating_Seeds_cDNA_P Parameter: Tissue Value: Germinating Seeds
  misc_feature: MA Experiment ID: 108464 Result: Down-regulated in Transcription
  misc_feature: MA Experiment 108464 PARAMETER Experiment Name: At_Germinating_Seeds_cDNA_P Parameter: Age (day) Value: 4 vs. 0
  misc_feature: MA Experiment 108464 PARAMETER Experiment Name: At_Germinating_Seeds_cDNA_P Parameter: Tissue Value: Germinating Seeds
  misc_feature: MA Experiment ID: 20000093 Result: Up-regulated in Transcription
  misc_feature: MA Experiment 20000093 PARAMETER Experiment Name: At_42deg_Heat_cDNA_P Parameter: Temperature (deg C) Value: 42 vs. 22
  misc_feature: MA Experiment 20000093 PARAMETER Experiment Name: At_42deg_Heat_cDNA_P Parameter: Timepoint (hr) Value: 0.5
  misc_feature: MA Experiment 20000093 PARAMETER Experiment Name: At_42deg_Heat_cDNA_P Parameter: Tissue Value: Aerial
  misc_feature: MA Experiment ID: 20000437 Result: Down-regulated in Transcription
  misc_feature: MA Experiment 20000437 PARAMETER Experiment Name: At_Drought_P Parameter: Age (day) Value: 8
  misc_feature: MA Experiment 20000437 PARAMETER Experiment Name: At_Drought_P Parameter: Organism Value: A. thaliana
  misc_feature: MA Experiment 20000437 PARAMETER Experiment Name: At_Drought_P Parameter: Plant Line Value: WS
  misc_feature: MA Experiment 20000437 PARAMETER Experiment Name: At_Drought_P Parameter: Timepoint (hr) Value: 24
  misc_feature: MA Experiment 20000437 PARAMETER Experiment Name: At_Drought_P Parameter: Tissue Value: Whole Plant
  misc_feature: MA Experiment 20000437 PARAMETER Experiment Name: At_Drought_P Parameter: Treatment Value: Drought vs. No Drought
  misc_feature: MA Experiment ID: 20001557 Result: Up-regulated in Transcription
  misc_feature: MA Experiment 20001557 PARAMETER Experiment Name: At_Drought_Soil_Dry_P Parameter: Age (day) Value: 27
  misc_feature: MA Experiment 20001557 PARAMETER Experiment Name: At_Drought_Soil_Dry_P Parameter: Organism Value: A. thaliana
  misc_feature: MA Experiment 20001557 PARAMETER Experiment Name: At_Drought_Soil_Dry_P Parameter: Plant Line Value: WS
  misc_feature: MA Experiment 20001557 PARAMETER Experiment Name: At_Drought_Soil_Dry_P Parameter: Post Timepoint (hr) Value: 3
  misc_feature: MA Experiment 20001557 PARAMETER Experiment Name: At_Drought_Soil_Dry_P Parameter: Post-Treatment Value: Re-Water vs. No Drought
  misc_feature: MA Experiment 20001557 PARAMETER Experiment Name: At_Drought_Soil_Dry_P Parameter: Timepoint (day) Value: 13
  misc_feature: MA Experiment 20001557 PARAMETER Experiment Name: At_Drought_Soil_Dry_P Parameter: Treatment Value: Drought vs. No Drought
agctactactgttgaagcgattctcactaaaaccctcgaacacatcgcctttatctctttctctagatctactcgctatggctactatcaccgttgttaaggctagacagatcttcgacagtcgtggtaatcccaccgttgaggttgatatccacacgtcaaatggtattaaggttacagcagctgttccaagtggagcttccactggtatctatgaggctcttgagctgagggatggaggatctgactaccttggaaagggtgtatctaaggctgttggcaatgtgaacaacatcatcgggccagcacttattggaaaggacccaactcagcagactgctattgacaacttcatggtccatgaacttgacggaacccaaaacgagtgggggtggtgcaagcaaaagcttggagccaatgcgattcttgctgtgtctcttgctgtctgcaaagctggggctgttgtcagcggcattcctctatacaagcacattgccaaccttgctggtaaccccaagattgtgctaccagttcctgccttcaacgtcatcaatggtggatcccatgccggaaacaagcttgctatgcaggagtttatgatcctccctgttggagctgcttctttcaaggaagccatgaagatgggtgtggaagtttaccaccacttgaagtctgtgattaagaagaagtacggccaggatgccacaaatgttggtgatgaaggtgggtttgcaccaaacattcaggagaacaaggagggtcttgaattgctcaagactgctatcgagaaggctggatacactggaaaggttgtcattggaatggatgttgccgcttcagagttctactcagaagacaagacctacgacttgaacttcaaagaagagaacaacaatggctctcagaagatttctggtgatgctctaaaggacctgtacaagtcctttgtcgctgagtacccaatcgtgtccattgaggacccatttgaccaagatgactgggagcactatgctaagatgaccactgagtgtggaaccgaggttcagattgtcggtgatgatttgttggtcactaaccccaagagagttgctaaggcaatcgcagagaagtcttgcaatgctcttcttttgaaggttaaccaaatcggatctgtaaccgagagtatcgaggcagttaagatgtcgaagaaagcaggttggggagtgatgaccagccacagaagtggtgaaaccgaggacacattcattgctgacttagccgttggcttgtccactggacaaatcaaaaccggtgctccttgcagatccgagcgtcttgccaagtacaaccagcttttgcgtattgaggaggagttgggatcagaggcaatttacgctggagtcaacttccgcaaacctgtggaaccctactaaatggagcttttagaagcaaagtggtcttctttgtgacgaggagaagatgacctgagtttgatcatttgctttaattaaataaaacgttctgtttttgtttcttctttgtttggtttcttacgtcttttgttgaaccctttttgggaaaagttactcatttttgtaagggaaacatgagaatgctctgcctttgtcgaggacggtagccccttatttcaatctaatttcggctttactctct

SEQ ID NO: 28966 - protein, 469 aa, Arabidopsis thaliana
  peptide (1)..(469): Ceres Seq. ID no. 12422792
  misc_feature (172)..(466): Pfam Name: Enolase, C-terminal TIM barrel domain Pfam Description: Enolase, C-terminal TIM barrel domain
  misc_feature (28)..(469): Homolog of NCBI NO: 1169534 NR Description: Enolase (2-phosphoglycerate dehydratase)
  misc_feature (26)..(469): Homolog of NCBI NO: 3023714 NR Description: Enolase (2-phosphoglycerate dehydratase)
  misc_feature (28)..(469): Homolog of NCBI NO: 14423687 NR Description: Enolase 2 (2-phosphoglycerate dehydratase 2)
  misc_feature (26)..(469): Homolog of NCBI NO: 7436883 NR Description: phosphopyruvate hydratase (EC 4.2.1.11) - common
  misc_feature (28)..(469): Homolog of NCBI NO: 14423688 NR Description: Enolase 1 (2-phosphoglycerate dehydratase 1)
  misc_feature (26)..(469): Homolog of NCBI NO: 119354 NR Description: Enolase (2-phosphoglycerate dehydratase)
  misc_feature (26)..(469): Homolog of NCBI NO: 20260174 NR Description: enolase (2-phospho-D-glycerate hydroylase)
  misc_feature (26)..(469): Homolog of NCBI NO: 18175728 NR Description: putative enolase (2-phospho-D-glycerate
  misc_feature (26)..(469): Homolog of NCBI NO: 15809970 NR Description: At2g36530/F1O11.16 [Arabidopsis thaliana]
  misc_feature (26)..(469): Homolog of NCBI NO: 15227987 NR Description: enolase (2-phospho-D-glycerate hydroylase)
LLLLKRFSLKPSNTSPLSLSLDLLAMATITVVKARQIFDSRGNPTVEVDIHTSNGIKVTAAVPSGASTGIYEALELRDGGSDYLGKGVSKAVGNVNNIIGPALIGKDPTQQTAIDNFMVHELDGTQNEWGWCKQKLGANAILAVSLAVCKAGAVVSGIPLYKHIANLAGNPKIVLPVPAFNVINGGSHAGNKLAMQEFMILPVGAASFKEAMKMGVEVYHHLKSVIKKKYGQDATNVGDEGGFAPNIQENKEGLELLKTAIEKAGYTGKVVIGMDVAASEFYSEDKTYDLNFKEENNNGSQKISGDALKDLYKSFVAEYPIVSIEDPFDQDDWEHYAKMTTECGTEVQIVGDDLLVTNPKRVAKAIAEKSCNALLLKVNQIGSVTESIEAVKMSKKAGWGVMTSHRSGETEDTFIADLAVGLSTGQIKTGAPCRSERLAKYNQLLRIEEELGSEAIYAGVNFRKPVEPY

SEQ ID NO: 28967 - protein, 444 aa, Arabidopsis thaliana
  peptide (1)..(444): Ceres Seq. ID no. 12422793
  misc_feature (147)..(441): Pfam Name: Enolase, C-terminal TIM barrel domain Pfam Description: Enolase, C-terminal TIM barrel domain
  misc_feature (3)..(444): Homolog of NCBI NO: 1169534 NR Description: Enolase (2-phosphoglycerate dehydratase)
  misc_feature (1)..(444): Homolog of NCBI NO: 3023714 NR Description: Enolase (2-phosphoglycerate dehydratase)
  misc_feature (3)..(444): Homolog of NCBI NO: 14423687 NR Description: Enolase 2 (2-phosphoglycerate dehydratase 2)
  misc_feature (1)..(444): Homolog of NCBI NO: 7436883 NR Description: phosphopyruvate hydratase (EC 4.2.1.11) - common
  misc_feature (3)..(444): Homolog of NCBI NO: 14423688 NR Description: Enolase 1 (2-phosphoglycerate dehydratase 1)
  misc_feature (1)..(444): Homolog of NCBI NO: 119354 NR Description: Enolase (2-phosphoglycerate dehydratase)
  misc_feature (1)..(444): Homolog of NCBI NO: 20260174 NR Description: enolase (2-phospho-D-glycerate hydroylase)
  misc_feature (1)..(444): Homolog of NCBI NO: 18175728 NR Description: putative enolase (2-phospho-D-glycerate
  misc_feature (1)..(444): Homolog of NCBI NO: 15809970 NR Description: At2g36530/F1O11.16 [Arabidopsis thaliana]
  misc_feature (1)..(444): Homolog of NCBI NO: 15227987 NR Description: enolase (2-phospho-D-glycerate hydroylase)
MATITVVKARQIFDSRGNPTVEVDIHTSNGIKVTAAVPSGASTGIYEALELRDGGSDYLGKGVSKAVGNVNNIIGPALIGKDPTQQTAIDNFMVHELDGTQNEWGWCKQKLGANAILAVSLAVCKAGAVVSGIPLYKHIANLAGNPKIVLPVPAFNVINGGSHAGNKLAMQEFMILPVGAASFKEAMKMGVEVYHHLKSVIKKKYGQDATNVGDEGGFAPNIQENKEGLELLKTAIEKAGYTGKVVIGMDVAASEFYSEDKTYDLNFKEENNNGSQKISGDALKDLYKSFVAEYPIVSIEDPFDQDDWEHYAKMTTECGTEVQIVGDDLLVTNPKRVAKAIAEKSCNALLLKVNQIGSVTESIEAVKMSKKAGWGVMTSHRSGETEDTFIADLAVGLSTGQIKTGAPCRSERLAKYNQLLRIEEELGSEAIYAGVNFRKPVEPY

SEQ ID NO: 28968 - protein, 352 aa, Arabidopsis thaliana; identical to SEQ ID NO: 15479
  peptide (1)..(352): Ceres Seq. ID no. 12422794
  misc_feature (55)..(349): Pfam Name: Enolase, C-terminal TIM barrel domain Pfam Description: Enolase, C-terminal TIM barrel domain
  misc_feature (1)..(352): Homolog of NCBI NO: 1169534 NR Description: Enolase (2-phosphoglycerate dehydratase)
  misc_feature (1)..(352): Homolog of NCBI NO: 3023714 NR Description: Enolase (2-phosphoglycerate dehydratase)
  misc_feature (1)..(352): Homolog of NCBI NO: 14423687 NR Description: Enolase 2 (2-phosphoglycerate dehydratase 2)
  misc_feature (1)..(352): Homolog of NCBI NO: 7436883 NR Description: phosphopyruvate hydratase (EC 4.2.1.11) - common
  misc_feature (1)..(352): Homolog of NCBI NO: 14423688 NR Description: Enolase 1 (2-phosphoglycerate dehydratase 1)
  misc_feature (1)..(352): Homolog of NCBI NO: 119354 NR Description: Enolase (2-phosphoglycerate dehydratase)
  misc_feature (1)..(352): Homolog of NCBI NO: 20260174 NR Description: enolase (2-phospho-D-glycerate hydroylase)
  misc_feature (1)..(352): Homolog of NCBI NO: 18175728 NR Description: putative enolase (2-phospho-D-glycerate
  misc_feature (1)..(352): Homolog of NCBI NO: 15809970 NR Description: At2g36530/F1O11.16 [Arabidopsis thaliana]
  misc_feature (1)..(352): Homolog of NCBI NO: 15227987 NR Description: enolase (2-phospho-D-glycerate hydroylase)

SEQ ID NO: 28969 - DNA, 4277 bp, Arabidopsis thaliana; identical to SEQ ID NO: 28888
  misc_feature (1)..(4277): Ceres Seq. ID no. 13491805
  misc_feature: MA Experiment ID: 108474 Result: Up-regulated in Transcription
  misc_feature: MA Experiment 108474 PARAMETER Experiment Name: At_Drought_Flowers_cDNA_P Parameter: Timepoint (hr) Value: null
  misc_feature: MA Experiment 108474 PARAMETER Experiment Name: At_Drought_Flowers_cDNA_P Parameter: Treatment Value: Drought vs. No Drought
  misc_feature: MA Experiment ID: 108488 Result: Up-regulated in Transcription

SEQ ID NO: 28970 - protein, 1286 aa, Arabidopsis thaliana; identical to SEQ ID NO: 28889
  peptide (1)..(1286): Ceres Seq. ID no. 13491806
  misc_feature (44)..(324): Pfam Name: ABC transporter transmembrane region Pfam Description: ABC transporter transmembrane region
  misc_feature (44)..(324): Pfam Name: ABC transporter transmembrane region Pfam Description: ABC transporter transmembrane region
  misc_feature (1)..(956): Homolog of NCBI NO: 18496818 NR Description: ABC transporter AbcB3 [Dictyostelium discoideum]
  misc_feature (801)..(1247): Homolog of NCBI NO: 25407562 NR Description: hypothetical protein AT4g18050 [imported] -
  misc_feature (27)..(797): Homolog of NCBI NO: 25407562 NR Description: hypothetical protein AT4g18050 [imported] -
  misc_feature (18)..(645): Homolog of NCBI NO: 15233244 NR Description: multidrug resistance P-glycoprotein, putative
  misc_feature (625)..(1261): Homolog of NCBI NO: 15233244 NR Description: multidrug resistance P-glycoprotein, putative
  misc_feature (1)..(956): Homolog of NCBI NO: 18496818 NR Description: ABC transporter AbcB3 [Dictyostelium discoideum]
  misc_feature (27)..(797): Homolog of NCBI NO: 25407562 NR Description: hypothetical protein AT4g18050 [imported] -
  misc_feature (625)..(1261): Homolog of NCBI NO: 15233244 NR Description: multidrug resistance P-glycoprotein, putative
  misc_feature (1)..(1262): Homolog of NCBI NO: 14715462 NR Description: CjMDR1 [Coptis japonica]
  misc_feature (528)..(1262): Homolog of NCBI NO: 15234323 NR Description: multidrug resistance P-glycoprotein, putative
  misc_feature (21)..(634): Homolog of NCBI NO: 15234323 NR Description: multidrug resistance P-glycoprotein, putative
  misc_feature (1)..(642): Homolog of NCBI NO: 27368853 NR Description: MDR-like ABC transporter [Oryza sativa (japonica
  misc_feature (605)..(1266): Homolog of NCBI NO: 27368853 NR Description: MDR-like ABC transporter [Oryza sativa (japonica
  misc_feature (18)..(645): Homolog of NCBI NO: 15233244 NR Description: multidrug resistance P-glycoprotein, putative
  misc_feature (801)..(1247): Homolog of NCBI NO: 25407562 NR Description: hypothetical protein AT4g18050 [imported] -
  misc_feature (605)..(1266): Homolog of NCBI NO: 27368853 NR Description: MDR-like ABC transporter [Oryza sativa (japonica
  misc_feature (1)..(642): Homolog of NCBI NO: 27368853 NR Description: MDR-like ABC transporter [Oryza sativa (japonica
  misc_feature (21)..(634): Homolog of NCBI NO: 15234323 NR Description: multidrug resistance P-glycoprotein, putative
  misc_feature (528)..(1262): Homolog of NCBI NO: 15234323 NR Description: multidrug resistance P-glycoprotein, putative
  misc_feature (1)..(1262): Homolog of NCBI NO: 14715462 NR Description: CjMDR1 [Coptis japonica]

SEQ ID NO: 28971 - protein, 1243 aa, Arabidopsis thaliana; identical to SEQ ID NO: 28890
  peptide (1)..(1243): Ceres Seq. ID no. 13491807
  misc_feature (1)..(281): Pfam Name: ABC transporter transmembrane region Pfam Description: ABC transporter transmembrane region
  misc_feature (1)..(281): Pfam Name: ABC transporter transmembrane region Pfam Description: ABC transporter transmembrane region
  misc_feature (1)..(913): Homolog of NCBI NO: 18496818 NR Description: ABC transporter AbcB3 [Dictyostelium discoideum]
  misc_feature (758)..(1204): Homolog of NCBI NO: 25407562 NR Description: hypothetical protein AT4g18050 [imported] -
  misc_feature (1)..(754): Homolog of NCBI NO: 25407562 NR Description: hypothetical protein AT4g18050 [imported] -
  misc_feature (1)..(602): Homolog of NCBI NO: 15233244 NR Description: multidrug resistance P-glycoprotein, putative
  misc_feature (582)..(1218): Homolog of NCBI NO: 15233244 NR Description: multidrug resistance P-glycoprotein, putative
  misc_feature (1)..(913): Homolog of NCBI NO: 18496818 NR Description: ABC transporter AbcB3 [Dictyostelium discoideum]
  misc_feature (1)..(754): Homolog of NCBI NO: 25407562 NR Description: hypothetical protein AT4g18050 [imported] -
  misc_feature (582)..(1218): Homolog of NCBI NO: 15233244 NR Description: multidrug resistance P-glycoprotein, putative
  misc_feature (1)..(1219): Homolog of NCBI NO: 14715462 NR Description: CjMDR1 [Coptis japonica]
  misc_feature (485)..(1219): Homolog of NCBI NO: 15234323 NR Description: multidrug resistance P-glycoprotein, putative
  misc_feature (1)..(591): Homolog of NCBI NO: 15234323 NR Description: multidrug resistance P-glycoprotein, putative
  misc_feature (1)..(599): Homolog of NCBI NO: 27368853 NR Description: MDR-like ABC transporter [Oryza sativa (japonica
  misc_feature (562)..(1223): Homolog of NCBI NO: 27368853 NR Description: MDR-like ABC transporter [Oryza sativa (japonica
  misc_feature (1)..(602): Homolog of NCBI NO: 15233244 NR Description: multidrug resistance P-glycoprotein, putative
  misc_feature (758)..(1204): Homolog of NCBI NO: 25407562 NR Description: hypothetical protein AT4g18050 [imported] -
  misc_feature (562)..(1223): Homolog of NCBI NO: 27368853 NR Description: MDR-like ABC transporter [Oryza sativa (japonica
  misc_feature (1)..(599): Homolog of NCBI NO: 27368853 NR Description: MDR-like ABC transporter [Oryza sativa (japonica
  misc_feature (1)..(591): Homolog of NCBI NO: 15234323 NR Description: multidrug resistance P-glycoprotein, putative
  misc_feature (485)..(1219): Homolog of NCBI NO: 15234323 NR Description: multidrug resistance P-glycoprotein, putative
  misc_feature (1)..(1219): Homolog of NCBI NO: 14715462 NR Description: CjMDR1 [Coptis japonica]

SEQ ID NO: 28972 - protein, 1205 aa, Arabidopsis thaliana; identical to SEQ ID NO: 28891
  peptide (1)..(1205): Ceres Seq. ID no. 13491808
  misc_feature (1)..(243): Pfam Name: ABC transporter transmembrane region Pfam Description: ABC transporter transmembrane region
  misc_feature (1)..(243): Pfam Name: ABC transporter transmembrane region Pfam Description: ABC transporter transmembrane region
  misc_feature (1)..(875): Homolog of NCBI NO: 18496818 NR Description: ABC transporter AbcB3 [Dictyostelium discoideum]
  misc_feature (720)..(1166): Homolog of NCBI NO: 25407562 NR Description: hypothetical protein AT4g18050 [imported] -
  misc_feature (1)..(716): Homolog of NCBI NO: 25407562 NR Description: hypothetical protein AT4g18050 [imported] -
  misc_feature (1)..(564): Homolog of NCBI NO: 15233244 NR Description: multidrug resistance P-glycoprotein, putative
  misc_feature (544)..(1180): Homolog of NCBI NO: 15233244 NR Description: multidrug resistance P-glycoprotein, putative
  misc_feature (1)..(875): Homolog of NCBI NO: 18496818 NR Description: ABC transporter AbcB3 [Dictyostelium discoideum]
  misc_feature (1)..(716): Homolog of NCBI NO: 25407562 NR Description: hypothetical protein AT4g18050 [imported] -
  misc_feature (544)..(1180): Homolog of NCBI NO: 15233244 NR Description: multidrug resistance P-glycoprotein, putative
  misc_feature (1)..(1181): Homolog of NCBI NO: 14715462 NR Description: CjMDR1 [Coptis japonica]
  misc_feature (447)..(1181): Homolog of NCBI NO: 15234323 NR Description: multidrug resistance P-glycoprotein, putative
  misc_feature (1)..(553): Homolog of NCBI NO: 15234323 NR Description: multidrug resistance P-glycoprotein, putative
  misc_feature (1)..(561): Homolog of NCBI NO: 27368853 NR Description: MDR-like ABC transporter [Oryza sativa (japonica
  misc_feature (524)..(1185): Homolog of NCBI NO: 27368853 NR Description: MDR-like ABC transporter [Oryza sativa (japonica
  misc_feature (1)..(564): Homolog of NCBI NO: 15233244 NR Description: multidrug resistance P-glycoprotein, putative
  misc_feature (720)..(1166): Homolog of NCBI NO: 25407562 NR Description: hypothetical protein AT4g18050 [imported] -
  misc_feature (524)..(1185): Homolog of NCBI NO: 27368853 NR Description: MDR-like ABC transporter [Oryza sativa (japonica
  misc_feature (1)..(561): Homolog of NCBI NO: 27368853 NR Description: MDR-like ABC transporter [Oryza sativa (japonica
  misc_feature (1)..(553): Homolog of NCBI NO: 15234323 NR Description: multidrug resistance P-glycoprotein, putative
  misc_feature (447)..(1181): Homolog of NCBI NO: 15234323 NR Description: multidrug resistance P-glycoprotein, putative
  misc_feature (1)..(1181): Homolog of NCBI NO: 14715462 NR Description: CjMDR1 [Coptis japonica]

SEQ ID NO: 28973 - DNA, 1416 bp, Arabidopsis thaliana
  misc_feature (1)..(1416): Ceres Seq. ID no. 12322287
  misc_feature: MA Experiment ID: 108573 Result: Up-regulated in Transcription
  misc_feature: MA Experiment 108573 PARAMETER Experiment Name: At_Drought_cDNA_P Parameter: Timepoint (hr) Value: 6
  misc_feature: MA Experiment 108573 PARAMETER Experiment Name: At_Drought_cDNA_P Parameter: Tissue Value: Aerial
  misc_feature: MA Experiment 108573 PARAMETER Experiment Name: At_Drought_cDNA_P Parameter: Treatment Value: Drought vs. No Drought
  misc_feature: MA Experiment ID: 108595 Result: Down-regulated in Transcription
  misc_feature: MA Experiment 108595 PARAMETER Experiment Name: At_Ler-pi_Ovule_cDNA_P Parameter: Plant Line Value: null
  misc_feature: MA Experiment ID: 20000111 Result: Down-regulated in Transcription
  misc_feature: MA Experiment 20000111 PARAMETER Experiment Name: At_42deg_Heat_cDNA_P Parameter: Temperature (deg C) Value: 42 vs. 22
  misc_feature: MA Experiment 20000111 PARAMETER Experiment Name: At_42deg_Heat_cDNA_P Parameter: Timepoint (hr) Value: 6
  misc_feature: MA Experiment 20000111 PARAMETER Experiment Name: At_42deg_Heat_cDNA_P Parameter: Tissue Value: Aerial
  misc_feature: MA Experiment ID: 20000113 Result: Down-regulated in Transcription
  misc_feature: MA Experiment 20000113 PARAMETER Experiment Name: At_42deg_Heat_cDNA_P Parameter: Temperature (deg C) Value: 42 vs. 22
  misc_feature: MA Experiment 20000113 PARAMETER Experiment Name: At_42deg_Heat_cDNA_P Parameter: Timepoint (hr) Value: 8
  misc_feature: MA Experiment 20000113 PARAMETER Experiment Name: At_42deg_Heat_cDNA_P Parameter: Tissue Value: Aerial
aatggataccgttctcatggctacaacaccaccaatcagatgtcttcatgcttcaattcctacggtgttccgttcgccggcgatttatcaggtcagctgccggagctcccaactgttttcctaccgttcgacgactatgatgagcatgtgttttctcagacggtccgatttgagatctcgctttcttagtactccgaaaaccacttctccgatgagacgacctcgcttttccgtcggtgcttctacggaggagtcttcaattccttctaatcggaaccttatcgtggctaactccgtcgtaatcgtagctttagctgtagctaatcgcgtgctctacaaactcgctttggttcccatgaaacagtacccttttttcatggctcagctcaccactttcggctacgtcttgatttatttcaccattctgtatacgaggcgccgtctaggcattgtgacgaatgaaatgatggatgtacccaaatggagattcgcaatcattggttttctcgaagctcttggtgttgccactggcatggctgcagcagcaatgcttcctggaccagttatacccattttgaatcagacatatttggtgtggcagctgctttttgctcttcttattttaggcaggaggtttttgcttaaccaaattgctggttgtctccttgtggctgtgggggttgtggtggctgtttcaagtggatctggtgcagatactacgctatctggaatcggtttcttatggcctgctgtattggtagcatccgctgcttttcaagctggtgcatctatcataaaggaatttgttttcaatgatgctgcaaagcgtcttgagggaaagtcactggatatatttgtggtaaattcatttggatctggatttcaggctctttttgtgttcctgttgttgccttttctctcaaacttgaaaggcattccattcgccagccttccttcatatctaaaagatggtgccggatgcttcttcaacactggagctaagatttctggctgtgatggtgcccctatactcccactgctctatatatccaccaatctcgctttcaacatctcattgctccatctggtgaaaatatcttcagcaatcgtttcctctcttaccatgatgctctcagtgccattagcggtgtacataatgtcaaaaccattgccgtatctaccgggaggatcaagcttgagctcaaattttacgatggggtgtatagttcttgtcctaggtcttcttctctacaacattcccactactccaactaaacaacacaccaagacctcctaacacactcactcaccattcatcctttttgtgcattactttttttttttgttgataaaccaaattcgtgtaatttcccaattttttttcctttgaccatcaaagatacatagaatattctc

SEQ ID NO: 28974 - protein, 431 aa, Arabidopsis thaliana
  peptide (1)..(431): Ceres Seq. ID no. 12322288
  misc_feature (98)..(182): Homolog of NCBI NO: 20161872 NR Description: B1139B11.13 [Oryza sativa (japonica
  misc_feature (155)..(431): Homolog of NCBI NO: 15239887 NR Description: putative protein; protein id: At5g12170.1
  misc_feature (94)..(431): Homolog of NCBI NO: 21536591 NR Description: unknown [Arabidopsis thaliana]
  misc_feature (94)..(431): Homolog of NCBI NO: 20260240 NR Description: unknown protein [Arabidopsis thaliana]
  misc_feature (94)..(424): Homolog of NCBI NO: 21553716 NR Description: unknown [Arabidopsis thaliana]
  misc_feature (94)..(424): Homolog of NCBI NO: 18419900 NR Description: putative protein
  misc_feature (1)..(232): Homolog of NCBI NO: 28973717 NR Description: unknown protein [Arabidopsis thaliana]
  misc_feature (209)..(380): Homolog of NCBI NO: 7487326 NR Description: hypothetical protein T22A6.290 - Arabidopsis
  misc_feature (1)..(181): Homolog of NCBI NO: 7487326 NR Description: hypothetical protein T22A6.290 - Arabidopsis
  misc_feature (1)..(431): Homolog of NCBI NO: 30686536 NR Description: expressed protein [Arabidopsis thaliana]
MDTVLMATTPPIRCLHASIPTVFRSPAIYQVSCRSSQLFSYRSTTMMSMCFLRRSDLRSRFLSTPKTTSPMRRPRFSVGASTEESSIPSNRNLIVANSVVIVALAVANRVLYKLALVPMKQYPFFMAQLTTFGYVLIYFTILYTRRRLGIVTNEMMDVPKWRFAIIGFLEALGVATGMAAAAMLPGPVIPILNQTYLVWQLLFALLILGRRFLLNQIAGCLLVAVGVVVAVSSGSGADTTLSGIGFLWPAVLVASAAFQAGASIIKEFVFNDAAKRLEGKSLDIFVVNSFGSGFQALFVFLLLPFLSNLKGIPFASLPSYLKDGAGCFFNTGAKISGCDGAPILPLLYISTNLAFNISLLHLVKISSAIVSSLTMMLSVPLAVYIMSKPLPYLPGGSSLSSNFTMGCIVLVLGLLLYNIPTTPTKQHTKTS

SEQ ID NO: 28975 - protein, 426 aa, Arabidopsis thaliana
  peptide (1)..(426): Ceres Seq. ID no. 12322289
  misc_feature (93)..(177): Homolog of NCBI NO: 20161872 NR Description: B1139B11.13 [Oryza sativa (japonica
  misc_feature (150)..(426): Homolog of NCBI NO: 15239887 NR Description: putative protein; protein id: At5g12170.1
  misc_feature (89)..(426): Homolog of NCBI NO: 21536591 NR Description: unknown [Arabidopsis thaliana]
  misc_feature (89)..(426): Homolog of NCBI NO: 20260240 NR Description: unknown protein [Arabidopsis thaliana]
  misc_feature (89)..(419): Homolog of NCBI NO: 21553716 NR Description: unknown [Arabidopsis thaliana]
  misc_feature (89)..(419): Homolog of NCBI NO: 18419900 NR Description: putative protein
  misc_feature (1)..(227): Homolog of NCBI NO: 28973717 NR Description: unknown protein [Arabidopsis thaliana]
  misc_feature (204)..(375): Homolog of NCBI NO: 7487326 NR Description: hypothetical protein T22A6.290 - Arabidopsis
  misc_feature (1)..(176): Homolog of NCBI NO: 7487326 NR Description: hypothetical protein T22A6.290 - Arabidopsis
  misc_feature (1)..(426): Homolog of NCBI NO: 30686536 NR Description: expressed protein [Arabidopsis thaliana]
MATTPPIRCLHASIPTVFRSPAIYQVSCRSSQLFSYRSTTMMSMCFLRRSDLRSRFLSTPKTTSPMRRPRFSVGASTEESSIPSNRNLIVANSVVIVALAVANRVLYKLALVPMKQYPFFMAQLTTFGYVLIYFTILYTRRRLGIVTNEMMDVPKWRFAIIGFLEALGVATGMAAAAMLPGPVIPILNQTYLVWQLLFALLILGRRFLLNQIAGCLLVAVGVVVAVSSGSGADTTLSGIGFLWPAVLVASAAFQAGASIIKEFVFNDAAKRLEGKSLDIFVVNSFGSGFQALFVFLLLPFLSNLKGIPFASLPSYLKDGAGCFFNTGAKISGCDGAPILPLLYISTNLAFNISLLHLVKISSAIVSSLTMMLSVPLAVYIMSKPLPYLPGGSSLSSNFTMGCIVLVLGLLLYNIPTTPTKQHTKTS

SEQ ID NO: 28976 - protein, 386 aa, Arabidopsis thaliana
  peptide (1)..(386): Ceres Seq. ID no. 12322290
  misc_feature (53)..(137): Homolog of NCBI NO: 20161872 NR Description: B1139B11.13 [Oryza sativa (japonica
  misc_feature (110)..(386): Homolog of NCBI NO: 15239887 NR Description: putative protein; protein id: At5g12170.1
  misc_feature (49)..(386): Homolog of NCBI NO: 21536591 NR Description: unknown [Arabidopsis thaliana]
  misc_feature (49)..(386): Homolog of NCBI NO: 20260240 NR Description: unknown protein [Arabidopsis thaliana]
  misc_feature (49)..(379): Homolog of NCBI NO: 21553716 NR Description: unknown [Arabidopsis thaliana]
  misc_feature (49)..(379): Homolog of NCBI NO: 18419900 NR Description: putative protein
  misc_feature (1)..(187): Homolog of NCBI NO: 28973717 NR Description: unknown protein [Arabidopsis thaliana]
  misc_feature (164)..(335): Homolog of NCBI NO: 7487326 NR Description: hypothetical protein T22A6.290 - Arabidopsis
  misc_feature (1)..(136): Homolog of NCBI NO: 7487326 NR Description: hypothetical protein T22A6.290 - Arabidopsis
  misc_feature (1)..(386): Homolog of NCBI NO: 30686536 NR Description: expressed protein [Arabidopsis thaliana]
MMSMCFLRRSDLRSRFLSTPKTTSPMRRPRFSVGASTEESSIPSNRNLIVANSVVIVALAVANRVLYKLALVPMKQYPFFMAQLTTFGYVLIYFTILYTRRRLGIVTNEMMDVPKWRFAIIGFLEALGVATGMAAAAMLPGPVIPILNQTYLVWQLLFALLILGRRFLLNQIAGCLLVAVGVVVAVSSGSGADTTLSGIGFLWPAVLVASAAFQAGASIIKEFVFNDAAKRLEGKSLDIFVVNSFGSGFQALFVFLLLPFLSNLKGIPFASLPSYLKDGAGCFFNTGAKISGCDGAPILPLLYISTNLAFNISLLHLVKISSAIVSSLTMMLSVPLAVYIMSKPLPYLPGGSSLSSNFTMGCIVLVLGLLLYNIPTTPTKQHTKTS

SEQ ID NO: 28977 - DNA, 1199 bp, Arabidopsis thaliana
  misc_feature (1)..(1199): Ceres Seq. ID no. 12396266
  misc_feature: MA Experiment ID: 108461 Result: Up-regulated in Transcription
  misc_feature: MA Experiment 108461 PARAMETER Experiment Name: At_Germinating_Seeds_cDNA_P Parameter: Age (day) Value: 1 vs. 0
  misc_feature: MA Experiment 108461 PARAMETER Experiment Name: At_Germinating_Seeds_cDNA_P Parameter: Tissue Value: Germinating Seeds
  misc_feature: MA Experiment ID: 108501 Result: Down-regulated in Transcription
  misc_feature: MA Experiment 108501 PARAMETER Experiment Name: At_ap2_floral_buds_cDNA_P Parameter: Plant Line Value: ap2 (Ler.)
  misc_feature: MA Experiment 108501 PARAMETER Experiment Name: At_ap2_floral_buds_cDNA_P Parameter: Tissue Value: Closed Flower
  misc_feature: MA Experiment ID: 108573 Result: Up-regulated in Transcription
  misc_feature: MA Experiment 108573 PARAMETER Experiment Name: At_Drought_cDNA_P Parameter: Timepoint (hr) Value: 6
  misc_feature: MA Experiment 108573 PARAMETER Experiment Name: At_Drought_cDNA_P Parameter: Tissue Value: Aerial
  misc_feature: MA Experiment 108573 PARAMETER Experiment Name: At_Drought_cDNA_P Parameter: Treatment Value: Drought vs. No Drought
  misc_feature: MA Experiment ID: 108668 Result: Up-regulated in Transcription
  misc_feature: MA Experiment 108668 PARAMETER Experiment Name: At_2mM_SA_cDNA_P Parameter: Plant Line Value: WS
  misc_feature: MA Experiment 108668 PARAMETER Experiment Name: At_2mM_SA_cDNA_P Parameter: Timepoint (hr) Value: 6
  misc_feature: MA Experiment 108668 PARAMETER Experiment Name: At_2mM_SA_cDNA_P Parameter: Treatment Value: 2mM SA vs. No Treatment
  misc_feature: MA Experiment ID: 20000090 Result: Up-regulated in Transcription
  misc_feature: MA Experiment ID: 20000171 Result: Up-regulated in Transcription
  misc_feature: MA Experiment 20000171 PARAMETER Experiment Name: At_42deg_Heat_P Parameter: Age (day) Value: 14
  misc_feature: MA Experiment 20000171 PARAMETER Experiment Name: At_42deg_Heat_P Parameter: Organism Value: A. thaliana
  misc_feature: MA Experiment 20000171 PARAMETER Experiment Name: At_42deg_Heat_P Parameter: Plant Line Value: WS
  misc_feature: MA Experiment 20000171 PARAMETER Experiment Name: At_42deg_Heat_P Parameter: Temperature (deg C) Value: 42 vs. 22
  misc_feature: MA Experiment 20000171 PARAMETER Experiment Name: At_42deg_Heat_P Parameter: Timepoint (hr) Value: 1
  misc_feature: MA Experiment 20000171 PARAMETER Experiment Name: At_42deg_Heat_P Parameter: Tissue Value: Aerial
  misc_feature: MA Experiment ID: 20000224 Result: Down-regulated in Transcription
gaactgaatcttcgtcgtcaacagattctccgccactggaagaaatggaaacgtcgccgcaattcagacttatcttcgccgtaatcatttcttctctcatcgctttccgatcgtacaagcggaagtcgctcgatctctccggtggaattgctggattcctcgttatgaccattcacttcaccgccggtttcaggtacggagctctgctgcttgtattctttcttacttcctcgaaacttaccaaagttggcgaagataaaaaaagacgcgttgatgttgagttcaaagaaggtggacaaaggaactgggtacaagtgctatgcaatagtggaattgcttcagttctagttgtaattgcttgtactttaacgggttggaaggacaagtgtttggactcgaagcagtcagaaattgtaacagctcttattggtgggatcattggtcattacgcctgctgtaatggagacacttggtcctcagagcttggggttcttagtgatgcccagcctcgactaatcacaacgtttaagccggtgaagaagggcacaaatggtggagttacaaaggcaggactcttagctgccttggcagcaggcaccactgttggattaacattccttatcttcggactctttaccgcgagttgtgcaagtgatgtagctctaaagcaactcttagtcataccactctttgcactagctggactatgtgggagtcttattgattctatactaggagcaaccattcaattcagtggtttctgctctgtccggaacaaggttgtagggaaaccgggtccaaccgtaaagaagatttcaggtgtggacattcttgacaacaatggtgtgaactttgtctccatactcttgacatcttttctgacttccattgcttctgtgtacattttctgaatgatgaagctaccaacctgttttcttgactagactgttttagattttcaccttttgcatgccaaatttggtatacaaacatactttgattttatttcttaaattgttcattttgttgtatgctgaaatgagagttttaagttcatagaaaactttgatcagaaaaaaaaaaaaaaaaagttcatagaacacagtctcttttatgttcagtacaataatcacagctaccaatgtaactgaacatgtatttgttgttttgtttaagagatgtatcactgtgcttccgcc

SEQ ID NO: 28978 - protein, 302 aa, Arabidopsis thaliana
  peptide (1)..(302): Ceres Seq. ID no. 12396267
  misc_feature (15)..(302): Pfam Name: Integral membrane protein DUF92 Pfam Description: Integral membrane protein DUF92
  misc_feature (9)..(290): Homolog of NCBI NO: 24663759 NR Description: CG10171-PA [Drosophila melanogaster]
  misc_feature (18)..(298): Homolog of NCBI NO: 26329849 NR Description: unnamed protein product [Mus musculus]
  misc_feature (18)..(298): Homolog of NCBI NO: 26335111 NR Description: unnamed protein product [Mus musculus]
  misc_feature (18)..(298): Homolog of NCBI NO: 19526846 NR Description: RIKEN cDNA 2810428F02 [Mus musculus]
  misc_feature (18)..(297): Homolog of NCBI NO: 21361720 NR Description: hypothetical protein FLJ10936 [Homo sapiens]
  misc_feature (18)..(298): Homolog of NCBI NO: 40018572 NR Description: Unknown (protein for MGC:72591) [Rattus
  misc_feature (22)..(261): Homolog of NCBI NO: 34914530 NR Description: OSJNBa0094H06.11 [Oryza sativa (japonica
  misc_feature (22)..(297): Homolog of NCBI NO: 34906132 NR Description: P0509B06.3 [Oryza sativa (japonica
  misc_feature (15)..(302): Homolog of NCBI NO: 18420075 NR Description: putative protein
  misc_feature (15)..(302): Homolog of NCBI NO: 21537262 NR Description: unknown [Arabidopsis thaliana]
TESSSSTDSPPLEEMETSPQFRLIFAVIISSLIAFRSYKRKSLDLSGGIAGFLVMTIHFTAGFRYGALLLVFFLTSSKLTKVGEDKKRRVDVEFKEGGQRNWVQVLCNSGIASVLVVIACTLTGWKDKCLDSKQSEIVTALIGGIIGHYACCNGDTWSSELGVLSDAQPRLITTFKPVKKGTNGGVTKAGLLAALAAGTTVGLTFLIFGLFTASCASDVALKQLLVIPLFALAGLCGSLIDSILGATIQFSGFCSVRNKVVGKPGPTVKKISGVDILDNNGVNFVSILLTSFLTSIASVYIF

SEQ ID NO: 28979 - protein, 288 aa, Arabidopsis thaliana
  peptide (1)..(288): Ceres Seq. ID no. 12396268
  misc_feature (1)..(288): Pfam Name: Integral membrane protein DUF92 Pfam Description: Integral membrane protein DUF92
  misc_feature (1)..(276): Homolog of NCBI NO: 24663759 NR Description: CG10171-PA [Drosophila melanogaster]
  misc_feature (4)..(284): Homolog of NCBI NO: 26329849 NR Description: unnamed protein product [Mus musculus]
  misc_feature (4)..(284): Homolog of NCBI NO: 26335111 NR Description: unnamed protein product [Mus musculus]
  misc_feature (4)..(284): Homolog of NCBI NO: 19526846 NR Description: RIKEN cDNA 2810428F02 [Mus musculus]
  misc_feature (4)..(283): Homolog of NCBI NO: 21361720 NR Description: hypothetical protein FLJ10936 [Homo sapiens]
  misc_feature (4)..(284): Homolog of NCBI NO: 40018572 NR Description: Unknown (protein for MGC:72591) [Rattus
  misc_feature (8)..(247): Homolog of NCBI NO: 34914530 NR Description: OSJNBa0094H06.11 [Oryza sativa (japonica
  misc_feature (8)..(283): Homolog of NCBI NO: 34906132 NR Description: P0509B06.3 [Oryza sativa (japonica
  misc_feature (1)..(288): Homolog of NCBI NO: 18420075 NR Description: putative protein
  misc_feature (1)..(288): Homolog of NCBI NO: 21537262 NR Description: unknown [Arabidopsis thaliana]
METSPQFRLIFAVIISSLIAFRSYKRKSLDLSGGIAGFLVMTIHFTAGFRYGALLLVFFLTSSKLTKVGEDKKRRVDVEFKEGGQRNWVQVLCNSGIASVLVVIACTLTGWKDKCLDSKQSEIVTALIGGIIGHYACCNGDTWSSELGVLSDAQPRLITTFKPVKKGTNGGVTKAGLLAALAAGTTVGLTFLIFGLFTASCASDVALKQLLVIPLFALAGLCGSLIDSILGATIQFSGFCSVRNKVVGKPGPTVKKISGVDILDNNGVNFVSILLTSFLTSIASVYIF

SEQ ID NO: 28980 - protein, 248 aa, Arabidopsis thaliana
  peptide (1)..(248): Ceres Seq. ID no. 12396269
  misc_feature (1)..(248): Pfam Name: Integral membrane protein DUF92 Pfam Description: Integral membrane protein DUF92
  misc_feature (1)..(236): Homolog of NCBI NO: 24663759 NR Description: CG10171-PA [Drosophila melanogaster]
  misc_feature (1)..(244): Homolog of NCBI NO: 26329849 NR Description: unnamed protein product [Mus musculus]
  misc_feature (1)..(244): Homolog of NCBI NO: 26335111 NR Description: unnamed protein product [Mus musculus]
  misc_feature (1)..(244): Homolog of NCBI NO: 19526846 NR Description: RIKEN cDNA 2810428F02 [Mus musculus]
  misc_feature (1)..(243): Homolog of NCBI NO: 21361720 NR Description: hypothetical protein FLJ10936 [Homo sapiens]
  misc_feature (1)..(244): Homolog of NCBI NO: 40018572 NR Description: Unknown (protein for MGC:72591) [Rattus
  misc_feature (1)..(207): Homolog of NCBI NO: 34914530 NR Description: OSJNBa0094H06.11 [Oryza sativa (japonica
  misc_feature (1)..(243): Homolog of NCBI NO: 34906132 NR Description: P0509B06.3 [Oryza sativa (japonica
  misc_feature (1)..(248): Homolog of NCBI NO: 18420075 NR Description: putative protein
  misc_feature (1)..(248): Homolog of NCBI NO: 21537262 NR Description: unknown [Arabidopsis thaliana]
MTIHFTAGFRYGALLLVFFLTSSKLTKVGEDKKRRVDVEFKEGGQRNWVQVLCNSGIASVLVVIACTLTGWKDKCLDSKQSEIVTALIGGIIGHYACCNGDTWSSELGVLSDAQPRLITTFKPVKKGTNGGVTKAGLLAALAAGTTVGLTFLIFGLFTASCASDVALKQLLVIPLFALAGLCGSLIDSILGATIQFSGFCSVRNKVVGKPGPTVKKISGVDILDNNGVNFVSILLTSFLTSIASVYIF

SEQ ID NO: 28981 - DNA, 1322 bp, Arabidopsis thaliana
  misc_feature (1)..(1322): Ceres Seq. ID no. 12324249
  misc_feature: MA Experiment ID: 108434 Result: Down-regulated in Transcription
  misc_feature: MA Experiment 108434 PARAMETER Experiment Name: At_Root_Tips_cDNA_P Parameter: Tissue Value: Root Tips
  misc_feature: MA Experiment ID: 108464 Result: Up-regulated in Transcription
  misc_feature: MA Experiment 108464 PARAMETER Experiment Name: At_Germinating_Seeds_cDNA_P Parameter: Age (day) Value: 4 vs. 0
  misc_feature: MA Experiment 108464 PARAMETER Experiment Name: At_Germinating_Seeds_cDNA_P Parameter: Tissue Value: Germinating Seeds
  misc_feature: MA Experiment ID: 108573 Result: Up-regulated in Transcription
  misc_feature: MA Experiment 108573 PARAMETER Experiment Name: At_Drought_cDNA_P Parameter: Timepoint (hr) Value: 6
  misc_feature: MA Experiment 108573 PARAMETER Experiment Name: At_Drought_cDNA_P Parameter: Tissue Value: Aerial
  misc_feature: MA Experiment 108573 PARAMETER Experiment Name: At_Drought_cDNA_P Parameter: Treatment Value: Drought vs. No Drought
  misc_feature: MA Experiment ID: 108585 Result: Up-regulated in Transcription
  misc_feature: MA Experiment 108585 PARAMETER Experiment Name: At_5mM_NaNP_cDNA_P Parameter: Timepoint (hr) Value: 6
  misc_feature: MA Experiment 108585 PARAMETER Experiment Name: At_5mM_NaNP_cDNA_P Parameter: Tissue Value: Aerial
  misc_feature: MA Experiment 108585 PARAMETER Experiment Name: At_5mM_NaNP_cDNA_P Parameter: Treatment Value: null
  misc_feature: MA Experiment ID: 108595 Result: Down-regulated in Transcription
  misc_feature: MA Experiment 108595 PARAMETER Experiment Name: At_Ler-pi_Ovule_cDNA_P Parameter: Plant Line Value: null
  misc_feature: MA Experiment ID: 20000234 Result: Down-regulated in Transcription
  misc_feature: MA Experiment 20000234 PARAMETER Experiment Name: At_Siliques_P Parameter: Age (day) Value: 21
  misc_feature: MA Experiment 20000234 PARAMETER Experiment Name: At_Siliques_P Parameter: Organism Value: A. thaliana
  misc_feature: MA Experiment 20000234 PARAMETER Experiment Name: At_Siliques_P Parameter: Plant Line Value: WS
  misc_feature: MA Experiment 20000234 PARAMETER Experiment Name: At_Siliques_P Parameter: Tissue Value: Less Than 5mm Siliques vs. Whole Plant
  misc_feature: MA Experiment ID: 20000235 Result: Down-regulated in Transcription
  misc_feature: MA Experiment 20000235 PARAMETER Experiment Name: At_Siliques_P Parameter: Age (day) Value: 21
  misc_feature: MA Experiment 20000235 PARAMETER Experiment Name: At_Siliques_P Parameter: Organism Value: A. thaliana
  misc_feature: MA Experiment 20000235 PARAMETER Experiment Name: At_Siliques_P Parameter: Plant Line Value: WS
  misc_feature: MA Experiment 20000235 PARAMETER Experiment Name: At_Siliques_P Parameter: Tissue Value: 5-10mm Siliques vs. Whole Plant
  misc_feature: MA Experiment ID: 20000437 Result: Up-regulated in Transcription
  misc_feature: MA Experiment 20000437 PARAMETER Experiment Name: At_Drought_P Parameter: Age (day) Value: 8
  misc_feature: MA Experiment 20000437 PARAMETER Experiment Name: At_Drought_P Parameter: Organism Value: A. thaliana
  misc_feature: MA Experiment 20000437 PARAMETER Experiment Name: At_Drought_P Parameter: Plant Line Value: WS
  misc_feature: MA Experiment 20000437 PARAMETER Experiment Name: At_Drought_P Parameter: Timepoint (hr) Value: 24
  misc_feature: MA Experiment 20000437 PARAMETER Experiment Name: At_Drought_P Parameter: Tissue Value: Whole Plant
  misc_feature: MA Experiment 20000437 PARAMETER Experiment Name: At_Drought_P Parameter: Treatment Value: Drought vs. No Drought
  misc_feature: MA Experiment ID: 20001247 Result: Up-regulated in Transcription
  misc_feature: MA Experiment 20001247 PARAMETER Experiment Name: At_Far-red-induction_P Parameter: Age (day) Value: 7
  misc_feature: MA Experiment 20001247 PARAMETER Experiment Name: At_Far-red-induction_P Parameter: Light Value: Far-red vs. White
  misc_feature: MA Experiment 20001247 PARAMETER Experiment Name: At_Far-red-induction_P Parameter: Organism Value: A. thaliana
  misc_feature: MA Experiment 20001247 PARAMETER Experiment Name: At_Far-red-induction_P Parameter: Plant Line Value: Columbia
  misc_feature: MA Experiment 20001247 PARAMETER Experiment Name: At_Far-red-induction_P Parameter: Timepoint (hr) Value: 1
  misc_feature: MA Experiment 20001247 PARAMETER Experiment Name: At_Far-red-induction_P Parameter: Tissue Value: Whole Plant
  misc_feature: MA Experiment ID: 20001248 Result: Up-regulated in Transcription
  misc_feature: MA Experiment 20001248 PARAMETER Experiment Name: At_Far-red-induction_P Parameter: Age (day) Value: 7
  misc_feature: MA Experiment 20001248 PARAMETER Experiment Name: At_Far-red-induction_P Parameter: Light Value: Far-red vs. White
  misc_feature: MA Experiment 20001248 PARAMETER Experiment Name: At_Far-red-induction_P Parameter: Organism Value: A. thaliana
  misc_feature: MA Experiment 20001248 PARAMETER Experiment Name: At_Far-red-induction_P Parameter: Plant Line Value: Columbia
  misc_feature: MA Experiment 20001248 PARAMETER Experiment Name: At_Far-red-induction_P Parameter: Timepoint (hr) Value: 4
  misc_feature: MA Experiment 20001248 PARAMETER Experiment Name: At_Far-red-induction_P Parameter: Tissue Value: Whole Plant
  misc_feature: MA Experiment ID: 20001450 Result: Up-regulated in Transcription
  misc_feature: MA Experiment 20001450 PARAMETER Experiment Name: At_Far-red-induction_P Parameter: Age (day) Value: 7
  misc_feature: MA Experiment 20001450 PARAMETER Experiment Name: At_Far-red-induction_P Parameter: Light Value: Far-red vs. White
  misc_feature: MA Experiment 20001450 PARAMETER Experiment Name: At_Far-red-induction_P Parameter: Organism Value: A. thaliana
  misc_feature: MA Experiment 20001450 PARAMETER Experiment Name: At_Far-red-induction_P Parameter: Plant Line Value: Columbia
  misc_feature: MA Experiment 20001450 PARAMETER Experiment Name: At_Far-red-induction_P Parameter: Timepoint (hr) Value: 8
  misc_feature: MA Experiment 20001450 PARAMETER Experiment Name: At_Far-red-induction_P Parameter: Tissue Value: Whole Plant
  misc_feature: MA Experiment ID: 20001560 Result: Down-regulated in Transcription
  misc_feature: MA Experiment 20001560 PARAMETER Experiment Name: At_Drought_Soil_Dry_P Parameter: Age (day) Value: 28
  misc_feature: MA Experiment 20001560 PARAMETER Experiment Name: At_Drought_Soil_Dry_P Parameter: Organism Value: A. thaliana
  misc_feature: MA Experiment 20001560 PARAMETER Experiment Name: At_Drought_Soil_Dry_P Parameter: Plant Line Value: WS
  misc_feature: MA Experiment 20001560 PARAMETER Experiment Name: At_Drought_Soil_Dry_P Parameter: Post Timepoint (hr) Value: None
  misc_feature: MA Experiment 20001560 PARAMETER Experiment Name: At_Drought_Soil_Dry_P Parameter: Post-Treatment Value: None
  misc_feature: MA Experiment 20001560 PARAMETER Experiment Name: At_Drought_Soil_Dry_P Parameter: Timepoint (day) Value: 14
  misc_feature: MA Experiment 20001560 PARAMETER Experiment Name: At_Drought_Soil_Dry_P Parameter: Treatment Value: Drought vs. No Drought
atttcgggaaaataacaaaaaaaagaaagaaataaaaagaggtgattcaaatccagagagttctcattatgtatattcaaaatctgaatcgagaaggaatctgactcgtgtagatgagaatcggcggcgtcgaggttacgaaatttgcgtcggagatgatgtcgtcgtcgtcttcgtcggcggtggagatgttgaatctcaaagaagcttcgaattggtggtcagacgtaaacgaatctccgatttggcaggatcgtatcttccatgttctcgctgttctctacggaatcgtttccctcgttgctgtgattcaacttgtgagaatacaattgagagttcctgaatatggttggacgacgcaaaaggtctttcactttctcaatttcgttgttaatggagttcgtgctgtggtgtttgtcttcaggcgaaatgttcagtttatgcaaccagagattctgcaacatatcttgcttgatattccaagtcttgctttcttcaccacctatgctcttctggttcttttctgggctgaaatttattatcaggcgcgtgcagtatcgactgatggactcaggccaagcttcttcacaattaatgcagttgtatatgtagttcagattgctctatggttggttttgtggtggaagcctgttcgagttatggtaatcctatctaagatgttctttgcaggtgtttcattgttcgctgcccttggatttttactttatggtggaaggcttttcctaatgttgcaacggtttccagtagaatctaaagggcggcgcaaaaagctgcaagaggttggttacgtgacaaccatatgctttacgtgtttcctcatcagatgtatcatgatgtgctttgctgctttcgatgagggggcaaaccttgatgtgttagatcaccccatccttaacttcatatattacctgttggtagagatattaccctcctctctggtcctcttcatcttgagaaagctaccaccaaaacgaggcattacacaataccatcagattcgctgaaatgtaaaggcacgacaactaatgatcagatgaagaagacaagactatggttgtttatgcttttctgtaatcaatagagagaaaagcataagatggaaatgaaatagatctaaagctgataaggccttttggttgatgatgggaatggattctacttgatttttggtaaacggtaaactggggtttgttccctttatataaaggttatgttgtaaaaaatttattataaagtacatgtaagaattgtgtaaatttatgttgaatcatgtggtaaaaaaaaaaaaaaagtttcttttt

SEQ ID NO: 28982 - protein, 303 aa, Arabidopsis thaliana
  peptide (1)..(303): Ceres Seq. ID no. 12324250
  misc_feature (35)..(302): Homolog of NCBI NO: 34394174 NR Description: putative transmembrane protein(TOM3)
  misc_feature (33)..(303): Homolog of NCBI NO: 18415765 NR Description: putative protein
  misc_feature (16)..(302): Homolog of NCBI NO: 34902220 NR Description: Putative transmembrane protein
  misc_feature (18)..(302): Homolog of NCBI NO: 37536460 NR Description: putative transmembrane protein
  misc_feature (14)..(303): Homolog of NCBI NO: 27754346 NR Description: unknown protein [Arabidopsis thaliana]
  misc_feature (20)..(303): Homolog of NCBI NO: 21537116 NR Description: unknown [Arabidopsis thaliana]
  misc_feature (14)..(303): Homolog of NCBI NO: 18394129 NR Description: expressed protein
  misc_feature (14)..(303): Homolog of NCBI NO: 7262697 NR Description: Contains similarity to an unknown protein from
  misc_feature (16)..(303): Homolog of NCBI NO: 21537264 NR Description: unknown [Arabidopsis thaliana]
  misc_feature (1)..(303): Homolog of NCBI NO: 18395323 NR Description: expressed protein
MRIGGVEVTKFASEMMSSSSSSAVEMLNLKEASNWWSDVNESPIWQDRIFHVLAVLYGIVSLVAVIQLVRIQLRVPEYGWTTQKVFHFLNFVVNGVRAVVFVFRRNVQFMQPEILQHILLDIPSLAFFTTYALLVLFWAEIYYQARAVSTDGLRPSFFTINAVVYVVQIALWLVLWWKPVRVMVILSKMFFAGVSLFAALGFLLYGGRLFLMLQRFPVESKGRRKKLQEVGYVTTICFTCFLIRCIMMCFAAFDEGANLDVLDHPILNFIYYLLVEILPSSLVLFILRKLPPKRGITQYHQIR

SEQ ID NO: 28983 - protein, 289 aa, Arabidopsis thaliana
  peptide (1)..(289): Ceres Seq. ID no. 12324251
  misc_feature (21)..(288): Homolog of NCBI NO: 34394174 NR Description: putative transmembrane protein(TOM3)
  misc_feature (19)..(289): Homolog of NCBI NO: 18415765 NR Description: putative protein
  misc_feature (2)..(288): Homolog of NCBI NO: 34902220 NR Description: Putative transmembrane protein
  misc_feature (4)..(288): Homolog of NCBI NO: 37536460 NR Description: putative transmembrane protein
  misc_feature (1)..(289): Homolog of NCBI NO: 27754346 NR Description: unknown protein [Arabidopsis thaliana]
  misc_feature (6)..(289): Homolog of NCBI NO: 21537116 NR Description: unknown [Arabidopsis thaliana]
  misc_feature (1)..(289): Homolog of NCBI NO: 18394129 NR Description: expressed protein
  misc_feature (1)..(289): Homolog of NCBI NO: 7262697 NR Description: Contains similarity to an unknown protein from
  misc_feature (2)..(289): Homolog of NCBI NO: 21537264 NR Description: unknown [Arabidopsis thaliana]
  misc_feature (1)..(289): Homolog of NCBI NO: 18395323 NR Description: expressed protein
MMSSSSSSAVEMLNLKEASNWWSDVNESPIWQDRIFHVLAVLYGIVSLVAVIQLVRIQLRVPEYGWTTQKVFHFLNFVVNGVRAVVFVFRRNVQFMQPEILQHILLDIPSLAFFTTYALLVLFWAEIYYQARAVSTDGLRPSFFTINAVVYVVQIALWLVLWWKPVRVMVILSKMFFAGVSLFAALGFLLYGGRLFLMLQRFPVESKGRRKKLQEVGYVTTICFTCFLIRCIMMCFAAFDEGANLDVLDHPILNFIYYLLVEILPSSLVLFILRKLPPKRGITQYHQIR

SEQ ID NO: 28984 - protein, 288 aa, Arabidopsis thaliana
  peptide (1)..(288): Ceres Seq. ID no. 12324252
  misc_feature (20)..(287): Homolog of NCBI NO: 34394174 NR Description: putative transmembrane protein(TOM3)
  misc_feature (18)..(288): Homolog of NCBI NO: 18415765 NR Description: putative protein
  misc_feature (1)..(287): Homolog of NCBI NO: 34902220 NR Description: Putative transmembrane protein
  misc_feature (3)..(287): Homolog of NCBI NO: 37536460 NR Description: putative transmembrane protein
  misc_feature (1)..(288): Homolog of NCBI NO: 27754346 NR Description: unknown protein [Arabidopsis thaliana]
  misc_feature (5)..(288): Homolog of NCBI NO: 21537116 NR Description: unknown [Arabidopsis thaliana]
  misc_feature (1)..(288): Homolog of NCBI NO: 18394129 NR Description: expressed protein
  misc_feature (1)..(288): Homolog of NCBI NO: 7262697 NR Description: Contains similarity to an unknown protein from
  misc_feature (1)..(288): Homolog of NCBI NO: 21537264 NR Description: unknown [Arabidopsis thaliana]
  misc_feature (1)..(288): Homolog of NCBI NO: 18395323 NR Description: expressed protein
MSSSSSSAVEMLNLKEASNWWSDVNESPIWQDRIFHVLAVLYGIVSLVAVIQLVRIQLRVPEYGWTTQKVFHFLNFVVNGVRAVVFVFRRNVQFMQPEILQHILLDIPSLAFFTTYALLVLFWAEIYYQARAVSTDGLRPSFFTINAVVYVVQIALWLVLWWKPVRVMVILSKMFFAGVSLFAALGFLLYGGRLFLMLQRFPVESKGRRKKLQEVGYVTTICFTCFLIRCIMMCFAAFDEGANLDVLDHPILNFIYYLLVEILPSSLVLFILRKLPPKRGITQYHQIR

SEQ ID NO: 28985 - DNA, 665 bp, Arabidopsis thaliana
  misc_feature (1)..(665): Ceres Seq. ID no. 12329989
  misc_feature: MA Experiment ID: 20000179 Result: Up-regulated in Transcription
  misc_feature: MA Experiment 20000179 PARAMETER Experiment Name: At_Germinating_Seeds_P Parameter: Age (hr) Value: 6 vs. 0
  misc_feature: MA Experiment 20000179 PARAMETER Experiment Name: At_Germinating_Seeds_P Parameter: Tissue Value: Germinating Seeds
ccgtcgtgtttaacaatctcttcttcgcggccaaaatttctctcttcccgtagtaagcagttctctctcgaccattttcctcagatctcacgtccgatcaaagtcatcgcgagaagcgccatggagacgacggcggagacaattaccggcggtgttcccaacaacacgatgaagttattgttcgttgagatgggtgtcggttacgatcagcacgggcaagatgtgacatctgcggcgatgaaggcttgttcgattcctggagtttcatttggagaaatgaagttgcagattaagcttggagtgcctcattctcttcaccagcagctggatttggacaaggttaagtctatcttcccatatgggaagattgtgaatgtagaggtggtggatggaggactgatttgctcaagcggtgttctagtcgaagaaatgggtgatacaaatgaagattgctacatagtgaatgtcgcagtctatgtcggttactagtctatcgttcttgtatggtcgactcgacgccgggtttaacaatgtcaccctcgtcgatagaagagaaaaacaaaaacaaatgcagtcacttttagttgtatattttgatttcagaaccattttggtttgtaggcgtgcagcgtttggtgcggtctagaaataatcacgtttgcctc

SEQ ID NO: 28986 - protein, 162 aa, Arabidopsis thaliana
  peptide (1)..(162): Ceres Seq. ID no. 12329990
  misc_feature (58)..(162): Homolog of NCBI NO: 16799587 NR Description: lin0512 [Listeria innocua]
  misc_feature (58)..(162): Homolog of NCBI NO: 16802555 NR Description: lmo0512 [Listeria monocytogenes EGD-e]
  misc_feature (41)..(119): Homolog of NCBI NO: 34912624 NR Description: P0410E01.16 [Oryza sativa (japonica
  misc_feature (58)..(162): Homolog of NCBI NO: 23098421 NR Description: hypothetical protein [Oceanobacillus iheyensis
  misc_feature (59)..(162): Homolog of NCBI NO: 23098097 NR Description: hypothetical protein [Oceanobacillus iheyensis
  misc_feature (57)..(162): Homolog of NCBI NO: 37520060 NR Description: hypothetical protein glr0491 [Gloeobacter
  misc_feature (1)..(120): Homolog of NCBI NO: 25373109 NR Description: F28N24.25 protein - Arabidopsis thaliana
  misc_feature (1)..(162): Homolog of NCBI NO: 21954066 NR Description: unknown protein [Arabidopsis thaliana]
  misc_feature (1)..(162): Homolog of NCBI NO: 18396927 NR Description: expressed protein
  misc_feature (1)..(162): Homolog of NCBI NO: 30690579 NR Description: expressed protein [Arabidopsis thaliana]
PSCLTISSSRPKFLSSRSKQFSLDHFPQISRPIKVIARSAMETTAETITGGVPNNTMKLLFVEMGVGYDQHGQDVTSAAMKACSIPGVSFGEMKLQIKLGVPHSLHQQLDLDKVKSIFPYGKIVNVEVVDGGLICSSGVLVEEMGDTNEDCYIVNVAVYVGY

SEQ ID NO: 28987 - protein, 122 aa, Arabidopsis thaliana
  peptide (1)..(122): Ceres Seq. ID no. 12329991
  misc_feature (18)..(122): Homolog of NCBI NO: 16799587 NR Description: lin0512 [Listeria innocua]
  misc_feature (18)..(122): Homolog of NCBI NO: 16802555 NR Description: lmo0512 [Listeria monocytogenes EGD-e]
  misc_feature (1)..(79): Homolog of NCBI NO: 34912624 NR Description: P0410E01.16 [Oryza sativa (japonica
  misc_feature (18)..(122): Homolog of NCBI NO: 23098421 NR Description: hypothetical protein [Oceanobacillus iheyensis
  misc_feature (19)..(122): Homolog of NCBI NO: 23098097 NR Description: hypothetical protein [Oceanobacillus iheyensis
  misc_feature (17)..(122): Homolog of NCBI NO: 37520060 NR Description: hypothetical protein glr0491 [Gloeobacter
  misc_feature (1)..(80): Homolog of NCBI NO: 25373109 NR Description: F28N24.25 protein - Arabidopsis thaliana
  misc_feature (1)..(122): Homolog of NCBI NO: 21954066 NR Description: unknown protein [Arabidopsis thaliana]
  misc_feature (1)..(122): Homolog of NCBI NO: 18396927 NR Description: expressed protein
  misc_feature (1)..(122): Homolog of NCBI NO: 30690579 NR Description: expressed protein [Arabidopsis thaliana]
METTAETITGGVPNNTMKLLFVEMGVGYDQHGQDVTSAAMKACSIPGVSFGEMKLQIKLGVPHSLHQQLDLDKVKSIFPYGKIVNVEVVDGGLICSSGVLVEEMGDTNEDCYIVNVAVYVGY

SEQ ID NO: 28988 - protein, 106 aa, Arabidopsis thaliana
  peptide (1)..(106): Ceres Seq. ID no. 12329992
  misc_feature (2)..(106): Homolog of NCBI NO: 16799587 NR Description: lin0512 [Listeria innocua]
  misc_feature (2)..(106): Homolog of NCBI NO: 16802555 NR Description: lmo0512 [Listeria monocytogenes EGD-e]
  misc_feature (1)..(63): Homolog of NCBI NO: 34912624 NR Description: P0410E01.16 [Oryza sativa (japonica
  misc_feature (2)..(106): Homolog of NCBI NO: 23098421 NR Description: hypothetical protein [Oceanobacillus iheyensis
  misc_feature (3)..(106): Homolog of NCBI NO: 23098097 NR Description: hypothetical protein [Oceanobacillus iheyensis
  misc_feature (1)..(106): Homolog of NCBI NO: 37520060 NR Description: hypothetical protein glr0491 [Gloeobacter
  misc_feature (1)..(64): Homolog of NCBI NO: 25373109 NR Description: F28N24.25 protein - Arabidopsis thaliana
  misc_feature (1)..(106): Homolog of NCBI NO: 21954066 NR Description: unknown protein [Arabidopsis thaliana]
  misc_feature (1)..(106): Homolog of NCBI NO: 18396927 NR Description: expressed protein
  misc_feature (1)..(106): Homolog of NCBI NO: 30690579 NR Description: expressed protein [Arabidopsis thaliana]
MKLLFVEMGVGYDQHGQDVTSAAMKACSIPGVSFGEMKLQIKLGVPHSLHQQLDLDKVKSIFPYGKIVNVEVVDGGLICSSGVLVEEMGDTNEDCYIVNVAVYVGY

SEQ ID NO: 28989 - DNA, 697 bp, Arabidopsis thaliana
  misc_feature (1)..(697): Ceres Seq. ID no. 13499469
  misc_feature: MA Experiment ID: 108461 Result: Up-regulated in Transcription
  misc_feature: MA Experiment 108461 PARAMETER Experiment Name: At_Germinating_Seeds_cDNA_P Parameter: Age (day) Value: 1 vs. 0
  misc_feature: MA Experiment 108461 PARAMETER Experiment Name: At_Germinating_Seeds_cDNA_P Parameter: Tissue Value: Germinating Seeds
  misc_feature: MA Experiment ID: 20000113 Result: Up-regulated in Transcription
  misc_feature: MA Experiment 20000113 PARAMETER Experiment Name: At_42deg_Heat_cDNA_P Parameter: Temperature (deg C) Value: 42 vs. 22
  misc_feature: MA Experiment 20000113 PARAMETER Experiment Name: At_42deg_Heat_cDNA_P Parameter: Timepoint (hr) Value: 8
  misc_feature: MA Experiment 20000113 PARAMETER Experiment Name: At_42deg_Heat_cDNA_P Parameter: Tissue Value: Aerial
  misc_feature: MA Experiment ID: 20000180 Result: Up-regulated in Transcription
  misc_feature: MA Experiment 20000180 PARAMETER Experiment Name: At_Germinating_Seeds_P Parameter: Age (hr) Value: 24 vs. 0
  misc_feature: MA Experiment 20000180 PARAMETER Experiment Name: At_Germinating_Seeds_P Parameter: Tissue Value: Germinating Seeds
  misc_feature: MA Experiment ID: 20000185 Result: Down-regulated in Transcription
  misc_feature: MA Experiment 20000185 PARAMETER Experiment Name: At_Roots__P Parameter: Age (day) Value: 7 vs. 21
  misc_feature: MA Experiment 20000185 PARAMETER Experiment Name: At_Roots__P Parameter: Organism Value: A. thaliana
  misc_feature: MA Experiment 20000185 PARAMETER Experiment Name: At_Roots__P Parameter: Tissue Value: Roots vs. Whole Plant
  misc_feature: MA Experiment ID: 20000264 Result: Down-regulated in Transcription
  misc_feature: MA Experiment 20000264 PARAMETER Experiment Name: At_Open_Flower_P Parameter: Age (day) Value: 21
  misc_feature: MA Experiment 20000264 PARAMETER Experiment Name: At_Open_Flower_P Parameter: Plant Line Value: WS
  misc_feature: MA Experiment 20000264 PARAMETER Experiment Name: At_Open_Flower_P Parameter: Tissue Value: Open Flower vs. Whole Plant
  misc_feature: MA Experiment ID: 20000439 Result: Down-regulated in Transcription
  misc_feature: MA Experiment 20000439 PARAMETER Experiment Name: At_Roots__P Parameter: Age (day) Value: 14 vs. 21
  misc_feature: MA Experiment 20000439 PARAMETER Experiment Name: At_Roots__P Parameter: Organism Value: A. thaliana
  misc_feature: MA Experiment 20000439 PARAMETER Experiment Name: At_Roots__P Parameter: Tissue Value: Roots vs. Whole Plant
  misc_feature: MA Experiment ID: 20000794 Result: Down-regulated in Transcription
  misc_feature: MA Experiment 20000794 PARAMETER Experiment Name: At_Petals_P Parameter: Age (day) Value: 23-25 days
  misc_feature: MA Experiment 20000794 PARAMETER Experiment Name: At_Petals_P Parameter: Plant Line Value: WS
  misc_feature: MA Experiment 20000794 PARAMETER Experiment Name: At_Petals_P Parameter: Tissue Value: Petals vs. Whole plant
  misc_feature: MA Experiment ID: 20001248 Result: Down-regulated in Transcription
  misc_feature: MA Experiment 20001248 PARAMETER Experiment Name: At_Far-red-induction_P Parameter: Age (day) Value: 7
  misc_feature: MA Experiment 20001248 PARAMETER Experiment Name: At_Far-red-induction_P Parameter: Light Value: Far-red vs. White
  misc_feature: MA Experiment 20001248 PARAMETER Experiment Name: At_Far-red-induction_P Parameter: Organism Value: A. thaliana
  misc_feature: MA Experiment 20001248 PARAMETER Experiment Name: At_Far-red-induction_P Parameter: Plant Line Value: Columbia
  misc_feature: MA Experiment 20001248 PARAMETER Experiment Name: At_Far-red-induction_P Parameter: Timepoint (hr) Value: 4
  misc_feature: MA Experiment 20001248 PARAMETER Experiment Name: At_Far-red-induction_P Parameter: Tissue Value: Whole Plant
  misc_feature: MA Experiment ID: 20001451 Result: Down-regulated in Transcription
  misc_feature: MA Experiment 20001451 PARAMETER Experiment Name: At_Far-red-induction_P Parameter: Age (day) Value: 7
  misc_feature: MA Experiment 20001451 PARAMETER Experiment Name: At_Far-red-induction_P Parameter: Light Value: Far-red vs. White
  misc_feature: MA Experiment 20001451 PARAMETER Experiment Name: At_Far-red-induction_P Parameter: Organism Value: A. thaliana
  misc_feature: MA Experiment 20001451 PARAMETER Experiment Name: At_Far-red-induction_P Parameter: Plant Line Value: Columbia
  misc_feature: MA Experiment 20001451 PARAMETER Experiment Name: At_Far-red-induction_P Parameter: Timepoint (hr) Value: 24
  misc_feature: MA Experiment 20001451 PARAMETER Experiment Name: At_Far-red-induction_P Parameter: Tissue Value: Whole Plant
  misc_feature: MA Experiment ID: 20001557 Result: Down-regulated in Transcription
  misc_feature: MA Experiment 20001557 PARAMETER Experiment Name: At_Drought_Soil_Dry_P Parameter: Age (day) Value: 27
  misc_feature: MA Experiment 20001557 PARAMETER Experiment Name: At_Drought_Soil_Dry_P Parameter: Organism Value: A. thaliana
  misc_feature: MA Experiment 20001557 PARAMETER Experiment Name: At_Drought_Soil_Dry_P Parameter: Plant Line Value: WS
  misc_feature: MA Experiment 20001557 PARAMETER Experiment Name: At_Drought_Soil_Dry_P Parameter: Post Timepoint (hr) Value: 3
  misc_feature: MA Experiment 20001557 PARAMETER Experiment Name: At_Drought_Soil_Dry_P Parameter: Post-Treatment Value: Re-Water vs. No Drought
  misc_feature: MA Experiment 20001557 PARAMETER Experiment Name: At_Drought_Soil_Dry_P Parameter: Timepoint (day) Value: 13
  misc_feature: MA Experiment 20001557 PARAMETER Experiment Name: At_Drought_Soil_Dry_P Parameter: Treatment Value: Drought vs. No Drought
  misc_feature: MA Experiment ID: 20001558 Result: Down-regulated in Transcription
  misc_feature: MA Experiment 20001558 PARAMETER Experiment Name: At_Drought_Soil_Dry_P Parameter: Age (day) Value: 27
  misc_feature: MA Experiment 20001558 PARAMETER Experiment Name: At_Drought_Soil_Dry_P Parameter: Organism Value: A. thaliana
  misc_feature: MA Experiment 20001558 PARAMETER Experiment Name: At_Drought_Soil_Dry_P Parameter: Plant Line Value: WS
  misc_feature: MA Experiment 20001558 PARAMETER Experiment Name: At_Drought_Soil_Dry_P Parameter: Post Timepoint (hr) Value: 6
  misc_feature: MA Experiment 20001558 PARAMETER Experiment Name: At_Drought_Soil_Dry_P Parameter: Post-Treatment Value: Re-Water vs. No Drought
  misc_feature: MA Experiment 20001558 PARAMETER Experiment Name: At_Drought_Soil_Dry_P Parameter: Timepoint (day) Value: 13
  misc_feature: MA Experiment 20001558 PARAMETER Experiment Name: At_Drought_Soil_Dry_P Parameter: Treatment Value: Drought vs. No Drought
  misc_feature: MA Experiment ID: 20001757 Result: Up-regulated in Transcription
  misc_feature: MA Experiment 20001757 PARAMETER Experiment Name: At_50mM_NH4NO3_L-to-H_P Parameter: Timepoint (hr) Value: 6
  misc_feature: MA Experiment 20001757 PARAMETER Experiment Name: At_50mM_NH4NO3_L-to-H_P Parameter: Tissue Value: Leaf
  misc_feature: MA Experiment 20001757 PARAMETER Experiment Name: At_50mM_NH4NO3_L-to-H_P Parameter: Treatment Value: 50mM NH4NO3 vs 100mM Mannitol
  misc_feature: MA Experiment ID: 20001904 Result: Down-regulated in Transcription
  misc_feature: MA Experiment 20001904 PARAMETER Experiment Name: At_Drought_Reproduction_P Parameter: Age (day) Value: 37
  misc_feature: MA Experiment 20001904 PARAMETER Experiment Name: At_Drought_Reproduction_P Parameter: Organism Value: A. thaliana
  misc_feature: MA Experiment 20001904 PARAMETER Experiment Name: At_Drought_Reproduction_P Parameter: Plant Line Value: WS
  misc_feature: MA Experiment 20001904 PARAMETER Experiment Name: At_Drought_Reproduction_P Parameter: Timepoint (day) Value: 7
  misc_feature: MA Experiment 20001904 PARAMETER Experiment Name: At_Drought_Reproduction_P Parameter: Tissue Value: Rosettes
  misc_feature: MA Experiment 20001904 PARAMETER Experiment Name: At_Drought_Reproduction_P Parameter: Treatment Value: Drought vs. No Drought
  misc_feature: MA Experiment ID: 20001905 Result: Down-regulated in Transcription
  misc_feature: MA Experiment 20001905 PARAMETER Experiment Name: At_Drought_Reproduction_P Parameter: Age (day) Value: 40
  misc_feature: MA Experiment 20001905 PARAMETER Experiment Name: At_Drought_Reproduction_P Parameter: Organism Value: A. thaliana
  misc_feature: MA Experiment 20001905 PARAMETER Experiment Name: At_Drought_Reproduction_P Parameter: Plant Line Value: WS
  misc_feature: MA Experiment 20001905 PARAMETER Experiment Name: At_Drought_Reproduction_P Parameter: Timepoint (day) Value: 10
  misc_feature: MA Experiment 20001905 PARAMETER Experiment Name: At_Drought_Reproduction_P Parameter: Tissue Value: Rosettes
  misc_feature: MA Experiment 20001905 PARAMETER Experiment Name: At_Drought_Reproduction_P Parameter: Treatment Value: Drought vs. No Drought
  misc_feature: MA Experiment ID: 20001906 Result: Down-regulated in Transcription
  misc_feature: MA Experiment 20001906 PARAMETER Experiment Name: At_Drought_Reproduction_P Parameter: Age (day) Value: 35
  misc_feature: MA Experiment 20001906 PARAMETER Experiment Name: At_Drought_Reproduction_P Parameter: Organism Value: A. thaliana
  misc_feature: MA Experiment 20001906 PARAMETER Experiment Name: At_Drought_Reproduction_P Parameter: Plant Line Value: WS
  misc_feature: MA Experiment 20001906 PARAMETER Experiment Name: At_Drought_Reproduction_P Parameter: Timepoint (day) Value: 5
  misc_feature: MA Experiment 20001906 PARAMETER Experiment Name: At_Drought_Reproduction_P Parameter: Tissue Value: Siliques
  misc_feature: MA Experiment 20001906 PARAMETER Experiment Name: At_Drought_Reproduction_P Parameter: Treatment Value: Drought vs. No Drought
  misc_feature: MA Experiment ID: 20001908 Result: Down-regulated in Transcription
  misc_feature: MA Experiment 20001908 PARAMETER Experiment Name: At_Drought_Reproduction_P Parameter: Age (day) Value: 40
  misc_feature: MA Experiment 20001908 PARAMETER Experiment Name: At_Drought_Reproduction_P Parameter: Organism Value: A. thaliana
  misc_feature: MA Experiment 20001908 PARAMETER Experiment Name: At_Drought_Reproduction_P Parameter: Plant Line Value: WS
  misc_feature: MA Experiment 20001908 PARAMETER Experiment Name: At_Drought_Reproduction_P Parameter: Timepoint (day) Value: 10
  misc_feature: MA Experiment 20001908 PARAMETER Experiment Name: At_Drought_Reproduction_P Parameter: Tissue Value: Siliques
  misc_feature: MA Experiment 20001908 PARAMETER Experiment Name: At_Drought_Reproduction_P Parameter: Treatment Value: Drought vs. No Drought
aacgaatcttgtttagtaaaaagcgcagctgcaaaaaaaatcgagtagagaagaagtaggcagacaaagaagaagaagaagaagttctcggcgtgcttcaatggcgatatcagtagcagcttcgtcctctatggccgtgatggttccacgtgttcccgccgtatccacccgttgctccgccgtcccttatcttcctcctcgctcctttggccgatcctctttcaccgttccgttgaagcttgtttcagggaatggattgcaaaaagttgaattgtagaagacaagagcttcttcagaagagacctcgtccattgataccaacgaactcatcacagatttgaaggaaaagtgggatggtcttgagaacaaatctactgtacttatatatggaggaggagccattgttgctgtttggttatcttccattgttgttggtgccatcaactctgttcctctgcttccgaaagttatggaacttgtcggtctcgggtacactggatggtttgtctacagataccttctcttcaagtcaagcagaaaggaattggctgaggatattgaatccttgaagaagaagatcgcaggaagcgaatagattcattttcaaataaaaccagctttctctctgtatgttttcctgtaatatcgtgttatattatacaatgtctctgtttcaacattgtatctgttgcatctc

SEQ ID NO: 28990 - protein, 71 aa, Arabidopsis thaliana
  peptide (1)..(71): Ceres Seq. ID no. 13499470
MVLRTNLLYLYMEEEPLLLFGYLPLLLVPSTLFLCFRKLWNLSVSGTLDGLSTDTFSSSQAERNWLRILNP

SEQ ID NO: 28991 - protein, 60 aa, Arabidopsis thaliana
  peptide (1)..(60): Ceres Seq. ID no. 13499471
MEEEPLLLFGYLPLLLVPSTLFLCFRKLWNLSVSGTLDGLSTDTFSSSQAERNWLRILNP

SEQ ID NO: 28992 - protein, 58 aa, Arabidopsis thaliana
  peptide (1)..(58): Ceres Seq. ID no. 13499472
  misc_feature (4)..(58): Homolog of NCBI NO: 18403896 NR Description: expressed protein [Arabidopsis thaliana]
  misc_feature (6)..(58): Homolog of NCBI NO: 37536446 NR Description: hypothetical protein [Oryza sativa (japonica
  misc_feature (20)..(58): Homolog of NCBI NO: 34393236 NR Description: unknown protein [Oryza sativa (japonica
  misc_feature (4)..(58): Homolog of NCBI NO: 21555057 NR Description: unknown [Arabidopsis thaliana]
  misc_feature (4)..(58): Homolog of NCBI NO: 18407178 NR Description: expressed protein [Arabidopsis thaliana]
  misc_feature (11)..(58): Homolog of NCBI NO: 38175474 NR Description: unknown protein [Oryza sativa (japonica
  misc_feature (1)..(58): Homolog of NCBI NO: 687677 NR Description: unknown
  misc_feature (1)..(58): Homolog of NCBI NO: 18411555 NR Description: expressed protein [Arabidopsis thaliana]
MAISVAASSSMAVMVPRVPAVSTRCSAVPYLPPRSFGRSSFTVPLKLVSGNGLQKVEL

SEQ ID NO: 28993 - DNA, 2148 bp, Arabidopsis thaliana
  misc_feature (1)..(2148): Ceres Seq. ID no. 12325293
  misc_feature: MA Experiment ID: 108462 Result: Down-regulated in Transcription
  misc_feature: MA Experiment 108462 PARAMETER Experiment Name: At_Germinating_Seeds_cDNA_P Parameter: Age (day) Value: 2 vs. 0
  misc_feature: MA Experiment 108462 PARAMETER Experiment Name: At_Germinating_Seeds_cDNA_P Parameter: Tissue Value: Germinating Seeds
  misc_feature: MA Experiment ID: 108463 Result: Down-regulated in Transcription
  misc_feature: MA Experiment 108463 PARAMETER Experiment Name: At_Germinating_Seeds_cDNA_P Parameter: Age (day) Value: 3 vs. 0
  misc_feature: MA Experiment 108463 PARAMETER Experiment Name: At_Germinating_Seeds_cDNA_P Parameter: Tissue Value: Germinating Seeds
  misc_feature: MA Experiment ID: 108464 Result: Down-regulated in Transcription
  misc_feature: MA Experiment 108464 PARAMETER Experiment Name: At_Germinating_Seeds_cDNA_P Parameter: Age (day) Value: 4 vs. 0
  misc_feature: MA Experiment 108464 PARAMETER Experiment Name: At_Germinating_Seeds_cDNA_P Parameter: Tissue Value: Germinating Seeds
  misc_feature: MA Experiment ID: 108595 Result: Down-regulated in Transcription
  misc_feature: MA Experiment 108595 PARAMETER Experiment Name: At_Ler-pi_Ovule_cDNA_P Parameter: Plant Line Value: null
  misc_feature: MA Experiment ID: 20000087 Result: Down-regulated in Transcription
  misc_feature: MA Experiment 20000087 PARAMETER Experiment Name: At_100uM_ABA_Mutants_cDNA_P Parameter: Plant Line Value: WS
  misc_feature: MA Experiment 20000087 PARAMETER Experiment Name: At_100uM_ABA_Mutants_cDNA_P Parameter: Timepoint (hr) Value: 6
  misc_feature: MA Experiment 20000087 PARAMETER Experiment Name: At_100uM_ABA_Mutants_cDNA_P Parameter: Tissue Value: Aerial
  misc_feature: MA Experiment 20000087 PARAMETER Experiment Name: At_100uM_ABA_Mutants_cDNA_P Parameter: Treatment Value: 100uM ABA vs. No Treatment
  misc_feature: MA Experiment ID: 20000171 Result: Up-regulated in Transcription
  misc_feature: MA Experiment 20000171 PARAMETER Experiment Name: At_42deg_Heat_P Parameter: Age (day) Value: 14
  misc_feature: MA Experiment 20000171 PARAMETER Experiment Name: At_42deg_Heat_P Parameter: Organism Value: A. thaliana
  misc_feature: MA Experiment 20000171 PARAMETER Experiment Name: At_42deg_Heat_P Parameter: Plant Line Value: WS
  misc_feature: MA Experiment 20000171 PARAMETER Experiment Name: At_42deg_Heat_P Parameter: Temperature (deg C) Value: 42 vs. 22
  misc_feature: MA Experiment 20000171 PARAMETER Experiment Name: At_42deg_Heat_P Parameter: Timepoint (hr) Value: 1
  misc_feature: MA Experiment 20000171 PARAMETER Experiment Name: At_42deg_Heat_P Parameter: Tissue Value: Aerial
  misc_feature: MA Experiment ID: 20000173 Result: Up-regulated in Transcription
  misc_feature: MA Experiment 20000173 PARAMETER Experiment Name: At_42deg_Heat_P Parameter: Age (day) Value: 14
  misc_feature: MA Experiment 20000173 PARAMETER Experiment Name: At_42deg_Heat_P Parameter: Organism Value: A. thaliana
  misc_feature: MA Experiment 20000173 PARAMETER Experiment Name: At_42deg_Heat_P Parameter: Plant Line Value: WS
  misc_feature: MA Experiment 20000173 PARAMETER Experiment Name: At_42deg_Heat_P Parameter: Temperature (deg C) Value: 42 vs. 22
  misc_feature: MA Experiment 20000173 PARAMETER Experiment Name: At_42deg_Heat_P Parameter: Timepoint (hr) Value: 6
  misc_feature: MA Experiment 20000173 PARAMETER Experiment Name: At_42deg_Heat_P Parameter: Tissue Value: Aerial
  misc_feature: MA Experiment ID: 20000180 Result: Down-regulated in Transcription
  misc_feature: MA Experiment 20000180 PARAMETER Experiment Name: At_Germinating_Seeds_P Parameter: Age (hr) Value: 24 vs. 0
  misc_feature: MA Experiment 20000180 PARAMETER Experiment Name: At_Germinating_Seeds_P Parameter: Tissue Value: Germinating Seeds
  misc_feature: MA Experiment ID: 20001557 Result: Up-regulated in Transcription
  misc_feature: MA Experiment 20001557 PARAMETER Experiment Name: At_Drought_Soil_Dry_P Parameter: Age (day) Value: 27
  misc_feature: MA Experiment 20001557 PARAMETER Experiment Name: At_Drought_Soil_Dry_P Parameter: Organism Value: A. thaliana
  misc_feature: MA Experiment 20001557 PARAMETER Experiment Name: At_Drought_Soil_Dry_P Parameter: Plant Line Value: WS
  misc_feature: MA Experiment 20001557 PARAMETER Experiment Name: At_Drought_Soil_Dry_P Parameter: Post Timepoint (hr) Value: 3
  misc_feature: MA Experiment 20001557 PARAMETER Experiment Name: At_Drought_Soil_Dry_P Parameter: Post-Treatment Value: Re-Water vs. No Drought
  misc_feature: MA Experiment 20001557 PARAMETER Experiment Name: At_Drought_Soil_Dry_P Parameter: Timepoint (day) Value: 13
  misc_feature: MA Experiment 20001557 PARAMETER Experiment Name: At_Drought_Soil_Dry_P Parameter: Treatment Value: Drought vs. No Drought
ctctgtgccttttttcctcttttctcgttcccctctacttcatttagggtttatcatcctctaccaatccgccgattctatacatacacttttcatatatatacatacatcgtctccactctcgttggctcatttttcattcaccgccacgaagcaagaggagattcgtattagccaccatgtctttgagacctaacgctaagactgaggttcgccggaaccgctacaaagtggcggtggatgctgaggaaggaagacggaggagagaggacaacatggtcgagatccgtaagagtaagcgtgaagaaagcttacagaagaagcgtcgtgaaggccttcaagctaatcagctacctcaattcgctccttcttctgttcctgcttcatcaactgttgagaagaagttggagagtttgcctgctatggttggtggtgtttggtcagatgatagaagtttacagcttgaagcgactactcagttccggaaattgctttctattgagcgtagtcctccgattgaagaagtgattgatgctggtgttgtgcctcggtttgtggaatttctcactagagaggattatccacagcttcagtttgaggctgcttgggcattgacaaacattgcttctgggacttcagagaatacaaaggtggtcattgaacatggtgctgttccgatttttgttcaactattggcttctcagagtgatgatgtccgtgagcaggctgtgtgggcattagggaatgttgctggtgattctccacggtgcagagatcttgtccttggtcaaggagctttgataccattactctctcagttgaatgagcatgctaaactctcgatgctgagaaatgctacttggaccctctctaatttctgcaggggcaagccacagcctccctttgaccaggtccgtccagcactcccagcccttgaacgcctgattcattcgactgatgaggaagtgttaacggatgcatgttgggctctctcttacctttccgatggcacaaatgacaaaatccaatctgtcattgaggcaggtgttgttcctcgactcgtcgagcttctccagcatcaatcaccatctgtgcttattcctgcccttcgtagtattggtaacattgtcactggagatgatctgcagacacagtgtgtaattagtcatggtgcacttcttagccttttgagccttctgactcacaatcataagaagagcatcaaaaaggaagcttgctggacaatctcaaatatcactgctggaaacagggaccagattcaggctgtgtgtgaagctggtttgatttgccctcttgtcaatctgcttcaaaatgcggagtttgatataaagaaagaagctgcgtgggcaatatcaaatgccacttcaggtggttctcctgaccaaatcaagtacatggtggaacagggagtcgtgaaaccactgtgtgatcttttggtgtgccctgatccaaggattatcactgtgtgtctggaaggattggagaacattttgaaagttggggaagctgaaaaggtcacaggaaataccggggatgtaaacttttatgcacagctgatcgatgatgctgagggattagaaaagattgagaatctgcagagtcatgacaacagcgaaatctatgagaaggcagtgaagattcttgaaacgtactggttggaagaggaagatgaaactttaccacctggtgatccctctgcacaaggcttccagtttggaggaggtaatgatgcagccgtaccaccaggtggattcaacttccagtgaaggagctgaacatgacgatttgaagagtcgaaggagcttaaagagtttgggggcactggttaaaaagggtatgattagagagtctggtcttctgtgtaaaagtcagatggggtgccttacttagtctggcctggtccggtcagatccagtggttggtgggtttgagtcatggaataagcttgttgggggggagttgggtaggagtcatcaagggatatttatttttgggaaagggtttataagtttttaaagtgtgatctgatgagaatgtgtctctctgggtttttgttacatttgtactacacaacactgcaaagtcaaacataaaaaagttggtcaaactttatttggtcttattggc

SEQ ID NO: 28994 - protein, 535 aa, Arabidopsis thaliana
  peptide (1)..(535): Ceres Seq. ID no. 12325294
  misc_feature (4)..(100): Pfam Name: Importin beta binding domain Pfam Description: Importin beta binding domain
  misc_feature (1)..(535): Homolog of NCBI NO: 34895044 NR Description: putative impotin alpha 1b
  misc_feature (1)..(526): Homolog of NCBI NO: 34902832 NR Description: unnamed protein product [Oryza sativa (japonica
  misc_feature (1)..(438): Homolog of NCBI NO: 18414597 NR Description: Expressed protein; protein id: At4g16143.1
  misc_feature (1)..(534): Homolog of NCBI NO: 13699777 NR Description: AtKAP alpha [Arabidopsis thaliana]
  misc_feature (1)..(534): Homolog of NCBI NO: 15809794 NR Description: AT3g06720/F3E22_14 [Arabidopsis thaliana]
  misc_feature (1)..(534): Homolog of NCBI NO: 25314876 NR Description: probable nuclear transport factor importin
  misc_feature (1)..(534): Homolog of NCBI NO: 15230778 NR Description: importin alpha
  misc_feature (1)..(534): Homolog of NCBI NO: 13752562 NR Description: importin alpha 2 [Capsicum annuum]
  misc_feature (1)..(535): Homolog of NCBI NO: 25314870 NR Description: probable nuclear transport factor importin alpha
  misc_feature (1)..(535): Homolog of NCBI NO: 13605661 NR Description: AT3g06720/F3E22_14 [Arabidopsis thaliana]
MSLRPNAKTEVRRNRYKVAVDAEEGRRRREDNMVEIRKSKREESLQKKRREGLQANQLPQFAPSSVPASSTVEKKLESLPAMVGGVWSDDRSLQLEATTQFRKLLSIERSPPIEEVIDAGVVPRFVEFLTREDYPQLQFEAAWALTNIASGTSENTKVVIEHGAVPIFVQLLASQSDDVREQAVWALGNVAGDSPRCRDLVLGQGALIPLLSQLNEHAKLSMLRNATWTLSNFCRGKPQPPFDQVRPALPALERLIHSTDEEVLTDACWALSYLSDGTNDKIQSVIEAGVVPRLVELLQHQSPSVLIPALRSIGNIVTGDDLQTQCVISHGALLSLLSLLTHNHKKSIKKEACWTISNITAGNRDQIQAVCEAGLICPLVNLLQNAEFDIKKEAAWAISNATSGGSPDQIKYMVEQGVVKPLCDLLVCPDPRIITVCLEGLENILKVGEAEKVTGNTGDVNFYAQLIDDAEGLEKIENLQSHDNSEIYEKAVKILETYWLEEEDETLPPGDPSAQGFQFGGGNDAAVPPGGFNFQ

SEQ ID NO: 28995 - protein, 503 aa, Arabidopsis thaliana
  peptide (1)..(503): Ceres Seq. ID no. 12325295
  misc_feature (1)..(68): Pfam Name: Importin beta binding domain Pfam Description: Importin beta binding domain
  misc_feature (1)..(503): Homolog of NCBI NO: 34895044 NR Description: putative impotin alpha 1b
  misc_feature (1)..(494): Homolog of NCBI NO: 34902832 NR Description: unnamed protein product [Oryza sativa (japonica
  misc_feature (1)..(406): Homolog of NCBI NO: 18414597 NR Description: Expressed protein; protein id: At4g16143.1
  misc_feature (1)..(502): Homolog of NCBI NO: 13699777 NR Description: AtKAP alpha [Arabidopsis thaliana]
  misc_feature (1)..(502): Homolog of NCBI NO: 15809794 NR Description: AT3g06720/F3E22_14 [Arabidopsis thaliana]
  misc_feature (1)..(502): Homolog of NCBI NO: 25314876 NR Description: probable nuclear transport factor importin
  misc_feature (1)..(502): Homolog of NCBI NO: 15230778 NR Description: importin alpha
  misc_feature (1)..(502): Homolog of NCBI NO: 13752562 NR Description: importin alpha 2 [Capsicum annuum]
  misc_feature (1)..(503): Homolog of NCBI NO: 25314870 NR Description: probable nuclear transport factor importin alpha
  misc_feature (1)..(503): Homolog of NCBI NO: 13605661 NR Description: AT3g06720/F3E22_14 [Arabidopsis thaliana]
MVEIRKSKREESLQKKRREGLQANQLPQFAPSSVPASSTVEKKLESLPAMVGGVWSDDRSLQLEATTQFRKLLSIERSPPIEEVIDAGVVPRFVEFLTREDYPQLQFEAAWALTNIASGTSENTKVVIEHGAVPIFVQLLASQSDDVREQAVWALGNVAGDSPRCRDLVLGQGALIPLLSQLNEHAKLSMLRNATWTLSNFCRGKPQPPFDQVRPALPALERLIHSTDEEVLTDACWALSYLSDGTNDKIQSVIEAGVVPRLVELLQHQSPSVLIPALRSIGNIVTGDDLQTQCVISHGALLSLLSLLTHNHKKSIKKEACWTISNITAGNRDQIQAVCEAGLICPLVNLLQNAEFDIKKEAAWAISNATSGGSPDQIKYMVEQGVVKPLCDLLVCPDPRIITVCLEGLENILKVGEAEKVTGNTGDVNFYAQLIDDAEGLEKIENLQSHDNSEIYEKAVKILETYWLEEEDETLPPGDPSAQGFQFGGGNDAAVPPGGFNFQ

SEQ ID NO: 28996 - protein, 454 aa, Arabidopsis thaliana
  peptide (1)..(454): Ceres Seq. ID no. 12325296
  misc_feature (113)..(154): Pfam Name: Armadillo/beta-catenin-like repeat Pfam Description: Armadillo/beta-catenin-like repeat
  misc_feature (1)..(454): Homolog of NCBI NO: 34895044 NR Description: putative impotin alpha 1b
  misc_feature (1)..(445): Homolog of NCBI NO: 34902832 NR Description: unnamed protein product [Oryza sativa (japonica
  misc_feature (1)..(357): Homolog of NCBI NO: 18414597 NR Description: Expressed protein; protein id: At4g16143.1
  misc_feature (1)..(453): Homolog of NCBI NO: 13699777 NR Description: AtKAP alpha [Arabidopsis thaliana]
  misc_feature (1)..(453): Homolog of NCBI NO: 15809794 NR Description: AT3g06720/F3E22_14 [Arabidopsis thaliana]
  misc_feature (1)..(453): Homolog of NCBI NO: 25314876 NR Description: probable nuclear transport factor importin
  misc_feature (1)..(453): Homolog of NCBI NO: 15230778 NR Description: importin alpha
  misc_feature (1)..(453): Homolog of NCBI NO: 13752562 NR Description: importin alpha 2 [Capsicum annuum]
  misc_feature (1)..(454): Homolog of NCBI NO: 25314870 NR Description: probable nuclear transport factor importin alpha
  misc_feature (1)..(454): Homolog of NCBI NO: 13605661 NR Description: AT3g06720/F3E22_14 [Arabidopsis thaliana]
MVGGVWSDDRSLQLEATTQFRKLLSIERSPPIEEVIDAGVVPRFVEFLTREDYPQLQFEAAWALTNIASGTSENTKVVIEHGAVPIFVQLLASQSDDVREQAVWALGNVAGDSPRCRDLVLGQGALIPLLSQLNEHAKLSMLRNATWTLSNFCRGKPQPPFDQVRPALPALERLIHSTDEEVLTDACWALSYLSDGTNDKIQSVIEAGVVPRLVELLQHQSPSVLIPALRSIGNIVTGDDLQTQCVISHGALLSLLSLLTHNHKKSIKKEACWTISNITAGNRDQIQAVCEAGLICPLVNLLQNAEFDIKKEAAWAISNATSGGSPDQIKYMVEQGVVKPLCDLLVCPDPRIITVCLEGLENILKVGEAEKVTGNTGDVNFYAQLIDDAEGLEKIENLQSHDNSEIYEKAVKILETYWLEEEDETLPPGDPSAQGFQFGGGNDAAVPPGGFNFQ

SEQ ID NO: 28997 - DNA, 1292 bp, Arabidopsis thaliana
  misc_feature (1)..(1292): Ceres Seq. ID no. 12348332
  misc_feature: MA Experiment ID: 108462 Result: Down-regulated in Transcription
  misc_feature: MA Experiment 108462 PARAMETER Experiment Name: At_Germinating_Seeds_cDNA_P Parameter: Age (day) Value: 2 vs. 0
  misc_feature: MA Experiment 108462 PARAMETER Experiment Name: At_Germinating_Seeds_cDNA_P Parameter: Tissue Value: Germinating Seeds
  misc_feature: MA Experiment ID: 108463 Result: Down-regulated in Transcription
  misc_feature: MA Experiment 108463 PARAMETER Experiment Name: At_Germinating_Seeds_cDNA_P Parameter: Age (day) Value: 3 vs. 0
  misc_feature: MA Experiment 108463 PARAMETER Experiment Name: At_Germinating_Seeds_cDNA_P Parameter: Tissue Value: Germinating Seeds
  misc_feature: MA Experiment ID: 108464 Result: Down-regulated in Transcription
  misc_feature: MA Experiment 108464 PARAMETER Experiment Name: At_Germinating_Seeds_cDNA_P Parameter: Age (day) Value: 4 vs. 0
  misc_feature: MA Experiment 108464 PARAMETER Experiment Name: At_Germinating_Seeds_cDNA_P Parameter: Tissue Value: Germinating Seeds
  misc_feature: MA Experiment ID: 108579 Result: Up-regulated in Transcription
  misc_feature: MA Experiment 108579 PARAMETER Experiment Name: At_4deg_Cold_cDNA_P Parameter: Temperature (deg C) Value: 4 vs. 22
  misc_feature: MA Experiment 108579 PARAMETER Experiment Name: At_4deg_Cold_cDNA_P Parameter: Timepoint (hr) Value: 6
  misc_feature: MA Experiment 108579 PARAMETER Experiment Name: At_4deg_Cold_cDNA_P Parameter: Tissue Value: Aerial
  misc_feature: MA Experiment ID: 108668 Result: Down-regulated in Transcription
  misc_feature: MA Experiment 108668 PARAMETER Experiment Name: At_2mM_SA_cDNA_P Parameter: Plant Line Value: WS
  misc_feature: MA Experiment 108668 PARAMETER Experiment Name: At_2mM_SA_cDNA_P Parameter: Timepoint (hr) Value: 6
  misc_feature: MA Experiment 108668 PARAMETER Experiment Name: At_2mM_SA_cDNA_P Parameter: Treatment Value: 2mM SA vs. No Treatment
  misc_feature: MA Experiment ID: 20000093 Result: Down-regulated in Transcription
  misc_feature: MA Experiment 20000093 PARAMETER Experiment Name: At_42deg_Heat_cDNA_P Parameter: Temperature (deg C) Value: 42 vs. 22
  misc_feature: MA Experiment 20000093 PARAMETER Experiment Name: At_42deg_Heat_cDNA_P Parameter: Timepoint (hr) Value: 0.5
  misc_feature: MA Experiment 20000093 PARAMETER Experiment Name: At_42deg_Heat_cDNA_P Parameter: Tissue Value: Aerial
ataaaaatcattatccaaaaaagtgcaacctctttcgccgtagaaaacattccggtaaccatgctccgaagaatcacttgttcttcttcacttgcttcaccctctctcttcctccgcttctttcgccaactccctcgctcttactcctcaccgaccaccatcgccgtctcaggccgcaacattcgccgactatcaactccaaccactcttcgttgcatttgttcacactcttcatctgaaatcatctccgagcatcctccgttcgtcagggtttacaaagacggtcgtatcgaacgtctttccggcaccgaaacagtcccggcttctctaaacccacgaaacgacgtcgtttcaaaagacgttgtctactcaccggggcataacctctccgttcgtctctttctccctcacaaatcaacacaactcgccgccggtaacaaactccctctacttatctacttccacggcggagcttggataaacgaatcccctttctccccaatctaccacaatttcctcacggaggtagttaaatccgctaactgcctcgccgtctcggttcaataccgccgtgcaccggaagatccggttccggctgcgtatgaagatacatggtctgctattcaatggattttctcacattccgatggatctggtgaagaagattggattaacaaatacgctgatttcgaaaaagtttttctcgccggagatagtgccggtggtaatatatctcatcacatggctatgagagctggtaaagagaagcttaagcctagaatcaaagggactgtgattgtgcatccagcgatttgggggaaagatccggtcgatgagcacgatgtgcaagatagagagatcagagacggagttgcagaaatttgggagaaaattgtgagtccgaatagtgttgatggagcggatgatccgtggtttaatgtggttggatccgggtcggatttttccgggatgggatgtgagaaggttttggttgaggtggctgggaaagatgtgttttggcggcaaggattagcttacgcggagaagctaaagaagagtgggtggaaaggagaggtggaggtgattgaggaagaagatgaagaacattgcttccatctcttaaatccaagttctgaaaatgctcccagcttcatgaagagacttgtggagtttatcactggttaacattgttctttgtgtgacacgaataaattttgatgtaacctttgaatttgatttggttagataattatggttaaggaattaaatacaggaataactctgttctgact

SEQ ID NO: 28998 - protein, 394 aa, Arabidopsis thaliana
  peptide (1)..(394): Ceres Seq. ID no. 12348333
  misc_feature (122)..(173): Pfam Name: Carboxylesterase Pfam Description: Carboxylesterase
  misc_feature (79)..(392): Homolog of NCBI NO: 15221975 NR Description: hypothetical protein; protein id: At1g19190.1
  misc_feature (79)..(394): Homolog of NCBI NO: 15228426 NR Description: putative protein; protein id: At3g48700.1
  misc_feature (79)..(394): Homolog of NCBI NO: 18086341 NR Description: AT3g48690/T8P19_200 [Arabidopsis thaliana]
  misc_feature (79)..(394): Homolog of NCBI NO: 15228425 NR Description: putative protein
  misc_feature (81)..(392): Homolog of NCBI NO: 28393060 NR Description: putative esterase [Arabidopsis thaliana]
  misc_feature (79)..(392): Homolog of NCBI NO: 15227669 NR Description: putative esterase; protein id: At2g03550.1
  misc_feature (79)..(392): Homolog of NCBI NO: 15222791 NR Description: hypothetical protein; protein id: At1g49640.1
  misc_feature (79)..(394): Homolog of NCBI NO: 15222795 NR Description: unknown protein; protein id: At1g49660.1
  misc_feature (21)..(394): Homolog of NCBI NO: 18402731 NR Description: expressed protein
  misc_feature (21)..(394): Homolog of NCBI NO: 21537287 NR Description: putative esterase [Arabidopsis thaliana]
IKIIIQKSATSFAVENIPVTMLRRITCSSSLASPSLFLRFFRQLPRSYSSPTTIAVSGRNIRRLSTPTTLRCICSHSSSEIISEHPPFVRVYKDGRIERLSGTETVPASLNPRNDVVSKDVVYSPGHNLSVRLFLPHKSTQLAAGNKLPLLIYFHGGAWINESPFSPIYHNFLTEVVKSANCLAVSVQYRRAPEDPVPAAYEDTWSAIQWIFSHSDGSGEEDWINKYADFEKVFLAGDSAGGNISHHMAMRAGKEKLKPRIKGTVIVHPAIWGKDPVDEHDVQDREIRDGVAEIWEKIVSPNSVDGADDPWFNVVGSGSDFSGMGCEKVLVEVAGKDVFWRQGLAYAEKLKKSGWKGEVEVIEEEDEEHCFHLLNPSSENAPSFMKRLVEFITG

SEQ ID NO: 28999 - protein, 374 aa, Arabidopsis thaliana
  peptide (1)..(374): Ceres Seq. ID no. 12348334
  misc_feature (102)..(153): Pfam Name: Carboxylesterase Pfam Description: Carboxylesterase
  misc_feature (59)..(372): Homolog of NCBI NO: 15221975 NR Description: hypothetical protein; protein id: At1g19190.1
  misc_feature (59)..(374): Homolog of NCBI NO: 15228426 NR Description: putative protein; protein id: At3g48700.1
  misc_feature (59)..(374): Homolog of NCBI NO: 18086341 NR Description: AT3g48690/T8P19_200 [Arabidopsis thaliana]
  misc_feature (59)..(374): Homolog of NCBI NO: 15228425 NR Description: putative protein
  misc_feature (61)..(372): Homolog of NCBI NO: 28393060 NR Description: putative esterase [Arabidopsis thaliana]
  misc_feature (59)..(372): Homolog of NCBI NO: 15227669 NR Description: putative esterase; protein id: At2g03550.1
  misc_feature (59)..(372): Homolog of NCBI NO: 15222791 NR Description: hypothetical protein; protein id: At1g49640.1
  misc_feature (59)..(374): Homolog of NCBI NO: 15222795 NR Description: unknown protein; protein id: At1g49660.1
  misc_feature (1)..(374): Homolog of NCBI NO: 18402731 NR Description: expressed protein
  misc_feature (1)..(374): Homolog of NCBI NO: 21537287 NR Description: putative esterase [Arabidopsis thaliana]
MLRRITCSSSLASPSLFLRFFRQLPRSYSSPTTIAVSGRNIRRLSTPTTLRCICSHSSSEIISEHPPFVRVYKDGRIERLSGTETVPASLNPRNDVVSKDVVYSPGHNLSVRLFLPHKSTQLAAGNKLPLLIYFHGGAWINESPFSPIYHNFLTEVVKSANCLAVSVQYRRAPEDPVPAAYEDTWSAIQWIFSHSDGSGEEDWINKYADFEKVFLAGDSAGGNISHHMAMRAGKEKLKPRIKGTVIVHPAIWGKDPVDEHDVQDREIRDGVAEIWEKIVSPNSVDGADDPWFNVVGSGSDFSGMGCEKVLVEVAGKDVFWRQGLAYAEKLKKSGWKGEVEVIEEEDEEHCFHLLNPSSENAPSFMKRLVEFITG

SEQ ID NO: 29000 - DNA, 1324 bp, Arabidopsis thaliana
  misc_feature (1)..(1324): Ceres Seq. ID no. 12324502
  misc_feature: MA Experiment ID: 108462 Result: Down-regulated in Transcription
  misc_feature: MA Experiment 108462 PARAMETER Experiment Name: At_Germinating_Seeds_cDNA_P Parameter: Age (day) Value: 2 vs. 0
  misc_feature: MA Experiment 108462 PARAMETER Experiment Name: At_Germinating_Seeds_cDNA_P Parameter: Tissue Value: Germinating Seeds
  misc_feature: MA Experiment ID: 108463 Result: Down-regulated in Transcription
  misc_feature: MA Experiment 108463 PARAMETER Experiment Name: At_Germinating_Seeds_cDNA_P Parameter: Age (day) Value: 3 vs. 0
  misc_feature: MA Experiment 108463 PARAMETER Experiment Name: At_Germinating_Seeds_cDNA_P Parameter: Tissue Value: Germinating Seeds
gttatggttagaaagagacattttgaacaagtaaaccctagttgatatcgtgctaagctcttaagcgaagatacaggtcaaaatcgcggcaaagcatcggtggctcgagtgacccaatccactccaccaaacttctttgggaatcccaaaggttgctactttactcctcaaatgattcgcaagctctgttcttcattctctcgctccatcatcttccccaacaaacccatcttcatcccccgctcttttcctcaaccactccgtcactcttctgctctctcgtactcctccttgaaaatgaccgatacccatatcccaggaaaccctaattcgtcccctatccaatctcccaccaaacccgagtcgcttcgttccctcgaatttcaattgggttcttctttcaccgccgatccaatcatcccgccgccgaatcagatcgtcatcgttattagcggtccaagcggagttggtaaagacgcagtgatcaacaagcttcgtgaggttcgtgaaggtcttcattttgttgttaccgccactagtcgtccgatgcgacctggtgaagttgatggtaaagactatttctttgtctcgagagatcagttcttgtcaatggtggagaacgaagagcttcttgaatacgcacttgtttatggagaatacaaagggattccaaagaagcagattcaggaatttatggccaaaggggaagacattgttcttagagttgatattcaaggagctcagacgttaaggaggatacttggtaactctgctgtgtttatattccttgtggcggagagtgagcttgctatggtggagaggttgattgatcggaagacggagagtcaagaggagttgcttgttagagttgctacggcgagagaagaggttaggcatctaaagaactttgattacgttgtggtgaatgccaaagggaggcttgatgatgcggttaaccgcgtggaatcgattatcgatgctgagaaatctaaagttcatcaaaggattgtcaggatttgatgtgcagagatgccattgtctgtaacaacatattggcttgctgtctccagacacggatccatcgaagaccgagacaattttattatcggtatgtgcggcaacccattccaaccaaagatttagatgaatcctggcccctgactacagagaacccttttgattaagcatcgtatctttatacatagctacatggattatgttatcatcatacagtatgtgattcatactcgcattttgaattttgttactttataaatgtttatggagcattgttcataataatttaagtatcatctaacttttc

SEQ ID NO: 29001 - protein, 282 aa, Arabidopsis thaliana
  peptide (1)..(282): Ceres Seq. ID no. 12324503
  misc_feature (123)..(228): Pfam Name: Guanylate kinase Pfam Description: Guanylate kinase
  misc_feature (89)..(281): Homolog of NCBI NO: 23098957 NR Description: guanylate kinase [Oceanobacillus iheyensis
  misc_feature (89)..(279): Homolog of NCBI NO: 27467803 NR Description: guanylate kinase [Staphylococcus epidermidis ATCC
  misc_feature (89)..(275): Homolog of NCBI NO: 20807954 NR Description: Guanylate kinase [Thermoanaerobacter
  misc_feature (89)..(281): Homolog of NCBI NO: 15673881 NR Description: guanylate kinase (EC 2.7.4.8) [Lactococcus lactis
  misc_feature (90)..(275): Homolog of NCBI NO: 15644437 NR Description: guanylate kinase [Thermotoga maritima]
  misc_feature (89)..(280): Homolog of NCBI NO: 15615075 NR Description: guanylate kinase [Bacillus halodurans]
  misc_feature (89)..(275): Homolog of NCBI NO: 28210904 NR Description: guanylate kinase [Clostridium tetani E88]
  misc_feature (85)..(282): Homolog of NCBI NO: 22969911 NR Description: hypothetical protein [Chloroflexus aurantiacus]
  misc_feature (43)..(282): Homolog of NCBI NO: 6862924 NR Description: putative guanylate kinase [Arabidopsis thaliana]
  misc_feature (1)..(282): Homolog of NCBI NO: 18397500 NR Description: putative guanylate kinase
MIRKLCSSFSRSIIFPNKPIFIPRSFPQPLRHSSALSYSSLKMTDTHIPGNPNSSPIQSPTKPESLRSLEFQLGSSFTADPIIPPPNQIVIVISGPSGVGKDAVINKLREVREGLHFVVTATSRPMRPGEVDGKDYFFVSRDQFLSMVENEELLEYALVYGEYKGIPKKQIQEFMAKGEDIVLRVDIQGAQTLRRILGNSAVFIFLVAESELAMVERLIDRKTESQEELLVRVATAREEVRHLKNFDYVVVNAKGRLDDAVNRVESIIDAEKSKVHQRIVRI

SEQ ID NO: 29002 - protein, 240 aa, Arabidopsis thaliana
  peptide (1)..(240): Ceres Seq. ID no. 12324504
  misc_feature (81)..(186): Pfam Name: Guanylate kinase Pfam Description: Guanylate kinase
  misc_feature (47)..(239): Homolog of NCBI NO: 23098957 NR Description: guanylate kinase [Oceanobacillus iheyensis
  misc_feature (47)..(237): Homolog of NCBI NO: 27467803 NR Description: guanylate kinase [Staphylococcus epidermidis ATCC
  misc_feature (47)..(233): Homolog of NCBI NO: 20807954 NR Description: Guanylate kinase [Thermoanaerobacter
  misc_feature (47)..(239): Homolog of NCBI NO: 15673881 NR Description: guanylate kinase (EC 2.7.4.8) [Lactococcus lactis
  misc_feature (48)..(233): Homolog of NCBI NO: 15644437 NR Description: guanylate kinase [Thermotoga maritima]
  misc_feature (47)..(238): Homolog of NCBI NO: 15615075 NR Description: guanylate kinase [Bacillus halodurans]
  misc_feature (47)..(233): Homolog of NCBI NO: 28210904 NR Description: guanylate kinase [Clostridium tetani E88]
  misc_feature (43)..(240): Homolog of NCBI NO: 22969911 NR Description: hypothetical protein [Chloroflexus aurantiacus]
  misc_feature (1)..(240): Homolog of NCBI NO: 6862924 NR Description: putative guanylate kinase [Arabidopsis thaliana]
  misc_feature (1)..(240): Homolog of NCBI NO: 18397500 NR Description: putative guanylate kinase
MTDTHIPGNPNSSPIQSPTKPESLRSLEFQLGSSFTADPIIPPPNQIVIVISGPSGVGKDAVINKLREVREGLHFVVTATSRPMRPGEVDGKDYFFVSRDQFLSMVENEELLEYALVYGEYKGIPKKQIQEFMAKGEDIVLRVDIQGAQTLRRILGNSAVFIFLVAESELAMVERLIDRKTESQEELLVRVATAREEVRHLKNFDYVVVNAKGRLDDAVNRVESIIDAEKSKVHQRIVRI

SEQ ID NO: 29003 - protein, 157 aa, Arabidopsis thaliana
  peptide (1)..(157): Ceres Seq. ID no. 12324505
  misc_feature (1)..(103): Pfam Name: Guanylate kinase Pfam Description: Guanylate kinase
  misc_feature (1)..(156): Homolog of NCBI NO: 23098957 NR Description: guanylate kinase [Oceanobacillus iheyensis
  misc_feature (1)..(154): Homolog of NCBI NO: 27467803 NR Description: guanylate kinase [Staphylococcus epidermidis ATCC
  misc_feature (1)..(150): Homolog of NCBI NO: 20807954 NR Description: Guanylate kinase [Thermoanaerobacter
  misc_feature (1)..(156): Homolog of NCBI NO: 15673881 NR Description: guanylate kinase (EC 2.7.4.8) [Lactococcus lactis
  misc_feature (1)..(150): Homolog of NCBI NO: 15644437 NR Description: guanylate kinase [Thermotoga maritima]
  misc_feature (1)..(155): Homolog of NCBI NO: 15615075 NR Description: guanylate kinase [Bacillus halodurans]
  misc_feature (1)..(150): Homolog of NCBI NO: 28210904 NR Description: guanylate kinase [Clostridium tetani E88]
  misc_feature (1)..(157): Homolog of NCBI NO: 22969911 NR Description: hypothetical protein [Chloroflexus aurantiacus]
  misc_feature (1)..(157): Homolog of NCBI NO: 6862924 NR Description: putative guanylate kinase [Arabidopsis thaliana]
  misc_feature (1)..(157): Homolog of NCBI NO: 18397500 NR Description: putative guanylate kinase
MRPGEVDGKDYFFVSRDQFLSMVENEELLEYALVYGEYKGIPKKQIQEFMAKGEDIVLRVDIQGAQTLRRILGNSAVFIFLVAESELAMVERLIDRKTESQEELLVRVATAREEVRHLKNFDYVVVNAKGRLDDAVNRVESIIDAEKSKVHQRIVRI

SEQ ID NO: 29004 - DNA, 1127 bp, Arabidopsis thaliana
  misc_feature (1)..(1127): Ceres Seq. ID no. 13593807
  misc_feature: MA Experiment ID: 20000169 Result: Up-regulated in Transcription
  misc_feature: MA Experiment 20000169 PARAMETER Experiment Name: At_100uM_ABA_P Parameter: Age (day) Value: 14
  misc_feature: MA Experiment 20000169 PARAMETER Experiment Name: At_100uM_ABA_P Parameter: Organism Value: A. thaliana
  misc_feature: MA Experiment 20000169 PARAMETER Experiment Name: At_100uM_ABA_P Parameter: Plant Line Value: WS
  misc_feature: MA Experiment 20000169 PARAMETER Experiment Name: At_100uM_ABA_P Parameter: Timepoint (hr) Value: 6
  misc_feature: MA Experiment 20000169 PARAMETER Experiment Name: At_100uM_ABA_P Parameter: Tissue Value: Aerial
  misc_feature: MA Experiment 20000169 PARAMETER Experiment Name: At_100uM_ABA_P Parameter: Treatment Value: 100uM ABA vs. No Treatment
  misc_feature: MA Experiment ID: 20000171 Result: Up-regulated in Transcription
  misc_feature: MA Experiment 20000171 PARAMETER Experiment Name: At_42deg_Heat_P Parameter: Age (day) Value: 14
  misc_feature: MA Experiment 20000171 PARAMETER Experiment Name: At_42deg_Heat_P Parameter: Organism Value: A. thaliana
  misc_feature: MA Experiment 20000171 PARAMETER Experiment Name: At_42deg_Heat_P Parameter: Plant Line Value: WS
  misc_feature: MA Experiment 20000171 PARAMETER Experiment Name: At_42deg_Heat_P Parameter: Temperature (deg C) Value: 42 vs. 22
  misc_feature: MA Experiment 20000171 PARAMETER Experiment Name: At_42deg_Heat_P Parameter: Timepoint (hr) Value: 1
  misc_feature: MA Experiment 20000171 PARAMETER Experiment Name: At_42deg_Heat_P Parameter: Tissue Value: Aerial
  misc_feature: MA Experiment ID: 20000173 Result: Up-regulated in Transcription
  misc_feature: MA Experiment 20000173 PARAMETER Experiment Name: At_42deg_Heat_P Parameter: Age (day) Value: 14
  misc_feature: MA Experiment 20000173 PARAMETER Experiment Name: At_42deg_Heat_P Parameter: Organism Value: A. thaliana
  misc_feature: MA Experiment 20000173 PARAMETER Experiment Name: At_42deg_Heat_P Parameter: Plant Line Value: WS
  misc_feature: MA Experiment 20000173 PARAMETER Experiment Name: At_42deg_Heat_P Parameter: Temperature (deg C) Value: 42 vs. 22
  misc_feature: MA Experiment 20000173 PARAMETER Experiment Name: At_42deg_Heat_P Parameter: Timepoint (hr) Value: 6
  misc_feature: MA Experiment 20000173 PARAMETER Experiment Name: At_42deg_Heat_P Parameter: Tissue Value: Aerial
  misc_feature: MA Experiment ID: 20000184 Result: Up-regulated in Transcription
  misc_feature: MA Experiment 20000184 PARAMETER Experiment Name: At_Shoots__P Parameter: Age (day) Value: 7
  misc_feature: MA Experiment 20000184 PARAMETER Experiment Name: At_Shoots__P Parameter: Tissue Value: Shoots vs. Whole Plant
  misc_feature: MA Experiment ID: 20000436 Result: Up-regulated in Transcription
  misc_feature: MA Experiment 20000436 PARAMETER Experiment Name: At_Drought_P Parameter: Age (day) Value: 7
  misc_feature: MA Experiment 20000436 PARAMETER Experiment Name: At_Drought_P Parameter: Organism Value: A. thaliana
  misc_feature: MA Experiment 20000436 PARAMETER Experiment Name: At_Drought_P Parameter: Plant Line Value: WS
  misc_feature: MA Experiment 20000436 PARAMETER Experiment Name: At_Drought_P Parameter: Timepoint (hr) Value: 12
  misc_feature: MA Experiment 20000436 PARAMETER Experiment Name: At_Drought_P Parameter: Tissue Value: Whole Plant
  misc_feature: MA Experiment 20000436 PARAMETER Experiment Name: At_Drought_P Parameter: Treatment Value: Drought vs. No Drought
  misc_feature: MA Experiment ID: 20000794 Result: Up-regulated in Transcription
  misc_feature: MA Experiment 20000794 PARAMETER Experiment Name: At_Petals_P Parameter: Age (day) Value: 23-25 days
  misc_feature: MA Experiment 20000794 PARAMETER Experiment Name: At_Petals_P Parameter: Plant Line Value: WS
  misc_feature: MA Experiment 20000794 PARAMETER Experiment Name: At_Petals_P Parameter: Tissue Value: Petals vs. Whole plant
  misc_feature: MA Experiment ID: 20001248 Result: Down-regulated in Transcription
  misc_feature: MA Experiment 20001248 PARAMETER Experiment Name: At_Far-red-induction_P Parameter: Age (day) Value: 7
  misc_feature: MA Experiment 20001248 PARAMETER Experiment Name: At_Far-red-induction_P Parameter: Light Value: Far-red vs. White
  misc_feature: MA Experiment 20001248 PARAMETER Experiment Name: At_Far-red-induction_P Parameter: Organism Value: A. thaliana
  misc_feature: MA Experiment 20001248 PARAMETER Experiment Name: At_Far-red-induction_P Parameter: Plant Line Value: Columbia
  misc_feature: MA Experiment 20001248 PARAMETER Experiment Name: At_Far-red-induction_P Parameter: Timepoint (hr) Value: 4
  misc_feature: MA Experiment 20001248 PARAMETER Experiment Name: At_Far-red-induction_P Parameter: Tissue Value: Whole Plant
  misc_feature: MA Experiment ID: 20001557 Result: Up-regulated in Transcription
  misc_feature: MA Experiment 20001557 PARAMETER Experiment Name: At_Drought_Soil_Dry_P Parameter: Age (day) Value: 27
  misc_feature: MA Experiment 20001557 PARAMETER Experiment Name: At_Drought_Soil_Dry_P Parameter: Organism Value: A. thaliana
  misc_feature: MA Experiment 20001557 PARAMETER Experiment Name: At_Drought_Soil_Dry_P Parameter: Plant Line Value: WS
  misc_feature: MA Experiment 20001557 PARAMETER Experiment Name: At_Drought_Soil_Dry_P Parameter: Post Timepoint (hr) Value: 3
  misc_feature: MA Experiment 20001557 PARAMETER Experiment Name: At_Drought_Soil_Dry_P Parameter: Post-Treatment Value: Re-Water vs. No Drought
  misc_feature: MA Experiment 20001557 PARAMETER Experiment Name: At_Drought_Soil_Dry_P Parameter: Timepoint (day) Value: 13
  misc_feature: MA Experiment 20001557 PARAMETER Experiment Name: At_Drought_Soil_Dry_P Parameter: Treatment Value: Drought vs. No Drought
  misc_feature: MA Experiment ID: 20001558 Result: Up-regulated in Transcription
  misc_feature: MA Experiment 20001558 PARAMETER Experiment Name: At_Drought_Soil_Dry_P Parameter: Age (day) Value: 27
  misc_feature: MA Experiment 20001558 PARAMETER Experiment Name: At_Drought_Soil_Dry_P Parameter: Organism Value: A. thaliana
  misc_feature: MA Experiment 20001558 PARAMETER Experiment Name: At_Drought_Soil_Dry_P Parameter: Plant Line Value: WS
  misc_feature: MA Experiment 20001558 PARAMETER Experiment Name: At_Drought_Soil_Dry_P Parameter: Post Timepoint (hr) Value: 6
  misc_feature: MA Experiment 20001558 PARAMETER Experiment Name: At_Drought_Soil_Dry_P Parameter: Post-Treatment Value: Re-Water vs. No Drought
  misc_feature: MA Experiment 20001558 PARAMETER Experiment Name: At_Drought_Soil_Dry_P Parameter: Timepoint (day) Value: 13
  misc_feature: MA Experiment 20001558 PARAMETER Experiment Name: At_Drought_Soil_Dry_P Parameter: Treatment Value: Drought vs. No Drought
  misc_feature: MA Experiment ID: 20001905 Result: Up-regulated in Transcription
  misc_feature: MA Experiment 20001905 PARAMETER Experiment Name: At_Drought_Reproduction_P Parameter: Age (day) Value: 40
  misc_feature: MA Experiment 20001905 PARAMETER Experiment Name: At_Drought_Reproduction_P Parameter: Organism Value: A. thaliana
  misc_feature: MA Experiment 20001905 PARAMETER Experiment Name: At_Drought_Reproduction_P Parameter: Plant Line Value: WS
  misc_feature: MA Experiment 20001905 PARAMETER Experiment Name: At_Drought_Reproduction_P Parameter: Timepoint (day) Value: 10
  misc_feature: MA Experiment 20001905 PARAMETER Experiment Name: At_Drought_Reproduction_P Parameter: Tissue Value: Rosettes
  misc_feature: MA Experiment 20001905 PARAMETER Experiment Name: At_Drought_Reproduction_P Parameter: Treatment Value: Drought vs. No Drought
agctacacacgagaaagaaaaagctcacaactttaacctttctggagagagaagaacaaaagagggagagggagagaaatggaaggcaaagaagaagatgtacgagtgggagctaacaagttcccggagaggcaacccatcggtacatcggctcagtccaccgacaaggactacaaagagccacctcctgcgccactgttcgagcccggcgagctcagctcatggtctttctacagagccggaatagctgagtttatcgctactttcttgtttctctacatcactgttttgactgtaatgggagttaagagagcaccaaacatgtgtgcttctgttggaatccaaggtatcgcttgggcttttggtggcatgatctttgctcttgtctactgtactgctggaatttcaggtggacacatcaaccctgctgtaacatttggtctgttcttggctcggaagttgtctctgaccagagctgtgttctacatgattatgcaatgtcttggagccatctgtggtgccggagtcgtcaaaggtttccagccaacgccgtaccagactctcggtggtggtgctaacaccgttgctcatggctacaccaaaggttctggccttggtgctgaaatcatcggaacattcgttctcgtctacactgtcttctccgccaccgacgccaagagaagcgcccgtgactcacacgtcccgattttggcgccgctcccaatcggatttgcagtgttcttggtacacttggcaacaataccgatcaccgggaccggaatcaacccagctagaagtcttggagccgcaattatctacaacaaggaccactcttgggatgaccattggattttctgggttggaccattcattggagcagctctagcagcactatatcaccagattgtcatcagagcgattcctttcaagagcaagagttagagacacacagaaagattccacggtccagaatttgttctttagtagtttctttgcttatctatctaatgtagcttgtgttttgcaatgtaatgagcctttcaagaatatgtatttgggatttctaatcagcttttgtctatgtaaaaaccatggtttatctttaaatgttgtttgaggttggcctc

SEQ ID NO: 29005 - protein, 287 aa, Arabidopsis thaliana
  peptide (1)..(287): Ceres Seq. ID no. 13593808
  misc_feature (45)..(274): Pfam Name: Major intrinsic protein Pfam Description: Major intrinsic protein
  misc_feature (1)..(287): Homolog of NCBI NO: 10799095 NR Description: aquaporin PIP1b2 [Brassica oleracea]
  misc_feature (1)..(287): Homolog of NCBI NO: 15236485 NR Description: major intrinsic protein (MIP) family [Arabidopsis
  misc_feature (1)..(287): Homolog of NCBI NO: 3551131 NR Description: plasma membrane aquaporin (PAQ1) [Raphanus
  misc_feature (1)..(287): Homolog of NCBI NO: 15233109 NR Description: plasma membrane intrinsic protein 1A [Arabidopsis
  misc_feature (1)..(287): Homolog of NCBI NO: 472875 NR Description: plasma membrane intrinsic protein 1c [Arabidopsis
  misc_feature (1)..(287): Homolog of NCBI NO: 17065068 NR Description: plasma membrane intrinsic protein 1C
  misc_feature (1)..(287): Homolog of NCBI NO: 15223438 NR Description: plasma membrane intrinsic protein 1c [Arabidopsis
  misc_feature (1)..(287): Homolog of NCBI NO: 2373401 NR Description: transmembrane protein [Arabidopsis thaliana]
  misc_feature (1)..(287): Homolog of NCBI NO: 7441247 NR Description: probable plasma membrane intrinsic protein 1c -
  misc_feature (1)..(287): Homolog of NCBI NO: 18411332 NR Description: transmembrane protein (MIP family) [Arabidopsis
MEGKEEDVRVGANKFPERQPIGTSAQSTDKDYKEPPPAPLFEPGELSSWSFYRAGIAEFIATFLFLYITVLTVMGVKRAPNMCASVGIQGIAWAFGGMIFALVYCTAGISGGHINPAVTFGLFLARKLSLTRAVFYMIMQCLGAICGAGVVKGFQPTPYQTLGGGANTVAHGYTKGSGLGAEIIGTFVLVYTVFSATDAKRSARDSHVPILAPLPIGFAVFLVHLATIPITGTGINPARSLGAAIIYNKDHSWDDHWIFWVGPFIGAALAALYHQIVIRAIPFKSKS

SEQ ID NO: 29006 - protein, 214 aa, Arabidopsis thaliana
  peptide (1)..(214): Ceres Seq. ID no. 13593809
  misc_feature (1)..(201): Pfam Name: Major intrinsic protein Pfam Description: Major intrinsic protein
  misc_feature (1)..(214): Homolog of NCBI NO: 10799095 NR Description: aquaporin PIP1b2 [Brassica oleracea]
  misc_feature (1)..(214): Homolog of NCBI NO: 15236485 NR Description: major intrinsic protein (MIP) family [Arabidopsis
  misc_feature (1)..(214): Homolog of NCBI NO: 3551131 NR Description: plasma membrane aquaporin (PAQ1) [Raphanus
  misc_feature (1)..(214): Homolog of NCBI NO: 15233109 NR Description: plasma membrane intrinsic protein 1A [Arabidopsis
  misc_feature (1)..(214): Homolog of NCBI NO: 472875 NR Description: plasma membrane intrinsic protein 1c [Arabidopsis
  misc_feature (1)..(214): Homolog of NCBI NO: 17065068 NR Description: plasma membrane intrinsic protein 1C
  misc_feature (1)..(214): Homolog of NCBI NO: 15223438 NR Description: plasma membrane intrinsic protein 1c [Arabidopsis
  misc_feature (1)..(214): Homolog of NCBI NO: 2373401 NR Description: transmembrane protein [Arabidopsis thaliana]
  misc_feature (1)..(214): Homolog of NCBI NO: 7441247 NR Description: probable plasma membrane intrinsic protein 1c -
  misc_feature (1)..(214): Homolog of NCBI NO: 18411332 NR Description: transmembrane protein (MIP family) [Arabidopsis
MGVKRAPNMCASVGIQGIAWAFGGMIFALVYCTAGISGGHINPAVTFGLFLARKLSLTRAVFYMIMQCLGAICGAGVVKGFQPTPYQTLGGGANTVAHGYTKGSGLGAEIIGTFVLVYTVFSATDAKRSARDSHVPILAPLPIGFAVFLVHLATIPITGTGINPARSLGAAIIYNKDHSWDDHWIFWVGPFIGAALAALYHQIVIRAIPFKSKS

SEQ ID NO: 29007 - protein, 206 aa, Arabidopsis thaliana
  peptide (1)..(206): Ceres Seq. ID no. 13593810
  misc_feature (1)..(193): Pfam Name: Major intrinsic protein Pfam Description: Major intrinsic protein
  misc_feature (1)..(206): Homolog of NCBI NO: 10799095 NR Description: aquaporin PIP1b2 [Brassica oleracea]
  misc_feature (1)..(206): Homolog of NCBI NO: 15236485 NR Description: major intrinsic protein (MIP) family [Arabidopsis
  misc_feature (1)..(206): Homolog of NCBI NO: 3551131 NR Description: plasma membrane aquaporin (PAQ1) [Raphanus
  misc_feature (1)..(206): Homolog of NCBI NO: 15233109 NR Description: plasma membrane intrinsic protein 1A [Arabidopsis
  misc_feature (1)..(206): Homolog of NCBI NO: 472875 NR Description: plasma membrane intrinsic protein 1c [Arabidopsis
  misc_feature (1)..(206): Homolog of NCBI NO: 17065068 NR Description: plasma membrane intrinsic protein 1C
  misc_feature (1)..(206): Homolog of NCBI NO: 15223438 NR Description: plasma membrane intrinsic protein 1c [Arabidopsis
  misc_feature (1)..(206): Homolog of NCBI NO: 2373401 NR Description: transmembrane protein [Arabidopsis thaliana]
  misc_feature (1)..(206): Homolog of NCBI NO: 7441247 NR Description: probable plasma membrane intrinsic protein 1c -
  misc_feature (1)..(206): Homolog of NCBI NO: 18411332 NR Description: transmembrane protein (MIP family) [Arabidopsis
MCASVGIQGIAWAFGGMIFALVYCTAGISGGHINPAVTFGLFLARKLSLTRAVFYMIMQCLGAICGAGVVKGFQPTPYQTLGGGANTVAHGYTKGSGLGAEIIGTFVLVYTVFSATDAKRSARDSHVPILAPLPIGFAVFLVHLATIPITGTGINPARSLGAAIIYNKDHSWDDHWIFWVGPFIGAALAALYHQIVIRAIPFKSKS

SEQ ID NO: 29008 - DNA, 1422 bp, Arabidopsis thaliana
  misc_feature (1)..(1422): Ceres Seq. ID no. 12395753
  misc_feature: MA Experiment ID: 108461 Result: Up-regulated in Transcription
  misc_feature: MA Experiment 108461 PARAMETER Experiment Name: At_Germinating_Seeds_cDNA_P Parameter: Age (day) Value: 1 vs. 0
  misc_feature: MA Experiment 108461 PARAMETER Experiment Name: At_Germinating_Seeds_cDNA_P Parameter: Tissue Value: Germinating Seeds
  misc_feature: MA Experiment ID: 108462 Result: Up-regulated in Transcription
  misc_feature: MA Experiment 108462 PARAMETER Experiment Name: At_Germinating_Seeds_cDNA_P Parameter: Age (day) Value: 2 vs. 0
  misc_feature: MA Experiment 108462 PARAMETER Experiment Name: At_Germinating_Seeds_cDNA_P Parameter: Tissue Value: Germinating Seeds
  misc_feature: MA Experiment ID: 108463 Result: Up-regulated in Transcription
  misc_feature: MA Experiment 108463 PARAMETER Experiment Name: At_Germinating_Seeds_cDNA_P Parameter: Age (day) Value: 3 vs. 0
  misc_feature: MA Experiment 108463 PARAMETER Experiment Name: At_Germinating_Seeds_cDNA_P Parameter: Tissue Value: Germinating Seeds
  misc_feature: MA Experiment ID: 108464 Result: Up-regulated in Transcription
  misc_feature: MA Experiment 108464 PARAMETER Experiment Name: At_Germinating_Seeds_cDNA_P Parameter: Age (day) Value: 4 vs. 0
  misc_feature: MA Experiment 108464 PARAMETER Experiment Name: At_Germinating_Seeds_cDNA_P Parameter: Tissue Value: Germinating Seeds
  misc_feature: MA Experiment ID: 108488 Result: Up-regulated in Transcription
  misc_feature: MA Experiment ID: 108574 Result: Down-regulated in Transcription
  misc_feature: MA Experiment 108574 PARAMETER Experiment Name: At_Wounding__cDNA_P Parameter: Timepoint (hr) Value: 1
  misc_feature: MA Experiment 108574 PARAMETER Experiment Name: At_Wounding__cDNA_P Parameter: Tissue Value: Aerial
  misc_feature: MA Experiment 108574 PARAMETER Experiment Name: At_Wounding__cDNA_P Parameter: Treatment Value: Wounding vs. No Wounding
  misc_feature: MA Experiment ID: 108576 Result: Down-regulated in Transcription
  misc_feature: MA Experiment 108576 PARAMETER Experiment Name: At_42deg_Heat_cDNA_P Parameter: Temperature (deg C) Value: 42 vs. 22
  misc_feature: MA Experiment 108576 PARAMETER Experiment Name: At_42deg_Heat_cDNA_P Parameter: Timepoint (hr) Value: 1
  misc_feature: MA Experiment 108576 PARAMETER Experiment Name: At_42deg_Heat_cDNA_P Parameter: Tissue Value: Aerial
  misc_feature: MA Experiment ID: 108577 Result: Down-regulated in Transcription
  misc_feature: MA Experiment 108577 PARAMETER Experiment Name: At_42deg_Heat_cDNA_P Parameter: Temperature (deg C) Value: 42 vs. 22
  misc_feature: MA Experiment 108577 PARAMETER Experiment Name: At_42deg_Heat_cDNA_P Parameter: Timepoint (hr) Value: 6
  misc_feature: MA Experiment 108577 PARAMETER Experiment Name: At_42deg_Heat_cDNA_P Parameter: Tissue Value: Aerial
  misc_feature: MA Experiment ID: 108579 Result: Down-regulated in Transcription
  misc_feature: MA Experiment 108579 PARAMETER Experiment Name: At_4deg_Cold_cDNA_P Parameter: Temperature (deg C) Value: 4 vs. 22
  misc_feature: MA Experiment 108579 PARAMETER Experiment Name: At_4deg_Cold_cDNA_P Parameter: Timepoint (hr) Value: 6
  misc_feature: MA Experiment 108579 PARAMETER Experiment Name: At_4deg_Cold_cDNA_P Parameter: Tissue Value: Aerial
  misc_feature: MA Experiment ID: 108585 Result: Down-regulated in Transcription
  misc_feature: MA Experiment 108585 PARAMETER Experiment Name: At_5mM_NaNP_cDNA_P Parameter: Timepoint (hr) Value: 6
  misc_feature: MA Experiment 108585 PARAMETER Experiment Name: At_5mM_NaNP_cDNA_P Parameter: Tissue Value: Aerial
  misc_feature: MA Experiment 108585 PARAMETER Experiment Name: At_5mM_NaNP_cDNA_P Parameter: Treatment Value: null
  misc_feature: MA Experiment ID: 108594 Result: Down-regulated in Transcription
  misc_feature: MA Experiment 108594 PARAMETER Experiment Name: At_Ler-rhl_Root_cDNA_P Parameter: Plant Line Value: null
  misc_feature: MA Experiment ID: 108595 Result: Down-regulated in Transcription
  misc_feature: MA Experiment 108595 PARAMETER Experiment Name: At_Ler-pi_Ovule_cDNA_P Parameter: Plant Line Value: null
  misc_feature: MA Experiment ID: 108668 Result: Down-regulated in Transcription
  misc_feature: MA Experiment 108668 PARAMETER Experiment Name: At_2mM_SA_cDNA_P Parameter: Plant Line Value: WS
  misc_feature: MA Experiment 108668 PARAMETER Experiment Name: At_2mM_SA_cDNA_P Parameter: Timepoint (hr) Value: 6
  misc_feature: MA Experiment 108668 PARAMETER Experiment Name: At_2mM_SA_cDNA_P Parameter: Treatment Value: 2mM SA vs. No Treatment
  misc_feature: MA Experiment ID: 20000068 Result: Down-regulated in Transcription
  misc_feature: MA Experiment ID: 20000069 Result: Up-regulated in Transcription
  misc_feature: MA Experiment 20000069 PARAMETER Experiment Name: At_100uM_ABA_Mutants_cDNA_P Parameter: Plant Line Value: CS23
  misc_feature: MA Experiment 20000069 PARAMETER Experiment Name: At_100uM_ABA_Mutants_cDNA_P Parameter: Timepoint (hr) Value: 6
  misc_feature: MA Experiment 20000069 PARAMETER Experiment Name: At_100uM_ABA_Mutants_cDNA_P Parameter: Tissue Value: Aerial
  misc_feature: MA Experiment 20000069 PARAMETER Experiment Name: At_100uM_ABA_Mutants_cDNA_P Parameter: Treatment Value: 100uM ABA vs. No Treatment
  misc_feature: MA Experiment ID: 20000070 Result: Up-regulated in Transcription
  misc_feature: MA Experiment 20000070 PARAMETER Experiment Name: At_100uM_ABA_Mutants_cDNA_P Parameter: Plant Line Value: CS24
  misc_feature: MA Experiment 20000070 PARAMETER Experiment Name: At_100uM_ABA_Mutants_cDNA_P Parameter: Timepoint (hr) Value: 6
  misc_feature: MA Experiment 20000070 PARAMETER Experiment Name: At_100uM_ABA_Mutants_cDNA_P Parameter: Tissue Value: Aerial
  misc_feature: MA Experiment 20000070 PARAMETER Experiment Name: At_100uM_ABA_Mutants_cDNA_P Parameter: Treatment Value: 100uM ABA vs. No Treatment
  misc_feature: MA Experiment ID: 20000087 Result: Down-regulated in Transcription
  misc_feature: MA Experiment 20000087 PARAMETER Experiment Name: At_100uM_ABA_Mutants_cDNA_P Parameter: Plant Line Value: WS
  misc_feature: MA Experiment 20000087 PARAMETER Experiment Name: At_100uM_ABA_Mutants_cDNA_P Parameter: Timepoint (hr) Value: 6
  misc_feature: MA Experiment 20000087 PARAMETER Experiment Name: At_100uM_ABA_Mutants_cDNA_P Parameter: Tissue Value: Aerial
  misc_feature: MA Experiment 20000087 PARAMETER Experiment Name: At_100uM_ABA_Mutants_cDNA_P Parameter: Treatment Value: 100uM ABA vs. No Treatment
  misc_feature: MA Experiment ID: 20000111 Result: Down-regulated in Transcription
  misc_feature: MA Experiment 20000111 PARAMETER Experiment Name: At_42deg_Heat_cDNA_P Parameter: Temperature (deg C) Value: 42 vs. 22
  misc_feature: MA Experiment 20000111 PARAMETER Experiment Name: At_42deg_Heat_cDNA_P Parameter: Timepoint (hr) Value: 6
  misc_feature: MA Experiment 20000111 PARAMETER Experiment Name: At_42deg_Heat_cDNA_P Parameter: Tissue Value: Aerial
  misc_feature: MA Experiment ID: 20000112 Result: Down-regulated in Transcription
  misc_feature: MA Experiment 20000112 PARAMETER Experiment Name: At_42deg_Heat_cDNA_P Parameter: Temperature (deg C) Value: 42 vs. 22
  misc_feature: MA Experiment 20000112 PARAMETER Experiment Name: At_42deg_Heat_cDNA_P Parameter: Timepoint (hr) Value: 2
  misc_feature: MA Experiment 20000112 PARAMETER Experiment Name: At_42deg_Heat_cDNA_P Parameter: Tissue Value: Aerial
  misc_feature: MA Experiment ID: 20000113 Result: Down-regulated in Transcription
  misc_feature: MA Experiment 20000113 PARAMETER Experiment Name: At_42deg_Heat_cDNA_P Parameter: Temperature (deg C) Value: 42 vs. 22
  misc_feature: MA Experiment 20000113 PARAMETER Experiment Name: At_42deg_Heat_cDNA_P Parameter: Timepoint (hr) Value: 8
  misc_feature: MA Experiment 20000113 PARAMETER Experiment Name: At_42deg_Heat_cDNA_P Parameter: Tissue Value: Aerial
  misc_feature: MA Experiment ID: 20000173 Result: Down-regulated in Transcription
  misc_feature: MA Experiment 20000173 PARAMETER Experiment Name: At_42deg_Heat_P Parameter: Age (day) Value: 14
  misc_feature: MA Experiment 20000173 PARAMETER Experiment Name: At_42deg_Heat_P Parameter: Organism Value: A. thaliana
  misc_feature: MA Experiment 20000173 PARAMETER Experiment Name: At_42deg_Heat_P Parameter: Plant Line Value: WS
  misc_feature: MA Experiment 20000173 PARAMETER Experiment Name: At_42deg_Heat_P Parameter: Temperature (deg C) Value: 42 vs. 22
  misc_feature: MA Experiment 20000173 PARAMETER Experiment Name: At_42deg_Heat_P Parameter: Timepoint (hr) Value: 6
  misc_feature: MA Experiment 20000173 PARAMETER Experiment Name: At_42deg_Heat_P Parameter: Tissue Value: Aerial
  misc_feature: MA Experiment ID: 20000182 Result: Down-regulated in Transcription
  misc_feature: MA Experiment 20000182 PARAMETER Experiment Name: At_2mM_SA_P Parameter: Age (day) Value: 14
  misc_feature: MA Experiment 20000182 PARAMETER Experiment Name: At_2mM_SA_P Parameter: Organism Value: A. thaliana
  misc_feature: MA Experiment 20000182 PARAMETER Experiment Name: At_2mM_SA_P Parameter: Plant Line Value: WS
  misc_feature: MA Experiment 20000182 PARAMETER Experiment Name: At_2mM_SA_P Parameter: Timepoint (hr) Value: 6
  misc_feature: MA Experiment 20000182 PARAMETER Experiment Name: At_2mM_SA_P Parameter: Tissue Value: Aerial
  misc_feature: MA Experiment 20000182 PARAMETER Experiment Name: At_2mM_SA_P Parameter: Treatment Value: 2mM SA vs. No Treatment
  misc_feature: MA Experiment ID: 20000184 Result: Down-regulated in Transcription
  misc_feature: MA Experiment 20000184 PARAMETER Experiment Name: At_Shoots__P Parameter: Age (day) Value: 7
  misc_feature: MA Experiment 20000184 PARAMETER Experiment Name: At_Shoots__P Parameter: Tissue Value: Shoots vs. Whole Plant
  misc_feature: MA Experiment ID: 20000185 Result: Down-regulated in Transcription
  misc_feature: MA Experiment 20000185 PARAMETER Experiment Name: At_Roots__P Parameter: Age (day) Value: 7 vs. 21
  misc_feature: MA Experiment 20000185 PARAMETER Experiment Name: At_Roots__P Parameter: Organism Value: A. thaliana
  misc_feature: MA Experiment 20000185 PARAMETER Experiment Name: At_Roots__P Parameter: Tissue Value: Roots vs. Whole Plant
  misc_feature: MA Experiment ID: 20000439 Result: Down-regulated in Transcription
  misc_feature: MA Experiment 20000439 PARAMETER Experiment Name: At_Roots__P Parameter: Age (day) Value: 14 vs. 21
  misc_feature: MA Experiment 20000439 PARAMETER Experiment Name: At_Roots__P Parameter: Organism Value: A. thaliana
  misc_feature: MA Experiment 20000439 PARAMETER Experiment Name: At_Roots__P Parameter: Tissue Value: Roots vs. Whole Plant
  misc_feature: MA Experiment ID: 20000527 Result: Up-regulated in Transcription
  misc_feature: MA Experiment 20000527 PARAMETER Experiment Name: At_10percent_PEG_P Parameter: Age (day) Value: 20
  misc_feature: MA Experiment 20000527 PARAMETER Experiment Name: At_10percent_PEG_P Parameter: Organism Value: A. thaliana
  misc_feature: MA Experiment 20000527 PARAMETER Experiment Name: At_10percent_PEG_P Parameter: Plant Line Value: WS
  misc_feature: MA Experiment 20000527 PARAMETER Experiment Name: At_10percent_PEG_P Parameter: Timepoint (day) Value: 20
  misc_feature: MA Experiment 20000527 PARAMETER Experiment Name: At_10percent_PEG_P Parameter: Tissue Value: Whole Plant
  misc_feature: MA Experiment 20000527 PARAMETER Experiment Name: At_10percent_PEG_P Parameter: Treatment Value: 10percent PEG vs. No Treatment
  misc_feature: MA Experiment ID: 20001248 Result: Up-regulated in Transcription
  misc_feature: MA Experiment 20001248 PARAMETER Experiment Name: At_Far-red-induction_P Parameter: Age (day) Value: 7
  misc_feature: MA Experiment 20001248 PARAMETER Experiment Name: At_Far-red-induction_P Parameter: Light Value: Far-red vs. White
  misc_feature: MA Experiment 20001248 PARAMETER Experiment Name: At_Far-red-induction_P Parameter: Organism Value: A. thaliana
  misc_feature: MA Experiment 20001248 PARAMETER Experiment Name: At_Far-red-induction_P Parameter: Plant Line Value: Columbia
  misc_feature: MA Experiment 20001248 PARAMETER Experiment Name: At_Far-red-induction_P Parameter: Timepoint (hr) Value: 4
  misc_feature: MA Experiment 20001248 PARAMETER Experiment Name: At_Far-red-induction_P Parameter: Tissue Value: Whole Plant
  misc_feature: MA Experiment ID: 20001450 Result: Up-regulated in Transcription
  misc_feature: MA Experiment 20001450 PARAMETER Experiment Name: At_Far-red-induction_P Parameter: Age (day) Value: 7
  misc_feature: MA Experiment 20001450 PARAMETER Experiment Name: At_Far-red-induction_P Parameter: Light Value: Far-red vs. White
  misc_feature: MA Experiment 20001450 PARAMETER Experiment Name: At_Far-red-induction_P Parameter: Organism Value: A. thaliana
  misc_feature: MA Experiment 20001450 PARAMETER Experiment Name: At_Far-red-induction_P Parameter: Plant Line Value: Columbia
  misc_feature: MA Experiment 20001450 PARAMETER Experiment Name: At_Far-red-induction_P Parameter: Timepoint (hr) Value: 8
  misc_feature: MA Experiment 20001450 PARAMETER Experiment Name: At_Far-red-induction_P Parameter: Tissue Value: Whole Plant
  misc_feature: MA Experiment ID: 20001451 Result: Up-regulated in Transcription
  misc_feature: MA Experiment 20001451 PARAMETER Experiment Name: At_Far-red-induction_P Parameter: Age (day) Value: 7
  misc_feature: MA Experiment 20001451 PARAMETER Experiment Name: At_Far-red-induction_P Parameter: Light Value: Far-red vs. White
  misc_feature: MA Experiment 20001451 PARAMETER Experiment Name: At_Far-red-induction_P Parameter: Organism Value: A. thaliana
  misc_feature: MA Experiment 20001451 PARAMETER Experiment Name: At_Far-red-induction_P Parameter: Plant Line Value: Columbia
  misc_feature: MA Experiment 20001451 PARAMETER Experiment Name: At_Far-red-induction_P Parameter: Timepoint (hr) Value: 24
  misc_feature: MA Experiment 20001451 PARAMETER Experiment Name: At_Far-red-induction_P Parameter: Tissue Value: Whole Plant
  misc_feature: MA Experiment ID: 20001557 Result: Down-regulated in Transcription
  misc_feature: MA Experiment 20001557 PARAMETER Experiment Name: At_Drought_Soil_Dry_P Parameter: Age (day) Value: 27
  misc_feature: MA Experiment 20001557 PARAMETER Experiment Name: At_Drought_Soil_Dry_P Parameter: Organism Value: A. thaliana
  misc_feature: MA Experiment 20001557 PARAMETER Experiment Name: At_Drought_Soil_Dry_P Parameter: Plant Line Value: WS
  misc_feature: MA Experiment 20001557 PARAMETER Experiment Name: At_Drought_Soil_Dry_P Parameter: Post Timepoint (hr) Value: 3
  misc_feature: MA Experiment 20001557 PARAMETER Experiment Name: At_Drought_Soil_Dry_P Parameter: Post-Treatment Value: Re-Water vs. No Drought
  misc_feature: MA Experiment 20001557 PARAMETER Experiment Name: At_Drought_Soil_Dry_P Parameter: Timepoint (day) Value: 13
  misc_feature: MA Experiment 20001557 PARAMETER Experiment Name: At_Drought_Soil_Dry_P Parameter: Treatment Value: Drought vs. No Drought
  misc_feature: MA Experiment ID: 20001558 Result: Down-regulated in Transcription
  misc_feature: MA Experiment 20001558 PARAMETER Experiment Name: At_Drought_Soil_Dry_P Parameter: Age (day) Value: 27
  misc_feature: MA Experiment 20001558 PARAMETER Experiment Name: At_Drought_Soil_Dry_P Parameter: Organism Value: A. thaliana
  misc_feature: MA Experiment 20001558 PARAMETER Experiment Name: At_Drought_Soil_Dry_P Parameter: Plant Line Value: WS
  misc_feature: MA Experiment 20001558 PARAMETER Experiment Name: At_Drought_Soil_Dry_P Parameter: Post Timepoint (hr) Value: 6
  misc_feature: MA Experiment 20001558 PARAMETER Experiment Name: At_Drought_Soil_Dry_P Parameter: Post-Treatment Value: Re-Water vs. No Drought
  misc_feature: MA Experiment 20001558 PARAMETER Experiment Name: At_Drought_Soil_Dry_P Parameter: Timepoint (day) Value: 13
  misc_feature: MA Experiment 20001558 PARAMETER Experiment Name: At_Drought_Soil_Dry_P Parameter: Treatment Value: Drought vs. No Drought
  misc_feature: MA Experiment ID: 20001560 Result: Down-regulated in Transcription
  misc_feature: MA Experiment 20001560 PARAMETER Experiment Name: At_Drought_Soil_Dry_P Parameter: Age (day) Value: 28
  misc_feature: MA Experiment 20001560 PARAMETER Experiment Name: At_Drought_Soil_Dry_P Parameter: Organism Value: A. thaliana
  misc_feature: MA Experiment 20001560 PARAMETER Experiment Name: At_Drought_Soil_Dry_P Parameter: Plant Line Value: WS
  misc_feature: MA Experiment 20001560 PARAMETER Experiment Name: At_Drought_Soil_Dry_P Parameter: Post Timepoint (hr) Value: None
  misc_feature: MA Experiment 20001560 PARAMETER Experiment Name: At_Drought_Soil_Dry_P Parameter: Post-Treatment Value: None
  misc_feature: MA Experiment 20001560 PARAMETER Experiment Name: At_Drought_Soil_Dry_P Parameter: Timepoint (day) Value: 14
  misc_feature: MA Experiment 20001560 PARAMETER Experiment Name: At_Drought_Soil_Dry_P Parameter: Treatment Value: Drought vs. No Drought
  misc_feature: MA Experiment ID: 20001905 Result: Down-regulated in Transcription
  misc_feature: MA Experiment 20001905 PARAMETER Experiment Name: At_Drought_Reproduction_P Parameter: Age (day) Value: 40
  misc_feature: MA Experiment 20001905 PARAMETER Experiment Name: At_Drought_Reproduction_P Parameter: Organism Value: A. thaliana
  misc_feature: MA Experiment 20001905 PARAMETER Experiment Name: At_Drought_Reproduction_P Parameter: Plant Line Value: WS
  misc_feature: MA Experiment 20001905 PARAMETER Experiment Name: At_Drought_Reproduction_P Parameter: Timepoint (day) Value: 10
  misc_feature: MA Experiment 20001905 PARAMETER Experiment Name: At_Drought_Reproduction_P Parameter: Tissue Value: Rosettes
  misc_feature: MA Experiment 20001905 PARAMETER Experiment Name: At_Drought_Reproduction_P Parameter: Treatment Value: Drought vs. No Drought
  misc_feature: MA Experiment ID: 20001906 Result: Down-regulated in Transcription
  misc_feature: MA Experiment 20001906 PARAMETER Experiment Name: At_Drought_Reproduction_P Parameter: Age (day) Value: 35
  misc_feature: MA Experiment 20001906 PARAMETER Experiment Name: At_Drought_Reproduction_P Parameter: Organism Value: A. thaliana
  misc_feature: MA Experiment 20001906 PARAMETER Experiment Name: At_Drought_Reproduction_P Parameter: Plant Line Value: WS
  misc_feature: MA Experiment 20001906 PARAMETER Experiment Name: At_Drought_Reproduction_P Parameter: Timepoint (day) Value: 5
  misc_feature: MA Experiment 20001906 PARAMETER Experiment Name: At_Drought_Reproduction_P Parameter: Tissue Value: Siliques
  misc_feature: MA Experiment 20001906 PARAMETER Experiment Name: At_Drought_Reproduction_P Parameter: Treatment Value: Drought vs. No Drought
  misc_feature: MA Experiment ID: 20001908 Result: Down-regulated in Transcription
  misc_feature: MA Experiment 20001908 PARAMETER Experiment Name: At_Drought_Reproduction_P Parameter: Age (day) Value: 40
  misc_feature: MA Experiment 20001908 PARAMETER Experiment Name: At_Drought_Reproduction_P Parameter: Organism Value: A. thaliana
  misc_feature: MA Experiment 20001908 PARAMETER Experiment Name: At_Drought_Reproduction_P Parameter: Plant Line Value: WS
  misc_feature: MA Experiment 20001908 PARAMETER Experiment Name: At_Drought_Reproduction_P Parameter: Timepoint (day) Value: 10
  misc_feature: MA Experiment 20001908 PARAMETER Experiment Name: At_Drought_Reproduction_P Parameter: Tissue Value: Siliques
  misc_feature: MA Experiment 20001908 PARAMETER Experiment Name: At_Drought_Reproduction_P Parameter: Treatment Value: Drought vs. No Drought
aaatgattttagaaactaaagtaaaatgagcttgacactagagtttctgcttcttctgattgtacttatcttgagtcaccatgctcattctggctctattgtcaaattccttcctggttttgaaggcccccttccttttgaactcgaaaccgggtacattggtattggtgaggaaggggaagtgcaattattctactatttcatcaaatctgagaagaatccagaagaagaccctcttcttctatggttaagtggaggacctggatgttcctctcttactggccttctttttgagaatggaccggtggctttgaagttcgaggtttacaatggaagtgttccatctttggtctctactacatattcatggacaaaggtaaaaatggcgaacataatattcttggatcagccagttggatctggcttctcctattcaagaactccactttgataaaattagtgacactggtgaagttaagaggatttatgagtttcttcaaaagtggttaagcaaacatcaacaatttttttccaaccctttttacgttggtggagattcttattcaggtatgattgttccacccctagttcaagaaatcggaaaaggaaattatcaaataaatctacagggttatatcctcggaaacccgataacagatactgaatctgaacaaaactatcagattccatatgctcatggaatggcattaatctctgatgaactatacaagtcaatggagagaatctgcaaaggaaattatgtgaaagtggattcacttaacacaaaatgctataaactaatcaaagattatcaaaagtgtattcataaactgaataagtatcatatattattacctgactgcgatataacatctcctgattgctttttatataggtatactctcataaccttttgggccaacaacaagagcgttcgcgaagctctgcaagtcaataagggaagtataggaaaatgggtacaatgtaactataaaaatatttcctacaattacgatatcaagagcagcgtcgcataccatatgaagaatagtattgatggctaccgatctcttatctacaatggtgaccatgatatgatggtgcctttccttgcaactcaagcctggataagatctctcaattattccatcactgatgattggaagccttggatgataaacgatcaaattgctggatacacgagaagttattccaataagatgacatttgctactatcaaaggaagtggacacacagcagagtataaaccaaaagagacctctatcatgttcaaaagatggatcagtgcccagcctttgtaaaagaggatgatggtctttgcgtatgtagaataaaactatgtaacataaaaaatgtttgtatacaatataatcatctacttggtaattaagtactaccgct

SEQ ID NO: 29009 - protein, 250 aa, Arabidopsis thaliana
  peptide (1)..(250): Ceres Seq. ID no. 12395754
  misc_feature (1)..(247): Pfam Name: Serine carboxypeptidase Pfam Description: Serine carboxypeptidase
  misc_feature (1)..(250): Homolog of NCBI NO: 8777303 NR Description: serine carboxypeptidase [Arabidopsis thaliana]
  misc_feature (1)..(250): Homolog of NCBI NO: 30681910 NR Description: serine carboxypeptidase -related [Arabidopsis
  misc_feature (1)..(250): Homolog of NCBI NO: 15219433 NR Description: putative serine carboxypeptidase; protein id:
  misc_feature (1)..(250): Homolog of NCBI NO: 18400137 NR Description: putative serine carboxypeptidase I; protein id:
  misc_feature (1)..(250): Homolog of NCBI NO: 15227772 NR Description: putative serine carboxypeptidase I
  misc_feature (1)..(250): Homolog of NCBI NO: 15227773 NR Description: putative serine carboxypeptidase I; protein id:
  misc_feature (1)..(250): Homolog of NCBI NO: 15228300 NR Description: putative glucose acyltransferase; protein id:
  misc_feature (1)..(250): Homolog of NCBI NO: 15227765 NR Description: putative serine carboxypeptidase I; protein id:
  misc_feature (1)..(250): Homolog of NCBI NO: 15227769 NR Description: putative serine carboxypeptidase II
  misc_feature (1)..(226): Homolog of NCBI NO: 24417488 NR Description: unknown [Arabidopsis thaliana]
MIVPPLVQEIGKGNYQINLQGYILGNPITDTESEQNYQIPYAHGMALISDELYKSMERICKGNYVKVDSLNTKCYKLIKDYQKCIHKLNKYHILLPDCDITSPDCFLYRYTLITFWANNKSVREALQVNKGSIGKWVQCNYKNISYNYDIKSSVAYHMKNSIDGYRSLIYNGDHDMMVPFLATQAWIRSLNYSITDDWKPWMINDQIAGYTRSYSNKMTFATIKGSGHTAEYKPKETSIMFKRWISAQPL

SEQ ID NO: 29010 - protein, 206 aa, Arabidopsis thaliana
  peptide (1)..(206): Ceres Seq. ID no. 12395755
  misc_feature (1)..(203): Pfam Name: Serine carboxypeptidase Pfam Description: Serine carboxypeptidase
  misc_feature (1)..(206): Homolog of NCBI NO: 8777303 NR Description: serine carboxypeptidase [Arabidopsis thaliana]
  misc_feature (1)..(206): Homolog of NCBI NO: 30681910 NR Description: serine carboxypeptidase -related [Arabidopsis
  misc_feature (1)..(206): Homolog of NCBI NO: 15219433 NR Description: putative serine carboxypeptidase; protein id:
  misc_feature (1)..(206): Homolog of NCBI NO: 18400137 NR Description: putative serine carboxypeptidase I; protein id:
  misc_feature (1)..(206): Homolog of NCBI NO: 15227772 NR Description: putative serine carboxypeptidase I
  misc_feature (1)..(206): Homolog of NCBI NO: 15227773 NR Description: putative serine carboxypeptidase I; protein id:
  misc_feature (1)..(206): Homolog of NCBI NO: 15228300 NR Description: putative glucose acyltransferase; protein id:
  misc_feature (1)..(206): Homolog of NCBI NO: 15227765 NR Description: putative serine carboxypeptidase I; protein id:
  misc_feature (1)..(206): Homolog of NCBI NO: 15227769 NR Description: putative serine carboxypeptidase II
  misc_feature (1)..(182): Homolog of NCBI NO: 24417488 NR Description: unknown [Arabidopsis thaliana]
MALISDELYKSMERICKGNYVKVDSLNTKCYKLIKDYQKCIHKLNKYHILLPDCDITSPDCFLYRYTLITFWANNKSVREALQVNKGSIGKWVQCNYKNISYNYDIKSSVAYHMKNSIDGYRSLIYNGDHDMMVPFLATQAWIRSLNYSITDDWKPWMINDQIAGYTRSYSNKMTFATIKGSGHTAEYKPKETSIMFKRWISAQPL

SEQ ID NO: 29011 - protein, 195 aa, Arabidopsis thaliana
  peptide (1)..(195): Ceres Seq. ID no. 12395756
  misc_feature (1)..(192): Pfam Name: Serine carboxypeptidase Pfam Description: Serine carboxypeptidase
  misc_feature (1)..(195): Homolog of NCBI NO: 8777303 NR Description: serine carboxypeptidase [Arabidopsis thaliana]
  misc_feature (1)..(195): Homolog of NCBI NO: 30681910 NR Description: serine carboxypeptidase -related [Arabidopsis
  misc_feature (1)..(195): Homolog of NCBI NO: 15219433 NR Description: putative serine carboxypeptidase; protein id:
  misc_feature (1)..(195): Homolog of NCBI NO: 18400137 NR Description: putative serine carboxypeptidase I; protein id:
  misc_feature (1)..(195): Homolog of NCBI NO: 15227772 NR Description: putative serine carboxypeptidase I
  misc_feature (1)..(195): Homolog of NCBI NO: 15227773 NR Description: putative serine carboxypeptidase I; protein id:
  misc_feature (1)..(195): Homolog of NCBI NO: 15228300 NR Description: putative glucose acyltransferase; protein id:
  misc_feature (1)..(195): Homolog of NCBI NO: 15227765 NR Description: putative serine carboxypeptidase I; protein id:
  misc_feature (1)..(195): Homolog of NCBI NO: 15227769 NR Description: putative serine carboxypeptidase II
  misc_feature (1)..(171): Homolog of NCBI NO: 24417488 NR Description: unknown [Arabidopsis thaliana]
MERICKGNYVKVDSLNTKCYKLIKDYQKCIHKLNKYHILLPDCDITSPDCFLYRYTLITFWANNKSVREALQVNKGSIGKWVQCNYKNISYNYDIKSSVAYHMKNSIDGYRSLIYNGDHDMMVPFLATQAWIRSLNYSITDDWKPWMINDQIAGYTRSYSNKMTFATIKGSGHTAEYKPKETSIMFKRWISAQPL

SEQ ID NO: 29012 - DNA, 881 bp, Arabidopsis thaliana
  misc_feature (1)..(881): Ceres Seq. ID no. 12334398
  misc_feature: MA Experiment ID: 108434 Result: Up-regulated in Transcription
  misc_feature: MA Experiment 108434 PARAMETER Experiment Name: At_Root_Tips_cDNA_P Parameter: Tissue Value: Root Tips
  misc_feature: MA Experiment ID: 108462 Result: Down-regulated in Transcription
  misc_feature: MA Experiment 108462 PARAMETER Experiment Name: At_Germinating_Seeds_cDNA_P Parameter: Age (day) Value: 2 vs. 0
  misc_feature: MA Experiment 108462 PARAMETER Experiment Name: At_Germinating_Seeds_cDNA_P Parameter: Tissue Value: Germinating Seeds
  misc_feature: MA Experiment ID: 108463 Result: Down-regulated in Transcription
  misc_feature: MA Experiment 108463 PARAMETER Experiment Name: At_Germinating_Seeds_cDNA_P Parameter: Age (day) Value: 3 vs. 0
  misc_feature: MA Experiment 108463 PARAMETER Experiment Name: At_Germinating_Seeds_cDNA_P Parameter: Tissue Value: Germinating Seeds
  misc_feature: MA Experiment ID: 108464 Result: Down-regulated in Transcription
  misc_feature: MA Experiment 108464 PARAMETER Experiment Name: At_Germinating_Seeds_cDNA_P Parameter: Age (day) Value: 4 vs. 0
  misc_feature: MA Experiment 108464 PARAMETER Experiment Name: At_Germinating_Seeds_cDNA_P Parameter: Tissue Value: Germinating Seeds
  misc_feature: MA Experiment ID: 108573 Result: Down-regulated in Transcription
  misc_feature: MA Experiment 108573 PARAMETER Experiment Name: At_Drought_cDNA_P Parameter: Timepoint (hr) Value: 6
  misc_feature: MA Experiment 108573 PARAMETER Experiment Name: At_Drought_cDNA_P Parameter: Tissue Value: Aerial
  misc_feature: MA Experiment 108573 PARAMETER Experiment Name: At_Drought_cDNA_P Parameter: Treatment Value: Drought vs. No Drought
  misc_feature: MA Experiment ID: 20000113 Result: Up-regulated in Transcription
  misc_feature: MA Experiment 20000113 PARAMETER Experiment Name: At_42deg_Heat_cDNA_P Parameter: Temperature (deg C) Value: 42 vs. 22
  misc_feature: MA Experiment 20000113 PARAMETER Experiment Name: At_42deg_Heat_cDNA_P Parameter: Timepoint (hr) Value: 8
  misc_feature: MA Experiment 20000113 PARAMETER Experiment Name: At_42deg_Heat_cDNA_P Parameter: Tissue Value: Aerial
  misc_feature: MA Experiment ID: 20000234 Result: Up-regulated in Transcription
  misc_feature: MA Experiment 20000234 PARAMETER Experiment Name: At_Siliques_P Parameter: Age (day) Value: 21
  misc_feature: MA Experiment 20000234 PARAMETER Experiment Name: At_Siliques_P Parameter: Organism Value: A. thaliana
  misc_feature: MA Experiment 20000234 PARAMETER Experiment Name: At_Siliques_P Parameter: Plant Line Value: WS
  misc_feature: MA Experiment 20000234 PARAMETER Experiment Name: At_Siliques_P Parameter: Tissue Value: Less Than 5mm Siliques vs. Whole Plant
  misc_feature: MA Experiment ID: 20000794 Result: Down-regulated in Transcription
  misc_feature: MA Experiment 20000794 PARAMETER Experiment Name: At_Petals_P Parameter: Age (day) Value: 23-25 days
  misc_feature: MA Experiment 20000794 PARAMETER Experiment Name: At_Petals_P Parameter: Plant Line Value: WS
  misc_feature: MA Experiment 20000794 PARAMETER Experiment Name: At_Petals_P Parameter: Tissue Value: Petals vs. Whole plant
  misc_feature: MA Experiment ID: 20001556 Result: Up-regulated in Transcription
  misc_feature: MA Experiment 20001556 PARAMETER Experiment Name: At_Drought_Soil_Dry_P Parameter: Age (day) Value: 26
  misc_feature: MA Experiment 20001556 PARAMETER Experiment Name: At_Drought_Soil_Dry_P Parameter: Organism Value: A. thaliana
  misc_feature: MA Experiment 20001556 PARAMETER Experiment Name: At_Drought_Soil_Dry_P Parameter: Plant Line Value: WS
  misc_feature: MA Experiment 20001556 PARAMETER Experiment Name: At_Drought_Soil_Dry_P Parameter: Post Timepoint (hr) Value: None
  misc_feature: MA Experiment 20001556 PARAMETER Experiment Name: At_Drought_Soil_Dry_P Parameter: Post-Treatment Value: None
  misc_feature: MA Experiment 20001556 PARAMETER Experiment Name: At_Drought_Soil_Dry_P Parameter: Timepoint (day) Value: 12
  misc_feature: MA Experiment 20001556 PARAMETER Experiment Name: At_Drought_Soil_Dry_P Parameter: Treatment Value: Drought vs. No Drought
  misc_feature: MA Experiment ID: 20001558 Result: Up-regulated in Transcription
  misc_feature: MA Experiment 20001558 PARAMETER Experiment Name: At_Drought_Soil_Dry_P Parameter: Age (day) Value: 27
  misc_feature: MA Experiment 20001558 PARAMETER Experiment Name: At_Drought_Soil_Dry_P Parameter: Organism Value: A. thaliana
  misc_feature: MA Experiment 20001558 PARAMETER Experiment Name: At_Drought_Soil_Dry_P Parameter: Plant Line Value: WS
  misc_feature: MA Experiment 20001558 PARAMETER Experiment Name: At_Drought_Soil_Dry_P Parameter: Post Timepoint (hr) Value: 6
  misc_feature: MA Experiment 20001558 PARAMETER Experiment Name: At_Drought_Soil_Dry_P Parameter: Post-Treatment Value: Re-Water vs. No Drought
  misc_feature: MA Experiment 20001558 PARAMETER Experiment Name: At_Drought_Soil_Dry_P Parameter: Timepoint (day) Value: 13
  misc_feature: MA Experiment 20001558 PARAMETER Experiment Name: At_Drought_Soil_Dry_P Parameter: Treatment Value: Drought vs. No Drought
  misc_feature: MA Experiment ID: 20001560 Result: Up-regulated in Transcription
  misc_feature: MA Experiment 20001560 PARAMETER Experiment Name: At_Drought_Soil_Dry_P Parameter: Age (day) Value: 28
  misc_feature: MA Experiment 20001560 PARAMETER Experiment Name: At_Drought_Soil_Dry_P Parameter: Organism Value: A. thaliana
  misc_feature: MA Experiment 20001560 PARAMETER Experiment Name: At_Drought_Soil_Dry_P Parameter: Plant Line Value: WS
  misc_feature: MA Experiment 20001560 PARAMETER Experiment Name: At_Drought_Soil_Dry_P Parameter: Post Timepoint (hr) Value: None
  misc_feature: MA Experiment 20001560 PARAMETER Experiment Name: At_Drought_Soil_Dry_P Parameter: Post-Treatment Value: None
  misc_feature: MA Experiment 20001560 PARAMETER Experiment Name: At_Drought_Soil_Dry_P Parameter: Timepoint (day) Value: 14
  misc_feature: MA Experiment 20001560 PARAMETER Experiment Name: At_Drought_Soil_Dry_P Parameter: Treatment Value: Drought vs. No Drought
  misc_feature: MA Experiment ID: 20001757 Result: Up-regulated in Transcription
  misc_feature: MA Experiment 20001757 PARAMETER Experiment Name: At_50mM_NH4NO3_L-to-H_P Parameter: Timepoint (hr) Value: 6
  misc_feature: MA Experiment 20001757 PARAMETER Experiment Name: At_50mM_NH4NO3_L-to-H_P Parameter: Tissue Value: Leaf
  misc_feature: MA Experiment 20001757 PARAMETER Experiment Name: At_50mM_NH4NO3_L-to-H_P Parameter: Treatment Value: 50mM NH4NO3 vs 100mM Mannitol
tctcgcagacgcagccatgggtatcgatcttatcgcaggaggtaagagtaagaagaccaaaaggactgctcctaagtccgatgatgtctacctaaagcttctcgtcaagctttaccggtttttggtgaggagatctaacagcaacttcaatgctgtgattctgaaaaggcttttcatgagcaaagtcaacaaagctcctctttcactctctaggcttgtagagttcatgactggcaaggatgacaagattgctgtgttggttggaactatcactgatgatttgagagttcatgagattcctgccatgaaggttactgccttgaggtttactgagagggctagggctagaattgagaaagctggtggagagtgcttaacctttgaccagcttgctctcagagctccattgggacagaacacagttcttcttagaggaccaaagaactcgcgtgaagcagtgaagcatttcggacctgctcctggtgtgccacacagtaacactaagccatatgttaggcataagggaaggaagtttgagaaagctagaggaaagcgaaagagtcgtggattcaaggtctaagaagatgttttctggtttcgttttgcttggtttaagtatcgaagttttggtagggaacgctggttcctctttaccctgttccagactttgttttaagttctgtttttctattctcaagacaattggatattttgctttgtcttttaatcttactactattagctgcaatgagattttatctagaatttggatttgatcagtatttggagttcatagtatcattatggtctatttcgttttgtatttctcttccttggaaataaaatatctgtacatgagtattaaaatgtgtaaacaaccc

SEQ ID NO: 29013 - protein, 192 aa, Arabidopsis thaliana
  peptide (1)..(192): Ceres Seq. ID no. 12334399
  misc_feature (6)..(191): Homolog of NCBI NO: 32450084 NR Description: Unknown (protein for MGC:64299) [Xenopus laevis]
  misc_feature (6)..(191): Homolog of NCBI NO: 28630356 NR Description: ribosomal protein L18 [Petromyzon marinus]
  misc_feature (6)..(168): Homolog of NCBI NO: 28798549 NR Description: 60S ribosomal protein [Medicago sativa]
  misc_feature (7)..(192): Homolog of NCBI NO: 7440855 NR Description: ribosomal protein L18, cytosolic - Arabidopsis
  misc_feature (9)..(192): Homolog of NCBI NO: 6094021 NR Description: 60S RIBOSOMAL PROTEIN L18
  misc_feature (6)..(192): Homolog of NCBI NO: 34393858 NR Description: putative cytoplasmic ribosomal protein L18
  misc_feature (6)..(192): Homolog of NCBI NO: 34897628 NR Description: cytoplasmic ribosomal protein L18 [Oryza sativa]
  misc_feature (6)..(192): Homolog of NCBI NO: 606970 NR Description: cytoplasmic ribosomal protein L18
  misc_feature (6)..(192): Homolog of NCBI NO: 15230011 NR Description: putative 60S ribosomal protein L18
  misc_feature (6)..(192): Homolog of NCBI NO: 15241061 NR Description: 60S ribosomal protein - like
LADAAMGIDLIAGGKSKKTKRTAPKSDDVYLKLLVKLYRFLVRRSNSNFNAVILKRLFMSKVNKAPLSLSRLVEFMTGKDDKIAVLVGTITDDLRVHEIPAMKVTALRFTERARARIEKAGGECLTFDQLALRAPLGQNTVLLRGPKNSREAVKHFGPAPGVPHSNTKPYVRHKGRKFEKARGKRKSRGFKV

SEQ ID NO: 29014 - protein, 187 aa, Arabidopsis thaliana [sequence omitted]

SEQ ID NO: 29015 - protein, 134 aa, Arabidopsis thaliana
  peptide (1)..(134): Ceres Seq. ID no. 12334401
  misc_feature (1)..(133): Homolog of NCBI NO: 32450084 NR Description: Unknown (protein for MGC:64299) [Xenopus laevis]
  misc_feature (1)..(133): Homolog of NCBI NO: 28630356 NR Description: ribosomal protein L18 [Petromyzon marinus]
  misc_feature (1)..(110): Homolog of NCBI NO: 28798549 NR Description: 60S ribosomal protein [Medicago sativa]
  misc_feature (1)..(134): Homolog of NCBI NO: 7440855 NR Description: ribosomal protein L18, cytosolic - Arabidopsis
  misc_feature (1)..(134): Homolog of NCBI NO: 6094021 NR Description: 60S RIBOSOMAL PROTEIN L18
  misc_feature (1)..(134): Homolog of NCBI NO: 34393858 NR Description: putative cytoplasmic ribosomal protein L18
  misc_feature (1)..(134): Homolog of NCBI NO: 34897628 NR Description: cytoplasmic ribosomal protein L18 [Oryza sativa]
  misc_feature (1)..(134): Homolog of NCBI NO: 606970 NR Description: cytoplasmic ribosomal protein L18
  misc_feature (1)..(134): Homolog of NCBI NO: 15230011 NR Description: putative 60S ribosomal protein L18
  misc_feature (1)..(134): Homolog of NCBI NO: 15241061 NR Description: 60S ribosomal protein - like
MSKVNKAPLSLSRLVEFMTGKDDKIAVLVGTITDDLRVHEIPAMKVTALRFTERARARIEKAGGECLTFDQLALRAPLGQNTVLLRGPKNSREAVKHFGPAPGVPHSNTKPYVRHKGRKFEKARGKRKSRGFKV

SEQ ID NO: 29016 - DNA, 1561 bp, Arabidopsis thaliana
  misc_feature (1)..(1561): Ceres Seq. ID no. 12371421
  misc_feature: MA Experiment ID: 108461 Result: Up-regulated in Transcription
  misc_feature: MA Experiment 108461 PARAMETER Experiment Name: At_Germinating_Seeds_cDNA_P Parameter: Age (day) Value: 1 vs. 0
  misc_feature: MA Experiment 108461 PARAMETER Experiment Name: At_Germinating_Seeds_cDNA_P Parameter: Tissue Value: Germinating Seeds
  misc_feature: MA Experiment ID: 108464 Result: Up-regulated in Transcription
  misc_feature: MA Experiment 108464 PARAMETER Experiment Name: At_Germinating_Seeds_cDNA_P Parameter: Age (day) Value: 4 vs. 0
  misc_feature: MA Experiment 108464 PARAMETER Experiment Name: At_Germinating_Seeds_cDNA_P Parameter: Tissue Value: Germinating Seeds
  misc_feature: MA Experiment ID: 108594 Result: Up-regulated in Transcription
  misc_feature: MA Experiment 108594 PARAMETER Experiment Name: At_Ler-rhl_Root_cDNA_P Parameter: Plant Line Value: null
  misc_feature: MA Experiment ID: 20000180 Result: Up-regulated in Transcription
  misc_feature: MA Experiment 20000180 PARAMETER Experiment Name: At_Germinating_Seeds_P Parameter: Age (hr) Value: 24 vs. 0
  misc_feature: MA Experiment 20000180 PARAMETER Experiment Name: At_Germinating_Seeds_P Parameter: Tissue Value: Germinating Seeds
  misc_feature: MA Experiment ID: 20000185 Result: Up-regulated in Transcription
  misc_feature: MA Experiment 20000185 PARAMETER Experiment Name: At_Roots__P Parameter: Age (day) Value: 7 vs. 21
  misc_feature: MA Experiment 20000185 PARAMETER Experiment Name: At_Roots__P Parameter: Organism Value: A. thaliana
  misc_feature: MA Experiment 20000185 PARAMETER Experiment Name: At_Roots__P Parameter: Tissue Value: Roots vs. Whole Plant
  misc_feature: MA Experiment ID: 20000269 Result: Down-regulated in Transcription
  misc_feature: MA Experiment 20000269 PARAMETER Experiment Name: At_1mM_KNO3_L-vs-H_Roots_P Parameter: Age (day) Value: 7,10,12
  misc_feature: MA Experiment 20000269 PARAMETER Experiment Name: At_1mM_KNO3_L-vs-H_Roots_P Parameter: Organism Value: A. thaliana
  misc_feature: MA Experiment 20000269 PARAMETER Experiment Name: At_1mM_KNO3_L-vs-H_Roots_P Parameter: Plant Line Value: WS
  misc_feature: MA Experiment 20000269 PARAMETER Experiment Name: At_1mM_KNO3_L-vs-H_Roots_P Parameter: Timepoint (day) Value: 7,10,12
  misc_feature: MA Experiment 20000269 PARAMETER Experiment Name: At_1mM_KNO3_L-vs-H_Roots_P Parameter: Tissue Value: Roots
  misc_feature: MA Experiment 20000269 PARAMETER Experiment Name: At_1mM_KNO3_L-vs-H_Roots_P Parameter: Treatment Value: 1mM KNO3 vs. 50mM KNO3
  misc_feature: MA Experiment ID: 20000439 Result: Up-regulated in Transcription
  misc_feature: MA Experiment 20000439 PARAMETER Experiment Name: At_Roots__P Parameter: Age (day) Value: 14 vs. 21
  misc_feature: MA Experiment 20000439 PARAMETER Experiment Name: At_Roots__P Parameter: Organism Value: A. thaliana
  misc_feature: MA Experiment 20000439 PARAMETER Experiment Name: At_Roots__P Parameter: Tissue Value: Roots vs. Whole Plant
  misc_feature: MA Experiment ID: 20000495 Result: Down-regulated in Transcription
  misc_feature: MA Experiment 20000495 PARAMETER Experiment Name: At_Guard_Cells_P Parameter: Harvest Date Value: 8/2/2002
  misc_feature: MA Experiment 20000495 PARAMETER Experiment Name: At_Guard_Cells_P Parameter: Organism Value: A. thaliana
  misc_feature: MA Experiment 20000495 PARAMETER Experiment Name: At_Guard_Cells_P Parameter: Tissue Value: Guard Cells vs. Leaves
atctctatctaaaaatcttctttgaatttgtgtatacacaaatcttattcaacgaatcatttatcaccaaaaggttctctcttttttgtttgtttctgtcttgtgtgaatgactcgtcggtgttcgcattgtagcaacaatgggcacaattcacgcacgtgtccaacgcgtggtggtggcacgtgcggtggaagtggcggaggaggaggaggtggtggtggaggagggtctggttcctcctccgccgtgaagttatttggtgtgaggttaacggatggctcgattattaaaaagagtgcgagtatgggtaatctctcggcattggctgttgcggcggcggcggcaacgcaccaccgtttatctccgtcgtctcctctggcgacgtcaaatcttaatgattcgccgttatcggatcatgcccgatactctaatttgcatcataatgaagggtatttatctgatgatcctgctcatggttctgggtctagtcaccgtcgtggtgagaggaagagaggtgttccttggactgaagaggaacatagactattcttagtcggtcttcagaaactcgggaaaggagattggcgcggtatttcgagaaactatgtaacgtcaagaactcctacacaagtggctagtcatgctcaaaagtattttattcgacatactagttcaagccgcaggaaaagacggtctagcctcttcgacatggttaccgatgagatggtaatcgaatcatcgccaacgcaagaagaccaaaccttaaaccgttcctctccaagcaaggaatctgaaagcaaaagctaccttccttcacttgagctctcactcaataataccacagaatctgaagtggttgtagcaactgcgccaccacaggaagaagctatagaaccatcaaacggtgtttcaccaatgctagtcccgggcggcttctttcctccttgttttccagtcacttacacaatttggctccctgcttcacttcatggaacagagcatgccttaaacgctgacacttcttctcagcagcatcaggtcctaaaaccaaaacctggatttgctaaagaacgtgtgaacatggacgagttggtaggtatgtctcagcttagcataggaatggcgacaagacacgaaaccgaaacttccccttccccgctatctttgagactagagccctcaaggccatcagcgtttcactcgaatggctcggttaatggtgcagatttgagtaaaggcaacagcgcgattcaggctatctaaaaaatctttgttatcgtgttaaagaatgaagaaggaagaccctgaccggattaaaccagaggatgttcctggtttaagacgaaacaaaccaagccataagccattagagagaacaattacttacaaaggaaaaaaaaacagagcaaactgtaacaatagacttaccaaacagtcaaaaacacatttctcagcatcacgtcatacttacataagataagcgtaacttacaattttaccctttcatttcatgtttaaggcaaatcatttattatctagagactaaacaataaagaatgtt

SEQ ID NO: 29017 - protein, 384 aa, Arabidopsis thaliana
  peptide (1)..(384): Ceres Seq. ID no. 12371422
  misc_feature (136)..(183): Pfam Name: Myb-like DNA-binding domain Pfam Description: Myb-like DNA-binding domain
  misc_feature (60)..(206): Homolog of NCBI NO: 15238083 NR Description: Myb-related transcription activator-like
  misc_feature (240)..(384): Homolog of NCBI NO: 15238083 NR Description: Myb-related transcription activator-like
  misc_feature (1)..(22): Homolog of NCBI NO: 1076660 NR Description: D13F(MYBST1) protein - potato
  misc_feature (47)..(384): Homolog of NCBI NO: 1076660 NR Description: D13F(MYBST1) protein - potato
  misc_feature (1)..(22): Homolog of NCBI NO: 7705206 NR Description: MybSt1 [Solanum tuberosum]
  misc_feature (47)..(384): Homolog of NCBI NO: 7705206 NR Description: MybSt1 [Solanum tuberosum]
  misc_feature (1)..(31): Homolog of NCBI NO: 34906364 NR Description: unnamed protein product [Oryza sativa (japonica
  misc_feature (35)..(384): Homolog of NCBI NO: 34906364 NR Description: unnamed protein product [Oryza sativa (japonica
  misc_feature (20)..(384): Homolog of NCBI NO: 2062176 NR Description: Myb-related transcription activator (MybSt1)
  misc_feature (1)..(384): Homolog of NCBI NO: 15228185 NR Description: putative MYB family transcription factor; protein
MTRRCSHCSNNGHNSRTCPTRGGGTCGGSGGGGGGGGGGGSGSSSAVKLFGVRLTDGSIIKKSASMGNLSALAVAAAAATHHRLSPSSPLATSNLNDSPLSDHARYSNLHHNEGYLSDDPAHGSGSSHRRGERKRGVPWTEEEHRLFLVGLQKLGKGDWRGISRNYVTSRTPTQVASHAQKYFIRHTSSSRRKRRSSLFDMVTDEMVIESSPTQEDQTLNRSSPSKESESKSYLPSLELSLNNTTESEVVVATAPPQEEAIEPSNGVSPMLVPGGFFPPCFPVTYTIWLPASLHGTEHALNADTSSQQHQVLKPKPGFAKERVNMDELVGMSQLSIGMATRHETETSPSPLSLRLEPSRPSAFHSNGSVNGADLSKGNSAIQAI

SEQ ID NO: 29018 - protein, 319 aa, Arabidopsis thaliana
  peptide (1)..(319): Ceres Seq. ID no. 12371423
  misc_feature (71)..(118): Pfam Name: Myb-like DNA-binding domain Pfam Description: Myb-like DNA-binding domain
  misc_feature (49)..(301): Homolog of NCBI NO: 28848628 NR Description: ZmMybst1 [Zea mays]
  misc_feature (48)..(301): Homolog of NCBI NO: 37536856 NR Description: putative Myb-related protein
  misc_feature (48)..(301): Homolog of NCBI NO: 24850307 NR Description: transcription factor MYBS3
  misc_feature (1)..(141): Homolog of NCBI NO: 15238083 NR Description: Myb-related transcription activator-like
  misc_feature (175)..(319): Homolog of NCBI NO: 15238083 NR Description: Myb-related transcription activator-like
  misc_feature (1)..(319): Homolog of NCBI NO: 1076660 NR Description: D13F(MYBST1) protein - potato
  misc_feature (1)..(319): Homolog of NCBI NO: 7705206 NR Description: MybSt1 [Solanum tuberosum]
  misc_feature (1)..(319): Homolog of NCBI NO: 34906364 NR Description: unnamed protein product [Oryza sativa (japonica
  misc_feature (1)..(319): Homolog of NCBI NO: 2062176 NR Description: Myb-related transcription activator (MybSt1)
  misc_feature (1)..(319): Homolog of NCBI NO: 15228185 NR Description: putative MYB family transcription factor; protein
MGNLSALAVAAAAATHHRLSPSSPLATSNLNDSPLSDHARYSNLHHNEGYLSDDPAHGSGSSHRRGERKRGVPWTEEEHRLFLVGLQKLGKGDWRGISRNYVTSRTPTQVASHAQKYFIRHTSSSRRKRRSSLFDMVTDEMVIESSPTQEDQTLNRSSPSKESESKSYLPSLELSLNNTTESEVVVATAPPQEEAIEPSNGVSPMLVPGGFFPPCFPVTYTIWLPASLHGTEHALNADTSSQQHQVLKPKPGFAKERVNMDELVGMSQLSIGMATRHETETSPSPLSLRLEPSRPSAFHSNGSVNGADLSKGNSAIQAI

SEQ ID NO: 29019 - DNA, 1219 bp, Arabidopsis thaliana
  misc_feature (1)..(1219): Ceres Seq. ID no. 12334410
  misc_feature: MA Experiment ID: 108595 Result: Down-regulated in Transcription
  misc_feature: MA Experiment 108595 PARAMETER Experiment Name: At_Ler-pi_Ovule_cDNA_P Parameter: Plant Line Value: null
  misc_feature: MA Experiment ID: 20001451 Result: Down-regulated in Transcription
  misc_feature: MA Experiment 20001451 PARAMETER Experiment Name: At_Far-red-induction_P Parameter: Age (day) Value: 7
  misc_feature: MA Experiment 20001451 PARAMETER Experiment Name: At_Far-red-induction_P Parameter: Light Value: Far-red vs. White
  misc_feature: MA Experiment 20001451 PARAMETER Experiment Name: At_Far-red-induction_P Parameter: Organism Value: A. thaliana
  misc_feature: MA Experiment 20001451 PARAMETER Experiment Name: At_Far-red-induction_P Parameter: Plant Line Value: Columbia
  misc_feature: MA Experiment 20001451 PARAMETER Experiment Name: At_Far-red-induction_P Parameter: Timepoint (hr) Value: 24
  misc_feature: MA Experiment 20001451 PARAMETER Experiment Name: At_Far-red-induction_P Parameter: Tissue Value: Whole Plant
atccatcatctcagctcacctttagcttcttcttcttcctcttccgatttcgacgttgtgtttatcttcttcttcataattccgacgaatttcaccagagagaatcaaacccccgaagaatcttaattttctctctgtattatcatcttccaattcaagtgaagaaactcgtacgtggtcgtagtggagatgagttcggctctacctttgaagcttttgttgcctcttacaacaacttcattgctaccttctcctttccgatcggataaccctaacttctatcgccgtcgttcctcttcctctacttcgtgttcttctcaatcccaatcgtttcagcttttctctgttagacgacgccgatccagatcctcctctccctctattcccatgtgctttcctgaacaaacgagagatcaagacgacgtggatagttgggtgaacaaagaggacaatgtgacttgtaggtttgactcagatgaagacaccaccaccaccggactccggattccaacacaagctcaagctatcgttgaaggacctggttcacttgctgtgtcggagctacaacgagtccctgatgtagattatatacaagaactgttggctatacagcaacaaggaccaagaacaattggcttctttggaactagaaatatgggtttcatgcatcaagagctcattcagattcttagctatgctatggttataactaaaaaccatatctacacatcaggtgcagctggaaccaatgcagctgttataagaggtgcacttagagcagagagaccagagcttcttacagttatcttacctcaaagtttgaaaaagcaacctcctgaaagccaggaactactgtcaaaagtacaaaacgtgatagaaaagcctcacaacgaccatttaccgttattagaagccagcaggctatgtaacatggatatcatatcacaagtgcaacaaatcatttgctttgcgtttcatgatagtaagcttctcatggagacatgtcaagaagctaaaaatctccggaagattgttaccctcttctacctggattgagtgattcagtgtttcccacttcaaaaaactcttctttgtcttcttagtgttttgttcatcttcctcttcggagaaagacaagttccattgtaattaggaatcgtcgtttacacatgcacaacctattctttggtctttcatttttttatttgctttatagggc

SEQ ID NO: 29020 - protein, 288 aa, Arabidopsis thaliana
  peptide (1)..(288): Ceres Seq. ID no. 12334411
  misc_feature (156)..(288): Homolog of NCBI NO: 17232156 NR Description: hypothetical protein [Nostoc sp. PCC 7120]
  misc_feature (138)..(288): Homolog of NCBI NO: 37522470 NR Description: hypothetical protein gll2901 [Gloeobacter
  misc_feature (152)..(288): Homolog of NCBI NO: 23043068 NR Description: hypothetical protein [Trichodesmium erythraeum
  misc_feature (121)..(288): Homolog of NCBI NO: 16331173 NR Description: unknown protein [Synechocystis sp. PCC 6803]
  misc_feature (134)..(288): Homolog of NCBI NO: 13812204 NR Description: hypothetical protein [Guillardia theta]
  misc_feature (86)..(224): Homolog of NCBI NO: 34894968 NR Description: B1088D01.6 [Oryza sativa (japonica
  misc_feature (1)..(264): Homolog of NCBI NO: 7486491 NR Description: hypothetical protein At2g43940 [imported] -
  misc_feature (1)..(288): Homolog of NCBI NO: 30689549 NR Description: predicted protein [Arabidopsis thaliana]
  misc_feature (1)..(288): Homolog of NCBI NO: 15232185 NR Description: putative protein
  misc_feature (1)..(288): Homolog of NCBI NO: 21537298 NR Description: unknown [Arabidopsis thaliana]
MSSALPLKLLLPLTTTSLLPSPFRSDNPNFYRRRSSSSTSCSSQSQSFQLFSVRRRRSRSSSPSIPMCFPEQTRDQDDVDSWVNKEDNVTCRFDSDEDTTTTGLRIPTQAQAIVEGPGSLAVSELQRVPDVDYIQELLAIQQQGPRTIGFFGTRNMGFMHQELIQILSYAMVITKNHIYTSGAAGTNAAVIRGALRAERPELLTVILPQSLKKQPPESQELLSKVQNVIEKPHNDHLPLLEASRLCNMDIISQVQQIICFAFHDSKLLMETCQEAKNLRKIVTLFYLD

SEQ ID NO: 29021 - protein, 222 aa, Arabidopsis thaliana
  peptide (1)..(222): Ceres Seq. ID no. 12334412
  misc_feature (90)..(222): Homolog of NCBI NO: 17232156 NR Description: hypothetical protein [Nostoc sp. PCC 7120]
  misc_feature (72)..(222): Homolog of NCBI NO: 37522470 NR Description: hypothetical protein gll2901 [Gloeobacter
  misc_feature (86)..(222): Homolog of NCBI NO: 23043068 NR Description: hypothetical protein [Trichodesmium erythraeum
  misc_feature (55)..(222): Homolog of NCBI NO: 16331173 NR Description: unknown protein [Synechocystis sp. PCC 6803]
  misc_feature (68)..(222): Homolog of NCBI NO: 13812204 NR Description: hypothetical protein [Guillardia theta]
  misc_feature (20)..(158): Homolog of NCBI NO: 34894968 NR Description: B1088D01.6 [Oryza sativa (japonica
  misc_feature (1)..(198): Homolog of NCBI NO: 7486491 NR Description: hypothetical protein At2g43940 [imported] -
  misc_feature (1)..(222): Homolog of NCBI NO: 30689549 NR Description: predicted protein [Arabidopsis thaliana]
  misc_feature (1)..(222): Homolog of NCBI NO: 15232185 NR Description: putative protein
  misc_feature (1)..(222): Homolog of NCBI NO: 21537298 NR Description: unknown [Arabidopsis thaliana]
MCFPEQTRDQDDVDSWVNKEDNVTCRFDSDEDTTTTGLRIPTQAQAIVEGPGSLAVSELQRVPDVDYIQELLAIQQQGPRTIGFFGTRNMGFMHQELIQILSYAMVITKNHIYTSGAAGTNAAVIRGALRAERPELLTVILPQSLKKQPPESQELLSKVQNVIEKPHNDHLPLLEASRLCNMDIISQVQQIICFAFHDSKLLMETCQEAKNLRKIVTLFYLD

SEQ ID NO: 29022 - DNA, 1518 bp, Arabidopsis thaliana
  misc_feature (1)..(1518): Ceres Seq. ID no. 12371601
  misc_feature: MA Experiment ID: 20000030 Result: Down-regulated in Transcription
  misc_feature: MA Experiment 20000030 PARAMETER Experiment Name: At_CS6630_Roots_cDNA_P Parameter: Plant Line Value: CS6630 vs. WS
  misc_feature: MA Experiment 20000030 PARAMETER Experiment Name: At_CS6630_Roots_cDNA_P Parameter: Tissue Value: Roots
  misc_feature: MA Experiment ID: 20000111 Result: Down-regulated in Transcription
  misc_feature: MA Experiment 20000111 PARAMETER Experiment Name: At_42deg_Heat_cDNA_P Parameter: Temperature (deg C) Value: 42 vs. 22
  misc_feature: MA Experiment 20000111 PARAMETER Experiment Name: At_42deg_Heat_cDNA_P Parameter: Timepoint (hr) Value: 6
  misc_feature: MA Experiment 20000111 PARAMETER Experiment Name: At_42deg_Heat_cDNA_P Parameter: Tissue Value: Aerial
  misc_feature: MA Experiment ID: 20000113 Result: Down-regulated in Transcription
  misc_feature: MA Experiment 20000113 PARAMETER Experiment Name: At_42deg_Heat_cDNA_P Parameter: Temperature (deg C) Value: 42 vs. 22
  misc_feature: MA Experiment 20000113 PARAMETER Experiment Name: At_42deg_Heat_cDNA_P Parameter: Timepoint (hr) Value: 8
  misc_feature: MA Experiment 20000113 PARAMETER Experiment Name: At_42deg_Heat_cDNA_P Parameter: Tissue Value: Aerial
  misc_feature: MA Experiment ID: 20000171 Result: Down-regulated in Transcription
  misc_feature: MA Experiment 20000171 PARAMETER Experiment Name: At_42deg_Heat_P Parameter: Age (day) Value: 14
  misc_feature: MA Experiment 20000171 PARAMETER Experiment Name: At_42deg_Heat_P Parameter: Organism Value: A. thaliana
  misc_feature: MA Experiment 20000171 PARAMETER Experiment Name: At_42deg_Heat_P Parameter: Plant Line Value: WS
  misc_feature: MA Experiment 20000171 PARAMETER Experiment Name: At_42deg_Heat_P Parameter: Temperature (deg C) Value: 42 vs. 22
  misc_feature: MA Experiment 20000171 PARAMETER Experiment Name: At_42deg_Heat_P Parameter: Timepoint (hr) Value: 1
  misc_feature: MA Experiment 20000171 PARAMETER Experiment Name: At_42deg_Heat_P Parameter: Tissue Value: Aerial
  misc_feature: MA Experiment ID: 20000173 Result: Down-regulated in Transcription
  misc_feature: MA Experiment 20000173 PARAMETER Experiment Name: At_42deg_Heat_P Parameter: Age (day) Value: 14
  misc_feature: MA Experiment 20000173 PARAMETER Experiment Name: At_42deg_Heat_P Parameter: Organism Value: A. thaliana
  misc_feature: MA Experiment 20000173 PARAMETER Experiment Name: At_42deg_Heat_P Parameter: Plant Line Value: WS
  misc_feature: MA Experiment 20000173 PARAMETER Experiment Name: At_42deg_Heat_P Parameter: Temperature (deg C) Value: 42 vs. 22
  misc_feature: MA Experiment 20000173 PARAMETER Experiment Name: At_42deg_Heat_P Parameter: Timepoint (hr) Value: 6
  misc_feature: MA Experiment 20000173 PARAMETER Experiment Name: At_42deg_Heat_P Parameter: Tissue Value: Aerial
  misc_feature: MA Experiment ID: 20000224 Result: Down-regulated in Transcription
atcagaaaccttcttaaagtttggtctgaaaatcagatcgagatgcgttcgttaaagttactcctttgttggatctcgtttcttacgttatcaatctcaatctctgcatcgtcagatgatcaattcaccctcgacggaacagttttagaactcaccgattcgaatttcgactcggcgatttcaactttcgattgcatctttgttgatttctatgctccttggtgtggtcactgcaagcgtctcaatcccgagttagacgcagctgctccaattcttgctaaattgaagcagcctattgtgattgcaaagctgaatgctgataagtattctcgtctcgctcggaagattgagattgatgcatttccgactctcatgctttataaccatggagttccaatggagtactatggaccaaggaaagcagatttgcttgtgcgttacttgaagaagtttgttgctccagatgttgcggttcttgagtcagactcaactgtcaaggagtttgttgaagatgctgggacattcttccctgtgtttatcgggtttggtttgaacgaatcgataatatcaggattaggtcggaagtataagaagaaggcatggtttgctgtttcaaaggaagtttcagaggatactatggtttcttatgattttgataaggctcctgcattagttgccaatcatccaacttacaatgagcatagcgtgttttacgggccattcgaagatggattcttggaggaatttgtgaaacagagttttcttcctttgattctacctattaaccatgacacattgaagttgttgaaggacgatgagagaaagattgtcttgacgatcgtggaagatgaaacacacgaaagcttggagaaactatacaaagcattgagagcagctgctcatgcgaaccgcgacctcgtttttggctacgtcggtgtgaagcagtttgaagagtttgttgactcgtttcatgtagacaagaagacaaatctgcctaagattgttgtgtgggatggagatgaagagtatgatcaggtgacgggtatagagaccataacccaagaggaagatcatttgacccaagtgtctcggtttctagagggctatagagaaggaagaacagagaagaagaaaatcaacggaccatcgttcatgggatttatcaactcaatgattgggattaggtcagtgtacatccttgtgttcttggttgcggtcattatgatgctacggagcctcggtcaagttgaggagcctactggagtccggaccgccacagcagtccgtgaaagagttgatcaggccactactgtccctgaagatgaaagcagtgagcataagcctagtgacaaaaaagaggactagttttgttacacttgaatgtggtatgttttttttcttcttttatacttgaagctaacttatatagttcatgcttatttatcttctttatggttagtctttttgggttttaaacggatggttgttccattttatttatgaatcattttggctctc

SEQ ID NO: 29023 - protein, 454 aa, Arabidopsis thaliana
  peptide (1)..(454): Ceres Seq. ID no. 12371602
  misc_feature (35)..(373): Homolog of NCBI NO: 12056117 NR Description: protein disulfide isomerase [Triticum turgidum
  misc_feature (18)..(318): Homolog of NCBI NO: 17647799 NR Description: Protein disulfide isomerase CG6988-PA
  misc_feature (7)..(368): Homolog of NCBI NO: 31239469 NR Description: ENSANGP00000011666 [Anopheles gambiae]
  misc_feature (25)..(382): Homolog of NCBI NO: 11133775 NR Description: Protein disulfide isomerase precursor (PDI)
  misc_feature (18)..(318): Homolog of NCBI NO: 27819775 NR Description: RH09122p [Drosophila melanogaster]
  misc_feature (26)..(382): Homolog of NCBI NO: 15219086 NR Description: putative protein disulfide isomerase precursor
  misc_feature (26)..(382): Homolog of NCBI NO: 30687521 NR Description: protein disulfide isomerase, putative
  misc_feature (18)..(419): Homolog of NCBI NO: 38344940 NR Description: OSJNBa0084A10.16 [Oryza sativa (japonica
  misc_feature (15)..(443): Homolog of NCBI NO: 8778373 NR Description: F15O4.20 [Arabidopsis thaliana]
  misc_feature (15)..(454): Homolog of NCBI NO: 18399786 NR Description: protein disulfide isomerase, putative
  misc_feature (35)..(373): Homolog of NCBI NO: 12056117 NR Description: protein disulfide isomerase [Triticum turgidum
  misc_feature (18)..(318): Homolog of NCBI NO: 17647799 NR Description: Protein disulfide isomerase CG6988-PA
  misc_feature (7)..(368): Homolog of NCBI NO: 31239469 NR Description: ENSANGP00000011666 [Anopheles gambiae]
  misc_feature (25)..(382): Homolog of NCBI NO: 11133775 NR Description: Protein disulfide isomerase precursor (PDI)
  misc_feature (18)..(318): Homolog of NCBI NO: 27819775 NR Description: RH09122p [Drosophila melanogaster]
  misc_feature (26)..(382): Homolog of NCBI NO: 15219086 NR Description: putative protein disulfide isomerase precursor
  misc_feature (26)..(382): Homolog of NCBI NO: 30687521 NR Description: protein disulfide isomerase, putative
  misc_feature (18)..(419): Homolog of NCBI NO: 38344940 NR Description: OSJNBa0084A10.16 [Oryza sativa (japonica
  misc_feature (15)..(443): Homolog of NCBI NO: 8778373 NR Description: F15O4.20 [Arabidopsis thaliana]
  misc_feature (15)..(454): Homolog of NCBI NO: 18399786 NR Description: protein disulfide isomerase, putative
IRNLLKVWSENQIEMRSLKLLLCWISFLTLSISISASSDDQFTLDGTVLELTDSNFDSAISTFDCIFVDFYAPWCGHCKRLNPELDAAAPILAKLKQPIVIAKLNADKYSRLARKIEIDAFPTLMLYNHGVPMEYYGPRKADLLVRYLKKFVAPDVAVLESDSTVKEFVEDAGTFFPVFIGFGLNESIISGLGRKYKKKAWFAVSKEVSEDTMVSYDFDKAPALVANHPTYNEHSVFYGPFEDGFLEEFVKQSFLPLILPINHDTLKLLKDDERKIVLTIVEDETHESLEKLYKALRAAAHANRDLVFGYVGVKQFEEFVDSFHVDKKTNLPKIVVWDGDEEYDQVTGIETITQEEDHLTQVSRFLEGYREGRTEKKKINGPSFMGFINSMIGIRSVYILVFLVAVIMMLRSLGQVEEPTGVRTATAVRERVDQATTVPEDESSEHKPSDKKED

SEQ ID NO: 29024 - protein, 440 aa, Arabidopsis thaliana
  peptide (1)..(440): Ceres Seq. ID no. 12371603
  misc_feature (21)..(359): Homolog of NCBI NO: 12056117 NR Description: protein disulfide isomerase [Triticum turgidum
  misc_feature (4)..(304): Homolog of NCBI NO: 17647799 NR Description: Protein disulfide isomerase CG6988-PA
  misc_feature (1)..(354): Homolog of NCBI NO: 31239469 NR Description: ENSANGP00000011666 [Anopheles gambiae]
  misc_feature (11)..(368): Homolog of NCBI NO: 11133775 NR Description: Protein disulfide isomerase precursor (PDI)
  misc_feature (4)..(304): Homolog of NCBI NO: 27819775 NR Description: RH09122p [Drosophila melanogaster]
  misc_feature (12)..(368): Homolog of NCBI NO: 15219086 NR Description: putative protein disulfide isomerase precursor
  misc_feature (12)..(368): Homolog of NCBI NO: 30687521 NR Description: protein disulfide isomerase, putative
  misc_feature (4)..(405): Homolog of NCBI NO: 38344940 NR Description: OSJNBa0084A10.16 [Oryza sativa (japonica
  misc_feature (1)..(429): Homolog of NCBI NO: 8778373 NR Description: F15O4.20 [Arabidopsis thaliana]
  misc_feature (1)..(440): Homolog of NCBI NO: 18399786 NR Description: protein disulfide isomerase, putative
  misc_feature (21)..(359): Homolog of NCBI NO: 12056117 NR Description: protein disulfide isomerase [Triticum turgidum
  misc_feature (4)..(304): Homolog of NCBI NO: 17647799 NR Description: Protein disulfide isomerase CG6988-PA
  misc_feature (1)..(354): Homolog of NCBI NO: 31239469 NR Description: ENSANGP00000011666 [Anopheles gambiae]
  misc_feature (11)..(368): Homolog of NCBI NO: 11133775 NR Description: Protein disulfide isomerase precursor (PDI)
  misc_feature (4)..(304): Homolog of NCBI NO: 27819775 NR Description: RH09122p [Drosophila melanogaster]
  misc_feature (12)..(368): Homolog of NCBI NO: 15219086 NR Description: putative protein disulfide isomerase precursor
  misc_feature (12)..(368): Homolog of NCBI NO: 30687521 NR Description: protein disulfide isomerase, putative
  misc_feature (4)..(405): Homolog of NCBI NO: 38344940 NR Description: OSJNBa0084A10.16 [Oryza sativa (japonica
  misc_feature (1)..(429): Homolog of NCBI NO: 8778373 NR Description: F15O4.20 [Arabidopsis thaliana]
  misc_feature (1)..(440): Homolog of NCBI NO: 18399786 NR Description: protein disulfide isomerase, putative
MRSLKLLLCWISFLTLSISISASSDDQFTLDGTVLELTDSNFDSAISTFDCIFVDFYAPWCGHCKRLNPELDAAAPILAKLKQPIVIAKLNADKYSRLARKIEIDAFPTLMLYNHGVPMEYYGPRKADLLVRYLKKFVAPDVAVLESDSTVKEFVEDAGTFFPVFIGFGLNESIISGLGRKYKKKAWFAVSKEVSEDTMVSYDFDKAPALVANHPTYNEHSVFYGPFEDGFLEEFVKQSFLPLILPINHDTLKLLKDDERKIVLTIVEDETHESLEKLYKALRAAAHANRDLVFGYVGVKQFEEFVDSFHVDKKTNLPKIVVWDGDEEYDQVTGIETITQEEDHLTQVSRFLEGYREGRTEKKKINGPSFMGFINSMIGIRSVYILVFLVAVIMMLRSLGQVEEPTGVRTATAVRERVDQATTVPEDESSEHKPSDKKED

SEQ ID NO: 29025 - protein, 330 aa, Arabidopsis thaliana
  peptide (1)..(330): Ceres Seq. ID no. 12371604
  misc_feature (1)..(249): Homolog of NCBI NO: 12056117 NR Description: protein disulfide isomerase [Triticum turgidum
  misc_feature (1)..(194): Homolog of NCBI NO: 17647799 NR Description: Protein disulfide isomerase CG6988-PA
  misc_feature (1)..(244): Homolog of NCBI NO: 31239469 NR Description: ENSANGP00000011666 [Anopheles gambiae]
  misc_feature (1)..(258): Homolog of NCBI NO: 11133775 NR Description: Protein disulfide isomerase precursor (PDI)
  misc_feature (1)..(194): Homolog of NCBI NO: 27819775 NR Description: RH09122p [Drosophila melanogaster]
  misc_feature (1)..(258): Homolog of NCBI NO: 15219086 NR Description: putative protein disulfide isomerase precursor
  misc_feature (1)..(258): Homolog of NCBI NO: 30687521 NR Description: protein disulfide isomerase, putative
  misc_feature (1)..(295): Homolog of NCBI NO: 38344940 NR Description: OSJNBa0084A10.16 [Oryza sativa (japonica
  misc_feature (1)..(319): Homolog of NCBI NO: 8778373 NR Description: F15O4.20 [Arabidopsis thaliana]
  misc_feature (1)..(330): Homolog of NCBI NO: 18399786 NR Description: protein disulfide isomerase, putative
  misc_feature (1)..(249): Homolog of NCBI NO: 12056117 NR Description: protein disulfide isomerase [Triticum turgidum
  misc_feature (1)..(194): Homolog of NCBI NO: 17647799 NR Description: Protein disulfide isomerase CG6988-PA
  misc_feature (1)..(244): Homolog of NCBI NO: 31239469 NR Description: ENSANGP00000011666 [Anopheles gambiae]
  misc_feature (1)..(258): Homolog of NCBI NO: 11133775 NR Description: Protein disulfide isomerase precursor (PDI)
  misc_feature (1)..(194): Homolog of NCBI NO: 27819775 NR Description: RH09122p [Drosophila melanogaster]
  misc_feature (1)..(258): Homolog of NCBI NO: 15219086 NR Description: putative protein disulfide isomerase precursor
  misc_feature (1)..(258): Homolog of NCBI NO: 30687521 NR Description: protein disulfide isomerase, putative
  misc_feature (1)..(295): Homolog of NCBI NO: 38344940 NR Description: OSJNBa0084A10.16 [Oryza sativa (japonica
  misc_feature (1)..(319): Homolog of NCBI NO: 8778373 NR Description: F15O4.20 [Arabidopsis thaliana]
  misc_feature (1)..(330): Homolog of NCBI NO: 18399786 NR Description: protein disulfide isomerase, putative
MLYNHGVPMEYYGPRKADLLVRYLKKFVAPDVAVLESDSTVKEFVEDAGTFFPVFIGFGLNESIISGLGRKYKKKAWFAVSKEVSEDTMVSYDFDKAPALVANHPTYNEHSVFYGPFEDGFLEEFVKQSFLPLILPINHDTLKLLKDDERKIVLTIVEDETHESLEKLYKALRAAAHANRDLVFGYVGVKQFEEFVDSFHVDKKTNLPKIVVWDGDEEYDQVTGIETITQEEDHLTQVSRFLEGYREGRTEKKKINGPSFMGFINSMIGIRSVYILVFLVAVIMMLRSLGQVEEPTGVRTATAVRERVDQATTVPEDESSEHKPSDKKED

SEQ ID NO: 29026 - DNA, 1429 bp, Arabidopsis thaliana; identical to SEQ ID NO: 26379
  misc_feature (1)..(1429): Ceres Seq. ID no. 13491286
  misc_feature: MA Experiment ID: 108594 Result: Down-regulated in Transcription
  misc_feature: MA Experiment 108594 PARAMETER Experiment Name: At_Ler-rhl_Root_cDNA_P Parameter: Plant Line Value: null
  misc_feature: MA Experiment ID: 108595 Result: Down-regulated in Transcription
  misc_feature: MA Experiment 108595 PARAMETER Experiment Name: At_Ler-pi_Ovule_cDNA_P Parameter: Plant Line Value: null
  misc_feature: MA Experiment ID: 20000180 Result: Up-regulated in Transcription
  misc_feature: MA Experiment 20000180 PARAMETER Experiment Name: At_Germinating_Seeds_P Parameter: Age (hr) Value: 24 vs. 0
  misc_feature: MA Experiment 20000180 PARAMETER Experiment Name: At_Germinating_Seeds_P Parameter: Tissue Value: Germinating Seeds
  misc_feature: MA Experiment ID: 20000185 Result: Down-regulated in Transcription
  misc_feature: MA Experiment 20000185 PARAMETER Experiment Name: At_Roots__P Parameter: Age (day) Value: 7 vs. 21
  misc_feature: MA Experiment 20000185 PARAMETER Experiment Name: At_Roots__P Parameter: Organism Value: A. thaliana
  misc_feature: MA Experiment 20000185 PARAMETER Experiment Name: At_Roots__P Parameter: Tissue Value: Roots vs. Whole Plant
  misc_feature: MA Experiment ID: 20000439 Result: Down-regulated in Transcription
  misc_feature: MA Experiment 20000439 PARAMETER Experiment Name: At_Roots__P Parameter: Age (day) Value: 14 vs. 21
  misc_feature: MA Experiment 20000439 PARAMETER Experiment Name: At_Roots__P Parameter: Organism Value: A. thaliana
  misc_feature: MA Experiment 20000439 PARAMETER Experiment Name: At_Roots__P Parameter: Tissue Value: Roots vs. Whole Plant
  misc_feature: MA Experiment ID: 20000794 Result: Down-regulated in Transcription
  misc_feature: MA Experiment 20000794 PARAMETER Experiment Name: At_Petals_P Parameter: Age (day) Value: 23-25 days
  misc_feature: MA Experiment 20000794 PARAMETER Experiment Name: At_Petals_P Parameter: Plant Line Value: WS
  misc_feature: MA Experiment 20000794 PARAMETER Experiment Name: At_Petals_P Parameter: Tissue Value: Petals vs. Whole plant
  misc_feature: MA Experiment ID: 20001248 Result: Down-regulated in Transcription
  misc_feature: MA Experiment 20001248 PARAMETER Experiment Name: At_Far-red-induction_P Parameter: Age (day) Value: 7
  misc_feature: MA Experiment 20001248 PARAMETER Experiment Name: At_Far-red-induction_P Parameter: Light Value: Far-red vs. White
  misc_feature: MA Experiment 20001248 PARAMETER Experiment Name: At_Far-red-induction_P Parameter: Organism Value: A. thaliana
  misc_feature: MA Experiment 20001248 PARAMETER Experiment Name: At_Far-red-induction_P Parameter: Plant Line Value: Columbia
  misc_feature: MA Experiment 20001248 PARAMETER Experiment Name: At_Far-red-induction_P Parameter: Timepoint (hr) Value: 4
  misc_feature: MA Experiment 20001248 PARAMETER Experiment Name: At_Far-red-induction_P Parameter: Tissue Value: Whole Plant
  misc_feature: MA Experiment ID: 20001450 Result: Down-regulated in Transcription
  misc_feature: MA Experiment 20001450 PARAMETER Experiment Name: At_Far-red-induction_P Parameter: Age (day) Value: 7
  misc_feature: MA Experiment 20001450 PARAMETER Experiment Name: At_Far-red-induction_P Parameter: Light Value: Far-red vs. White
  misc_feature: MA Experiment 20001450 PARAMETER Experiment Name: At_Far-red-induction_P Parameter: Organism Value: A. thaliana
  misc_feature: MA Experiment 20001450 PARAMETER Experiment Name: At_Far-red-induction_P Parameter: Plant Line Value: Columbia
  misc_feature: MA Experiment 20001450 PARAMETER Experiment Name: At_Far-red-induction_P Parameter: Timepoint (hr) Value: 8
  misc_feature: MA Experiment 20001450 PARAMETER Experiment Name: At_Far-red-induction_P Parameter: Tissue Value: Whole Plant
  misc_feature: MA Experiment ID: 20001451 Result: Down-regulated in Transcription
  misc_feature: MA Experiment 20001451 PARAMETER Experiment Name: At_Far-red-induction_P Parameter: Age (day) Value: 7
  misc_feature: MA Experiment 20001451 PARAMETER Experiment Name: At_Far-red-induction_P Parameter: Light Value: Far-red vs. White
  misc_feature: MA Experiment 20001451 PARAMETER Experiment Name: At_Far-red-induction_P Parameter: Organism Value: A. thaliana
  misc_feature: MA Experiment 20001451 PARAMETER Experiment Name: At_Far-red-induction_P Parameter: Plant Line Value: Columbia
  misc_feature: MA Experiment 20001451 PARAMETER Experiment Name: At_Far-red-induction_P Parameter: Timepoint (hr) Value: 24
  misc_feature: MA Experiment 20001451 PARAMETER Experiment Name: At_Far-red-induction_P Parameter: Tissue Value: Whole Plant
  misc_feature: MA Experiment ID: 20001557 Result: Down-regulated in Transcription
  misc_feature: MA Experiment 20001557 PARAMETER Experiment Name: At_Drought_Soil_Dry_P Parameter: Age (day) Value: 27
  misc_feature: MA Experiment 20001557 PARAMETER Experiment Name: At_Drought_Soil_Dry_P Parameter: Organism Value: A. thaliana
  misc_feature: MA Experiment 20001557 PARAMETER Experiment Name: At_Drought_Soil_Dry_P Parameter: Plant Line Value: WS
  misc_feature: MA Experiment 20001557 PARAMETER Experiment Name: At_Drought_Soil_Dry_P Parameter: Post Timepoint (hr) Value: 3
  misc_feature: MA Experiment 20001557 PARAMETER Experiment Name: At_Drought_Soil_Dry_P Parameter: Post-Treatment Value: Re-Water vs. No Drought
  misc_feature: MA Experiment 20001557 PARAMETER Experiment Name: At_Drought_Soil_Dry_P Parameter: Timepoint (day) Value: 13
  misc_feature: MA Experiment 20001557 PARAMETER Experiment Name: At_Drought_Soil_Dry_P Parameter: Treatment Value: Drought vs. No Drought
  misc_feature: MA Experiment ID: 20001904 Result: Down-regulated in Transcription
  misc_feature: MA Experiment 20001904 PARAMETER Experiment Name: At_Drought_Reproduction_P Parameter: Age (day) Value: 37
  misc_feature: MA Experiment 20001904 PARAMETER Experiment Name: At_Drought_Reproduction_P Parameter: Organism Value: A. thaliana
  misc_feature: MA Experiment 20001904 PARAMETER Experiment Name: At_Drought_Reproduction_P Parameter: Plant Line Value: WS
  misc_feature: MA Experiment 20001904 PARAMETER Experiment Name: At_Drought_Reproduction_P Parameter: Timepoint (day) Value: 7
  misc_feature: MA Experiment 20001904 PARAMETER Experiment Name: At_Drought_Reproduction_P Parameter: Tissue Value: Rosettes
  misc_feature: MA Experiment 20001904 PARAMETER Experiment Name: At_Drought_Reproduction_P Parameter: Treatment Value: Drought vs. No Drought
  misc_feature: MA Experiment ID: 20001905 Result: Down-regulated in Transcription
  misc_feature: MA Experiment 20001905 PARAMETER Experiment Name: At_Drought_Reproduction_P Parameter: Age (day) Value: 40
  misc_feature: MA Experiment 20001905 PARAMETER Experiment Name: At_Drought_Reproduction_P Parameter: Organism Value: A. thaliana
  misc_feature: MA Experiment 20001905 PARAMETER Experiment Name: At_Drought_Reproduction_P Parameter: Plant Line Value: WS
  misc_feature: MA Experiment 20001905 PARAMETER Experiment Name: At_Drought_Reproduction_P Parameter: Timepoint (day) Value: 10
  misc_feature: MA Experiment 20001905 PARAMETER Experiment Name: At_Drought_Reproduction_P Parameter: Tissue Value: Rosettes
  misc_feature: MA Experiment 20001905 PARAMETER Experiment Name: At_Drought_Reproduction_P Parameter: Treatment Value: Drought vs. No Drought
  misc_feature: MA Experiment ID: 20001906 Result: Down-regulated in Transcription
  misc_feature: MA Experiment 20001906 PARAMETER Experiment Name: At_Drought_Reproduction_P Parameter: Age (day) Value: 35
  misc_feature: MA Experiment 20001906 PARAMETER Experiment Name: At_Drought_Reproduction_P Parameter: Organism Value: A. thaliana
  misc_feature: MA Experiment 20001906 PARAMETER Experiment Name: At_Drought_Reproduction_P Parameter: Plant Line Value: WS
  misc_feature: MA Experiment 20001906 PARAMETER Experiment Name: At_Drought_Reproduction_P Parameter: Timepoint (day) Value: 5
  misc_feature: MA Experiment 20001906 PARAMETER Experiment Name: At_Drought_Reproduction_P Parameter: Tissue Value: Siliques
  misc_feature: MA Experiment 20001906 PARAMETER Experiment Name: At_Drought_Reproduction_P Parameter: Treatment Value: Drought vs. No Drought
  misc_feature: MA Experiment ID: 20001908 Result: Down-regulated in Transcription
  misc_feature: MA Experiment 20001908 PARAMETER Experiment Name: At_Drought_Reproduction_P Parameter: Age (day) Value: 40
  misc_feature: MA Experiment 20001908 PARAMETER Experiment Name: At_Drought_Reproduction_P Parameter: Organism Value: A. thaliana
  misc_feature: MA Experiment 20001908 PARAMETER Experiment Name: At_Drought_Reproduction_P Parameter: Plant Line Value: WS
  misc_feature: MA Experiment 20001908 PARAMETER Experiment Name: At_Drought_Reproduction_P Parameter: Timepoint (day) Value: 10
  misc_feature: MA Experiment 20001908 PARAMETER Experiment Name: At_Drought_Reproduction_P Parameter: Tissue Value: Siliques
  misc_feature: MA Experiment 20001908 PARAMETER Experiment Name: At_Drought_Reproduction_P Parameter: Treatment Value: Drought vs. No Drought
  misc_feature: MA Experiment ID: 20001911 Result: Down-regulated in Transcription
  misc_feature: MA Experiment 20001911 PARAMETER Experiment Name: At_Drought_Reproduction_P Parameter: Age (day) Value: 40
  misc_feature: MA Experiment 20001911 PARAMETER Experiment Name: At_Drought_Reproduction_P Parameter: Organism Value: A. thaliana
  misc_feature: MA Experiment 20001911 PARAMETER Experiment Name: At_Drought_Reproduction_P Parameter: Plant Line Value: WS
  misc_feature: MA Experiment 20001911 PARAMETER Experiment Name: At_Drought_Reproduction_P Parameter: Timepoint (day) Value: 10
  misc_feature: MA Experiment 20001911 PARAMETER Experiment Name: At_Drought_Reproduction_P Parameter: Tissue Value: Flowers
  misc_feature: MA Experiment 20001911 PARAMETER Experiment Name: At_Drought_Reproduction_P Parameter: Treatment Value: Drought vs. No Drought

SEQ ID NO: 29027 - protein, 379 aa, Arabidopsis thaliana; identical to SEQ ID NO: 26380
  peptide (1)..(379): Ceres Seq. ID no. 13491287
  misc_feature (96)..(345): Pfam Name: haloacid dehalogenase-like hydrolase Pfam Description: haloacid dehalogenase-like hydrolase
  misc_feature (96)..(345): Pfam Name: haloacid dehalogenase-like hydrolase Pfam Description: haloacid dehalogenase-like hydrolase
  misc_feature (81)..(372): Homolog of NCBI NO: 15238800 NR Description: phosphoglycolate phosphatase, putative
  misc_feature (81)..(372): Homolog of NCBI NO: 10177912 NR Description: 4-nitrophenylphosphatase-like protein
  misc_feature (81)..(372): Homolog of NCBI NO: 21593203 NR Description: 4-nitrophenylphosphatase-like protein
  misc_feature (67)..(375): Homolog of NCBI NO: 15982558 NR Description: phosphoglycolate phosphatase precursor
  misc_feature (80)..(379): Homolog of NCBI NO: 38345235 NR Description: OSJNBa0084K20.14 [Oryza sativa (japonica
  misc_feature (81)..(372): Homolog of NCBI NO: 15238800 NR Description: phosphoglycolate phosphatase, putative
  misc_feature (81)..(372): Homolog of NCBI NO: 21593203 NR Description: 4-nitrophenylphosphatase-like protein
  misc_feature (80)..(379): Homolog of NCBI NO: 38345235 NR Description: OSJNBa0084K20.14 [Oryza sativa (japonica
  misc_feature (18)..(349): Homolog of NCBI NO: 8953699 NR Description: 4-nitrophenylphosphatase-like [Arabidopsis
  misc_feature (18)..(379): Homolog of NCBI NO: 15239406 NR Description: phosphoglycolate phosphatase, putative
  misc_feature (71)..(379): Homolog of NCBI NO: 26450878 NR Description: putative p-nitrophenylphosphatase [Arabidopsis
  misc_feature (202)..(379): Homolog of NCBI NO: 8885622 NR Description: N-glyceraldehyde-2-phosphotransferase-like
  misc_feature (71)..(206): Homolog of NCBI NO: 8885622 NR Description: N-glyceraldehyde-2-phosphotransferase-like
  misc_feature (67)..(375): Homolog of NCBI NO: 15982558 NR Description: phosphoglycolate phosphatase precursor
  misc_feature (81)..(372): Homolog of NCBI NO: 10177912 NR Description: 4-nitrophenylphosphatase-like protein
  misc_feature (71)..(206): Homolog of NCBI NO: 8885622 NR Description: N-glyceraldehyde-2-phosphotransferase-like
  misc_feature (202)..(379): Homolog of NCBI NO: 8885622 NR Description: N-glyceraldehyde-2-phosphotransferase-like
  misc_feature (71)..(379): Homolog of NCBI NO: 26450878 NR Description: putative p-nitrophenylphosphatase [Arabidopsis
  misc_feature (18)..(379): Homolog of NCBI NO: 15239406 NR Description: phosphoglycolate phosphatase, putative
  misc_feature (18)..(349): Homolog of NCBI NO: 8953699 NR Description: 4-nitrophenylphosphatase-like [Arabidopsis

SEQ ID NO: 29028 - protein, 362 aa, Arabidopsis thaliana; identical to SEQ ID NO: 26381
  peptide (1)..(362): Ceres Seq. ID no. 13491288
  misc_feature (79)..(328): Pfam Name: haloacid dehalogenase-like hydrolase Pfam Description: haloacid dehalogenase-like hydrolase
  misc_feature (79)..(328): Pfam Name: haloacid dehalogenase-like hydrolase Pfam Description: haloacid dehalogenase-like hydrolase
  misc_feature (64)..(355): Homolog of NCBI NO: 15238800 NR Description: phosphoglycolate phosphatase, putative
  misc_feature (64)..(355): Homolog of NCBI NO: 10177912 NR Description: 4-nitrophenylphosphatase-like protein
  misc_feature (64)..(355): Homolog of NCBI NO: 21593203 NR Description: 4-nitrophenylphosphatase-like protein
  misc_feature (50)..(358): Homolog of NCBI NO: 15982558 NR Description: phosphoglycolate phosphatase precursor
  misc_feature (63)..(362): Homolog of NCBI NO: 38345235 NR Description: OSJNBa0084K20.14 [Oryza sativa (japonica
  misc_feature (64)..(355): Homolog of NCBI NO: 15238800 NR Description: phosphoglycolate phosphatase, putative
  misc_feature (64)..(355): Homolog of NCBI NO: 21593203 NR Description: 4-nitrophenylphosphatase-like protein
  misc_feature (63)..(362): Homolog of NCBI NO: 38345235 NR Description: OSJNBa0084K20.14 [Oryza sativa (japonica
  misc_feature (1)..(332): Homolog of NCBI NO: 8953699 NR Description: 4-nitrophenylphosphatase-like [Arabidopsis
  misc_feature (1)..(362): Homolog of NCBI NO: 15239406 NR Description: phosphoglycolate phosphatase, putative
  misc_feature (54)..(362): Homolog of NCBI NO: 26450878 NR Description: putative p-nitrophenylphosphatase [Arabidopsis
  misc_feature (185)..(362): Homolog of NCBI NO: 8885622 NR Description: N-glyceraldehyde-2-phosphotransferase-like
  misc_feature (54)..(189): Homolog of NCBI NO: 8885622 NR Description: N-glyceraldehyde-2-phosphotransferase-like
  misc_feature (50)..(358): Homolog of NCBI NO: 15982558 NR Description: phosphoglycolate phosphatase precursor
  misc_feature (64)..(355): Homolog of NCBI NO: 10177912 NR Description: 4-nitrophenylphosphatase-like protein
  misc_feature (54)..(189): Homolog of NCBI NO: 8885622 NR Description: N-glyceraldehyde-2-phosphotransferase-like
  misc_feature (185)..(362): Homolog of NCBI NO: 8885622 NR Description: N-glyceraldehyde-2-phosphotransferase-like
  misc_feature (54)..(362): Homolog of NCBI NO: 26450878 NR Description: putative p-nitrophenylphosphatase [Arabidopsis
  misc_feature (1)..(362): Homolog of NCBI NO: 15239406 NR Description: phosphoglycolate phosphatase, putative
  misc_feature (1)..(332): Homolog of NCBI NO: 8953699 NR Description: 4-nitrophenylphosphatase-like [Arabidopsis

SEQ ID NO: 29029 - protein, 309 aa, Arabidopsis thaliana; identical to SEQ ID NO: 26382
  peptide (1)..(309): Ceres Seq. ID no. 13491289
  misc_feature (26)..(275): Pfam Name: haloacid dehalogenase-like hydrolase Pfam Description: haloacid dehalogenase-like hydrolase
  misc_feature (26)..(275): Pfam Name: haloacid dehalogenase-like hydrolase Pfam Description: haloacid dehalogenase-like hydrolase
  misc_feature (11)..(302): Homolog of NCBI NO: 15238800 NR Description: phosphoglycolate phosphatase, putative
  misc_feature (11)..(302): Homolog of NCBI NO: 10177912 NR Description: 4-nitrophenylphosphatase-like protein
  misc_feature (11)..(302): Homolog of NCBI NO: 21593203 NR Description: 4-nitrophenylphosphatase-like protein
  misc_feature (1)..(305): Homolog of NCBI NO: 15982558 NR Description: phosphoglycolate phosphatase precursor
  misc_feature (10)..(309): Homolog of NCBI NO: 38345235 NR Description: OSJNBa0084K20.14 [Oryza sativa (japonica
  misc_feature (1)..(309): Homolog of NCBI NO: 15239406 NR Description: phosphoglycolate phosphatase, putative
  misc_feature (1)..(309): Homolog of NCBI NO: 26450878 NR Description: putative p-nitrophenylphosphatase [Arabidopsis
  misc_feature (1)..(136): Homolog of NCBI NO: 8885622 NR Description: N-glyceraldehyde-2-phosphotransferase-like
  misc_feature (10)..(309): Homolog of NCBI NO: 38345235 NR Description: OSJNBa0084K20.14 [Oryza sativa (japonica
  misc_feature (1)..(305): Homolog of NCBI NO: 15982558 NR Description: phosphoglycolate phosphatase precursor
  misc_feature (11)..(302): Homolog of NCBI NO: 21593203 NR Description: 4-nitrophenylphosphatase-like protein
  misc_feature (11)..(302): Homolog of NCBI NO: 10177912 NR Description: 4-nitrophenylphosphatase-like protein
  misc_feature (11)..(302): Homolog of NCBI NO: 15238800 NR Description: phosphoglycolate phosphatase, putative
  misc_feature (132)..(309): Homolog of NCBI NO: 8885622 NR Description: N-glyceraldehyde-2-phosphotransferase-like
  misc_feature (1)..(279): Homolog of NCBI NO: 8953699 NR Description: 4-nitrophenylphosphatase-like [Arabidopsis
  misc_feature (1)..(136): Homolog of NCBI NO: 8885622 NR Description: N-glyceraldehyde-2-phosphotransferase-like
  misc_feature (132)..(309): Homolog of NCBI NO: 8885622 NR Description: N-glyceraldehyde-2-phosphotransferase-like
  misc_feature (1)..(309): Homolog of NCBI NO: 26450878 NR Description: putative p-nitrophenylphosphatase [Arabidopsis
  misc_feature (1)..(309): Homolog of NCBI NO: 15239406 NR Description: phosphoglycolate phosphatase, putative
  misc_feature (1)..(279): Homolog of NCBI NO: 8953699 NR Description: 4-nitrophenylphosphatase-like [Arabidopsis

SEQ ID NO: 29030 - DNA, 1779 bp, Arabidopsis thaliana
  misc_feature (1)..(1779): Ceres Seq. ID no. 13600793
  misc_feature: MA Experiment ID: 20000179 Result: Up-regulated in Transcription
  misc_feature: MA Experiment 20000179 PARAMETER Experiment Name: At_Germinating_Seeds_P Parameter: Age (hr) Value: 6 vs. 0
  misc_feature: MA Experiment 20000179 PARAMETER Experiment Name: At_Germinating_Seeds_P Parameter: Tissue Value: Germinating Seeds
  misc_feature: MA Experiment ID: 20001451 Result: Down-regulated in Transcription
  misc_feature: MA Experiment 20001451 PARAMETER Experiment Name: At_Far-red-induction_P Parameter: Age (day) Value: 7
  misc_feature: MA Experiment 20001451 PARAMETER Experiment Name: At_Far-red-induction_P Parameter: Light Value: Far-red vs. White
  misc_feature: MA Experiment 20001451 PARAMETER Experiment Name: At_Far-red-induction_P Parameter: Organism Value: A. thaliana
  misc_feature: MA Experiment 20001451 PARAMETER Experiment Name: At_Far-red-induction_P Parameter: Plant Line Value: Columbia
  misc_feature: MA Experiment 20001451 PARAMETER Experiment Name: At_Far-red-induction_P Parameter: Timepoint (hr) Value: 24
  misc_feature: MA Experiment 20001451 PARAMETER Experiment Name: At_Far-red-induction_P Parameter: Tissue Value: Whole Plant
cactagtcccccccccccccgactaatccctaaatcacgagagaagtgagagacactgagactttgtagttgaccggatcattctcacttcgccggccgacgttcttccttccgccgtcggtatctatatttacgatccacgatctctcttgctgtttctgtcttcatcgtgacgaacatggctgctcgtatcgggatcttctccgtcttcgtagctgtattgttatctatttctgcattttcctcagctcaggatctccagatcgtaaatgccgagcgaaggattgatttaagctcacatatcgtgaaggccttcttgactctcaaggttgaaaatattgggaaagatcctgctgcagaaatgcttcttgctttcccacctacccagatcaagaatttggctatggtacaagccctggcaattactggcaagaagaagaagaaaacttatttgccattagatgtaaaaccaactgaacaacctgatgcaccgaatgacactggatactaccgtgttacgtttattagccccttaggtccgggtgaaactgtttcacttgaggtgctttacatattgactcattccttggaacctttcccagtggagataacccagtcagaatctcaattggtttactatcatgatagtgcagtgatattgtcaccgtatcatgttaagcaacagacaacttttattaagactcctagtactagagtagagtcgttcactagcattgaacctgctaaccgggctggcaaagagatcaaatatggaccatatgaaaatcgtgcttcatactcttacacacctgtcatcattcacttcgagaataacagtccatttgctgttgttgaggagcttgtgcgtgaaattgagatttcacactggggtagccttcagattacagaaaattataggttgactcatgggggagcgaggcataagggtgttttctcaagggttgattatcaatctaaacgatcggtcagtggtgcatcctctttcaatgcgctccttgcagtactacctcccagagtgaactctgtctactacagggatgagataggaaacatctctacttcacatttgcgtacaggctttagaaagtcagaacttgaatttgaaccccgctacccattatttggagggtggagtgcaacttttatcatcggctatagagttccattggaagactatctctttgaagcatctgatggcagacgttacttgaactttacctttgggtgcccgctcgtcgaaactattgttaacaagttgactatcaaagtcgtgcttcctgaaggatcaaaggacccttctgctgttttgccctttacagtcaatcaagagttgcaggtcaaatactcataccttgacatagtgggaagaaccgtggttgtgttgcaaaaagataacgtagttcccactcacaacgtacccttccaggtgtactatacattcaaaccaatatacatgcttgcggaaccattcatgcttgtatcggctttcttcttagtatttgtggcttcgcttgcgtatgtacacattgacctcaatatcgtcaggaagtagaagtcttatcaacagtcctttgctttcacttatagactcgttaaagaatacacttttgatcatcacttgaagaactaaactttgtaggtgttgctgcttttagtagagttatatctttgacactaaaaaaaaaaaaaaaaaaaactcgagggggggcccggtacccaattcgtgttaaacacaataaagttggaactggagggggg

SEQ ID NO: 29031 - protein, 464 aa, Arabidopsis thaliana
  peptide (1)..(464): Ceres Seq. ID no. 15219006
  misc_feature (26)..(456): Pfam Name: Ribophorin I Pfam Description: Ribophorin I
  misc_feature (26)..(456): Pfam Name: Ribophorin I Pfam Description: Ribophorin I
  misc_feature (26)..(456): Pfam Name: Ribophorin I Pfam Description: Ribophorin I
  misc_feature (19)..(463): Homolog of NCBI NO: 31543605 NR Description: ribophorin I
  misc_feature (19)..(463): Homolog of NCBI NO: 16359229 NR Description: ribophorin I [Mus musculus]
  misc_feature (22)..(463): Homolog of NCBI NO: 9857227 NR Description: ribophorin I [Sus scrofa]
  misc_feature (19)..(463): Homolog of NCBI NO: 4506675 NR Description: ribophorin I [Homo sapiens]
  misc_feature (11)..(463): Homolog of NCBI NO: 28175644 NR Description: Similar to ribophorin I [Xenopus laevis]
  misc_feature (19)..(463): Homolog of NCBI NO: 31543605 NR Description: ribophorin I
  misc_feature (22)..(463): Homolog of NCBI NO: 9857227 NR Description: ribophorin I [Sus scrofa]
  misc_feature (11)..(463): Homolog of NCBI NO: 28175644 NR Description: Similar to ribophorin I [Xenopus laevis]
  misc_feature (19)..(463): Homolog of NCBI NO: 4506675 NR Description: ribophorin I [Homo sapiens]
  misc_feature (22)..(463): Homolog of NCBI NO: 9857227 NR Description: ribophorin I [Sus scrofa]
  misc_feature (19)..(463): Homolog of NCBI NO: 16359229 NR Description: ribophorin I [Mus musculus]
  misc_feature (19)..(463): Homolog of NCBI NO: 31543605 NR Description: ribophorin I
  misc_feature (1)..(464): Homolog of NCBI NO: 15226341 NR Description: ribophorin I -related [Arabidopsis thaliana]
  misc_feature (14)..(464): Homolog of NCBI NO: 7489438 NR Description: ribophorin I homolog - barley (fragment)
  misc_feature (5)..(464): Homolog of NCBI NO: 15223039 NR Description: ribophorin I
  misc_feature (4)..(463): Homolog of NCBI NO: 28277278 NR Description: Similar to ribophorin I [Xenopus laevis]
  misc_feature (1)..(463): Homolog of NCBI NO: 40674542 NR Description: Unknown (protein for MGC:76266) [Silurana
  misc_feature (1)..(464): Homolog of NCBI NO: 15226341 NR Description: ribophorin I -related [Arabidopsis thaliana]
  misc_feature (14)..(464): Homolog of NCBI NO: 7489438 NR Description: ribophorin I homolog - barley (fragment)
  misc_feature (5)..(464): Homolog of NCBI NO: 15223039 NR Description: ribophorin I
  misc_feature (4)..(463): Homolog of NCBI NO: 28277278 NR Description: Similar to ribophorin I [Xenopus laevis]
  misc_feature (1)..(463): Homolog of NCBI NO: 40674542 NR Description: Unknown (protein for MGC:76266) [Silurana
  misc_feature (11)..(463): Homolog of NCBI NO: 28175644 NR Description: Similar to ribophorin I [Xenopus laevis]
  misc_feature (19)..(463): Homolog of NCBI NO: 4506675 NR Description: ribophorin I [Homo sapiens]
  misc_feature (19)..(463): Homolog of NCBI NO: 16359229 NR Description: ribophorin I [Mus musculus]
  misc_feature (1)..(463): Homolog of NCBI NO: 40674542 NR Description: Unknown (protein for MGC:76266) [Silurana
  misc_feature (4)..(463): Homolog of NCBI NO: 28277278 NR Description: Similar to ribophorin I [Xenopus laevis]
  misc_feature (5)..(464): Homolog of NCBI NO: 15223039 NR Description: ribophorin I
  misc_feature (14)..(464): Homolog of NCBI NO: 7489438 NR Description: ribophorin I homolog - barley (fragment)
  misc_feature (1)..(464): Homolog of NCBI NO: 15226341 NR Description: ribophorin I -related [Arabidopsis thaliana]
MAARIGIFSVFVAVLLSISAFSSAQDLQIVNAERRIDLSSHIVKAFLTLKVENIGKDPAAEMLLAFPPTQIKNLAMVQALAITGKKKKKTYLPLDVKPTEQPDAPNDTGYYRVTFISPLGPGETVSLEVLYILTHSLEPFPVEITQSESQLVYYHDSAVILSPYHVKQQTTFIKTPSTRVESFTSIEPANRAGKEIKYGPYENRASYSYTPVIIHFENNSPFAVVEELVREIEISHWGSLQITENYRLTHGGARHKGVFSRVDYQSKRSVSGASSFNALLAVLPPRVNSVYYRDEIGNISTSHLRTGFRKSELEFEPRYPLFGGWSATFIIGYRVPLEDYLFEASDGRRYLNFTFGCPLVETIVNKLTIKVVLPEGSKDPSAVLPFTVNQELQVKYSYLDIVGRTVVVLQKDNVVPTHNVPFQVYYTFKPIYMLAEPFMLVSAFFLVFVASLAYVHIDLNIVRK

SEQ ID NO: 29032 - protein, 403 aa, Arabidopsis thaliana
  peptide (1)..(403): Ceres Seq. ID no. 15219007
  misc_feature (1)..(395): Pfam Name: Ribophorin I Pfam Description: Ribophorin I
  misc_feature (1)..(395): Pfam Name: Ribophorin I Pfam Description: Ribophorin I
  misc_feature (1)..(395): Pfam Name: Ribophorin I Pfam Description: Ribophorin I
  misc_feature (1)..(402): Homolog of NCBI NO: 31543605 NR Description: ribophorin I
  misc_feature (1)..(402): Homolog of NCBI NO: 16359229 NR Description: ribophorin I [Mus musculus]
  misc_feature (1)..(402): Homolog of NCBI NO: 9857227 NR Description: ribophorin I [Sus scrofa]
  misc_feature (1)..(402): Homolog of NCBI NO: 4506675 NR Description: ribophorin I [Homo sapiens]
  misc_feature (1)..(402): Homolog of NCBI NO: 28175644 NR Description: Similar to ribophorin I [Xenopus laevis]
  misc_feature (1)..(402): Homolog of NCBI NO: 31543605 NR Description: ribophorin I
  misc_feature (1)..(402): Homolog of NCBI NO: 9857227 NR Description: ribophorin I [Sus scrofa]
  misc_feature (1)..(402): Homolog of NCBI NO: 28175644 NR Description: Similar to ribophorin I [Xenopus laevis]
  misc_feature (1)..(402): Homolog of NCBI NO: 4506675 NR Description: ribophorin I [Homo sapiens]
  misc_feature (1)..(402): Homolog of NCBI NO: 9857227 NR Description: ribophorin I [Sus scrofa]
  misc_feature (1)..(402): Homolog of NCBI NO: 16359229 NR Description: ribophorin I [Mus musculus]
  misc_feature (1)..(402): Homolog of NCBI NO: 31543605 NR Description: ribophorin I
  misc_feature (1)..(403): Homolog of NCBI NO: 15226341 NR Description: ribophorin I -related [Arabidopsis thaliana]
  misc_feature (1)..(403): Homolog of NCBI NO: 7489438 NR Description: ribophorin I homolog - barley (fragment)
  misc_feature (1)..(403): Homolog of NCBI NO: 15223039 NR Description: ribophorin I
  misc_feature (1)..(402): Homolog of NCBI NO: 28277278 NR Description: Similar to ribophorin I [Xenopus laevis]
  misc_feature (1)..(402): Homolog of NCBI NO: 40674542 NR Description: Unknown (protein for MGC:76266) [Silurana
  misc_feature (1)..(403): Homolog of NCBI NO: 15226341 NR Description: ribophorin I -related [Arabidopsis thaliana]
  misc_feature (1)..(403): Homolog of NCBI NO: 7489438 NR Description: ribophorin I homolog - barley (fragment)
  misc_feature (1)..(403): Homolog of NCBI NO: 15223039 NR Description: ribophorin I
  misc_feature (1)..(402): Homolog of NCBI NO: 28277278 NR Description: Similar to ribophorin I [Xenopus laevis]
  misc_feature (1)..(402): Homolog of NCBI NO: 40674542 NR Description: Unknown (protein for MGC:76266) [Silurana
  misc_feature (1)..(402): Homolog of NCBI NO: 28175644 NR Description: Similar to ribophorin I [Xenopus laevis]
  misc_feature (1)..(402): Homolog of NCBI NO: 4506675 NR Description: ribophorin I [Homo sapiens]
  misc_feature (1)..(402): Homolog of NCBI NO: 16359229 NR Description: ribophorin I [Mus musculus]
  misc_feature (1)..(402): Homolog of NCBI NO: 40674542 NR Description: Unknown (protein for MGC:76266) [Silurana
  misc_feature (1)..(402): Homolog of NCBI NO: 28277278 NR Description: Similar to ribophorin I [Xenopus laevis]
  misc_feature (1)..(403): Homolog of NCBI NO: 15223039 NR Description: ribophorin I
  misc_feature (1)..(403): Homolog of NCBI NO: 7489438 NR Description: ribophorin I homolog - barley (fragment)
  misc_feature (1)..(403): Homolog of NCBI NO: 15226341 NR Description: ribophorin I -related [Arabidopsis thaliana]
MLLAFPPTQIKNLAMVQALAITGKKKKKTYLPLDVKPTEQPDAPNDTGYYRVTFISPLGPGETVSLEVLYILTHSLEPFPVEITQSESQLVYYHDSAVILSPYHVKQQTTFIKTPSTRVESFTSIEPANRAGKEIKYGPYENRASYSYTPVIIHFENNSPFAVVEELVREIEISHWGSLQITENYRLTHGGARHKGVFSRVDYQSKRSVSGASSFNALLAVLPPRVNSVYYRDEIGNISTSHLRTGFRKSELEFEPRYPLFGGWSATFIIGYRVPLEDYLFEASDGRRYLNFTFGCPLVETIVNKLTIKVVLPEGSKDPSAVLPFTVNQELQVKYSYLDIVGRTVVVLQKDNVVPTHNVPFQVYYTFKPIYMLAEPFMLVSAFFLVFVASLAYVHIDLNIVRK

SEQ ID NO: 29033 - protein, 389 aa, Arabidopsis thaliana
  peptide (1)..(389): Ceres Seq. ID no. 15219008
  misc_feature (1)..(381): Pfam Name: Ribophorin I Pfam Description: Ribophorin I
  misc_feature (1)..(381): Pfam Name: Ribophorin I Pfam Description: Ribophorin I
  misc_feature (1)..(381): Pfam Name: Ribophorin I Pfam Description: Ribophorin I
  misc_feature (1)..(388): Homolog of NCBI NO: 31543605 NR Description: ribophorin I
  misc_feature (1)..(388): Homolog of NCBI NO: 16359229 NR Description: ribophorin I [Mus musculus]
  misc_feature (1)..(388): Homolog of NCBI NO: 9857227 NR Description: ribophorin I [Sus scrofa]
  misc_feature (1)..(388): Homolog of NCBI NO: 4506675 NR Description: ribophorin I [Homo sapiens]
  misc_feature (1)..(388): Homolog of NCBI NO: 28175644 NR Description: Similar to ribophorin I [Xenopus laevis]
  misc_feature (1)..(388): Homolog of NCBI NO: 31543605 NR Description: ribophorin I
  misc_feature (1)..(388): Homolog of NCBI NO: 9857227 NR Description: ribophorin I [Sus scrofa]
  misc_feature (1)..(388): Homolog of NCBI NO: 28175644 NR Description: Similar to ribophorin I [Xenopus laevis]
  misc_feature (1)..(388): Homolog of NCBI NO: 4506675 NR Description: ribophorin I [Homo sapiens]
  misc_feature (1)..(388): Homolog of NCBI NO: 9857227 NR Description: ribophorin I [Sus scrofa]
  misc_feature (1)..(388): Homolog of NCBI NO: 16359229 NR Description: ribophorin I [Mus musculus]
  misc_feature (1)..(388): Homolog of NCBI NO: 31543605 NR Description: ribophorin I
  misc_feature (1)..(389): Homolog of NCBI NO: 15226341 NR Description: ribophorin I -related [Arabidopsis thaliana]
  misc_feature (1)..(389): Homolog of NCBI NO: 7489438 NR Description: ribophorin I homolog - barley (fragment)
  misc_feature (1)..(389): Homolog of NCBI NO: 15223039 NR Description: ribophorin I
  misc_feature (1)..(388): Homolog of NCBI NO: 28277278 NR Description: Similar to ribophorin I [Xenopus laevis]
  misc_feature (1)..(388): Homolog of NCBI NO: 40674542 NR Description: Unknown (protein for MGC:76266) [Silurana
  misc_feature (1)..(389): Homolog of NCBI NO: 15226341 NR Description: ribophorin I -related [Arabidopsis thaliana]
  misc_feature (1)..(389): Homolog of NCBI NO: 7489438 NR Description: ribophorin I homolog - barley (fragment)
  misc_feature (1)..(389): Homolog of NCBI NO: 15223039 NR Description: ribophorin I
  misc_feature (1)..(388): Homolog of NCBI NO: 28277278 NR Description: Similar to ribophorin I [Xenopus laevis]
  misc_feature (1)..(388): Homolog of NCBI NO: 40674542 NR Description: Unknown (protein for MGC:76266) [Silurana
  misc_feature (1)..(388): Homolog of NCBI NO: 28175644 NR Description: Similar to ribophorin I [Xenopus laevis]
  misc_feature (1)..(388): Homolog of NCBI NO: 4506675 NR Description: ribophorin I [Homo sapiens]
  misc_feature (1)..(388): Homolog of NCBI NO: 16359229 NR Description: ribophorin I [Mus musculus]
  misc_feature (1)..(388): Homolog of NCBI NO: 40674542 NR Description: Unknown (protein for MGC:76266) [Silurana
  misc_feature (1)..(388): Homolog of NCBI NO: 28277278 NR Description: Similar to ribophorin I [Xenopus laevis]
  misc_feature (1)..(389): Homolog of NCBI NO: 15223039 NR Description: ribophorin I
  misc_feature (1)..(389): Homolog of NCBI NO: 7489438 NR Description: ribophorin I homolog - barley (fragment)
  misc_feature (1)..(389): Homolog of NCBI NO: 15226341 NR Description: ribophorin I -related [Arabidopsis thaliana]
MVQALAITGKKKKKTYLPLDVKPTEQPDAPNDTGYYRVTFISPLGPGETVSLEVLYILTHSLEPFPVEITQSESQLVYYHDSAVILSPYHVKQQTTFIKTPSTRVESFTSIEPANRAGKEIKYGPYENRASYSYTPVIIHFENNSPFAVVEELVREIEISHWGSLQITENYRLTHGGARHKGVFSRVDYQSKRSVSGASSFNALLAVLPPRVNSVYYRDEIGNISTSHLRTGFRKSELEFEPRYPLFGGWSATFIIGYRVPLEDYLFEASDGRRYLNFTFGCPLVETIVNKLTIKVVLPEGSKDPSAVLPFTVNQELQVKYSYLDIVGRTVVVLQKDNVVPTHNVPFQVYYTFKPIYMLAEPFMLVSAFFLVFVASLAYVHIDLNIVRK

SEQ ID NO: 29034 - DNA, 895 bp, Arabidopsis thaliana
  misc_feature (1)..(895): Ceres Seq. ID no. 13492417
  misc_feature: MA Experiment ID: 108434 Result: Up-regulated in Transcription
  misc_feature: MA Experiment 108434 PARAMETER Experiment Name: At_Root_Tips_cDNA_P Parameter: Tissue Value: Root Tips
  misc_feature: MA Experiment ID: 108435 Result: Up-regulated in Transcription
  misc_feature: MA Experiment 108435 PARAMETER Experiment Name: At_stm_Mutants_cDNA_P Parameter: Plant Line Value: wt Landsburg vs stm
  misc_feature: MA Experiment 108435 PARAMETER Experiment Name: At_stm_Mutants_cDNA_P Parameter: Tissue Value: Shoot Apical Meristem Region
  misc_feature: MA Experiment ID: 108461 Result: Down-regulated in Transcription
  misc_feature: MA Experiment 108461 PARAMETER Experiment Name: At_Germinating_Seeds_cDNA_P Parameter: Age (day) Value: 1 vs. 0
  misc_feature: MA Experiment 108461 PARAMETER Experiment Name: At_Germinating_Seeds_cDNA_P Parameter: Tissue Value: Germinating Seeds
  misc_feature: MA Experiment ID: 108462 Result: Down-regulated in Transcription
  misc_feature: MA Experiment 108462 PARAMETER Experiment Name: At_Germinating_Seeds_cDNA_P Parameter: Age (day) Value: 2 vs. 0
  misc_feature: MA Experiment 108462 PARAMETER Experiment Name: At_Germinating_Seeds_cDNA_P Parameter: Tissue Value: Germinating Seeds
  misc_feature: MA Experiment ID: 108463 Result: Down-regulated in Transcription
  misc_feature: MA Experiment 108463 PARAMETER Experiment Name: At_Germinating_Seeds_cDNA_P Parameter: Age (day) Value: 3 vs. 0
  misc_feature: MA Experiment 108463 PARAMETER Experiment Name: At_Germinating_Seeds_cDNA_P Parameter: Tissue Value: Germinating Seeds
  misc_feature: MA Experiment ID: 108464 Result: Down-regulated in Transcription
  misc_feature: MA Experiment 108464 PARAMETER Experiment Name: At_Germinating_Seeds_cDNA_P Parameter: Age (day) Value: 4 vs. 0
  misc_feature: MA Experiment 108464 PARAMETER Experiment Name: At_Germinating_Seeds_cDNA_P Parameter: Tissue Value: Germinating Seeds
  misc_feature: MA Experiment ID: 108572 Result: Down-regulated in Transcription
  misc_feature: MA Experiment 108572 PARAMETER Experiment Name: At_Drought_cDNA_P Parameter: Timepoint (hr) Value: 1
  misc_feature: MA Experiment 108572 PARAMETER Experiment Name: At_Drought_cDNA_P Parameter: Tissue Value: Aerial
  misc_feature: MA Experiment 108572 PARAMETER Experiment Name: At_Drought_cDNA_P Parameter: Treatment Value: Drought vs. No Drought
  misc_feature: MA Experiment ID: 108573 Result: Down-regulated in Transcription
  misc_feature: MA Experiment 108573 PARAMETER Experiment Name: At_Drought_cDNA_P Parameter: Timepoint (hr) Value: 6
  misc_feature: MA Experiment 108573 PARAMETER Experiment Name: At_Drought_cDNA_P Parameter: Tissue Value: Aerial
  misc_feature: MA Experiment 108573 PARAMETER Experiment Name: At_Drought_cDNA_P Parameter: Treatment Value: Drought vs. No Drought
  misc_feature: MA Experiment ID: 108577 Result: Down-regulated in Transcription
  misc_feature: MA Experiment 108577 PARAMETER Experiment Name: At_42deg_Heat_cDNA_P Parameter: Temperature (deg C) Value: 42 vs. 22
  misc_feature: MA Experiment 108577 PARAMETER Experiment Name: At_42deg_Heat_cDNA_P Parameter: Timepoint (hr) Value: 6
  misc_feature: MA Experiment 108577 PARAMETER Experiment Name: At_42deg_Heat_cDNA_P Parameter: Tissue Value: Aerial
  misc_feature: MA Experiment ID: 108579 Result: Up-regulated in Transcription
  misc_feature: MA Experiment 108579 PARAMETER Experiment Name: At_4deg_Cold_cDNA_P Parameter: Temperature (deg C) Value: 4 vs. 22
  misc_feature: MA Experiment 108579 PARAMETER Experiment Name: At_4deg_Cold_cDNA_P Parameter: Timepoint (hr) Value: 6
  misc_feature: MA Experiment 108579 PARAMETER Experiment Name: At_4deg_Cold_cDNA_P Parameter: Tissue Value: Aerial
  misc_feature: MA Experiment ID: 20000180 Result: Down-regulated in Transcription
  misc_feature: MA Experiment 20000180 PARAMETER Experiment Name: At_Germinating_Seeds_P Parameter: Age (hr) Value: 24 vs. 0
  misc_feature: MA Experiment 20000180 PARAMETER Experiment Name: At_Germinating_Seeds_P Parameter: Tissue Value: Germinating Seeds
  misc_feature: MA Experiment ID: 20000184 Result: Up-regulated in Transcription
  misc_feature: MA Experiment 20000184 PARAMETER Experiment Name: At_Shoots__P Parameter: Age (day) Value: 7
  misc_feature: MA Experiment 20000184 PARAMETER Experiment Name: At_Shoots__P Parameter: Tissue Value: Shoots vs. Whole Plant
  misc_feature: MA Experiment ID: 20000227 Result: Up-regulated in Transcription
  misc_feature: MA Experiment 20000227 PARAMETER Experiment Name: At_Root-Tips-vs-Tops_P Parameter: Tissue Value: Root Tips vs. Root Tops
  misc_feature: MA Experiment ID: 20000265 Result: Up-regulated in Transcription
  misc_feature: MA Experiment 20000265 PARAMETER Experiment Name: At_Open_Flower_P Parameter: Age (day) Value: 21
  misc_feature: MA Experiment 20000265 PARAMETER Experiment Name: At_Open_Flower_P Parameter: Plant Line Value: WS
  misc_feature: MA Experiment 20000265 PARAMETER Experiment Name: At_Open_Flower_P Parameter: Tissue Value: Closed Flower vs. Whole Plant
  misc_feature: MA Experiment ID: 20000437 Result: Down-regulated in Transcription
  misc_feature: MA Experiment 20000437 PARAMETER Experiment Name: At_Drought_P Parameter: Age (day) Value: 8
  misc_feature: MA Experiment 20000437 PARAMETER Experiment Name: At_Drought_P Parameter: Organism Value: A. thaliana
  misc_feature: MA Experiment 20000437 PARAMETER Experiment Name: At_Drought_P Parameter: Plant Line Value: WS
  misc_feature: MA Experiment 20000437 PARAMETER Experiment Name: At_Drought_P Parameter: Timepoint (hr) Value: 24
  misc_feature: MA Experiment 20000437 PARAMETER Experiment Name: At_Drought_P Parameter: Tissue Value: Whole Plant
  misc_feature: MA Experiment 20000437 PARAMETER Experiment Name: At_Drought_P Parameter: Treatment Value: Drought vs. No Drought
  misc_feature: MA Experiment ID: 20000453 Result: Down-regulated in Transcription
  misc_feature: MA Experiment 20000453 PARAMETER Experiment Name: At_100uM_ABA_P Parameter: Age (day) Value: 15
  misc_feature: MA Experiment 20000453 PARAMETER Experiment Name: At_100uM_ABA_P Parameter: Organism Value: A. thaliana
  misc_feature: MA Experiment 20000453 PARAMETER Experiment Name: At_100uM_ABA_P Parameter: Plant Line Value: WS
  misc_feature: MA Experiment 20000453 PARAMETER Experiment Name: At_100uM_ABA_P Parameter: Timepoint (hr) Value: 24
  misc_feature: MA Experiment 20000453 PARAMETER Experiment Name: At_100uM_ABA_P Parameter: Tissue Value: Aerial
  misc_feature: MA Experiment 20000453 PARAMETER Experiment Name: At_100uM_ABA_P Parameter: Treatment Value: 100uM ABA vs. No Treatment
  misc_feature: MA Experiment ID: 20000456 Result: Up-regulated in Transcription
  misc_feature: MA Experiment 20000456 PARAMETER Experiment Name: At_100uM_BA_P Parameter: Age (day) Value: 14
  misc_feature: MA Experiment 20000456 PARAMETER Experiment Name: At_100uM_BA_P Parameter: Organism Value: A. thaliana
  misc_feature: MA Experiment 20000456 PARAMETER Experiment Name: At_100uM_BA_P Parameter: Plant Line Value: WS
  misc_feature: MA Experiment 20000456 PARAMETER Experiment Name: At_100uM_BA_P Parameter: Timepoint (hr) Value: 6
  misc_feature: MA Experiment 20000456 PARAMETER Experiment Name: At_100uM_BA_P Parameter: Tissue Value: Aerial
  misc_feature: MA Experiment 20000456 PARAMETER Experiment Name: At_100uM_BA_P Parameter: Treatment Value: 100uM BA vs. No Treatment
  misc_feature: MA Experiment ID: 20000794 Result: Down-regulated in Transcription
  misc_feature: MA Experiment 20000794 PARAMETER Experiment Name: At_Petals_P Parameter: Age (day) Value: 23-25 days
  misc_feature: MA Experiment 20000794 PARAMETER Experiment Name: At_Petals_P Parameter: Plant Line Value: WS
  misc_feature: MA Experiment 20000794 PARAMETER Experiment Name: At_Petals_P Parameter: Tissue Value: Petals vs. Whole plant
  misc_feature: MA Experiment ID: 20001451 Result: Down-regulated in Transcription
  misc_feature: MA Experiment 20001451 PARAMETER Experiment Name: At_Far-red-induction_P Parameter: Age (day) Value: 7
  misc_feature: MA Experiment 20001451 PARAMETER Experiment Name: At_Far-red-induction_P Parameter: Light Value: Far-red vs. White
  misc_feature: MA Experiment 20001451 PARAMETER Experiment Name: At_Far-red-induction_P Parameter: Organism Value: A. thaliana
  misc_feature: MA Experiment 20001451 PARAMETER Experiment Name: At_Far-red-induction_P Parameter: Plant Line Value: Columbia
  misc_feature: MA Experiment 20001451 PARAMETER Experiment Name: At_Far-red-induction_P Parameter: Timepoint (hr) Value: 24
  misc_feature: MA Experiment 20001451 PARAMETER Experiment Name: At_Far-red-induction_P Parameter: Tissue Value: Whole Plant
  misc_feature: MA Experiment ID: 20001556 Result: Up-regulated in Transcription
  misc_feature: MA Experiment 20001556 PARAMETER Experiment Name: At_Drought_Soil_Dry_P Parameter: Age (day) Value: 26
  misc_feature: MA Experiment 20001556 PARAMETER Experiment Name: At_Drought_Soil_Dry_P Parameter: Organism Value: A. thaliana
  misc_feature: MA Experiment 20001556 PARAMETER Experiment Name: At_Drought_Soil_Dry_P Parameter: Plant Line Value: WS
  misc_feature: MA Experiment 20001556 PARAMETER Experiment Name: At_Drought_Soil_Dry_P Parameter: Post Timepoint (hr) Value: None
  misc_feature: MA Experiment 20001556 PARAMETER Experiment Name: At_Drought_Soil_Dry_P Parameter: Post-Treatment Value: None
  misc_feature: MA Experiment 20001556 PARAMETER Experiment Name: At_Drought_Soil_Dry_P Parameter: Timepoint (day) Value: 12
  misc_feature: MA Experiment 20001556 PARAMETER Experiment Name: At_Drought_Soil_Dry_P Parameter: Treatment Value: Drought vs. No Drought
  misc_feature: MA Experiment ID: 20001557 Result: Up-regulated in Transcription
  misc_feature: MA Experiment 20001557 PARAMETER Experiment Name: At_Drought_Soil_Dry_P Parameter: Age (day) Value: 27
  misc_feature: MA Experiment 20001557 PARAMETER Experiment Name: At_Drought_Soil_Dry_P Parameter: Organism Value: A. thaliana
  misc_feature: MA Experiment 20001557 PARAMETER Experiment Name: At_Drought_Soil_Dry_P Parameter: Plant Line Value: WS
  misc_feature: MA Experiment 20001557 PARAMETER Experiment Name: At_Drought_Soil_Dry_P Parameter: Post Timepoint (hr) Value: 3
  misc_feature: MA Experiment 20001557 PARAMETER Experiment Name: At_Drought_Soil_Dry_P Parameter: Post-Treatment Value: Re-Water vs. No Drought
  misc_feature: MA Experiment 20001557 PARAMETER Experiment Name: At_Drought_Soil_Dry_P Parameter: Timepoint (day) Value: 13
  misc_feature: MA Experiment 20001557 PARAMETER Experiment Name: At_Drought_Soil_Dry_P Parameter: Treatment Value: Drought vs. No Drought
  misc_feature: MA Experiment ID: 20001558 Result: Up-regulated in Transcription
  misc_feature: MA Experiment 20001558 PARAMETER Experiment Name: At_Drought_Soil_Dry_P Parameter: Age (day) Value: 27
  misc_feature: MA Experiment 20001558 PARAMETER Experiment Name: At_Drought_Soil_Dry_P Parameter: Organism Value: A. thaliana
  misc_feature: MA Experiment 20001558 PARAMETER Experiment Name: At_Drought_Soil_Dry_P Parameter: Plant Line Value: WS
  misc_feature: MA Experiment 20001558 PARAMETER Experiment Name: At_Drought_Soil_Dry_P Parameter: Post Timepoint (hr) Value: 6
  misc_feature: MA Experiment 20001558 PARAMETER Experiment Name: At_Drought_Soil_Dry_P Parameter: Post-Treatment Value: Re-Water vs. No Drought
  misc_feature: MA Experiment 20001558 PARAMETER Experiment Name: At_Drought_Soil_Dry_P Parameter: Timepoint (day) Value: 13
  misc_feature: MA Experiment 20001558 PARAMETER Experiment Name: At_Drought_Soil_Dry_P Parameter: Treatment Value: Drought vs. No Drought
  misc_feature: MA Experiment ID: 20001560 Result: Up-regulated in Transcription
  misc_feature: MA Experiment 20001560 PARAMETER Experiment Name: At_Drought_Soil_Dry_P Parameter: Age (day) Value: 28
  misc_feature: MA Experiment 20001560 PARAMETER Experiment Name: At_Drought_Soil_Dry_P Parameter: Organism Value: A. thaliana
  misc_feature: MA Experiment 20001560 PARAMETER Experiment Name: At_Drought_Soil_Dry_P Parameter: Plant Line Value: WS
  misc_feature: MA Experiment 20001560 PARAMETER Experiment Name: At_Drought_Soil_Dry_P Parameter: Post Timepoint (hr) Value: None
  misc_feature: MA Experiment 20001560 PARAMETER Experiment Name: At_Drought_Soil_Dry_P Parameter: Post-Treatment Value: None
  misc_feature: MA Experiment 20001560 PARAMETER Experiment Name: At_Drought_Soil_Dry_P Parameter: Timepoint (day) Value: 14
  misc_feature: MA Experiment 20001560 PARAMETER Experiment Name: At_Drought_Soil_Dry_P Parameter: Treatment Value: Drought vs. No Drought
cattgagccgttatataaatccttcactcgctccttgagaagacgaatttgagattgcctctgcaaagagtaaaatggcgaatcctaaagtcttcttcgacatcttgattggtaagatgaaggcagggcgtgttgtaatggagttatttgcagatgtgactccgagaacagctaataatttccgtgctttgtgcactggggagaatggtattgggaaagcagggaaggctttacactacaaaggctcagcctttcaccgtataatcccagggttcatgtgtcaaggtggagatttcactcgtgggaatggaactggaggagaatctatttacgggtctaaatttgaagatgagaacttcaagttgaagcacactggtccagggattttgtctatggctaactctggtcccaacactaatggttctcagttcttcatctgcacagagaagacttcgtggcttgatgggaaacatgttgttttcgggaaagttgttgatggatacaatgtggtcaaggcaatggaggatgttggctctgacatgggaaatccttctgaacgagttgtgattgaagattgtggtgagctcaagaacccaagttcataagttcttaaaacattgggtgggttgatcttgacaggttattctatcatatgctgtgaagcagagacagcatcttagcgttaaggtcaatctagtctgtgatgcactactttggttttgactatatcatatgaaccttaggaagtggtccatccttgtaagttgttttcttaaaactcttgtgtgagaataggatggatgataataatggttagtttctttatgaagacatttggttttgtagctttcttattttggtgtagttaatatgaatgaaccaaactcttcttagg

SEQ ID NO: 29035 - protein, 176 aa, Arabidopsis thaliana
  peptide (1)..(176): Ceres Seq. ID no. 13492418
  misc_feature (2)..(171): Homolog of NCBI NO: 18076088 NR Description: cyclophilin [Ricinus communis]
  misc_feature (1)..(171): Homolog of NCBI NO: 29124975 NR Description: cyclophilin [Populus tremuloides]
  misc_feature (1)..(171): Homolog of NCBI NO: 3334157 NR Description: Peptidyl-prolyl cis-trans isomerase (PPIase)
  misc_feature (1)..(171): Homolog of NCBI NO: 11270316 NR Description: peptidylprolyl isomerase (EC 5.2.1.8)
  misc_feature (3)..(171): Homolog of NCBI NO: 1084454 NR Description: peptidylprolyl isomerase (EC 5.2.1.8) Cyp1 - rice
  misc_feature (1)..(176): Homolog of NCBI NO: 11270314 NR Description: peptidylprolyl isomerase (EC 5.2.1.8) ATCYP4
  misc_feature (1)..(176): Homolog of NCBI NO: 1305457 NR Description: cytosolic cyclophilin [Arabidopsis thaliana]
  misc_feature (1)..(176): Homolog of NCBI NO: 15228814 NR Description: peptidylprolyl isomerase [Arabidopsis thaliana]
MANPKVFFDILIGKMKAGRVVMELFADVTPRTANNFRALCTGENGIGKAGKALHYKGSAFHRIIPGFMCQGGDFTRGNGTGGESIYGSKFEDENFKLKHTGPGILSMANSGPNTNGSQFFICTEKTSWLDGKHVVFGKVVDGYNVVKAMEDVGSDMGNPSERVVIEDCGELKNPSS

SEQ ID NO: 29036 - protein, 162 aa, Arabidopsis thaliana
  peptide (1)..(162): Ceres Seq. ID no. 13492419
  misc_feature (1)..(157): Homolog of NCBI NO: 18076088 NR Description: cyclophilin [Ricinus communis]
  misc_feature (1)..(157): Homolog of NCBI NO: 29124975 NR Description: cyclophilin [Populus tremuloides]
  misc_feature (1)..(157): Homolog of NCBI NO: 3334157 NR Description: Peptidyl-prolyl cis-trans isomerase (PPIase)
  misc_feature (1)..(157): Homolog of NCBI NO: 11270316 NR Description: peptidylprolyl isomerase (EC 5.2.1.8)
  misc_feature (1)..(157): Homolog of NCBI NO: 1084454 NR Description: peptidylprolyl isomerase (EC 5.2.1.8) Cyp1 - rice
  misc_feature (1)..(162): Homolog of NCBI NO: 11270314 NR Description: peptidylprolyl isomerase (EC 5.2.1.8) ATCYP4
  misc_feature (1)..(162): Homolog of NCBI NO: 1305457 NR Description: cytosolic cyclophilin [Arabidopsis thaliana]
  misc_feature (1)..(162): Homolog of NCBI NO: 15228814 NR Description: peptidylprolyl isomerase [Arabidopsis thaliana]
MKAGRVVMELFADVTPRTANNFRALCTGENGIGKAGKALHYKGSAFHRIIPGFMCQGGDFTRGNGTGGESIYGSKFEDENFKLKHTGPGILSMANSGPNTNGSQFFICTEKTSWLDGKHVVFGKVVDGYNVVKAMEDVGSDMGNPSERVVIEDCGELKNPSS

SEQ ID NO: 29037 - protein, 155 aa, Arabidopsis thaliana
  peptide (1)..(155): Ceres Seq. ID no. 13492420
  misc_feature (1)..(150): Homolog of NCBI NO: 18076088 NR Description: cyclophilin [Ricinus communis]
  misc_feature (1)..(150): Homolog of NCBI NO: 29124975 NR Description: cyclophilin [Populus tremuloides]
  misc_feature (1)..(150): Homolog of NCBI NO: 3334157 NR Description: Peptidyl-prolyl cis-trans isomerase (PPIase)
  misc_feature (1)..(150): Homolog of NCBI NO: 11270316 NR Description: peptidylprolyl isomerase (EC 5.2.1.8)
  misc_feature (1)..(150): Homolog of NCBI NO: 1084454 NR Description: peptidylprolyl isomerase (EC 5.2.1.8) Cyp1 - rice
  misc_feature (1)..(155): Homolog of NCBI NO: 11270314 NR Description: peptidylprolyl isomerase (EC 5.2.1.8) ATCYP4
  misc_feature (1)..(155): Homolog of NCBI NO: 1305457 NR Description: cytosolic cyclophilin [Arabidopsis thaliana]
  misc_feature (1)..(155): Homolog of NCBI NO: 15228814 NR Description: peptidylprolyl isomerase [Arabidopsis thaliana]
MELFADVTPRTANNFRALCTGENGIGKAGKALHYKGSAFHRIIPGFMCQGGDFTRGNGTGGESIYGSKFEDENFKLKHTGPGILSMANSGPNTNGSQFFICTEKTSWLDGKHVVFGKVVDGYNVVKAMEDVGSDMGNPSERVVIEDCGELKNPSS

SEQ ID NO: 29038 - DNA, 1721 bp, Arabidopsis thaliana
  misc_feature (1)..(1721): Ceres Seq. ID no. 12603478
  misc_feature: MA Experiment ID: 20001911 Result: Up-regulated in Transcription
  misc_feature: MA Experiment 20001911 PARAMETER Experiment Name: At_Drought_Reproduction_P Parameter: Age (day) Value: 40
  misc_feature: MA Experiment 20001911 PARAMETER Experiment Name: At_Drought_Reproduction_P Parameter: Organism Value: A. thaliana
  misc_feature: MA Experiment 20001911 PARAMETER Experiment Name: At_Drought_Reproduction_P Parameter: Plant Line Value: WS
  misc_feature: MA Experiment 20001911 PARAMETER Experiment Name: At_Drought_Reproduction_P Parameter: Timepoint (day) Value: 10
  misc_feature: MA Experiment 20001911 PARAMETER Experiment Name: At_Drought_Reproduction_P Parameter: Tissue Value: Flowers
  misc_feature: MA Experiment 20001911 PARAMETER Experiment Name: At_Drought_Reproduction_P Parameter: Treatment Value: Drought vs. No Drought
ctactttgtgaggcgaagaagaagatcgtagtagcccgataatgaagctacgattgagacatcacgagacgagagaaaccctaaaacttgaattggccgatgcagacactctccatgatctccggcgacggatcaaccccacggtgccttcctccgttcatctctcgctcaatcgtaaagacgagctcatcacgccttcgccggaggatacgctccgatctcttggtttaatatccggtgacctaatttacttctctctcgaggctggcgaatcttcgaattggaaattgagagattctgaaaccgtagcttctcaatcggagagtaatcagacgagtgttcatgattcgattgggttcgcagaggttgatgttgtccccgatcaagcgaaatctaatcctaatacctccgtagaagatccagagggagatatttcgggtatggagggtccagagccgatggatgttgagcagcttgacatggagctcgctgcagctggaagcaaaaggctaagtgaaccattcttcttgaaaaatatactgcttgagaaatctggtgatactagtgagttgactactttggctttgtcagtacatgctgttatgttagaatctggattcgtgctgttgaatcatggctctgacaagtttaacttttcaaaggagttacttacagtatccctgaggtatactctacctgagctgattaagtctaaggatacaaatacaatcgagtcagtttctgtgaagtttcagaatttaggccctgtggttgtagtttacggaactgtaggtggatctagtgggcgagtgcatatgaatcttgataagcgtaggtttgttcctgttatcgacttggttatggatacttctacatctgacgaagaaggctcttcgagtatctaccgtgaagtgttcatgttctggagaatggtaaaagatcgccttgttatcccgttgttgattggtatttgcgataaagctggcttggaacctccaccgtgtttgatgcgcttaccaacagagctaaagctgaagatactagagttgcttcctggtgtgagtattggaaatatggcttgtgtttgtacagaaatgcggtatctggcatcagacaatgacttgtggaagcagaagtgcttggaggaagttaataattttgttgtgacagaagcgggtgattcagttaattggaaggcgaggtttgctactttttggaggcaaaaacagcttgctgctgctagtgatactttttggaggcaaaaccagcttggaaggcggaacatttccacgggaagaagcggcatacgattccctcgaatcattggagaccctcctttcacatggtttaatggggatcgcatgcatggatccattggtattcacccgggacaatcagcacgtgggctcggcagacgaacatggggacagctctttactcccagatgcaatcttgggggactcaactagcaaacataccgagtgtaaaaatggaactgttgaatctttctaaaggtaggagaagtagtatatggcttttccgatatcagcaaataaattgggaggacactaatatagtaatatgtttgatctttaaatgtttatttggttttgaatgattttctcttcttcttgccatgatatgttacatggttgctctcttatgagtttctttctttctgtaaagcttttgatcacccgatatatatggcttcttatatt

SEQ ID NO: 29039 - protein, 475 aa, Arabidopsis thaliana
  peptide (1)..(475): Ceres Seq. ID no. 12603479
  misc_feature (41)..(385): Homolog of NCBI NO: 6164624 NR Description: F-box protein Fbx7 [Homo sapiens]
  misc_feature (1)..(367): Homolog of NCBI NO: 34862922 NR Description: similar to RIKEN cDNA 2410015K21 [Rattus
  misc_feature (3)..(385): Homolog of NCBI NO: 13124249 NR Description: F-box only protein 7
  misc_feature (3)..(385): Homolog of NCBI NO: 15812193 NR Description: F-box only protein 7; F-box protein 7 [Homo
  misc_feature (1)..(385): Homolog of NCBI NO: 23397417 NR Description: RIKEN cDNA 2410015K21 [Mus musculus]
  misc_feature (168)..(357): Homolog of NCBI NO: 15223132 NR Description: hypothetical protein; protein id: At1g70360.1
  misc_feature (12)..(371): Homolog of NCBI NO: 27311243 NR Description: Hypothetical protein [Oryza sativa (japonica
  misc_feature (116)..(430): Homolog of NCBI NO: 15220857 NR Description: unknown protein; protein id: At1g23770.1
  misc_feature (1)..(475): Homolog of NCBI NO: 18395296 NR Description: expressed protein
MKLRLRHHETRETLKLELADADTLHDLRRRINPTVPSSVHLSLNRKDELITPSPEDTLRSLGLISGDLIYFSLEAGESSNWKLRDSETVASQSESNQTSVHDSIGFAEVDVVPDQAKSNPNTSVEDPEGDISGMEGPEPMDVEQLDMELAAAGSKRLSEPFFLKNILLEKSGDTSELTTLALSVHAVMLESGFVLLNHGSDKFNFSKELLTVSLRYTLPELIKSKDTNTIESVSVKFQNLGPVVVVYGTVGGSSGRVHMNLDKRRFVPVIDLVMDTSTSDEEGSSSIYREVFMFWRMVKDRLVIPLLIGICDKAGLEPPPCLMRLPTELKLKILELLPGVSIGNMACVCTEMRYLASDNDLWKQKCLEEVNNFVVTEAGDSVNWKARFATFWRQKQLAAASDTFWRQNQLGRRNISTGRSGIRFPRIIGDPPFTWFNGDRMHGSIGIHPGQSARGLGRRTWGQLFTPRCNLGGLN

SEQ ID NO: 29040 - protein, 342 aa, Arabidopsis thaliana
  peptide (1)..(342): Ceres Seq. ID no. 12603480
  misc_feature (1)..(252): Homolog of NCBI NO: 6164624 NR Description: F-box protein Fbx7 [Homo sapiens]
  misc_feature (1)..(234): Homolog of NCBI NO: 34862922 NR Description: similar to RIKEN cDNA 2410015K21 [Rattus
  misc_feature (1)..(252): Homolog of NCBI NO: 13124249 NR Description: F-box only protein 7
  misc_feature (1)..(252): Homolog of NCBI NO: 15812193 NR Description: F-box only protein 7; F-box protein 7 [Homo
  misc_feature (1)..(252): Homolog of NCBI NO: 23397417 NR Description: RIKEN cDNA 2410015K21 [Mus musculus]
  misc_feature (35)..(224): Homolog of NCBI NO: 15223132 NR Description: hypothetical protein; protein id: At1g70360.1
  misc_feature (1)..(238): Homolog of NCBI NO: 27311243 NR Description: Hypothetical protein [Oryza sativa (japonica
  misc_feature (1)..(297): Homolog of NCBI NO: 15220857 NR Description: unknown protein; protein id: At1g23770.1
  misc_feature (1)..(342): Homolog of NCBI NO: 18395296 NR Description: expressed protein
MEGPEPMDVEQLDMELAAAGSKRLSEPFFLKNILLEKSGDTSELTTLALSVHAVMLESGFVLLNHGSDKFNFSKELLTVSLRYTLPELIKSKDTNTIESVSVKFQNLGPVVVVYGTVGGSSGRVHMNLDKRRFVPVIDLVMDTSTSDEEGSSSIYREVFMFWRMVKDRLVIPLLIGICDKAGLEPPPCLMRLPTELKLKILELLPGVSIGNMACVCTEMRYLASDNDLWKQKCLEEVNNFVVTEAGDSVNWKARFATFWRQKQLAAASDTFWRQNQLGRRNISTGRSGIRFPRIIGDPPFTWFNGDRMHGSIGIHPGQSARGLGRRTWGQLFTPRCNLGGLN

SEQ ID NO: 29041 - protein, 336 aa, Arabidopsis thaliana
  peptide (1)..(336): Ceres Seq. ID no. 12603481
  misc_feature (1)..(246): Homolog of NCBI NO: 6164624 NR Description: F-box protein Fbx7 [Homo sapiens]
  misc_feature (1)..(228): Homolog of NCBI NO: 34862922 NR Description: similar to RIKEN cDNA 2410015K21 [Rattus
  misc_feature (1)..(246): Homolog of NCBI NO: 13124249 NR Description: F-box only protein 7
  misc_feature (1)..(246): Homolog of NCBI NO: 15812193 NR Description: F-box only protein 7; F-box protein 7 [Homo
  misc_feature (1)..(246): Homolog of NCBI NO: 23397417 NR Description: RIKEN cDNA 2410015K21 [Mus musculus]
  misc_feature (29)..(218): Homolog of NCBI NO: 15223132 NR Description: hypothetical protein; protein id: At1g70360.1
  misc_feature (1)..(232): Homolog of NCBI NO: 27311243 NR Description: Hypothetical protein [Oryza sativa (japonica
  misc_feature (1)..(291): Homolog of NCBI NO: 15220857 NR Description: unknown protein; protein id: At1g23770.1
  misc_feature (1)..(336): Homolog of NCBI NO: 18395296 NR Description: expressed protein
MDVEQLDMELAAAGSKRLSEPFFLKNILLEKSGDTSELTTLALSVHAVMLESGFVLLNHGSDKFNFSKELLTVSLRYTLPELIKSKDTNTIESVSVKFQNLGPVVVVYGTVGGSSGRVHMNLDKRRFVPVIDLVMDTSTSDEEGSSSIYREVFMFWRMVKDRLVIPLLIGICDKAGLEPPPCLMRLPTELKLKILELLPGVSIGNMACVCTEMRYLASDNDLWKQKCLEEVNNFVVTEAGDSVNWKARFATFWRQKQLAAASDTFWRQNQLGRRNISTGRSGIRFPRIIGDPPFTWFNGDRMHGSIGIHPGQSARGLGRRTWGQLFTPRCNLGGLN

SEQ ID NO: 29042 - DNA, 3259 bp, Arabidopsis thaliana
  misc_feature (1)..(3259): Ceres Seq. ID no. 12323883
  misc_feature: MA Experiment ID: 20000179 Result: Up-regulated in Transcription
  misc_feature: MA Experiment 20000179 PARAMETER Experiment Name: At_Germinating_Seeds_P Parameter: Age (hr) Value: 6 vs. 0
  misc_feature: MA Experiment 20000179 PARAMETER Experiment Name: At_Germinating_Seeds_P Parameter: Tissue Value: Germinating Seeds
  misc_feature: MA Experiment ID: 20000180 Result: Up-regulated in Transcription
  misc_feature: MA Experiment 20000180 PARAMETER Experiment Name: At_Germinating_Seeds_P Parameter: Age (hr) Value: 24 vs. 0
  misc_feature: MA Experiment 20000180 PARAMETER Experiment Name: At_Germinating_Seeds_P Parameter: Tissue Value: Germinating Seeds
  misc_feature: MA Experiment ID: 20000185 Result: Up-regulated in Transcription
  misc_feature: MA Experiment 20000185 PARAMETER Experiment Name: At_Roots__P Parameter: Age (day) Value: 7 vs. 21
  misc_feature: MA Experiment 20000185 PARAMETER Experiment Name: At_Roots__P Parameter: Organism Value: A. thaliana
  misc_feature: MA Experiment 20000185 PARAMETER Experiment Name: At_Roots__P Parameter: Tissue Value: Roots vs. Whole Plant
  misc_feature: MA Experiment ID: 20000234 Result: Up-regulated in Transcription
  misc_feature: MA Experiment 20000234 PARAMETER Experiment Name: At_Siliques_P Parameter: Age (day) Value: 21
  misc_feature: MA Experiment 20000234 PARAMETER Experiment Name: At_Siliques_P Parameter: Organism Value: A. thaliana
  misc_feature: MA Experiment 20000234 PARAMETER Experiment Name: At_Siliques_P Parameter: Plant Line Value: WS
  misc_feature: MA Experiment 20000234 PARAMETER Experiment Name: At_Siliques_P Parameter: Tissue Value: Less Than 5mm Siliques vs. Whole Plant
  misc_feature: MA Experiment ID: 20000264 Result: Up-regulated in Transcription
  misc_feature: MA Experiment 20000264 PARAMETER Experiment Name: At_Open_Flower_P Parameter: Age (day) Value: 21
  misc_feature: MA Experiment 20000264 PARAMETER Experiment Name: At_Open_Flower_P Parameter: Plant Line Value: WS
  misc_feature: MA Experiment 20000264 PARAMETER Experiment Name: At_Open_Flower_P Parameter: Tissue Value: Open Flower vs. Whole Plant
  misc_feature: MA Experiment ID: 20000286 Result: Up-regulated in Transcription
  misc_feature: MA Experiment 20000286 PARAMETER Experiment Name: At_Open_Flower_P Parameter: Age (day) Value: 21
  misc_feature: MA Experiment 20000286 PARAMETER Experiment Name: At_Open_Flower_P Parameter: Plant Line Value: WS
  misc_feature: MA Experiment 20000286 PARAMETER Experiment Name: At_Open_Flower_P Parameter: Tissue Value: Half Open vs. Whole Plant
  misc_feature: MA Experiment ID: 20000306 Result: Up-regulated in Transcription
  misc_feature: MA Experiment 20000306 PARAMETER Experiment Name: At_Germinating_Seeds_Sub_P Parameter: Age (hr) Value: 6 vs. 0
  misc_feature: MA Experiment 20000306 PARAMETER Experiment Name: At_Germinating_Seeds_Sub_P Parameter: Organism Value: A. thaliana
  misc_feature: MA Experiment 20000306 PARAMETER Experiment Name: At_Germinating_Seeds_Sub_P Parameter: Plant Line Value: WS
  misc_feature: MA Experiment 20000306 PARAMETER Experiment Name: At_Germinating_Seeds_Sub_P Parameter: Tissue Value: Germinating Seeds
  misc_feature: MA Experiment ID: 20000307 Result: Up-regulated in Transcription
  misc_feature: MA Experiment 20000307 PARAMETER Experiment Name: At_Germinating_Seeds_Sub_P Parameter: Age (hr) Value: 24 vs. 0
  misc_feature: MA Experiment 20000307 PARAMETER Experiment Name: At_Germinating_Seeds_Sub_P Parameter: Organism Value: A. thaliana
  misc_feature: MA Experiment 20000307 PARAMETER Experiment Name: At_Germinating_Seeds_Sub_P Parameter: Plant Line Value: WS
  misc_feature: MA Experiment 20000307 PARAMETER Experiment Name: At_Germinating_Seeds_Sub_P Parameter: Tissue Value: Germinating Seeds
  misc_feature: MA Experiment ID: 20000314 Result: Up-regulated in Transcription
  misc_feature: MA Experiment 20000314 PARAMETER Experiment Name: At_14day_Shoots-Roots_Sub_P Parameter: Age (day) Value: 14
  misc_feature: MA Experiment 20000314 PARAMETER Experiment Name: At_14day_Shoots-Roots_Sub_P Parameter: Organism Value: A. thaliana
  misc_feature: MA Experiment 20000314 PARAMETER Experiment Name: At_14day_Shoots-Roots_Sub_P Parameter: Plant Line Value: WS
  misc_feature: MA Experiment 20000314 PARAMETER Experiment Name: At_14day_Shoots-Roots_Sub_P Parameter: Tissue Value: Roots vs. Whole Plant
  misc_feature: MA Experiment ID: 20000315 Result: Down-regulated in Transcription
  misc_feature: MA Experiment 20000315 PARAMETER Experiment Name: At_14day_Shoots-Roots_Sub_P Parameter: Age (day) Value: 14
  misc_feature: MA Experiment 20000315 PARAMETER Experiment Name: At_14day_Shoots-Roots_Sub_P Parameter: Organism Value: A. thaliana
  misc_feature: MA Experiment 20000315 PARAMETER Experiment Name: At_14day_Shoots-Roots_Sub_P Parameter: Plant Line Value: WS
  misc_feature: MA Experiment 20000315 PARAMETER Experiment Name: At_14day_Shoots-Roots_Sub_P Parameter: Tissue Value: Shoots vs. Whole Plant
  misc_feature: MA Experiment ID: 20000328 Result: Down-regulated in Transcription
  misc_feature: MA Experiment 20000328 PARAMETER Experiment Name: At_42deg_Heat_Sub_P Parameter: Age (day) Value: 14
  misc_feature: MA Experiment 20000328 PARAMETER Experiment Name: At_42deg_Heat_Sub_P Parameter: Organism Value: A. thaliana
  misc_feature: MA Experiment 20000328 PARAMETER Experiment Name: At_42deg_Heat_Sub_P Parameter: Plant Line Value: WS
  misc_feature: MA Experiment 20000328 PARAMETER Experiment Name: At_42deg_Heat_Sub_P Parameter: Temperature (deg C) Value: 42 vs. 22
  misc_feature: MA Experiment 20000328 PARAMETER Experiment Name: At_42deg_Heat_Sub_P Parameter: Timepoint (hr) Value: 6
  misc_feature: MA Experiment 20000328 PARAMETER Experiment Name: At_42deg_Heat_Sub_P Parameter: Tissue Value: Aerial
  misc_feature: MA Experiment ID: 20000329 Result: Down-regulated in Transcription
  misc_feature: MA Experiment 20000329 PARAMETER Experiment Name: At_4deg_Cold_Sub_P Parameter: Age (day) Value: 14
  misc_feature: MA Experiment 20000329 PARAMETER Experiment Name: At_4deg_Cold_Sub_P Parameter: Organism Value: A. thaliana
  misc_feature: MA Experiment 20000329 PARAMETER Experiment Name: At_4deg_Cold_Sub_P Parameter: Plant Line Value: WS
  misc_feature: MA Experiment 20000329 PARAMETER Experiment Name: At_4deg_Cold_Sub_P Parameter: Temperature (deg C) Value: 4 vs. 22
  misc_feature: MA Experiment 20000329 PARAMETER Experiment Name: At_4deg_Cold_Sub_P Parameter: Timepoint (hr) Value: 6
  misc_feature: MA Experiment 20000329 PARAMETER Experiment Name: At_4deg_Cold_Sub_P Parameter: Tissue Value: Aerial
  misc_feature: MA Experiment ID: 20000355 Result: Up-regulated in Transcription
  misc_feature: MA Experiment 20000355 PARAMETER Experiment Name: At_Siliques_Sub_P Parameter: Age (day) Value: 21
  misc_feature: MA Experiment 20000355 PARAMETER Experiment Name: At_Siliques_Sub_P Parameter: Organism Value: A. thaliana
  misc_feature: MA Experiment 20000355 PARAMETER Experiment Name: At_Siliques_Sub_P Parameter: Plant Line Value: WS
  misc_feature: MA Experiment 20000355 PARAMETER Experiment Name: At_Siliques_Sub_P Parameter: Tissue Value: Less Than 5mm Siliques vs. Whole Plant
  misc_feature: MA Experiment ID: 20000439 Result: Up-regulated in Transcription
  misc_feature: MA Experiment 20000439 PARAMETER Experiment Name: At_Roots__P Parameter: Age (day) Value: 14 vs. 21
  misc_feature: MA Experiment 20000439 PARAMETER Experiment Name: At_Roots__P Parameter: Organism Value: A. thaliana
  misc_feature: MA Experiment 20000439 PARAMETER Experiment Name: At_Roots__P Parameter: Tissue Value: Roots vs. Whole Plant
  misc_feature: MA Experiment ID: 20000495 Result: Up-regulated in Transcription
  misc_feature: MA Experiment 20000495 PARAMETER Experiment Name: At_Guard_Cells_P Parameter: Harvest Date Value: 8/2/2002
  misc_feature: MA Experiment 20000495 PARAMETER Experiment Name: At_Guard_Cells_P Parameter: Organism Value: A. thaliana
  misc_feature: MA Experiment 20000495 PARAMETER Experiment Name: At_Guard_Cells_P Parameter: Tissue Value: Guard Cells vs. Leaves
  misc_feature: MA Experiment ID: 20000794 Result: Up-regulated in Transcription
  misc_feature: MA Experiment 20000794 PARAMETER Experiment Name: At_Petals_P Parameter: Age (day) Value: 23-25 days
  misc_feature: MA Experiment 20000794 PARAMETER Experiment Name: At_Petals_P Parameter: Plant Line Value: WS
  misc_feature: MA Experiment 20000794 PARAMETER Experiment Name: At_Petals_P Parameter: Tissue Value: Petals vs. Whole plant
  misc_feature: MA Experiment ID: 20001451 Result: Up-regulated in Transcription
  misc_feature: MA Experiment 20001451 PARAMETER Experiment Name: At_Far-red-induction_P Parameter: Age (day) Value: 7
  misc_feature: MA Experiment 20001451 PARAMETER Experiment Name: At_Far-red-induction_P Parameter: Light Value: Far-red vs. White
  misc_feature: MA Experiment 20001451 PARAMETER Experiment Name: At_Far-red-induction_P Parameter: Organism Value: A. thaliana
  misc_feature: MA Experiment 20001451 PARAMETER Experiment Name: At_Far-red-induction_P Parameter: Plant Line Value: Columbia
  misc_feature: MA Experiment 20001451 PARAMETER Experiment Name: At_Far-red-induction_P Parameter: Timepoint (hr) Value: 24
  misc_feature: MA Experiment 20001451 PARAMETER Experiment Name: At_Far-red-induction_P Parameter: Tissue Value: Whole Plant
  misc_feature: MA Experiment ID: 20001910 Result: Up-regulated in Transcription
  misc_feature: MA Experiment 20001910 PARAMETER Experiment Name: At_Drought_Reproduction_P Parameter: Age (day) Value: 37
  misc_feature: MA Experiment 20001910 PARAMETER Experiment Name: At_Drought_Reproduction_P Parameter: Organism Value: A. thaliana
  misc_feature: MA Experiment 20001910 PARAMETER Experiment Name: At_Drought_Reproduction_P Parameter: Plant Line Value: WS
  misc_feature: MA Experiment 20001910 PARAMETER Experiment Name: At_Drought_Reproduction_P Parameter: Timepoint (day) Value: 7
  misc_feature: MA Experiment 20001910 PARAMETER Experiment Name: At_Drought_Reproduction_P Parameter: Tissue Value: Flowers
  misc_feature: MA Experiment 20001910 PARAMETER Experiment Name: At_Drought_Reproduction_P Parameter: Treatment Value: Drought vs. No Drought
acttccgtcactcgcttccttcacgtctctctcccaaaattcaaattcctcaggcctaaccaatcctgtgatcgacgtcgtcaaatattcaaaagcagtccgtgatccattgcatgatcctcttcctgtgggattcttactctcatggctaacccagacgttaaagagattctctgcgattgtgtgataaacttgagagagaatccgaagaggcgaagggagacggtttacgtcggatgtggtgctggattcggcggcgataggccactggcggctctcaaactgcttcagagagttgaagagcttaactatcttgtccttgagtgcttagccgaacgaactttggctgatcgatggctttctatggcatctggcggtctcggctacgaccctcgtgtttcagagtggatgcagttgttgctacctttggctgtggagagaggcacttgtataatcactaacatgggtgcaattgatccctctggggctcagaagaaagttctcgaggtagccggtgaattaggtctcaccatttccgtggctgtggctcatgaggtgcattttgaaacaggctcgggatcatcttttggcggtcaatattgctctgcagggggtactagcacttatcttggagcagctcctattgttgaatgcctggagaagtaccaaccaaacgtgataattacttcaagagtggctgatgccgccttatttttagcaccaatggtgaggcgttcttgtcgtttcctgtttcgtgattaaatctgatcattcttgttgtgtcatcaggtctatgaactaggttggaattggaatgacttggagctgctagctcagggaactctcgctggccaccttctggagtgcggttgccagctcactggtggatacttcatgcatccaggtgatcagtatagagacatggctttccctcttctccaggatttgtcacttccttatgcagagattggctatgatggtaaagtatgtgtatcaaaggttgaaggtagtggtggaattttaaataccagtacttgcgccgagcaacttctgtatgaaattgctgaccctagtgcctacattacacctgatgtggtaatcgatattcgaggtgtttctttccttcccctgtcagactgcaaagtacaatgcagtggagcaaaaccatcttctaacacttctgtgcctgagaaactcttgcggttaattccaaaggagtgtggttggaaagggtggggagagatatcttatggaggaaatggttctatacaacgtgctaaagcttcagagtttctggttcgatcttggatggaagaaaccattcctggtgttaaccattgtattctttcttatgtgattggggttgatagcttgaaggcgacaagcaacggcactgaatcttggcagtcatgtggagatattagattacgtatggatggtctttttaaactgaaggaacatgcggtccagttaacaaaagagtttactgctctatatacaaacggaccagctggtggtggtggaattagtaccggacacaagatggaaattgttcttgaaaagcgtttggtcagccgtgaatctgtaatgtggaaaactggacttcagcacaccaacacttcagagccagagacctctgaacatcattctccagagaaaatgccaaagttacctaaggaaaatccaaagaaccttacaatgagaggctatcaatctggatttcatcactctcctgctccatctggccaaaagatcccactctactctgttgcacatagccgggctggcgataaaggaaacgacataaacttctcaataatcccgcattattccccagatgtcgagcgtctgaaactcataattactcctcaatgggtaaagcatgtgatgtcagttctgttatcaacctcttcgtttctggaattggatgcaaaaccaatggatgaaaatgtgtcagtagagatatatgacgttgaaggcattcatgctatgaatgttgtcgtacggaacatattagatggtggagtcaactgttccaggaggatcgaccgacacggaaagacaatctcagatctcatcttgtgtcaacaagttgtgttgatctgactgacatgggttgcaccacctcagagacagttggcttaaagtaacaatcccttattggattgaaattgtcagaaaccacaacccttcttttgctcaactccaatcactttgccacccaattttatctcattcattttgcaaaaaagatcaaagagagagagagagagagagagaaagaaaaaaaggaaaaaaccttcctccgttacaacctcacaattgcaacaaagtttcatataaaagaggacagaaatttcgcaggttcctccgttgtctgaggatcttggagaaggaaggaaacaacaacaaccaaaaaaaaaccaaaaaaaaaaaagataaaacaaaaaaaatgtctttcacaggaactctcgacaaatgcaatgtttgtgataagacagtctatgtggtggacatgttgtccattgaaggaatgccttaccacaagtcttgcttcaggtgtacccattgcaaaggaacccttcagatgagcaactattcctccatggacggagttttgtactgcaagactcattttgagcaactcttcaaggaatctggcaatttcagcaaaaactttcaaccaggaaaaactgagaagccagagctgactaggactcccagcaagatatcttccatcttctgtggaacacaagacaagtgtgccgcttgcgaaaaaactgtttaccctcttgaaaagatacaaatggaaggagaatgcttccacaagacatgtttccggtgcgctcacggtgggtgtacgctgactcactcctcctacgcctccttagatagcgttctctattgccgacatcactttaaccaactcttcatggagaaaggaaactacgctcacgtcctccaagccgccaatcaccgtcgcacagcctcaggcaacactcttccaccggaacctaccgaagacgtcgccgtggaggccaaggaagagaatggcgtttcagagtcttgaatatctcttacatgagtgtttttgagtgaatgattgaatgaatgttgttgcgggggaaagatttgatttcatttgtaatgagttgtttccatatgaagacatgattttttttgttatttttttaattcattcgttatacatttattattacacacgaaaaaaaggcaagaattgatgttttttcactct

SEQ ID NO: 29043 - protein, 403 aa, Arabidopsis thaliana
  peptide (1)..(403): Ceres Seq. ID no. 12323884
  misc_feature (1)..(90): Homolog of NCBI NO: 29830411 NR Description: hypothetical protein [Streptomyces avermitilis
  misc_feature (1)..(143): Homolog of NCBI NO: 21222769 NR Description: conserved hypothetical protein [Streptomyces
  misc_feature (1)..(88): Homolog of NCBI NO: 15608116 NR Description: hypothetical protein Rv0976c [Mycobacterium
  misc_feature (1)..(332): Homolog of NCBI NO: 15598082 NR Description: hypothetical protein [Pseudomonas aeruginosa
  misc_feature (280)..(396): Homolog of NCBI NO: 23108010 NR Description: hypothetical protein [Novosphingobium
  misc_feature (1)..(159): Homolog of NCBI NO: 23108010 NR Description: hypothetical protein [Novosphingobium
  misc_feature (1)..(231): Homolog of NCBI NO: 33603653 NR Description: hypothetical protein BB4681 [Bordetella
  misc_feature (1)..(231): Homolog of NCBI NO: 33598699 NR Description: hypothetical protein BPP4211 [Bordetella
  misc_feature (1)..(231): Homolog of NCBI NO: 33602182 NR Description: conserved hypothetical protein [Bordetella
  misc_feature (1)..(402): Homolog of NCBI NO: 34394893 NR Description: unknown protein [Oryza sativa (japonica
MHPGDQYRDMAFPLLQDLSLPYAEIGYDGKVCVSKVEGSGGILNTSTCAEQLLYEIADPSAYITPDVVIDIRGVSFLPLSDCKVQCSGAKPSSNTSVPEKLLRLIPKECGWKGWGEISYGGNGSIQRAKASEFLVRSWMEETIPGVNHCILSYVIGVDSLKATSNGTESWQSCGDIRLRMDGLFKLKEHAVQLTKEFTALYTNGPAGGGGISTGHKMEIVLEKRLVSRESVMWKTGLQHTNTSEPETSEHHSPEKMPKLPKENPKNLTMRGYQSGFHHSPAPSGQKIPLYSVAHSRAGDKGNDINFSIIPHYSPDVERLKLIITPQWVKHVMSVLLSTSSFLELDAKPMDENVSVEIYDVEGIHAMNVVVRNILDGGVNCSRRIDRHGKTISDLILCQQVVLI

SEQ ID NO: 29044 - protein, 394 aa, Arabidopsis thaliana
  peptide (1)..(394): Ceres Seq. ID no. 12323885
  misc_feature (1)..(81): Homolog of NCBI NO: 29830411 NR Description: hypothetical protein [Streptomyces avermitilis
  misc_feature (1)..(134): Homolog of NCBI NO: 21222769 NR Description: conserved hypothetical protein [Streptomyces
  misc_feature (1)..(79): Homolog of NCBI NO: 15608116 NR Description: hypothetical protein Rv0976c [Mycobacterium
  misc_feature (1)..(323): Homolog of NCBI NO: 15598082 NR Description: hypothetical protein [Pseudomonas aeruginosa
  misc_feature (271)..(387): Homolog of NCBI NO: 23108010 NR Description: hypothetical protein [Novosphingobium
  misc_feature (1)..(150): Homolog of NCBI NO: 23108010 NR Description: hypothetical protein [Novosphingobium
  misc_feature (1)..(222): Homolog of NCBI NO: 33603653 NR Description: hypothetical protein BB4681 [Bordetella
  misc_feature (1)..(222): Homolog of NCBI NO: 33598699 NR Description: hypothetical protein BPP4211 [Bordetella
  misc_feature (1)..(222): Homolog of NCBI NO: 33602182 NR Description: conserved hypothetical protein [Bordetella
  misc_feature (1)..(393): Homolog of NCBI NO: 34394893 NR Description: unknown protein [Oryza sativa (japonica
MAFPLLQDLSLPYAEIGYDGKVCVSKVEGSGGILNTSTCAEQLLYEIADPSAYITPDVVIDIRGVSFLPLSDCKVQCSGAKPSSNTSVPEKLLRLIPKECGWKGWGEISYGGNGSIQRAKASEFLVRSWMEETIPGVNHCILSYVIGVDSLKATSNGTESWQSCGDIRLRMDGLFKLKEHAVQLTKEFTALYTNGPAGGGGISTGHKMEIVLEKRLVSRESVMWKTGLQHTNTSEPETSEHHSPEKMPKLPKENPKNLTMRGYQSGFHHSPAPSGQKIPLYSVAHSRAGDKGNDINFSIIPHYSPDVERLKLIITPQWVKHVMSVLLSTSSFLELDAKPMDENVSVEIYDVEGIHAMNVVVRNILDGGVNCSRRIDRHGKTISDLILCQQVVLI

SEQ ID NO: 29045 - protein, 265 aa, Arabidopsis thaliana
  peptide (1)..(265): Ceres Seq. ID no. 12323886
  misc_feature (1)..(194): Homolog of NCBI NO: 15598082 NR Description: hypothetical protein [Pseudomonas aeruginosa
  misc_feature (142)..(258): Homolog of NCBI NO: 23108010 NR Description: hypothetical protein [Novosphingobium
  misc_feature (1)..(21): Homolog of NCBI NO: 23108010 NR Description: hypothetical protein [Novosphingobium
  misc_feature (1)..(93): Homolog of NCBI NO: 33603653 NR Description: hypothetical protein BB4681 [Bordetella
  misc_feature (1)..(93): Homolog of NCBI NO: 33598699 NR Description: hypothetical protein BPP4211 [Bordetella
  misc_feature (1)..(93): Homolog of NCBI NO: 33602182 NR Description: conserved hypothetical protein [Bordetella
  misc_feature (1)..(264): Homolog of NCBI NO: 34394893 NR Description: unknown protein [Oryza sativa (japonica
MEETIPGVNHCILSYVIGVDSLKATSNGTESWQSCGDIRLRMDGLFKLKEHAVQLTKEFTALYTNGPAGGGGISTGHKMEIVLEKRLVSRESVMWKTGLQHTNTSEPETSEHHSPEKMPKLPKENPKNLTMRGYQSGFHHSPAPSGQKIPLYSVAHSRAGDKGNDINFSIIPHYSPDVERLKLIITPQWVKHVMSVLLSTSSFLELDAKPMDENVSVEIYDVEGIHAMNVVVRNILDGGVNCSRRIDRHGKTISDLILCQQVVLI

SEQ ID NO: 29046 - DNA, 1766 bp, Arabidopsis thaliana
  misc_feature (1)..(1766): Ceres Seq. ID no. 13647205
  misc_feature: MA Experiment ID: 20000315 Result: Down-regulated in Transcription
  misc_feature: MA Experiment 20000315 PARAMETER Experiment Name: At_14day_Shoots-Roots_Sub_P Parameter: Age (day) Value: 14
  misc_feature: MA Experiment 20000315 PARAMETER Experiment Name: At_14day_Shoots-Roots_Sub_P Parameter: Organism Value: A. thaliana
  misc_feature: MA Experiment 20000315 PARAMETER Experiment Name: At_14day_Shoots-Roots_Sub_P Parameter: Plant Line Value: WS
  misc_feature: MA Experiment 20000315 PARAMETER Experiment Name: At_14day_Shoots-Roots_Sub_P Parameter: Tissue Value: Shoots vs. Whole Plant
  misc_feature: MA Experiment ID: 20000329 Result: Down-regulated in Transcription
  misc_feature: MA Experiment 20000329 PARAMETER Experiment Name: At_4deg_Cold_Sub_P Parameter: Age (day) Value: 14
  misc_feature: MA Experiment 20000329 PARAMETER Experiment Name: At_4deg_Cold_Sub_P Parameter: Organism Value: A. thaliana
  misc_feature: MA Experiment 20000329 PARAMETER Experiment Name: At_4deg_Cold_Sub_P Parameter: Plant Line Value: WS
  misc_feature: MA Experiment 20000329 PARAMETER Experiment Name: At_4deg_Cold_Sub_P Parameter: Temperature (deg C) Value: 4 vs. 22
  misc_feature: MA Experiment 20000329 PARAMETER Experiment Name: At_4deg_Cold_Sub_P Parameter: Timepoint (hr) Value: 6
  misc_feature: MA Experiment 20000329 PARAMETER Experiment Name: At_4deg_Cold_Sub_P Parameter: Tissue Value: Aerial
  misc_feature: MA Experiment ID: 20000355 Result: Down-regulated in Transcription
  misc_feature: MA Experiment 20000355 PARAMETER Experiment Name: At_Siliques_Sub_P Parameter: Age (day) Value: 21
  misc_feature: MA Experiment 20000355 PARAMETER Experiment Name: At_Siliques_Sub_P Parameter: Organism Value: A. thaliana
  misc_feature: MA Experiment 20000355 PARAMETER Experiment Name: At_Siliques_Sub_P Parameter: Plant Line Value: WS
  misc_feature: MA Experiment 20000355 PARAMETER Experiment Name: At_Siliques_Sub_P Parameter: Tissue Value: Less Than 5mm Siliques vs. Whole Plant
gtttttaatcactcaaccattaaaccccattttgatctctagttttttaaaagcaggagattttccttttcccagaaaagaaatttcccaaatcaaagtttcgagctttcacttctcgacttgcaaattctcgtcctttttactgaattcgatctgggtttttgtttttgattagtaaaataacaaaaaaaaaaaaaggatttatcagaaatggctgcgagcgatgaagttaatcttattgagagcagaacagtggttcctctcaatacatgggttttaatatccaacttcaaagtagcctacaatatccttcgtcgccctgatggaacctttaaccgacacttagctgagtatctagaccgtaaagtcactgcaaacgccaatccggttgatggggttttctcgttcgatgtcttgattgatcgcaggatcaatcttctaagcagagtctatagaccagcttatgcagatcaagagcaacctcctagtattttagatctcgagaagcctgttgatggcgacattgtccctgttatattgttcttccatggaggtagctttgctcattcttctgcaaacagtgccatctacgatactctttgtcgcaggcttgttggtttgtgcaagtgtgttgttgtctctgtgaattatcggcgtgcaccagagaatccatacccttgtgcttatgatgatggttggattgctcttaattgggttaactcgagatcttggcttaaatccaagaaagactcaaaggtccatattttcttggctggtgatagctctggaggtaacatcgcgcataatgtggctttaagagcgggtgaatcgggaatcgatgttttggggaacattctgctgaatcctatgtttggtgggaatgagagaacggagtctgagaaaagtttggatgggaaatactttgtgacggttagagaccgcgattggtactggaaagcgtttttacccgagggagaagatagagagcatccagcgtgtaatccgtttagcccgagagggaaaagcttagaaggagtgagtttccccaagagtcttgtggttgtcgcgggtttggatttgattagagattggcagttggcatacgcggaagggctcaagaaagcgggtcaagaggttaagcttatgcatttagagaaagcaactgttgggttttacctcttgcctaataacaatcatttccataatgttatggatgagatttcggcgtttgtaaacgcggaatgttaacactgggttagagaaagaaggttgttttaacaaagccaagacatctttcaaactaacacacaggtgaatgtattgcctgtggattctctcgtttagttttgtttttgtgtttagtatctaagtgtgtggcggtctgcggcagcctttgtgatggctgtttaaacgctggattctgaaacgctaaagcttgtggaagaacagtgaggcgtttagagacttggaaaggaaccaagcactagtaaaaatttctcctttttttgtctgtaatatttggcatttagcttttacccttgagcctttttactaactaaaagctgattttttcagcatgagagtggtaattagatatctataaatataaatatttcaagaatgtaatgtttatacacaaattttagtgattttggtaaatgtatgtagggtctgcaaaaaaaaaaaaaaaaaaactcgagggggggcccggtacccaattcagttgtttaaacacaataaagttggaacgggaggggggaaaggat

SEQ ID NO: 29047 - protein, 345 aa, Arabidopsis thaliana
  peptide (1)..(345): Ceres Seq. ID no. 15218678
  misc_feature (101)..(151): Pfam Name: Carboxylesterase Pfam Description: Carboxylesterase
  misc_feature (101)..(151): Pfam Name: Carboxylesterase Pfam Description: Carboxylesterase
  misc_feature (30)..(341): Homolog of NCBI NO: 34904760 NR Description: similar to carboxylesterase
  misc_feature (13)..(345): Homolog of NCBI NO: 34904772 NR Description: similar to carboxylesterase
  misc_feature (16)..(343): Homolog of NCBI NO: 34904774 NR Description: similar to carboxylesterase
  misc_feature (16)..(343): Homolog of NCBI NO: 34393714 NR Description: putative esterase [Oryza sativa (japonica
  misc_feature (3)..(341): Homolog of NCBI NO: 34904770 NR Description: similar to carboxylesterase
  misc_feature (30)..(341): Homolog of NCBI NO: 34904760 NR Description: similar to carboxylesterase
  misc_feature (16)..(343): Homolog of NCBI NO: 34904774 NR Description: similar to carboxylesterase
  misc_feature (3)..(341): Homolog of NCBI NO: 34904770 NR Description: similar to carboxylesterase
  misc_feature (1)..(345): Homolog of NCBI NO: 15229905 NR Description: expressed protein [Arabidopsis thaliana]
  misc_feature (1)..(345): Homolog of NCBI NO: 15240483 NR Description: expressed protein [Arabidopsis thaliana]
  misc_feature (1)..(343): Homolog of NCBI NO: 15229371 NR Description: expressed protein [Arabidopsis thaliana]
  misc_feature (13)..(342): Homolog of NCBI NO: 21618039 NR Description: unknown [Arabidopsis thaliana]
  misc_feature (13)..(342): Homolog of NCBI NO: 15237783 NR Description: expressed protein [Arabidopsis thaliana]
  misc_feature (16)..(343): Homolog of NCBI NO: 34393714 NR Description: putative esterase [Oryza sativa (japonica
  misc_feature (13)..(345): Homolog of NCBI NO: 34904772 NR Description: similar to carboxylesterase
  misc_feature (13)..(342): Homolog of NCBI NO: 15237783 NR Description: expressed protein [Arabidopsis thaliana]
  misc_feature (13)..(342): Homolog of NCBI NO: 21618039 NR Description: unknown [Arabidopsis thaliana]
  misc_feature (1)..(343): Homolog of NCBI NO: 15229371 NR Description: expressed protein [Arabidopsis thaliana]
  misc_feature (1)..(345): Homolog of NCBI NO: 15240483 NR Description: expressed protein [Arabidopsis thaliana]
  misc_feature (1)..(345): Homolog of NCBI NO: 15229905 NR Description: expressed protein [Arabidopsis thaliana]
MAASDEVNLIESRTVVPLNTWVLISNFKVAYNILRRPDGTFNRHLAEYLDRKVTANANPVDGVFSFDVLIDRRINLLSRVYRPAYADQEQPPSILDLEKPVDGDIVPVILFFHGGSFAHSSANSAIYDTLCRRLVGLCKCVVVSVNYRRAPENPYPCAYDDGWIALNWVNSRSWLKSKKDSKVHIFLAGDSSGGNIAHNVALRAGESGIDVLGNILLNPMFGGNERTESEKSLDGKYFVTVRDRDWYWKAFLPEGEDREHPACNPFSPRGKSLEGVSFPKSLVVVAGLDLIRDWQLAYAEGLKKAGQEVKLMHLEKATVGFYLLPNNNHFHNVMDEISAFVNAEC

SEQ ID NO: 29048 - DNA, 2322 bp, Arabidopsis thaliana
  misc_feature (1)..(2322): Ceres Seq. ID no. 12385531
  misc_feature: MA Experiment ID: 108462 Result: Up-regulated in Transcription
  misc_feature: MA Experiment 108462 PARAMETER Experiment Name: At_Germinating_Seeds_cDNA_P Parameter: Age (day) Value: 2 vs. 0
  misc_feature: MA Experiment 108462 PARAMETER Experiment Name: At_Germinating_Seeds_cDNA_P Parameter: Tissue Value: Germinating Seeds
  misc_feature: MA Experiment ID: 108573 Result: Up-regulated in Transcription
  misc_feature: MA Experiment 108573 PARAMETER Experiment Name: At_Drought_cDNA_P Parameter: Timepoint (hr) Value: 6
  misc_feature: MA Experiment 108573 PARAMETER Experiment Name: At_Drought_cDNA_P Parameter: Tissue Value: Aerial
  misc_feature: MA Experiment 108573 PARAMETER Experiment Name: At_Drought_cDNA_P Parameter: Treatment Value: Drought vs. No Drought
  misc_feature: MA Experiment ID: 20000179 Result: Up-regulated in Transcription
  misc_feature: MA Experiment 20000179 PARAMETER Experiment Name: At_Germinating_Seeds_P Parameter: Age (hr) Value: 6 vs. 0
  misc_feature: MA Experiment 20000179 PARAMETER Experiment Name: At_Germinating_Seeds_P Parameter: Tissue Value: Germinating Seeds
  misc_feature: MA Experiment ID: 20000180 Result: Up-regulated in Transcription
  misc_feature: MA Experiment 20000180 PARAMETER Experiment Name: At_Germinating_Seeds_P Parameter: Age (hr) Value: 24 vs. 0
  misc_feature: MA Experiment 20000180 PARAMETER Experiment Name: At_Germinating_Seeds_P Parameter: Tissue Value: Germinating Seeds
  misc_feature: MA Experiment ID: 20001557 Result: Up-regulated in Transcription
  misc_feature: MA Experiment 20001557 PARAMETER Experiment Name: At_Drought_Soil_Dry_P Parameter: Age (day) Value: 27
  misc_feature: MA Experiment 20001557 PARAMETER Experiment Name: At_Drought_Soil_Dry_P Parameter: Organism Value: A. thaliana
  misc_feature: MA Experiment 20001557 PARAMETER Experiment Name: At_Drought_Soil_Dry_P Parameter: Plant Line Value: WS
  misc_feature: MA Experiment 20001557 PARAMETER Experiment Name: At_Drought_Soil_Dry_P Parameter: Post Timepoint (hr) Value: 3
  misc_feature: MA Experiment 20001557 PARAMETER Experiment Name: At_Drought_Soil_Dry_P Parameter: Post-Treatment Value: Re-Water vs. No Drought
  misc_feature: MA Experiment 20001557 PARAMETER Experiment Name: At_Drought_Soil_Dry_P Parameter: Timepoint (day) Value: 13
  misc_feature: MA Experiment 20001557 PARAMETER Experiment Name: At_Drought_Soil_Dry_P Parameter: Treatment Value: Drought vs. No Drought
gtttttcccattaccgttctctgctccattgggttctttcctcttttctcccagattcatcaatccctcctgctaccgcgagagagtaacaactcaccggacgtttcaaatccatcctccgataactatattcgtttcgttagatctagatctgagcgtcggtgagagattttctggatctgtgatacgttccaggaaacatggcgacgatgaaaagtttgataggtctgataaacaaaatccagagggcgtgtactgtcctcggagatcatggcggtgaaggaatgtcgctttgggaagctctcccaaccgtcgctgtcgttggtggccagagttccggaaaatcttcagttctagaaagtgttgtgggaagagattttctgcctcgtggatctggtatcgttacaaggaggccattggtgttgcaacttcataagactgaagacgggacaactgagtacgctgagtttcttcatgctcctaagaagagatttgctgattttgctgctgtgcggaaagaaattgaggatgaaactgatcgtattactgggaagtcaaaacaaatctcaaacattccaattcagctgagcatatattctcctaatgttgttaatctgacgctcatagatcttccgggtttgaccaaggtcgctgtagatggacaaccggaaagtattgtccaagacattgaaaatatggtccggtcttatgttgaaaagccaaattgcatcatattggctatttctccagcaaatcaagatattgctacctcagatgctataaaacttgctagagaagttgatcctacaggcgaaaggacttttggtgttgcaaccaagcttgatatcatggataaaggaacagattgtctagatgttcttgagggaaggtcataccgtttgcaacatccctgggttggaattgtgaatcgttcacaagctgatattaataagagagtcgatatgattgctgcacgtagaaaagagcaagaatattttgaaacaagccctgaatacgggcacttagccagtagaatgggatcagaatatctagcaaaactcttgtctcagcacttagagactgttatcaggcagaaaatccccagtattgttgctttgatcaacaaaagcatcgatgagataaatgcagaacttgataggattgggagacccattgcagtagattcaggagcccaactttacacaattttggaactctgccgggcatttgatcgtgtctttaaggagcacttggatggaggacgacctggtggagaccgaatttatggagttttcgaccatcaattaccagcagccttaaagaaacttccctttgatcgacatctgtctaccaaaaatgttcagaaggttgtttcagaagcagatggttatcagccgcatcttattgctcctgaacaaggatacagaaggctcattgatggatccataagctatttcaaaggaccagctgaagccactgtcgatgcagtgcatttcgtattgaaggagctggtcagaaagtcaatttcagaaacagaggaactgaagcgtttcccgactctagcaagcgatatagcagctgctgcaaatgaagctcttgaaagattcagagacgaaagcaggaaaacggttttgcgtctggtggatatggaatctagctacctcacggttgagttcttcaggaaactccatcttgaacccgagaaagagaaaccaaacccaaggaatgccccagcaccaaacgcagacccctactccgataatcacttcagaaagatcggatccaacgtgagtgcatacataaacatggtctgcgacacattgagaaactctcttcccaaagctgtcgtttactgccaagttagagaagctaagagatcgcttctcaacttcttctacgctcaagttggcaggaaagagaaggagaagctgggtgctatgttggacgaagacccacagctgatggaacgaagaggaaccttagctaaacggctagagctttacaaacaagctagagacgacatcgatgcagtggcttggaagtaagggggtttgctaagacatattctttatattgttaatttctttgttcgtgtgggcacactgcattataatagatatgtttggagttctaacttccagtctacacaaacatacacgcgactactcatgttttcttgggtcgctaatttctatcacaactttcccacttttttttggtgtgtatcttcgattcttgaatactggtttttagaacagttaagacatattttgaagtcgcactctttacattagacaaaaaggaagctaatctttgattttt

SEQ ID NO: 29049 - protein, 614 aa, Arabidopsis thaliana
  peptide (1)..(614): Ceres Seq. ID no. 12385532
  misc_feature (223)..(509): Pfam Name: Dynamin central region Pfam Description: Dynamin central region
  misc_feature (153)..(613): Homolog of NCBI NO: 30689765 NR Description: phragmoplastin -related [Arabidopsis thaliana]
  misc_feature (4)..(613): Homolog of NCBI NO: 30689768 NR Description: phragmoplastin -related [Arabidopsis thaliana]
  misc_feature (1)..(613): Homolog of NCBI NO: 6651401 NR Description: dynamin-like protein 4 [Arabidopsis thaliana]
  misc_feature (4)..(613): Homolog of NCBI NO: 11357275 NR Description: dynamin-like protein 4 (ADL4) - Arabidopsis
  misc_feature (1)..(613): Homolog of NCBI NO: 18411520 NR Description: dynamin-like protein 4 (ADL4)
  misc_feature (1)..(614): Homolog of NCBI NO: 18071348 NR Description: putative GTP-binding protein
  misc_feature (527)..(614): Homolog of NCBI NO: 8778229 NR Description: F10B6.23 [Arabidopsis thaliana]
  misc_feature (446)..(541): Homolog of NCBI NO: 8778229 NR Description: F10B6.23 [Arabidopsis thaliana]
  misc_feature (1)..(135): Homolog of NCBI NO: 8778229 NR Description: F10B6.23 [Arabidopsis thaliana]
  misc_feature (137)..(466): Homolog of NCBI NO: 8778229 NR Description: F10B6.23 [Arabidopsis thaliana]
MATMKSLIGLINKIQRACTVLGDHGGEGMSLWEALPTVAVVGGQSSGKSSVLESVVGRDFLPRGSGIVTRRPLVLQLHKTEDGTTEYAEFLHAPKKRFADFAAVRKEIEDETDRITGKSKQISNIPIQLSIYSPNVVNLTLIDLPGLTKVAVDGQPESIVQDIENMVRSYVEKPNCIILAISPANQDIATSDAIKLAREVDPTGERTFGVATKLDIMDKGTDCLDVLEGRSYRLQHPWVGIVNRSQADINKRVDMIAARRKEQEYFETSPEYGHLASRMGSEYLAKLLSQHLETVIRQKIPSIVALINKSIDEINAELDRIGRPIAVDSGAQLYTILELCRAFDRVFKEHLDGGRPGGDRIYGVFDHQLPAALKKLPFDRHLSTKNVQKVVSEADGYQPHLIAPEQGYRRLIDGSISYFKGPAEATVDAVHFVLKELVRKSISETEELKRFPTLASDIAAAANEALERFRDESRKTVLRLVDMESSYLTVEFFRKLHLEPEKEKPNPRNAPAPNADPYSDNHFRKIGSNVSAYINMVCDTLRNSLPKAVVYCQVREAKRSLLNFFYAQVGRKEKEKLGAMLDEDPQLMERRGTLAKRLELYKQARDDIDAVAWK

SEQ ID NO: 29050 - protein, 611 aa, Arabidopsis thaliana
  peptide (1)..(611): Ceres Seq. ID no. 12385533
  misc_feature (220)..(506): Pfam Name: Dynamin central region Pfam Description: Dynamin central region
  misc_feature (150)..(610): Homolog of NCBI NO: 30689765 NR Description: phragmoplastin -related [Arabidopsis thaliana]
  misc_feature (1)..(610): Homolog of NCBI NO: 30689768 NR Description: phragmoplastin -related [Arabidopsis thaliana]
  misc_feature (1)..(610): Homolog of NCBI NO: 6651401 NR Description: dynamin-like protein 4 [Arabidopsis thaliana]
  misc_feature (1)..(610): Homolog of NCBI NO: 11357275 NR Description: dynamin-like protein 4 (ADL4) - Arabidopsis
  misc_feature (1)..(610): Homolog of NCBI NO: 18411520 NR Description: dynamin-like protein 4 (ADL4)
  misc_feature (1)..(611): Homolog of NCBI NO: 18071348 NR Description: putative GTP-binding protein
  misc_feature (524)..(611): Homolog of NCBI NO: 8778229 NR Description: F10B6.23 [Arabidopsis thaliana]
  misc_feature (443)..(538): Homolog of NCBI NO: 8778229 NR Description: F10B6.23 [Arabidopsis thaliana]
  misc_feature (1)..(132): Homolog of NCBI NO: 8778229 NR Description: F10B6.23 [Arabidopsis thaliana]
  misc_feature (134)..(463): Homolog of NCBI NO: 8778229 NR Description: F10B6.23 [Arabidopsis thaliana]
MKSLIGLINKIQRACTVLGDHGGEGMSLWEALPTVAVVGGQSSGKSSVLESVVGRDFLPRGSGIVTRRPLVLQLHKTEDGTTEYAEFLHAPKKRFADFAAVRKEIEDETDRITGKSKQISNIPIQLSIYSPNVVNLTLIDLPGLTKVAVDGQPESIVQDIENMVRSYVEKPNCIILAISPANQDIATSDAIKLAREVDPTGERTFGVATKLDIMDKGTDCLDVLEGRSYRLQHPWVGIVNRSQADINKRVDMIAARRKEQEYFETSPEYGHLASRMGSEYLAKLLSQHLETVIRQKIPSIVALINKSIDEINAELDRIGRPIAVDSGAQLYTILELCRAFDRVFKEHLDGGRPGGDRIYGVFDHQLPAALKKLPFDRHLSTKNVQKVVSEADGYQPHLIAPEQGYRRLIDGSISYFKGPAEATVDAVHFVLKELVRKSISETEELKRFPTLASDIAAAANEALERFRDESRKTVLRLVDMESSYLTVEFFRKLHLEPEKEKPNPRNAPAPNADPYSDNHFRKIGSNVSAYINMVCDTLRNSLPKAVVYCQVREAKRSLLNFFYAQVGRKEKEKLGAMLDEDPQLMERRGTLAKRLELYKQARDDIDAVAWK

SEQ ID NO: 29051 - protein, 586 aa, Arabidopsis thaliana
  peptide (1)..(586): Ceres Seq. ID no. 12385534
  misc_feature (195)..(481): Pfam Name: Dynamin central region Pfam Description: Dynamin central region
  misc_feature (125)..(585): Homolog of NCBI NO: 30689765 NR Description: phragmoplastin -related [Arabidopsis thaliana]
  misc_feature (1)..(585): Homolog of NCBI NO: 30689768 NR Description: phragmoplastin -related [Arabidopsis thaliana]
  misc_feature (1)..(585): Homolog of NCBI NO: 6651401 NR Description: dynamin-like protein 4 [Arabidopsis thaliana]
  misc_feature (1)..(585): Homolog of NCBI NO: 11357275 NR Description: dynamin-like protein 4 (ADL4) - Arabidopsis
  misc_feature (1)..(585): Homolog of NCBI NO: 18411520 NR Description: dynamin-like protein 4 (ADL4)
  misc_feature (1)..(586): Homolog of NCBI NO: 18071348 NR Description: putative GTP-binding protein
  misc_feature (499)..(586): Homolog of NCBI NO: 8778229 NR Description: F10B6.23 [Arabidopsis thaliana]
  misc_feature (418)..(513): Homolog of NCBI NO: 8778229 NR Description: F10B6.23 [Arabidopsis thaliana]
  misc_feature (1)..(107): Homolog of NCBI NO: 8778229 NR Description: F10B6.23 [Arabidopsis thaliana]
  misc_feature (109)..(438): Homolog of NCBI NO: 8778229 NR Description: F10B6.23 [Arabidopsis thaliana]
MSLWEALPTVAVVGGQSSGKSSVLESVVGRDFLPRGSGIVTRRPLVLQLHKTEDGTTEYAEFLHAPKKRFADFAAVRKEIEDETDRITGKSKQISNIPIQLSIYSPNVVNLTLIDLPGLTKVAVDGQPESIVQDIENMVRSYVEKPNCIILAISPANQDIATSDAIKLAREVDPTGERTFGVATKLDIMDKGTDCLDVLEGRSYRLQHPWVGIVNRSQADINKRVDMIAARRKEQEYFETSPEYGHLASRMGSEYLAKLLSQHLETVIRQKIPSIVALINKSIDEINAELDRIGRPIAVDSGAQLYTILELCRAFDRVFKEHLDGGRPGGDRIYGVFDHQLPAALKKLPFDRHLSTKNVQKVVSEADGYQPHLIAPEQGYRRLIDGSISYFKGPAEATVDAVHFVLKELVRKSISETEELKRFPTLASDIAAAANEALERFRDESRKTVLRLVDMESSYLTVEFFRKLHLEPEKEKPNPRNAPAPNADPYSDNHFRKIGSNVSAYINMVCDTLRNSLPKAVVYCQVREAKRSLLNFFYAQVGRKEKEKLGAMLDEDPQLMERRGTLAKRLELYKQARDDIDAVAWK

SEQ ID NO: 29052 - DNA, 1400 bp, Arabidopsis thaliana
  misc_feature (1)..(1400): Ceres Seq. ID no. 12423119
  misc_feature: MA Experiment ID: 20000265 Result: Up-regulated in Transcription
  misc_feature: MA Experiment 20000265 PARAMETER Experiment Name: At_Open_Flower_P Parameter: Age (day) Value: 21
  misc_feature: MA Experiment 20000265 PARAMETER Experiment Name: At_Open_Flower_P Parameter: Plant Line Value: WS
  misc_feature: MA Experiment 20000265 PARAMETER Experiment Name: At_Open_Flower_P Parameter: Tissue Value: Closed Flower vs. Whole Plant
  misc_feature: MA Experiment ID: 20000286 Result: Up-regulated in Transcription
  misc_feature: MA Experiment 20000286 PARAMETER Experiment Name: At_Open_Flower_P Parameter: Age (day) Value: 21
  misc_feature: MA Experiment 20000286 PARAMETER Experiment Name: At_Open_Flower_P Parameter: Plant Line Value: WS
  misc_feature: MA Experiment 20000286 PARAMETER Experiment Name: At_Open_Flower_P Parameter: Tissue Value: Half Open vs. Whole Plant
  misc_feature: MA Experiment ID: 20001910 Result: Down-regulated in Transcription
  misc_feature: MA Experiment 20001910 PARAMETER Experiment Name: At_Drought_Reproduction_P Parameter: Age (day) Value: 37
  misc_feature: MA Experiment 20001910 PARAMETER Experiment Name: At_Drought_Reproduction_P Parameter: Organism Value: A. thaliana
  misc_feature: MA Experiment 20001910 PARAMETER Experiment Name: At_Drought_Reproduction_P Parameter: Plant Line Value: WS
  misc_feature: MA Experiment 20001910 PARAMETER Experiment Name: At_Drought_Reproduction_P Parameter: Timepoint (day) Value: 7
  misc_feature: MA Experiment 20001910 PARAMETER Experiment Name: At_Drought_Reproduction_P Parameter: Tissue Value: Flowers
  misc_feature: MA Experiment 20001910 PARAMETER Experiment Name: At_Drought_Reproduction_P Parameter: Treatment Value: Drought vs. No Drought
aagaacaagaagaaaaaggtttgtgaaaaaaaaacaaaggcaaacatggtggagggcataccaaagagatggaaggtgctaagtggccaaaacaaatggaaaggcctgcttgatccacttgacccggatcttcgccgctacatcattcactacggcgagatgtctcaggttggttacgatgcctttaactgggaccgtaagtccagatacgccggtgattgttattactccaagaaccgactgtttgctcgaaccggcttccttaaagccaaccctttcaggtacaaagtgactaagtacatctacgcaacagcttccataaagttaccaatctctttcatcgtaaagtctttgtcaaaggatgcatctcacgtgcagactaactggatgggttacattgcggtagctacagaccagggaaaagcgatgttagggaggagagacattgttgttgcatggagaggaactctacagccatatgaatgggctaatgatttcgattttccgcttgagccagctatctcggttttcccagtaactgaccccaaagataaccctcgtattggaagtggctggctcgacatctataccgcttctgattctcgctcaccttatgacacgactagtgcacaagaacaggtacaaggagagctcaagaggttgctagaactttacaaggatgaagaaataagcatcaccttcacaggccatagcttgggcgcagttatgtcagttctatcagctgcagatcttgtctatggcaaaaagaataatatcaatataaatcttcaaaaaaagcaagttcctatcacagtttttgctttcgggagtcctcggattggagaccataacttcaaaaacgtagtcgactcactccaaccactaaacattctaagaatagtaaatgttccagatgtcgcaccacattatccactcttactgtactcagaaattggcgaggtgttagagatcaatactttgaactcaacatacctgaaacggtctctgaacttcaggaactaccataacctggagatatacctgcacggcatggcagggatgcaagatacagacggggtattcaagctggagattggccgggatatttcgttggtcaataaaggattggatgctctaaaggacgagtacttagtgccaagtacctggaggtgtctggcaaacaaagggatgcttcaaatggatgatgggacatggaagctggatgtccacaggagagatcatgatgatgatgttgatgctgatgacaatgacgactcctcaactagtaaccaactacaagagctaaatacagattagttacaaaaacttatataagattctgcacaatatgtttgtacacaaaaaaaaattcatttagaagaacaaagaatctgggaacc

SEQ ID NO: 29053 - protein, 438 aa, Arabidopsis thaliana
  peptide (1)..(438): Ceres Seq. ID no. 12423120
  misc_feature (17)..(413): Homolog of NCBI NO: 1527001 NR Description: Ipomoea nil Pn47p
  misc_feature (23)..(422): Homolog of NCBI NO: 34911832 NR Description: lipase-like protein [Oryza sativa (japonica
  misc_feature (20)..(213): Homolog of NCBI NO: 34911870 NR Description: lipase-like protein [Oryza sativa (japonica
  misc_feature (209)..(417): Homolog of NCBI NO: 34911870 NR Description: lipase-like protein [Oryza sativa (japonica
  misc_feature (20)..(417): Homolog of NCBI NO: 34911830 NR Description: lipase-like protein [Oryza sativa (japonica
  misc_feature (3)..(419): Homolog of NCBI NO: 15233922 NR Description: lipase-like protein; protein id: At4g18550.1
  misc_feature (16)..(56): Homolog of NCBI NO: 15224613 NR Description: putative lipase; protein id: At2g31100.1
  misc_feature (137)..(424): Homolog of NCBI NO: 15224613 NR Description: putative lipase; protein id: At2g31100.1
  misc_feature (16)..(438): Homolog of NCBI NO: 15221426 NR Description: lipase-like protein
  misc_feature (16)..(438): Homolog of NCBI NO: 21537306 NR Description: lipase-like protein [Arabidopsis thaliana]
KNKKKKVCEKKTKANMVEGIPKRWKVLSGQNKWKGLLDPLDPDLRRYIIHYGEMSQVGYDAFNWDRKSRYAGDCYYSKNRLFARTGFLKANPFRYKVTKYIYATASIKLPISFIVKSLSKDASHVQTNWMGYIAVATDQGKAMLGRRDIVVAWRGTLQPYEWANDFDFPLEPAISVFPVTDPKDNPRIGSGWLDIYTASDSRSPYDTTSAQEQVQGELKRLLELYKDEEISITFTGHSLGAVMSVLSAADLVYGKKNNININLQKKQVPITVFAFGSPRIGDHNFKNVVDSLQPLNILRIVNVPDVAPHYPLLLYSEIGEVLEINTLNSTYLKRSLNFRNYHNLEIYLHGMAGMQDTDGVFKLEIGRDISLVNKGLDALKDEYLVPSTWRCLANKGMLQMDDGTWKLDVHRRDHDDDVDADDNDDSSTSNQLQELNTD

SEQ ID NO: 29054 - protein, 423 aa, Arabidopsis thaliana
  peptide (1)..(423): Ceres Seq. ID no. 12423121
  misc_feature (2)..(398): Homolog of NCBI NO: 1527001 NR Description: Ipomoea nil Pn47p
  misc_feature (8)..(407): Homolog of NCBI NO: 34911832 NR Description: lipase-like protein [Oryza sativa (japonica
  misc_feature (5)..(198): Homolog of NCBI NO: 34911870 NR Description: lipase-like protein [Oryza sativa (japonica
  misc_feature (194)..(402): Homolog of NCBI NO: 34911870 NR Description: lipase-like protein [Oryza sativa (japonica
  misc_feature (5)..(402): Homolog of NCBI NO: 34911830 NR Description: lipase-like protein [Oryza sativa (japonica
  misc_feature (1)..(404): Homolog of NCBI NO: 15233922 NR Description: lipase-like protein; protein id: At4g18550.1
  misc_feature (1)..(41): Homolog of NCBI NO: 15224613 NR Description: putative lipase; protein id: At2g31100.1
  misc_feature (122)..(409): Homolog of NCBI NO: 15224613 NR Description: putative lipase; protein id: At2g31100.1
  misc_feature (1)..(423): Homolog of NCBI NO: 15221426 NR Description: lipase-like protein
  misc_feature (1)..(423): Homolog of NCBI NO: 21537306 NR Description: lipase-like protein [Arabidopsis thaliana]
MVEGIPKRWKVLSGQNKWKGLLDPLDPDLRRYIIHYGEMSQVGYDAFNWDRKSRYAGDCYYSKNRLFARTGFLKANPFRYKVTKYIYATASIKLPISFIVKSLSKDASHVQTNWMGYIAVATDQGKAMLGRRDIVVAWRGTLQPYEWANDFDFPLEPAISVFPVTDPKDNPRIGSGWLDIYTASDSRSPYDTTSAQEQVQGELKRLLELYKDEEISITFTGHSLGAVMSVLSAADLVYGKKNNININLQKKQVPITVFAFGSPRIGDHNFKNVVDSLQPLNILRIVNVPDVAPHYPLLLYSEIGEVLEINTLNSTYLKRSLNFRNYHNLEIYLHGMAGMQDTDGVFKLEIGRDISLVNKGLDALKDEYLVPSTWRCLANKGMLQMDDGTWKLDVHRRDHDDDVDADDNDDSSTSNQLQELNTD

SEQ ID NO: 29055 - protein, 385 aa, Arabidopsis thaliana
  peptide (1)..(385): Ceres Seq. ID no. 12423122
  misc_feature (128)..(366): Homolog of NCBI NO: 4103627 NR Description: lipase [Dianthus caryophyllus]
  misc_feature (1)..(360): Homolog of NCBI NO: 1527001 NR Description: Ipomoea nil Pn47p
  misc_feature (1)..(369): Homolog of NCBI NO: 34911832 NR Description: lipase-like protein [Oryza sativa (japonica
  misc_feature (1)..(160): Homolog of NCBI NO: 34911870 NR Description: lipase-like protein [Oryza sativa (japonica
  misc_feature (156)..(364): Homolog of NCBI NO: 34911870 NR Description: lipase-like protein [Oryza sativa (japonica
  misc_feature (1)..(364): Homolog of NCBI NO: 34911830 NR Description: lipase-like protein [Oryza sativa (japonica
  misc_feature (1)..(366): Homolog of NCBI NO: 15233922 NR Description: lipase-like protein; protein id: At4g18550.1
  misc_feature (84)..(371): Homolog of NCBI NO: 15224613 NR Description: putative lipase; protein id: At2g31100.1
  misc_feature (1)..(385): Homolog of NCBI NO: 15221426 NR Description: lipase-like protein
  misc_feature (1)..(385): Homolog of NCBI NO: 21537306 NR Description: lipase-like protein [Arabidopsis thaliana]
MSQVGYDAFNWDRKSRYAGDCYYSKNRLFARTGFLKANPFRYKVTKYIYATASIKLPISFIVKSLSKDASHVQTNWMGYIAVATDQGKAMLGRRDIVVAWRGTLQPYEWANDFDFPLEPAISVFPVTDPKDNPRIGSGWLDIYTASDSRSPYDTTSAQEQVQGELKRLLELYKDEEISITFTGHSLGAVMSVLSAADLVYGKKNNININLQKKQVPITVFAFGSPRIGDHNFKNVVDSLQPLNILRIVNVPDVAPHYPLLLYSEIGEVLEINTLNSTYLKRSLNFRNYHNLEIYLHGMAGMQDTDGVFKLEIGRDISLVNKGLDALKDEYLVPSTWRCLANKGMLQMDDGTWKLDVHRRDHDDDVDADDNDDSSTSNQLQELNTD

SEQ ID NO: 29056 - DNA, 1133 bp, Arabidopsis thaliana
  misc_feature (1)..(1133): Ceres Seq. ID no. 12336045
  misc_feature: MA Experiment ID: 20000182 Result: Down-regulated in Transcription
  misc_feature: MA Experiment 20000182 PARAMETER Experiment Name: At_2mM_SA_P Parameter: Age (day) Value: 14
  misc_feature: MA Experiment 20000182 PARAMETER Experiment Name: At_2mM_SA_P Parameter: Organism Value: A. thaliana
  misc_feature: MA Experiment 20000182 PARAMETER Experiment Name: At_2mM_SA_P Parameter: Plant Line Value: WS
  misc_feature: MA Experiment 20000182 PARAMETER Experiment Name: At_2mM_SA_P Parameter: Timepoint (hr) Value: 6
  misc_feature: MA Experiment 20000182 PARAMETER Experiment Name: At_2mM_SA_P Parameter: Tissue Value: Aerial
  misc_feature: MA Experiment 20000182 PARAMETER Experiment Name: At_2mM_SA_P Parameter: Treatment Value: 2mM SA vs. No Treatment
  misc_feature: MA Experiment ID: 20000184 Result: Up-regulated in Transcription
  misc_feature: MA Experiment 20000184 PARAMETER Experiment Name: At_Shoots__P Parameter: Age (day) Value: 7
  misc_feature: MA Experiment 20000184 PARAMETER Experiment Name: At_Shoots__P Parameter: Tissue Value: Shoots vs. Whole Plant
  misc_feature: MA Experiment ID: 20000234 Result: Down-regulated in Transcription
  misc_feature: MA Experiment 20000234 PARAMETER Experiment Name: At_Siliques_P Parameter: Age (day) Value: 21
  misc_feature: MA Experiment 20000234 PARAMETER Experiment Name: At_Siliques_P Parameter: Organism Value: A. thaliana
  misc_feature: MA Experiment 20000234 PARAMETER Experiment Name: At_Siliques_P Parameter: Plant Line Value: WS
  misc_feature: MA Experiment 20000234 PARAMETER Experiment Name: At_Siliques_P Parameter: Tissue Value: Less Than 5mm Siliques vs. Whole Plant
  misc_feature: MA Experiment ID: 20000235 Result: Down-regulated in Transcription
  misc_feature: MA Experiment 20000235 PARAMETER Experiment Name: At_Siliques_P Parameter: Age (day) Value: 21
  misc_feature: MA Experiment 20000235 PARAMETER Experiment Name: At_Siliques_P Parameter: Organism Value: A. thaliana
  misc_feature: MA Experiment 20000235 PARAMETER Experiment Name: At_Siliques_P Parameter: Plant Line Value: WS
  misc_feature: MA Experiment 20000235 PARAMETER Experiment Name: At_Siliques_P Parameter: Tissue Value: 5-10mm Siliques vs. Whole Plant
  misc_feature: MA Experiment ID: 20000264 Result: Down-regulated in Transcription
  misc_feature: MA Experiment 20000264 PARAMETER Experiment Name: At_Open_Flower_P Parameter: Age (day) Value: 21
  misc_feature: MA Experiment 20000264 PARAMETER Experiment Name: At_Open_Flower_P Parameter: Plant Line Value: WS
  misc_feature: MA Experiment 20000264 PARAMETER Experiment Name: At_Open_Flower_P Parameter: Tissue Value: Open Flower vs. Whole Plant
  misc_feature: MA Experiment ID: 20000265 Result: Down-regulated in Transcription
  misc_feature: MA Experiment 20000265 PARAMETER Experiment Name: At_Open_Flower_P Parameter: Age (day) Value: 21
  misc_feature: MA Experiment 20000265 PARAMETER Experiment Name: At_Open_Flower_P Parameter: Plant Line Value: WS
  misc_feature: MA Experiment 20000265 PARAMETER Experiment Name: At_Open_Flower_P Parameter: Tissue Value: Closed Flower vs. Whole Plant
  misc_feature: MA Experiment ID: 20000308 Result: Down-regulated in Transcription
  misc_feature: MA Experiment 20000308 PARAMETER Experiment Name: At_100mM_NaCl__P Parameter: Age (day) Value: 17
  misc_feature: MA Experiment 20000308 PARAMETER Experiment Name: At_100mM_NaCl__P Parameter: Organism Value: A. thaliana
  misc_feature: MA Experiment 20000308 PARAMETER Experiment Name: At_100mM_NaCl__P Parameter: Plant Line Value: WS
  misc_feature: MA Experiment 20000308 PARAMETER Experiment Name: At_100mM_NaCl__P Parameter: Timepoint (hr) Value: 72
  misc_feature: MA Experiment 20000308 PARAMETER Experiment Name: At_100mM_NaCl__P Parameter: Tissue Value: Whole Plant
  misc_feature: MA Experiment 20000308 PARAMETER Experiment Name: At_100mM_NaCl__P Parameter: Treatment Value: 100mM NaCl vs. No Treatment
  misc_feature: MA Experiment ID: 20001247 Result: Up-regulated in Transcription
  misc_feature: MA Experiment 20001247 PARAMETER Experiment Name: At_Far-red-induction_P Parameter: Age (day) Value: 7
  misc_feature: MA Experiment 20001247 PARAMETER Experiment Name: At_Far-red-induction_P Parameter: Light Value: Far-red vs. White
  misc_feature: MA Experiment 20001247 PARAMETER Experiment Name: At_Far-red-induction_P Parameter: Organism Value: A. thaliana
  misc_feature: MA Experiment 20001247 PARAMETER Experiment Name: At_Far-red-induction_P Parameter: Plant Line Value: Columbia
  misc_feature: MA Experiment 20001247 PARAMETER Experiment Name: At_Far-red-induction_P Parameter: Timepoint (hr) Value: 1
  misc_feature: MA Experiment 20001247 PARAMETER Experiment Name: At_Far-red-induction_P Parameter: Tissue Value: Whole Plant
  misc_feature: MA Experiment ID: 20001450 Result: Up-regulated in Transcription
  misc_feature: MA Experiment 20001450 PARAMETER Experiment Name: At_Far-red-induction_P Parameter: Age (day) Value: 7
  misc_feature: MA Experiment 20001450 PARAMETER Experiment Name: At_Far-red-induction_P Parameter: Light Value: Far-red vs. White
  misc_feature: MA Experiment 20001450 PARAMETER Experiment Name: At_Far-red-induction_P Parameter: Organism Value: A. thaliana
  misc_feature: MA Experiment 20001450 PARAMETER Experiment Name: At_Far-red-induction_P Parameter: Plant Line Value: Columbia
  misc_feature: MA Experiment 20001450 PARAMETER Experiment Name: At_Far-red-induction_P Parameter: Timepoint (hr) Value: 8
  misc_feature: MA Experiment 20001450 PARAMETER Experiment Name: At_Far-red-induction_P Parameter: Tissue Value: Whole Plant
  misc_feature: MA Experiment ID: 20001451 Result: Up-regulated in Transcription
  misc_feature: MA Experiment 20001451 PARAMETER Experiment Name: At_Far-red-induction_P Parameter: Age (day) Value: 7
  misc_feature: MA Experiment 20001451 PARAMETER Experiment Name: At_Far-red-induction_P Parameter: Light Value: Far-red vs. White
  misc_feature: MA Experiment 20001451 PARAMETER Experiment Name: At_Far-red-induction_P Parameter: Organism Value: A. thaliana
  misc_feature: MA Experiment 20001451 PARAMETER Experiment Name: At_Far-red-induction_P Parameter: Plant Line Value: Columbia
  misc_feature: MA Experiment 20001451 PARAMETER Experiment Name: At_Far-red-induction_P Parameter: Timepoint (hr) Value: 24
  misc_feature: MA Experiment 20001451 PARAMETER Experiment Name: At_Far-red-induction_P Parameter: Tissue Value: Whole Plant
  misc_feature: MA Experiment ID: 20001555 Result: Down-regulated in Transcription
  misc_feature: MA Experiment 20001555 PARAMETER Experiment Name: At_Drought_Soil_Dry_P Parameter: Age (day) Value: 24
  misc_feature: MA Experiment 20001555 PARAMETER Experiment Name: At_Drought_Soil_Dry_P Parameter: Organism Value: A. thaliana
  misc_feature: MA Experiment 20001555 PARAMETER Experiment Name: At_Drought_Soil_Dry_P Parameter: Plant Line Value: WS
  misc_feature: MA Experiment 20001555 PARAMETER Experiment Name: At_Drought_Soil_Dry_P Parameter: Post Timepoint (hr) Value: None
  misc_feature: MA Experiment 20001555 PARAMETER Experiment Name: At_Drought_Soil_Dry_P Parameter: Post-Treatment Value: None
  misc_feature: MA Experiment 20001555 PARAMETER Experiment Name: At_Drought_Soil_Dry_P Parameter: Timepoint (day) Value: 10
  misc_feature: MA Experiment 20001555 PARAMETER Experiment Name: At_Drought_Soil_Dry_P Parameter: Treatment Value: Drought vs. No Drought
  misc_feature: MA Experiment ID: 20001556 Result: Down-regulated in Transcription
  misc_feature: MA Experiment 20001556 PARAMETER Experiment Name: At_Drought_Soil_Dry_P Parameter: Age (day) Value: 26
  misc_feature: MA Experiment 20001556 PARAMETER Experiment Name: At_Drought_Soil_Dry_P Parameter: Organism Value: A. thaliana
  misc_feature: MA Experiment 20001556 PARAMETER Experiment Name: At_Drought_Soil_Dry_P Parameter: Plant Line Value: WS
  misc_feature: MA Experiment 20001556 PARAMETER Experiment Name: At_Drought_Soil_Dry_P Parameter: Post Timepoint (hr) Value: None
  misc_feature: MA Experiment 20001556 PARAMETER Experiment Name: At_Drought_Soil_Dry_P Parameter: Post-Treatment Value: None
  misc_feature: MA Experiment 20001556 PARAMETER Experiment Name: At_Drought_Soil_Dry_P Parameter: Timepoint (day) Value: 12
  misc_feature: MA Experiment 20001556 PARAMETER Experiment Name: At_Drought_Soil_Dry_P Parameter: Treatment Value: Drought vs. No Drought
  misc_feature: MA Experiment ID: 20001558 Result: Down-regulated in Transcription
  misc_feature: MA Experiment 20001558 PARAMETER Experiment Name: At_Drought_Soil_Dry_P Parameter: Age (day) Value: 27
  misc_feature: MA Experiment 20001558 PARAMETER Experiment Name: At_Drought_Soil_Dry_P Parameter: Organism Value: A. thaliana
  misc_feature: MA Experiment 20001558 PARAMETER Experiment Name: At_Drought_Soil_Dry_P Parameter: Plant Line Value: WS
  misc_feature: MA Experiment 20001558 PARAMETER Experiment Name: At_Drought_Soil_Dry_P Parameter: Post Timepoint (hr) Value: 6
  misc_feature: MA Experiment 20001558 PARAMETER Experiment Name: At_Drought_Soil_Dry_P Parameter: Post-Treatment Value: Re-Water vs. No Drought
  misc_feature: MA Experiment 20001558 PARAMETER Experiment Name: At_Drought_Soil_Dry_P Parameter: Timepoint (day) Value: 13
  misc_feature: MA Experiment 20001558 PARAMETER Experiment Name: At_Drought_Soil_Dry_P Parameter: Treatment Value: Drought vs. No Drought
  misc_feature: MA Experiment ID: 20001904 Result: Down-regulated in Transcription
  misc_feature: MA Experiment 20001904 PARAMETER Experiment Name: At_Drought_Reproduction_P Parameter: Age (day) Value: 37
  misc_feature: MA Experiment 20001904 PARAMETER Experiment Name: At_Drought_Reproduction_P Parameter: Organism Value: A. thaliana
  misc_feature: MA Experiment 20001904 PARAMETER Experiment Name: At_Drought_Reproduction_P Parameter: Plant Line Value: WS
  misc_feature: MA Experiment 20001904 PARAMETER Experiment Name: At_Drought_Reproduction_P Parameter: Timepoint (day) Value: 7
  misc_feature: MA Experiment 20001904 PARAMETER Experiment Name: At_Drought_Reproduction_P Parameter: Tissue Value: Rosettes
  misc_feature: MA Experiment 20001904 PARAMETER Experiment Name: At_Drought_Reproduction_P Parameter: Treatment Value: Drought vs. No Drought
atgtttcttctccttctatcttctccctccctctcaaattttaatctccagttttttttttttttttttttgactcagagatcaacaaaacctagtttttgaatttgtttcaatttttctcaaattactctgtttttgagatctctgttttcgttaaattatgtctttgaggtcagaatcttcaacggcagagaagataacagaggatccggtgacgtataagacagcacaaagcagcgtgacgtgcatctaccaagcacatatggttggattctggagaaacgttagggttctatggtctaaaaatctcatgaaccattccttaaccgtgatggtcactagcgtacaaggcgatatgaattactgttgcaaggttgatcttaagccatggcacttttggtacaagaaaggttacaaatcgtttgaggtcgaaggaaaccaagtagatgtctattgggattttaggtctgctaaattcaacggcgggcctgagccgagctccgatttttacgtggcgcttgtatccgaggaagaggttgttttgttgttgggtgatcacaagaagaaagcttttaagagaactaaatctagaccttccttggttgacgctgccttgttctacaagaaagagaatgtgtttgggaagaagattttttcgactagggctaagttccatgataggaagagagagcatgagatcgtagtggagagctctaccggggcgaaagaaccagagatgtggattagcgtagatgggatcgttttggttcaggtgagaaatctgcagtggaaatttagagggaaccagactgttttggttgataaagaacctgttcaagtgttttgggatgtgtatgattggttgttcagcacccccggtacggggcacggcttgttcatctttaaaccggagagcggtgaaagcgaaacgagcaacgaaaccaagaattgcagtgcttcttcttcttcttcttcgtcggagttttgtctctttctttatgcttggaaattggagtaagtctaaatgttttcaatccaaaagcttgcattgatttttttgcctgactaaattcacattcaaaaatcaatcttagcgtgtgaccgactcttgataattttgagttgtcaaattc

SEQ ID NO: 29057 - protein, 285 aa, Arabidopsis thaliana
  peptide (1)..(285): Ceres Seq. ID no. 12336046
  misc_feature (20)..(284): Pfam Name: Plant protein of unknown function (DUF868) Pfam Description: Plant protein of unknown function (DUF868)
  misc_feature (20)..(284): Pfam Name: Plant protein of unknown function (DUF868) Pfam Description: Plant protein of unknown function (DUF868)
  misc_feature (20)..(284): Pfam Name: Plant protein of unknown function (DUF868) Pfam Description: Plant protein of unknown function (DUF868)
  misc_feature (21)..(285): Homolog of NCBI NO: 18397034 NR Description: expressed protein
  misc_feature (21)..(285): Homolog of NCBI NO: 15241702 NR Description: putative protein
  misc_feature (25)..(283): Homolog of NCBI NO: 22331055 NR Description: hypothetical protein; protein id: At3g13229.1
  misc_feature (1)..(65): Homolog of NCBI NO: 20804936 NR Description: P0456E05.14 [Oryza sativa (japonica
  misc_feature (70)..(285): Homolog of NCBI NO: 20804936 NR Description: P0456E05.14 [Oryza sativa (japonica
  misc_feature (21)..(285): Homolog of NCBI NO: 18397034 NR Description: expressed protein
  misc_feature (25)..(283): Homolog of NCBI NO: 22331055 NR Description: hypothetical protein; protein id: At3g13229.1
  misc_feature (70)..(285): Homolog of NCBI NO: 20804936 NR Description: P0456E05.14 [Oryza sativa (japonica
  misc_feature (1)..(65): Homolog of NCBI NO: 20804936 NR Description: P0456E05.14 [Oryza sativa (japonica
  misc_feature (25)..(283): Homolog of NCBI NO: 22331055 NR Description: hypothetical protein; protein id: At3g13229.1
  misc_feature (21)..(285): Homolog of NCBI NO: 15241702 NR Description: putative protein
  misc_feature (21)..(285): Homolog of NCBI NO: 18397034 NR Description: expressed protein
  misc_feature (1)..(285): Homolog of NCBI NO: 15235452 NR Description: putative protein
  misc_feature (4)..(259): Homolog of NCBI NO: 15228105 NR Description: hypothetical protein; protein id: At2g04220.1
  misc_feature (1)..(250): Homolog of NCBI NO: 15238927 NR Description: putative protein; protein id: At5g48270.1
  misc_feature (251)..(285): Homolog of NCBI NO: 15238927 NR Description: putative protein; protein id: At5g48270.1
  misc_feature (58)..(259): Homolog of NCBI NO: 25334990 NR Description: hypothetical protein At2g04220 [imported] -
  misc_feature (1)..(285): Homolog of NCBI NO: 15235452 NR Description: putative protein
  misc_feature (4)..(259): Homolog of NCBI NO: 15228105 NR Description: hypothetical protein; protein id: At2g04220.1
  misc_feature (1)..(250): Homolog of NCBI NO: 15238927 NR Description: putative protein; protein id: At5g48270.1
  misc_feature (251)..(285): Homolog of NCBI NO: 15238927 NR Description: putative protein; protein id: At5g48270.1
  misc_feature (58)..(259): Homolog of NCBI NO: 25334990 NR Description: hypothetical protein At2g04220 [imported] -
  misc_feature (70)..(285): Homolog of NCBI NO: 20804936 NR Description: P0456E05.14 [Oryza sativa (japonica
  misc_feature (1)..(65): Homolog of NCBI NO: 20804936 NR Description: P0456E05.14 [Oryza sativa (japonica
  misc_feature (21)..(285): Homolog of NCBI NO: 15241702 NR Description: putative protein
  misc_feature (58)..(259): Homolog of NCBI NO: 25334990 NR Description: hypothetical protein At2g04220 [imported] -
  misc_feature (251)..(285): Homolog of NCBI NO: 15238927 NR Description: putative protein; protein id: At5g48270.1
  misc_feature (1)..(250): Homolog of NCBI NO: 15238927 NR Description: putative protein; protein id: At5g48270.1
  misc_feature (4)..(259): Homolog of NCBI NO: 15228105 NR Description: hypothetical protein; protein id: At2g04220.1
  misc_feature (1)..(285): Homolog of NCBI NO: 15235452 NR Description: putative protein
MSLRSESSTAEKITEDPVTYKTAQSSVTCIYQAHMVGFWRNVRVLWSKNLMNHSLTVMVTSVQGDMNYCCKVDLKPWHFWYKKGYKSFEVEGNQVDVYWDFRSAKFNGGPEPSSDFYVALVSEEEVVLLLGDHKKKAFKRTKSRPSLVDAALFYKKENVFGKKIFSTRAKFHDRKREHEIVVESSTGAKEPEMWISVDGIVLVQVRNLQWKFRGNQTVLVDKEPVQVFWDVYDWLFSTPGTGHGLFIFKPESGESETSNETKNCSASSSSSSSEFCLFLYAWKLE

SEQ ID NO: 29058 - protein, 251 aa, Arabidopsis thaliana
  peptide (1)..(251): Ceres Seq. ID no. 12336047
  misc_feature (1)..(250): Pfam Name: Plant protein of unknown function (DUF868) Pfam Description: Plant protein of unknown function (DUF868)
  misc_feature (1)..(250): Pfam Name: Plant protein of unknown function (DUF868) Pfam Description: Plant protein of unknown function (DUF868)
  misc_feature (1)..(250): Pfam Name: Plant protein of unknown function (DUF868) Pfam Description: Plant protein of unknown function (DUF868)
  misc_feature (1)..(251): Homolog of NCBI NO: 18397034 NR Description: expressed protein
  misc_feature (1)..(251): Homolog of NCBI NO: 15241702 NR Description: putative protein
  misc_feature (1)..(249): Homolog of NCBI NO: 22331055 NR Description: hypothetical protein; protein id: At3g13229.1
  misc_feature (1)..(31): Homolog of NCBI NO: 20804936 NR Description: P0456E05.14 [Oryza sativa (japonica
  misc_feature (36)..(251): Homolog of NCBI NO: 20804936 NR Description: P0456E05.14 [Oryza sativa (japonica
  misc_feature (1)..(251): Homolog of NCBI NO: 18397034 NR Description: expressed protein
  misc_feature (1)..(249): Homolog of NCBI NO: 22331055 NR Description: hypothetical protein; protein id: At3g13229.1
  misc_feature (36)..(251): Homolog of NCBI NO: 20804936 NR Description: P0456E05.14 [Oryza sativa (japonica
  misc_feature (1)..(31): Homolog of NCBI NO: 20804936 NR Description: P0456E05.14 [Oryza sativa (japonica
  misc_feature (1)..(249): Homolog of NCBI NO: 22331055 NR Description: hypothetical protein; protein id: At3g13229.1
  misc_feature (1)..(251): Homolog of NCBI NO: 15241702 NR Description: putative protein
  misc_feature (1)..(251): Homolog of NCBI NO: 18397034 NR Description: expressed protein
  misc_feature (1)..(251): Homolog of NCBI NO: 15235452 NR Description: putative protein
  misc_feature (1)..(225): Homolog of NCBI NO: 15228105 NR Description: hypothetical protein; protein id: At2g04220.1
  misc_feature (1)..(216): Homolog of NCBI NO: 15238927 NR Description: putative protein; protein id: At5g48270.1
  misc_feature (217)..(251): Homolog of NCBI NO: 15238927 NR Description: putative protein; protein id: At5g48270.1
  misc_feature (24)..(225): Homolog of NCBI NO: 25334990 NR Description: hypothetical protein At2g04220 [imported] -
  misc_feature (1)..(251): Homolog of NCBI NO: 15235452 NR Description: putative protein
  misc_feature (1)..(225): Homolog of NCBI NO: 15228105 NR Description: hypothetical protein; protein id: At2g04220.1
  misc_feature (1)..(216): Homolog of NCBI NO: 15238927 NR Description: putative protein; protein id: At5g48270.1
  misc_feature (217)..(251): Homolog of NCBI NO: 15238927 NR Description: putative protein; protein id: At5g48270.1
  misc_feature (24)..(225): Homolog of NCBI NO: 25334990 NR Description: hypothetical protein At2g04220 [imported] -
  misc_feature (36)..(251): Homolog of NCBI NO: 20804936 NR Description: P0456E05.14 [Oryza sativa (japonica
  misc_feature (1)..(31): Homolog of NCBI NO: 20804936 NR Description: P0456E05.14 [Oryza sativa (japonica
  misc_feature (1)..(251): Homolog of NCBI NO: 15241702 NR Description: putative protein
  misc_feature (24)..(225): Homolog of NCBI NO: 25334990 NR Description: hypothetical protein At2g04220 [imported] -
  misc_feature (217)..(251): Homolog of NCBI NO: 15238927 NR Description: putative protein; protein id: At5g48270.1
  misc_feature (1)..(216): Homolog of NCBI NO: 15238927 NR Description: putative protein; protein id: At5g48270.1
  misc_feature (1)..(225): Homolog of NCBI NO: 15228105 NR Description: hypothetical protein; protein id: At2g04220.1
  misc_feature (1)..(251): Homolog of NCBI NO: 15235452 NR Description: putative protein
MVGFWRNVRVLWSKNLMNHSLTVMVTSVQGDMNYCCKVDLKPWHFWYKKGYKSFEVEGNQVDVYWDFRSAKFNGGPEPSSDFYVALVSEEEVVLLLGDHKKKAFKRTKSRPSLVDAALFYKKENVFGKKIFSTRAKFHDRKREHEIVVESSTGAKEPEMWISVDGIVLVQVRNLQWKFRGNQTVLVDKEPVQVFWDVYDWLFSTPGTGHGLFIFKPESGESETSNETKNCSASSSSSSSEFCLFLYAWKLE

SEQ ID NO: 29059 - protein, 235 aa, Arabidopsis thaliana
  peptide (1)..(235): Ceres Seq. ID no. 12336048
  misc_feature (1)..(234): Pfam Name: Plant protein of unknown function (DUF868) Pfam Description: Plant protein of unknown function (DUF868)
  misc_feature (1)..(234): Pfam Name: Plant protein of unknown function (DUF868) Pfam Description: Plant protein of unknown function (DUF868)
  misc_feature (1)..(234): Pfam Name: Plant protein of unknown function (DUF868) Pfam Description: Plant protein of unknown function (DUF868)
  misc_feature (1)..(235): Homolog of NCBI NO: 18397034 NR Description: expressed protein
  misc_feature (1)..(235): Homolog of NCBI NO: 15241702 NR Description: putative protein
  misc_feature (1)..(233): Homolog of NCBI NO: 22331055 NR Description: hypothetical protein; protein id: At3g13229.1
  misc_feature (1)..(15): Homolog of NCBI NO: 20804936 NR Description: P0456E05.14 [Oryza sativa (japonica
  misc_feature (20)..(235): Homolog of NCBI NO: 20804936 NR Description: P0456E05.14 [Oryza sativa (japonica
  misc_feature (1)..(235): Homolog of NCBI NO: 18397034 NR Description: expressed protein
  misc_feature (1)..(233): Homolog of NCBI NO: 22331055 NR Description: hypothetical protein; protein id: At3g13229.1
  misc_feature (20)..(235): Homolog of NCBI NO: 20804936 NR Description: P0456E05.14 [Oryza sativa (japonica
  misc_feature (1)..(15): Homolog of NCBI NO: 20804936 NR Description: P0456E05.14 [Oryza sativa (japonica
  misc_feature (1)..(233): Homolog of NCBI NO: 22331055 NR Description: hypothetical protein; protein id: At3g13229.1
  misc_feature (1)..(235): Homolog of NCBI NO: 15241702 NR Description: putative protein
  misc_feature (1)..(235): Homolog of NCBI NO: 18397034 NR Description: expressed protein
  misc_feature (1)..(235): Homolog of NCBI NO: 15235452 NR Description: putative protein
  misc_feature (1)..(209): Homolog of NCBI NO: 15228105 NR Description: hypothetical protein; protein id: At2g04220.1
  misc_feature (1)..(200): Homolog of NCBI NO: 15238927 NR Description: putative protein; protein id: At5g48270.1
  misc_feature (201)..(235): Homolog of NCBI NO: 15238927 NR Description: putative protein; protein id: At5g48270.1
  misc_feature (8)..(209): Homolog of NCBI NO: 25334990 NR Description: hypothetical protein At2g04220 [imported] -
  misc_feature (1)..(235): Homolog of NCBI NO: 15235452 NR Description: putative protein
  misc_feature (1)..(209): Homolog of NCBI NO: 15228105 NR Description: hypothetical protein; protein id: At2g04220.1
  misc_feature (1)..(200): Homolog of NCBI NO: 15238927 NR Description: putative protein; protein id: At5g48270.1
  misc_feature (201)..(235): Homolog of NCBI NO: 15238927 NR Description: putative protein; protein id: At5g48270.1
  misc_feature (8)..(209): Homolog of NCBI NO: 25334990 NR Description: hypothetical protein At2g04220 [imported] -
  misc_feature (20)..(235): Homolog of NCBI NO: 20804936 NR Description: P0456E05.14 [Oryza sativa (japonica
  misc_feature (1)..(15): Homolog of NCBI NO: 20804936 NR Description: P0456E05.14 [Oryza sativa (japonica
  misc_feature (1)..(235): Homolog of NCBI NO: 15241702 NR Description: putative protein
  misc_feature (8)..(209): Homolog of NCBI NO: 25334990 NR Description: hypothetical protein At2g04220 [imported] -
  misc_feature (201)..(235): Homolog of NCBI NO: 15238927 NR Description: putative protein; protein id: At5g48270.1
  misc_feature (1)..(200): Homolog of NCBI NO: 15238927 NR Description: putative protein; protein id: At5g48270.1
  misc_feature (1)..(209): Homolog of NCBI NO: 15228105 NR Description: hypothetical protein; protein id: At2g04220.1
  misc_feature (1)..(235): Homolog of NCBI NO: 15235452 NR Description: putative protein
MNHSLTVMVTSVQGDMNYCCKVDLKPWHFWYKKGYKSFEVEGNQVDVYWDFRSAKFNGGPEPSSDFYVALVSEEEVVLLLGDHKKKAFKRTKSRPSLVDAALFYKKENVFGKKIFSTRAKFHDRKREHEIVVESSTGAKEPEMWISVDGIVLVQVRNLQWKFRGNQTVLVDKEPVQVFWDVYDWLFSTPGTGHGLFIFKPESGESETSNETKNCSASSSSSSSEFCLFLYAWKLE

SEQ ID NO: 29060 - DNA, 1106 bp, Arabidopsis thaliana
  misc_feature (1)..(1106): Ceres Seq. ID no. 12338629
  misc_feature: MA Experiment ID: 108573 Result: Up-regulated in Transcription
  misc_feature: MA Experiment 108573 PARAMETER Experiment Name: At_Drought_cDNA_P Parameter: Timepoint (hr) Value: 6
  misc_feature: MA Experiment 108573 PARAMETER Experiment Name: At_Drought_cDNA_P Parameter: Tissue Value: Aerial
  misc_feature: MA Experiment 108573 PARAMETER Experiment Name: At_Drought_cDNA_P Parameter: Treatment Value: Drought vs. No Drought
  misc_feature: MA Experiment ID: 108595 Result: Down-regulated in Transcription
  misc_feature: MA Experiment 108595 PARAMETER Experiment Name: At_Ler-pi_Ovule_cDNA_P Parameter: Plant Line Value: null
  misc_feature: MA Experiment ID: 20000173 Result: Down-regulated in Transcription
  misc_feature: MA Experiment 20000173 PARAMETER Experiment Name: At_42deg_Heat_P Parameter: Age (day) Value: 14
  misc_feature: MA Experiment 20000173 PARAMETER Experiment Name: At_42deg_Heat_P Parameter: Organism Value: A. thaliana
  misc_feature: MA Experiment 20000173 PARAMETER Experiment Name: At_42deg_Heat_P Parameter: Plant Line Value: WS
  misc_feature: MA Experiment 20000173 PARAMETER Experiment Name: At_42deg_Heat_P Parameter: Temperature (deg C) Value: 42 vs. 22
  misc_feature: MA Experiment 20000173 PARAMETER Experiment Name: At_42deg_Heat_P Parameter: Timepoint (hr) Value: 6
  misc_feature: MA Experiment 20000173 PARAMETER Experiment Name: At_42deg_Heat_P Parameter: Tissue Value: Aerial
  misc_feature: MA Experiment ID: 20000185 Result: Up-regulated in Transcription
  misc_feature: MA Experiment 20000185 PARAMETER Experiment Name: At_Roots__P Parameter: Age (day) Value: 7 vs. 21
  misc_feature: MA Experiment 20000185 PARAMETER Experiment Name: At_Roots__P Parameter: Organism Value: A. thaliana
  misc_feature: MA Experiment 20000185 PARAMETER Experiment Name: At_Roots__P Parameter: Tissue Value: Roots vs. Whole Plant
gtaattcttctatcttgatatcttcaccgcctgccgatctctctcaatctccgatcaaccatgagcaaaggtccaggactcttcaccgatatcggcaagaaagccaaagatctgttgacgagagactacaattccgatcagaagttcagtatctccacttacagtgcctccggcgtggcccttacgtctactgctctgaagaaaggaggagttcatgctgctgatgttgccacccaatacaagtacaagaatgctttgtttgatgttaaaatcgacactgattctagtgttttgacaacagtcacacttaccgagatcctcccatcaacaaaagccattgcctccttcaaagtccctgattataattccgccaagctcgaggtgcaatacttccacgaccacgcaacagttaccgctgctgcagctttgaaacaaaacccactaattgacataacagctactcttggttcgccagtcatctcatttggtgctgaagctggatatgacacaacctccaaaactttcaccaagtacaatgccgggatcagtgtgacaaaaccagatgcttgcctctccataatattgggagacaaaggagactcactcaaagcatcataccttcatcactttgatgaatttaagagaaccgcagcagttggtgaggtttacaggaagttctcgacaaatgaaaacacgataacggttggtggattgtatgcgattgatcattcgactgcagtgaaagctaagctcaacaaccatggcacacttggtgctcttctgcagcacgaggtcctgcccagatcactagtgactgtttccagtgagattgacactaaggctttagaaaagcatccaaggtttggtctctctcttgctctcaaaccttgagaacacacactcacatcagacctgcttgagtcttcctacttttctcgtatgctctcattgttgatttcctctacggcaggacgtgagagttagcgtttttttcctccttttttccttacgtttaattggaatcaataaatagttccgcagtgaaattgacggataattctttttttggatatgctcggttttggttttttttttatctttctttt

SEQ ID NO: 29061 - protein, 276 aa, Arabidopsis thaliana
  peptide (1)..(276): Ceres Seq. ID no. 12338630
  misc_feature (4)..(269): Pfam Name: Eukaryotic porin Pfam Description: Eukaryotic porin
  misc_feature (1)..(276): Homolog of NCBI NO: 5031279 NR Description: porin [Prunus armeniaca]
  misc_feature (1)..(276): Homolog of NCBI NO: 1172558 NR Description: Outer plastidial membrane protein porin
  misc_feature (1)..(276): Homolog of NCBI NO: 36957183 NR Description: VDAC1.2 [Lotus corniculatus var. japonicus]
  misc_feature (1)..(276): Homolog of NCBI NO: 1172555 NR Description: 34 kDa outer mitochondrial membrane protein porin
  misc_feature (1)..(276): Homolog of NCBI NO: 36957170 NR Description: VDAC1.1 [Lotus corniculatus var. japonicus]
  misc_feature (1)..(276): Homolog of NCBI NO: 7442953 NR Description: porin - common ice plant
  misc_feature (3)..(276): Homolog of NCBI NO: 29367429 NR Description: porin-like protein [Oryza sativa (japonica
  misc_feature (3)..(276): Homolog of NCBI NO: 31249532 NR Description: PgPOR29 [Pennisetum glaucum]
  misc_feature (1)..(276): Homolog of NCBI NO: 36957216 NR Description: VDAC2.1 [Lotus corniculatus var. japonicus]
  misc_feature (1)..(276): Homolog of NCBI NO: 15240765 NR Description: porin-like protein
MSKGPGLFTDIGKKAKDLLTRDYNSDQKFSISTYSASGVALTSTALKKGGVHAADVATQYKYKNALFDVKIDTDSSVLTTVTLTEILPSTKAIASFKVPDYNSAKLEVQYFHDHATVTAAAALKQNPLIDITATLGSPVISFGAEAGYDTTSKTFTKYNAGISVTKPDACLSIILGDKGDSLKASYLHHFDEFKRTAAVGEVYRKFSTNENTITVGGLYAIDHSTAVKAKLNNHGTLGALLQHEVLPRSLVTVSSEIDTKALEKHPRFGLSLALKP

SEQ ID NO: 29062 - DNA, 1321 bp, Arabidopsis thaliana
  misc_feature (1)..(1321): Ceres Seq. ID no. 12338275
  misc_feature: MA Experiment ID: 20000171 Result: Up-regulated in Transcription
  misc_feature: MA Experiment 20000171 PARAMETER Experiment Name: At_42deg_Heat_P Parameter: Age (day) Value: 14
  misc_feature: MA Experiment 20000171 PARAMETER Experiment Name: At_42deg_Heat_P Parameter: Organism Value: A. thaliana
  misc_feature: MA Experiment 20000171 PARAMETER Experiment Name: At_42deg_Heat_P Parameter: Plant Line Value: WS
  misc_feature: MA Experiment 20000171 PARAMETER Experiment Name: At_42deg_Heat_P Parameter: Temperature (deg C) Value: 42 vs. 22
  misc_feature: MA Experiment 20000171 PARAMETER Experiment Name: At_42deg_Heat_P Parameter: Timepoint (hr) Value: 1
  misc_feature: MA Experiment 20000171 PARAMETER Experiment Name: At_42deg_Heat_P Parameter: Tissue Value: Aerial
  misc_feature: MA Experiment ID: 20000173 Result: Up-regulated in Transcription
  misc_feature: MA Experiment 20000173 PARAMETER Experiment Name: At_42deg_Heat_P Parameter: Age (day) Value: 14
  misc_feature: MA Experiment 20000173 PARAMETER Experiment Name: At_42deg_Heat_P Parameter: Organism Value: A. thaliana
  misc_feature: MA Experiment 20000173 PARAMETER Experiment Name: At_42deg_Heat_P Parameter: Plant Line Value: WS
  misc_feature: MA Experiment 20000173 PARAMETER Experiment Name: At_42deg_Heat_P Parameter: Temperature (deg C) Value: 42 vs. 22
  misc_feature: MA Experiment 20000173 PARAMETER Experiment Name: At_42deg_Heat_P Parameter: Timepoint (hr) Value: 6
  misc_feature: MA Experiment 20000173 PARAMETER Experiment Name: At_42deg_Heat_P Parameter: Tissue Value: Aerial
  misc_feature: MA Experiment ID: 20000180 Result: Up-regulated in Transcription
  misc_feature: MA Experiment 20000180 PARAMETER Experiment Name: At_Germinating_Seeds_P Parameter: Age (hr) Value: 24 vs. 0
  misc_feature: MA Experiment 20000180 PARAMETER Experiment Name: At_Germinating_Seeds_P Parameter: Tissue Value: Germinating Seeds
  misc_feature: MA Experiment ID: 20000185 Result: Up-regulated in Transcription
  misc_feature: MA Experiment 20000185 PARAMETER Experiment Name: At_Roots__P Parameter: Age (day) Value: 7 vs. 21
  misc_feature: MA Experiment 20000185 PARAMETER Experiment Name: At_Roots__P Parameter: Organism Value: A. thaliana
  misc_feature: MA Experiment 20000185 PARAMETER Experiment Name: At_Roots__P Parameter: Tissue Value: Roots vs. Whole Plant
  misc_feature: MA Experiment ID: 20000227 Result: Down-regulated in Transcription
  misc_feature: MA Experiment 20000227 PARAMETER Experiment Name: At_Root-Tips-vs-Tops_P Parameter: Tissue Value: Root Tips vs. Root Tops
  misc_feature: MA Experiment ID: 20000265 Result: Up-regulated in Transcription
  misc_feature: MA Experiment 20000265 PARAMETER Experiment Name: At_Open_Flower_P Parameter: Age (day) Value: 21
  misc_feature: MA Experiment 20000265 PARAMETER Experiment Name: At_Open_Flower_P Parameter: Plant Line Value: WS
  misc_feature: MA Experiment 20000265 PARAMETER Experiment Name: At_Open_Flower_P Parameter: Tissue Value: Closed Flower vs. Whole Plant
  misc_feature: MA Experiment ID: 20000286 Result: Up-regulated in Transcription
  misc_feature: MA Experiment 20000286 PARAMETER Experiment Name: At_Open_Flower_P Parameter: Age (day) Value: 21
  misc_feature: MA Experiment 20000286 PARAMETER Experiment Name: At_Open_Flower_P Parameter: Plant Line Value: WS
  misc_feature: MA Experiment 20000286 PARAMETER Experiment Name: At_Open_Flower_P Parameter: Tissue Value: Half Open vs. Whole Plant
  misc_feature: MA Experiment ID: 20000439 Result: Up-regulated in Transcription
  misc_feature: MA Experiment 20000439 PARAMETER Experiment Name: At_Roots__P Parameter: Age (day) Value: 14 vs. 21
  misc_feature: MA Experiment 20000439 PARAMETER Experiment Name: At_Roots__P Parameter: Organism Value: A. thaliana
  misc_feature: MA Experiment 20000439 PARAMETER Experiment Name: At_Roots__P Parameter: Tissue Value: Roots vs. Whole Plant
  misc_feature: MA Experiment ID: 20000451 Result: Up-regulated in Transcription
  misc_feature: MA Experiment 20000451 PARAMETER Experiment Name: At_CS6879_Shoots-Roots_P Parameter: Age (day) Value: 14
  misc_feature: MA Experiment 20000451 PARAMETER Experiment Name: At_CS6879_Shoots-Roots_P Parameter: Organism Value: A. thaliana
  misc_feature: MA Experiment 20000451 PARAMETER Experiment Name: At_CS6879_Shoots-Roots_P Parameter: Plant Line Value: CS6879 vs. WS
  misc_feature: MA Experiment 20000451 PARAMETER Experiment Name: At_CS6879_Shoots-Roots_P Parameter: Tissue Value: Roots
  misc_feature: MA Experiment ID: 20001556 Result: Up-regulated in Transcription
  misc_feature: MA Experiment 20001556 PARAMETER Experiment Name: At_Drought_Soil_Dry_P Parameter: Age (day) Value: 26
  misc_feature: MA Experiment 20001556 PARAMETER Experiment Name: At_Drought_Soil_Dry_P Parameter: Organism Value: A. thaliana
  misc_feature: MA Experiment 20001556 PARAMETER Experiment Name: At_Drought_Soil_Dry_P Parameter: Plant Line Value: WS
  misc_feature: MA Experiment 20001556 PARAMETER Experiment Name: At_Drought_Soil_Dry_P Parameter: Post Timepoint (hr) Value: None
  misc_feature: MA Experiment 20001556 PARAMETER Experiment Name: At_Drought_Soil_Dry_P Parameter: Post-Treatment Value: None
  misc_feature: MA Experiment 20001556 PARAMETER Experiment Name: At_Drought_Soil_Dry_P Parameter: Timepoint (day) Value: 12
  misc_feature: MA Experiment 20001556 PARAMETER Experiment Name: At_Drought_Soil_Dry_P Parameter: Treatment Value: Drought vs. No Drought
  misc_feature: MA Experiment ID: 20001904 Result: Up-regulated in Transcription
  misc_feature: MA Experiment 20001904 PARAMETER Experiment Name: At_Drought_Reproduction_P Parameter: Age (day) Value: 37
  misc_feature: MA Experiment 20001904 PARAMETER Experiment Name: At_Drought_Reproduction_P Parameter: Organism Value: A. thaliana
  misc_feature: MA Experiment 20001904 PARAMETER Experiment Name: At_Drought_Reproduction_P Parameter: Plant Line Value: WS
  misc_feature: MA Experiment 20001904 PARAMETER Experiment Name: At_Drought_Reproduction_P Parameter: Timepoint (day) Value: 7
  misc_feature: MA Experiment 20001904 PARAMETER Experiment Name: At_Drought_Reproduction_P Parameter: Tissue Value: Rosettes
  misc_feature: MA Experiment 20001904 PARAMETER Experiment Name: At_Drought_Reproduction_P Parameter: Treatment Value: Drought vs. No Drought
  misc_feature: MA Experiment ID: 20001905 Result: Up-regulated in Transcription
  misc_feature: MA Experiment 20001905 PARAMETER Experiment Name: At_Drought_Reproduction_P Parameter: Age (day) Value: 40
  misc_feature: MA Experiment 20001905 PARAMETER Experiment Name: At_Drought_Reproduction_P Parameter: Organism Value: A. thaliana
  misc_feature: MA Experiment 20001905 PARAMETER Experiment Name: At_Drought_Reproduction_P Parameter: Plant Line Value: WS
  misc_feature: MA Experiment 20001905 PARAMETER Experiment Name: At_Drought_Reproduction_P Parameter: Timepoint (day) Value: 10
  misc_feature: MA Experiment 20001905 PARAMETER Experiment Name: At_Drought_Reproduction_P Parameter: Tissue Value: Rosettes
  misc_feature: MA Experiment 20001905 PARAMETER Experiment Name: At_Drought_Reproduction_P Parameter: Treatment Value: Drought vs. No Drought
  misc_feature: MA Experiment ID: 20001906 Result: Up-regulated in Transcription
  misc_feature: MA Experiment 20001906 PARAMETER Experiment Name: At_Drought_Reproduction_P Parameter: Age (day) Value: 35
  misc_feature: MA Experiment 20001906 PARAMETER Experiment Name: At_Drought_Reproduction_P Parameter: Organism Value: A. thaliana
  misc_feature: MA Experiment 20001906 PARAMETER Experiment Name: At_Drought_Reproduction_P Parameter: Plant Line Value: WS
  misc_feature: MA Experiment 20001906 PARAMETER Experiment Name: At_Drought_Reproduction_P Parameter: Timepoint (day) Value: 5
  misc_feature: MA Experiment 20001906 PARAMETER Experiment Name: At_Drought_Reproduction_P Parameter: Tissue Value: Siliques
  misc_feature: MA Experiment 20001906 PARAMETER Experiment Name: At_Drought_Reproduction_P Parameter: Treatment Value: Drought vs. No Drought
ctaacttctctgttcatctttttctctctttatttataaatttatctgcatagtactctctgaatctatatcttcaaaaaaaaaaaacgtccaagatcaaatcaagaaacccattaaaaaaaaaaatcaggttttggtttcagttttaagggtttaatgtttcttggggaagaaacgatggagactttttgtgggtttcaaaaggaggaagagcagatggatttacctcctgggttcaggtttcatccaacagatgaagaactcataactcactatctccataagaaggttcttgacaccagcttctcagctaaagctatcggtgaagttgatttaaacaaatcagagccatgggagttaccatggatggcaaaaatgggtgagaaagaatggtattttttctgtgtgagagacagaaagtatcccaccggtttaagaactaaccgagcaactgaagccggttattggaaggcgaccgggaaggataaagagatataccgaggcaaatcacttgttgggatgaagaagacacttgttttctatagaggaagagctcctaaaggtcagaaaaccaactgggtgatgcatgagtacaggcttgaaggaaaattctctgcccataacttgccgaaaaccgcaaagaatgaatgggtgatatgcagggtgttccaaaagagtgctggagggaagaagatcccgatttcgagtctaatccgaatcggttcactcggaaccgactttaacccttcgcttttgccctctttaaccgattcttcgccttacaacgataaaaccaaaacagaaccggtctacgtgccctgcttctccaaccaaacggatcaaaaccaaggaaccacactcaattgcttcagcagccctgttcttaactcgatccaagccgacatttttcacaggattccactctatcaaactcagtccctccaggtttctatgaatctacagagcccggttctcacgcaagaacactcagttctacatgctatgatcgagaacaacagaagacaaagtctcaaaacgatgagtgtctcacaagaaaccggagtttcaactgacatgaacactgatatctcatcggattttgaatttggtaagagacggtttgattctcaagaagatccgtcttcctctactggaccggttgatcttgaacctttctggaattactgaagatgattcaagattctcatgtccattaatttactgtggtgtgttaaagtttgtataggctattgtcatatactctcatatcaacttccactatatattataacaatttaaagaaacttaaaaatatgatttg

SEQ ID NO: 29063 - protein, 343 aa, Arabidopsis thaliana
  peptide (1)..(343): Ceres Seq. ID no. 12338276
  misc_feature (23)..(149): Pfam Name: No apical meristem (NAM) protein Pfam Description: No apical meristem (NAM) protein
  misc_feature (21)..(343): Homolog of NCBI NO: 30682054 NR Description: NAM (no apical meristem)-related protein
  misc_feature (8)..(343): Homolog of NCBI NO: 30682048 NR Description: NAM (no apical meristem)-related protein
  misc_feature (21)..(343): Homolog of NCBI NO: 21537315 NR Description: NAM, no apical meristem,-like protein
  misc_feature (8)..(343): Homolog of NCBI NO: 15240252 NR Description: NAM, no apical meristem, - like protein
MFLGEETMETFCGFQKEEEQMDLPPGFRFHPTDEELITHYLHKKVLDTSFSAKAIGEVDLNKSEPWELPWMAKMGEKEWYFFCVRDRKYPTGLRTNRATEAGYWKATGKDKEIYRGKSLVGMKKTLVFYRGRAPKGQKTNWVMHEYRLEGKFSAHNLPKTAKNEWVICRVFQKSAGGKKIPISSLIRIGSLGTDFNPSLLPSLTDSSPYNDKTKTEPVYVPCFSNQTDQNQGTTLNCFSSPVLNSIQADIFHRIPLYQTQSLQVSMNLQSPVLTQEHSVLHAMIENNRRQSLKTMSVSQETGVSTDMNTDISSDFEFGKRRFDSQEDPSSSTGPVDLEPFWNY

SEQ ID NO: 29064 - protein, 336 aa, Arabidopsis thaliana
  peptide (1)..(336): Ceres Seq. ID no. 12338277
  misc_feature (16)..(142): Pfam Name: No apical meristem (NAM) protein Pfam Description: No apical meristem (NAM) protein
  misc_feature (14)..(336): Homolog of NCBI NO: 30682054 NR Description: NAM (no apical meristem)-related protein
  misc_feature (1)..(336): Homolog of NCBI NO: 30682048 NR Description: NAM (no apical meristem)-related protein
  misc_feature (14)..(336): Homolog of NCBI NO: 21537315 NR Description: NAM, no apical meristem,-like protein
  misc_feature (1)..(336): Homolog of NCBI NO: 15240252 NR Description: NAM, no apical meristem, - like protein
METFCGFQKEEEQMDLPPGFRFHPTDEELITHYLHKKVLDTSFSAKAIGEVDLNKSEPWELPWMAKMGEKEWYFFCVRDRKYPTGLRTNRATEAGYWKATGKDKEIYRGKSLVGMKKTLVFYRGRAPKGQKTNWVMHEYRLEGKFSAHNLPKTAKNEWVICRVFQKSAGGKKIPISSLIRIGSLGTDFNPSLLPSLTDSSPYNDKTKTEPVYVPCFSNQTDQNQGTTLNCFSSPVLNSIQADIFHRIPLYQTQSLQVSMNLQSPVLTQEHSVLHAMIENNRRQSLKTMSVSQETGVSTDMNTDISSDFEFGKRRFDSQEDPSSSTGPVDLEPFWNY

SEQ ID NO: 29065 - protein, 323 aa, Arabidopsis thaliana
  peptide (1)..(323): Ceres Seq. ID no. 12338278
  misc_feature (3)..(129): Pfam Name: No apical meristem (NAM) protein Pfam Description: No apical meristem (NAM) protein
  misc_feature (1)..(323): Homolog of NCBI NO: 30682054 NR Description: NAM (no apical meristem)-related protein
  misc_feature (1)..(323): Homolog of NCBI NO: 30682048 NR Description: NAM (no apical meristem)-related protein
  misc_feature (1)..(323): Homolog of NCBI NO: 21537315 NR Description: NAM, no apical meristem,-like protein
  misc_feature (1)..(323): Homolog of NCBI NO: 15240252 NR Description: NAM, no apical meristem, - like protein
MDLPPGFRFHPTDEELITHYLHKKVLDTSFSAKAIGEVDLNKSEPWELPWMAKMGEKEWYFFCVRDRKYPTGLRTNRATEAGYWKATGKDKEIYRGKSLVGMKKTLVFYRGRAPKGQKTNWVMHEYRLEGKFSAHNLPKTAKNEWVICRVFQKSAGGKKIPISSLIRIGSLGTDFNPSLLPSLTDSSPYNDKTKTEPVYVPCFSNQTDQNQGTTLNCFSSPVLNSIQADIFHRIPLYQTQSLQVSMNLQSPVLTQEHSVLHAMIENNRRQSLKTMSVSQETGVSTDMNTDISSDFEFGKRRFDSQEDPSSSTGPVDLEPFWNY

SEQ ID NO: 29066 - DNA, 1227 bp, Arabidopsis thaliana
  misc_feature (1)..(1227): Ceres Seq. ID no. 12338983
  misc_feature: MA Experiment ID: 108461 Result: Up-regulated in Transcription
  misc_feature: MA Experiment 108461 PARAMETER Experiment Name: At_Germinating_Seeds_cDNA_P Parameter: Age (day) Value: 1 vs. 0
  misc_feature: MA Experiment 108461 PARAMETER Experiment Name: At_Germinating_Seeds_cDNA_P Parameter: Tissue Value: Germinating Seeds
  misc_feature: MA Experiment ID: 108585 Result: Up-regulated in Transcription
  misc_feature: MA Experiment 108585 PARAMETER Experiment Name: At_5mM_NaNP_cDNA_P Parameter: Timepoint (hr) Value: 6
  misc_feature: MA Experiment 108585 PARAMETER Experiment Name: At_5mM_NaNP_cDNA_P Parameter: Tissue Value: Aerial
  misc_feature: MA Experiment 108585 PARAMETER Experiment Name: At_5mM_NaNP_cDNA_P Parameter: Treatment Value: null
  misc_feature: MA Experiment ID: 20000171 Result: Up-regulated in Transcription
  misc_feature: MA Experiment 20000171 PARAMETER Experiment Name: At_42deg_Heat_P Parameter: Age (day) Value: 14
  misc_feature: MA Experiment 20000171 PARAMETER Experiment Name: At_42deg_Heat_P Parameter: Organism Value: A. thaliana
  misc_feature: MA Experiment 20000171 PARAMETER Experiment Name: At_42deg_Heat_P Parameter: Plant Line Value: WS
  misc_feature: MA Experiment 20000171 PARAMETER Experiment Name: At_42deg_Heat_P Parameter: Temperature (deg C) Value: 42 vs. 22
  misc_feature: MA Experiment 20000171 PARAMETER Experiment Name: At_42deg_Heat_P Parameter: Timepoint (hr) Value: 1
  misc_feature: MA Experiment 20000171 PARAMETER Experiment Name: At_42deg_Heat_P Parameter: Tissue Value: Aerial
  misc_feature: MA Experiment ID: 20000179 Result: Up-regulated in Transcription
  misc_feature: MA Experiment 20000179 PARAMETER Experiment Name: At_Germinating_Seeds_P Parameter: Age (hr) Value: 6 vs. 0
  misc_feature: MA Experiment 20000179 PARAMETER Experiment Name: At_Germinating_Seeds_P Parameter: Tissue Value: Germinating Seeds
  misc_feature: MA Experiment ID: 20000180 Result: Up-regulated in Transcription
  misc_feature: MA Experiment 20000180 PARAMETER Experiment Name: At_Germinating_Seeds_P Parameter: Age (hr) Value: 24 vs. 0
  misc_feature: MA Experiment 20000180 PARAMETER Experiment Name: At_Germinating_Seeds_P Parameter: Tissue Value: Germinating Seeds
  misc_feature: MA Experiment ID: 20000185 Result: Up-regulated in Transcription
  misc_feature: MA Experiment 20000185 PARAMETER Experiment Name: At_Roots__P Parameter: Age (day) Value: 7 vs. 21
  misc_feature: MA Experiment 20000185 PARAMETER Experiment Name: At_Roots__P Parameter: Organism Value: A. thaliana
  misc_feature: MA Experiment 20000185 PARAMETER Experiment Name: At_Roots__P Parameter: Tissue Value: Roots vs. Whole Plant
  misc_feature: MA Experiment ID: 20000439 Result: Up-regulated in Transcription
  misc_feature: MA Experiment 20000439 PARAMETER Experiment Name: At_Roots__P Parameter: Age (day) Value: 14 vs. 21
  misc_feature: MA Experiment 20000439 PARAMETER Experiment Name: At_Roots__P Parameter: Organism Value: A. thaliana
  misc_feature: MA Experiment 20000439 PARAMETER Experiment Name: At_Roots__P Parameter: Tissue Value: Roots vs. Whole Plant
  misc_feature: MA Experiment ID: 20001556 Result: Down-regulated in Transcription
  misc_feature: MA Experiment 20001556 PARAMETER Experiment Name: At_Drought_Soil_Dry_P Parameter: Age (day) Value: 26
  misc_feature: MA Experiment 20001556 PARAMETER Experiment Name: At_Drought_Soil_Dry_P Parameter: Organism Value: A. thaliana
  misc_feature: MA Experiment 20001556 PARAMETER Experiment Name: At_Drought_Soil_Dry_P Parameter: Plant Line Value: WS
  misc_feature: MA Experiment 20001556 PARAMETER Experiment Name: At_Drought_Soil_Dry_P Parameter: Post Timepoint (hr) Value: None
  misc_feature: MA Experiment 20001556 PARAMETER Experiment Name: At_Drought_Soil_Dry_P Parameter: Post-Treatment Value: None
  misc_feature: MA Experiment 20001556 PARAMETER Experiment Name: At_Drought_Soil_Dry_P Parameter: Timepoint (day) Value: 12
  misc_feature: MA Experiment 20001556 PARAMETER Experiment Name: At_Drought_Soil_Dry_P Parameter: Treatment Value: Drought vs. No Drought
  misc_feature: MA Experiment ID: 20001558 Result: Down-regulated in Transcription
  misc_feature: MA Experiment 20001558 PARAMETER Experiment Name: At_Drought_Soil_Dry_P Parameter: Age (day) Value: 27
  misc_feature: MA Experiment 20001558 PARAMETER Experiment Name: At_Drought_Soil_Dry_P Parameter: Organism Value: A. thaliana
  misc_feature: MA Experiment 20001558 PARAMETER Experiment Name: At_Drought_Soil_Dry_P Parameter: Plant Line Value: WS
  misc_feature: MA Experiment 20001558 PARAMETER Experiment Name: At_Drought_Soil_Dry_P Parameter: Post Timepoint (hr) Value: 6
  misc_feature: MA Experiment 20001558 PARAMETER Experiment Name: At_Drought_Soil_Dry_P Parameter: Post-Treatment Value: Re-Water vs. No Drought
  misc_feature: MA Experiment 20001558 PARAMETER Experiment Name: At_Drought_Soil_Dry_P Parameter: Timepoint (day) Value: 13
  misc_feature: MA Experiment 20001558 PARAMETER Experiment Name: At_Drought_Soil_Dry_P Parameter: Treatment Value: Drought vs. No Drought
atcagattcaagatcagtagtaacaatggagaagccaaagttcaagactgtccaagaggtggttgcagcaggcgaaggaataccggagagatacctccaaccaccagccgtcgacgacaatggtcaacatcttaacgctgccgtgccggtgatggatattccggccatcgatttgagtcttctcctctctccttctgatgacggtcgagaagagttgagtaaacttcactcggcactctctacatggggagttgttcaggtgataaatcatggaattacaaaagcgttgctcgacaagatttacaagctaaccaaggagttctgtgcacttccgtccgaagagaaacaaaagtacgcgagagagattggtagtatccaaggatatggtaacgatatgattctgtgggatgatcaagttcttgattggatcgaccgtttgtatatcactacttaccctgaagatcagagacaacttaagttctggcctgatgtccctgtcggattcagggaaactttacatgaatacacaatgaagcaacatctagtgtttaatcaagtctttaaagcgatggctatatcgttggaattggaagagaattgctttctagacatgtgtggagaaaatgctacgatggatacaagattcaacatgtatcctccatgtccgaggccggacaaggttattggcgttagaccgcacgctgataagtcggctttcactcttctcttgcctgacaaaaatgtcgaagggcttcagttccttaaagatgggaagtggtataaagctccagttgtcgcttcagatacaattctgatcaatgttggagatcagatggagataatgagcaatgggatatacaagagcccggttcatagagtggtgactaatacagaaaaagaaaggatatctgtggcaacgttttgcattccaggtgcagacaaagagattcagcctgttgatgggcttgtgtctgaggcaagaccaagattgtataagccagtaaaaaactatgtggacctcttaaacaagtactatatacagggtcaaagaccaattgcagcgtcattgatctgatcatatttttcaagtctcctttattggtttcacaaatgaatctgtttctttcgttacttgatcctttataagaataataataatgttgctttgtttgttggaatgtgagaatgtaagactgcattgtgttatttgtgttacaattctgagac

SEQ ID NO: 29067 - protein, 357 aa, Arabidopsis thaliana
  peptide (1)..(357): Ceres Seq. ID no. 12338984
  misc_feature (209)..(310): Pfam Name: 2OG-Fe(II) oxygenase superfamily Pfam Description: 2OG-Fe(II) oxygenase superfamily
  misc_feature (3)..(347): Homolog of NCBI NO: 37536802 NR Description: putative ethylene-forming enzyme
  misc_feature (17)..(332): Homolog of NCBI NO: 34898470 NR Description: ESTs D47168(S12332),D46350(S10967) correspond to region of the predicted gene.~Similar to Prunus armeniaca
  misc_feature (17)..(334): Homolog of NCBI NO: 24413982 NR Description: ethylene-forming-enzyme-like dioxygenase-like
  misc_feature (17)..(345): Homolog of NCBI NO: 24413984 NR Description: ethylene-forming-enzyme-like dioxygenase-like
  misc_feature (16)..(357): Homolog of NCBI NO: 2688828 NR Description: ethylene-forming-enzyme-like dioxygenase [Prunus
  misc_feature (9)..(357): Homolog of NCBI NO: 15239524 NR Description: ethylene-forming-enzyme-like dioxygenase; protein
  misc_feature (9)..(357): Homolog of NCBI NO: 15222131 NR Description: flavonol synthase, putative; protein id:
  misc_feature (9)..(357): Homolog of NCBI NO: 15241348 NR Description: ethylene-forming-enzyme-like dioxygenase-like
  misc_feature (9)..(357): Homolog of NCBI NO: 21593366 NR Description: ethylene-forming-enzyme-like dioxygenase-like
  misc_feature (9)..(357): Homolog of NCBI NO: 15241383 NR Description: ethylene-forming-enzyme-like dioxygenase - like
SDSRSVVTMEKPKFKTVQEVVAAGEGIPERYLQPPAVDDNGQHLNAAVPVMDIPAIDLSLLLSPSDDGREELSKLHSALSTWGVVQVINHGITKALLDKIYKLTKEFCALPSEEKQKYAREIGSIQGYGNDMILWDDQVLDWIDRLYITTYPEDQRQLKFWPDVPVGFRETLHEYTMKQHLVFNQVFKAMAISLELEENCFLDMCGENATMDTRFNMYPPCPRPDKVIGVRPHADKSAFTLLLPDKNVEGLQFLKDGKWYKAPVVASDTILINVGDQMEIMSNGIYKSPVHRVVTNTEKERISVATFCIPGADKEIQPVDGLVSEARPRLYKPVKNYVDLLNKYYIQGQRPIAASLI

SEQ ID NO: 29068 - protein, 349 aa, Arabidopsis thaliana
  peptide (1)..(349): Ceres Seq. ID no. 12338985
  misc_feature (201)..(302): Pfam Name: 2OG-Fe(II) oxygenase superfamily Pfam Description: 2OG-Fe(II) oxygenase superfamily
  misc_feature (1)..(339): Homolog of NCBI NO: 37536802 NR Description: putative ethylene-forming enzyme
  misc_feature (9)..(324): Homolog of NCBI NO: 34898470 NR Description: ESTs D47168(S12332),D46350(S10967) correspond to region of the predicted gene.~Similar to Prunus armeniaca
  misc_feature (9)..(326): Homolog of NCBI NO: 24413982 NR Description: ethylene-forming-enzyme-like dioxygenase-like
  misc_feature (9)..(337): Homolog of NCBI NO: 24413984 NR Description: ethylene-forming-enzyme-like dioxygenase-like
  misc_feature (8)..(349): Homolog of NCBI NO: 2688828 NR Description: ethylene-forming-enzyme-like dioxygenase [Prunus
  misc_feature (1)..(349): Homolog of NCBI NO: 15239524 NR Description: ethylene-forming-enzyme-like dioxygenase; protein
  misc_feature (1)..(349): Homolog of NCBI NO: 15222131 NR Description: flavonol synthase, putative; protein id:
  misc_feature (1)..(349): Homolog of NCBI NO: 15241348 NR Description: ethylene-forming-enzyme-like dioxygenase-like
  misc_feature (1)..(349): Homolog of NCBI NO: 21593366 NR Description: ethylene-forming-enzyme-like dioxygenase-like
  misc_feature (1)..(349): Homolog of NCBI NO: 15241383 NR Description: ethylene-forming-enzyme-like dioxygenase - like
MEKPKFKTVQEVVAAGEGIPERYLQPPAVDDNGQHLNAAVPVMDIPAIDLSLLLSPSDDGREELSKLHSALSTWGVVQVINHGITKALLDKIYKLTKEFCALPSEEKQKYAREIGSIQGYGNDMILWDDQVLDWIDRLYITTYPEDQRQLKFWPDVPVGFRETLHEYTMKQHLVFNQVFKAMAISLELEENCFLDMCGENATMDTRFNMYPPCPRPDKVIGVRPHADKSAFTLLLPDKNVEGLQFLKDGKWYKAPVVASDTILINVGDQMEIMSNGIYKSPVHRVVTNTEKERISVATFCIPGADKEIQPVDGLVSEARPRLYKPVKNYVDLLNKYYIQGQRPIAASLI

SEQ ID NO: 29069 - protein, 307 aa, Arabidopsis thaliana
  peptide (1)..(307): Ceres Seq. ID no. 12338987
  misc_feature (159)..(260): Pfam Name: 2OG-Fe(II) oxygenase superfamily Pfam Description: 2OG-Fe(II) oxygenase superfamily
  misc_feature (1)..(297): Homolog of NCBI NO: 37536802 NR Description: putative ethylene-forming enzyme
  misc_feature (1)..(282): Homolog of NCBI NO: 34898470 NR Description: ESTs D47168(S12332),D46350(S10967) correspond to region of the predicted gene.~Similar to Prunus armeniaca
  misc_feature (1)..(284): Homolog of NCBI NO: 24413982 NR Description: ethylene-forming-enzyme-like dioxygenase-like
  misc_feature (1)..(295): Homolog of NCBI NO: 24413984 NR Description: ethylene-forming-enzyme-like dioxygenase-like
  misc_feature (1)..(307): Homolog of NCBI NO: 2688828 NR Description: ethylene-forming-enzyme-like dioxygenase [Prunus
  misc_feature (1)..(307): Homolog of NCBI NO: 15239524 NR Description: ethylene-forming-enzyme-like dioxygenase; protein
  misc_feature (1)..(307): Homolog of NCBI NO: 15222131 NR Description: flavonol synthase, putative; protein id:
  misc_feature (1)..(307): Homolog of NCBI NO: 15241348 NR Description: ethylene-forming-enzyme-like dioxygenase-like
  misc_feature (1)..(307): Homolog of NCBI NO: 21593366 NR Description: ethylene-forming-enzyme-like dioxygenase-like
  misc_feature (1)..(307): Homolog of NCBI NO: 15241383 NR Description: ethylene-forming-enzyme-like dioxygenase - like
MDIPAIDLSLLLSPSDDGREELSKLHSALSTWGVVQVINHGITKALLDKIYKLTKEFCALPSEEKQKYAREIGSIQGYGNDMILWDDQVLDWIDRLYITTYPEDQRQLKFWPDVPVGFRETLHEYTMKQHLVFNQVFKAMAISLELEENCFLDMCGENATMDTRFNMYPPCPRPDKVIGVRPHADKSAFTLLLPDKNVEGLQFLKDGKWYKAPVVASDTILINVGDQMEIMSNGIYKSPVHRVVTNTEKERISVATFCIPGADKEIQPVDGLVSEARPRLYKPVKNYVDLLNKYYIQGQRPIAASLI

SEQ ID NO: 29070 - DNA, 1976 bp, Arabidopsis thaliana
  misc_feature (1)..(1976): Ceres Seq. ID no. 13497375
  misc_feature: MA Experiment ID: 108434 Result: Up-regulated in Transcription
  misc_feature: MA Experiment 108434 PARAMETER Experiment Name: At_Root_Tips_cDNA_P Parameter: Tissue Value: Root Tips
  misc_feature: MA Experiment ID: 108461 Result: Down-regulated in Transcription
  misc_feature: MA Experiment 108461 PARAMETER Experiment Name: At_Germinating_Seeds_cDNA_P Parameter: Age (day) Value: 1 vs. 0
  misc_feature: MA Experiment 108461 PARAMETER Experiment Name: At_Germinating_Seeds_cDNA_P Parameter: Tissue Value: Germinating Seeds
  misc_feature: MA Experiment ID: 108462 Result: Down-regulated in Transcription
  misc_feature: MA Experiment 108462 PARAMETER Experiment Name: At_Germinating_Seeds_cDNA_P Parameter: Age (day) Value: 2 vs. 0
  misc_feature: MA Experiment 108462 PARAMETER Experiment Name: At_Germinating_Seeds_cDNA_P Parameter: Tissue Value: Germinating Seeds
  misc_feature: MA Experiment ID: 108463 Result: Down-regulated in Transcription
  misc_feature: MA Experiment 108463 PARAMETER Experiment Name: At_Germinating_Seeds_cDNA_P Parameter: Age (day) Value: 3 vs. 0
  misc_feature: MA Experiment 108463 PARAMETER Experiment Name: At_Germinating_Seeds_cDNA_P Parameter: Tissue Value: Germinating Seeds
  misc_feature: MA Experiment ID: 108464 Result: Down-regulated in Transcription
  misc_feature: MA Experiment 108464 PARAMETER Experiment Name: At_Germinating_Seeds_cDNA_P Parameter: Age (day) Value: 4 vs. 0
  misc_feature: MA Experiment 108464 PARAMETER Experiment Name: At_Germinating_Seeds_cDNA_P Parameter: Tissue Value: Germinating Seeds
  misc_feature: MA Experiment ID: 20000113 Result: Down-regulated in Transcription
  misc_feature: MA Experiment 20000113 PARAMETER Experiment Name: At_42deg_Heat_cDNA_P Parameter: Temperature (deg C) Value: 42 vs. 22
  misc_feature: MA Experiment 20000113 PARAMETER Experiment Name: At_42deg_Heat_cDNA_P Parameter: Timepoint (hr) Value: 8
  misc_feature: MA Experiment 20000113 PARAMETER Experiment Name: At_42deg_Heat_cDNA_P Parameter: Tissue Value: Aerial
  misc_feature: MA Experiment ID: 20000227 Result: Up-regulated in Transcription
  misc_feature: MA Experiment 20000227 PARAMETER Experiment Name: At_Root-Tips-vs-Tops_P Parameter: Tissue Value: Root Tips vs. Root Tops
  misc_feature: MA Experiment ID: 20000495 Result: Up-regulated in Transcription
  misc_feature: MA Experiment 20000495 PARAMETER Experiment Name: At_Guard_Cells_P Parameter: Harvest Date Value: 8/2/2002
  misc_feature: MA Experiment 20000495 PARAMETER Experiment Name: At_Guard_Cells_P Parameter: Organism Value: A. thaliana
  misc_feature: MA Experiment 20000495 PARAMETER Experiment Name: At_Guard_Cells_P Parameter: Tissue Value: Guard Cells vs. Leaves
  misc_feature: MA Experiment ID: 20001557 Result: Up-regulated in Transcription
  misc_feature: MA Experiment 20001557 PARAMETER Experiment Name: At_Drought_Soil_Dry_P Parameter: Age (day) Value: 27
  misc_feature: MA Experiment 20001557 PARAMETER Experiment Name: At_Drought_Soil_Dry_P Parameter: Organism Value: A. thaliana
  misc_feature: MA Experiment 20001557 PARAMETER Experiment Name: At_Drought_Soil_Dry_P Parameter: Plant Line Value: WS
  misc_feature: MA Experiment 20001557 PARAMETER Experiment Name: At_Drought_Soil_Dry_P Parameter: Post Timepoint (hr) Value: 3
  misc_feature: MA Experiment 20001557 PARAMETER Experiment Name: At_Drought_Soil_Dry_P Parameter: Post-Treatment Value: Re-Water vs. No Drought
  misc_feature: MA Experiment 20001557 PARAMETER Experiment Name: At_Drought_Soil_Dry_P Parameter: Timepoint (day) Value: 13
  misc_feature: MA Experiment 20001557 PARAMETER Experiment Name: At_Drought_Soil_Dry_P Parameter: Treatment Value: Drought vs. No Drought
ctctcctctcattttctactcttcttcaaaagcacactcaatatttcgagatcctctcggcttgttcgttcttcgtgaacgatcccatctattgtttctcgctagtctcagattcgactaacttggatatctccgatactgaagaagcctccttcttctttttccgctcttcccgatgccgatcgataagatcttcaaagatgatgctagtgaagagaagggagaacgtgcgaggatggcatcatttgttggtgcaatggctatcagtgatctggttaagtctactttagggccaaagggcatggataaaatcttgcaatctactggtagaggtcatgcggtcactgttactaacgatggtgctactattctcaagtcacttcacatagacaaccctgcagctaaagttcttgttgacatctcgaaagttcaagatgatgaggttggtgatggaactacctctgttgttgtcttggccggcgagcttctgagggaagcagaaaagcttgtggcttctaagattcaccctatgaccatcatagcaggttacagaatggcttcggaatgtgctcgtaatgctttactgaaaagagtcattgataacaaggacaatgcagagaagtttaggtcagacttgttgaagattgcgatgactactttatgttccaaaattctctcacaggacaaggaacattttgcagaaatggccgtggatgctgttttcaggctaaagggaagcacaaacttggaagctattcagatcatcaaaaaacctggagggtctctgaaggattcgtttttggatgaagggtttattcttgacaagaaaataggaattgggcagcctaagcgcatagagaatgcaaatatcttagtagctaatactgctatggataccgataaagtgaagatttacggtgcacgtgtccgtgtggattccatgaccaaggttgctgagattgaaggggctgagaaggaaaaaatgaaagacaaggtgaagaagatcataggccacggaatcaactgctttgttaacaggcagttgatctacaatttccctgaggaactctttgctgatgctggtatacttgctattgagcatgctgactttgagggaatagagcgtcttggtttggttactggtggtgaaattgcttcgacctttgacaacccagagtctgttaagcttgggcattgcaagcttatagaagaaatcatgattggtgaagacaagttgattcatttctctggttgtgaaatgggccaggcttgttcaattgtcctaagaggggccagtcaccatgtcctagatgaggctgaaagatcactccatgatgccttatgtgtactctctcaaacagtgaatgatactagagttttgcttggaggtggatggccagagatggtgatggcaaaggaagtagatgagcttgcaaggaaaactgctggcaaaaaatctcatgccattgaagctttctcacgtgctctagttgctataccgacaacaatcgctgacaacgctggtttagacagtgccgaattggttgctcagcttcgtgcagagcaccacactgaagggtgtaacgctgggatcgacgtcatcactggagctgtaggagatatggaagagagaggaatctatgaagcattcaaagtgaagcaagcggttctgctttcagccacagaagcatctgagatgatattgcgagtggatgaaatcattacatgtgctcctaggaggagagaagacaggatgtgaaaaactcaacacaaacacatgaacgtggtgggagcctagagattccatgattgtgttttcgatttggatcagaatacaacttttctaatatgtttaatgttttgctcctccttagaactcatctttttgttttgtttccttttaatcttgttttgagtttgaatttagacgtttgaaaaaagtgttagctccaaagtttttaatttgtttggttgcg

SEQ ID NO: 29071 - protein, 527 aa, Arabidopsis thaliana
  peptide (1)..(527): Ceres Seq. ID no. 13497376
  misc_feature (30)..(520): Pfam Name: TCP-1/cpn60 chaperonin family Pfam Description: TCP-1/cpn60 chaperonin family
  misc_feature (6)..(527): Homolog of NCBI NO: 18313108 NR Description: thermosome (chaperonin) alpha subunit
  misc_feature (2)..(526): Homolog of NCBI NO: 18858175 NR Description: CG7033-PA [Drosophila melanogaster]
  misc_feature (2)..(524): Homolog of NCBI NO: 17066722 NR Description: CCT chaperonin beta subunit [Physarum
  misc_feature (5)..(527): Homolog of NCBI NO: 19113929 NR Description: probable t-complex protein 1, beta subunit
  misc_feature (2)..(502): Homolog of NCBI NO: 21105454 NR Description: chaperonin-containing TCP-1 complex beta chain
  misc_feature (2)..(523): Homolog of NCBI NO: 6671700 NR Description: chaperonin subunit 2 (beta) [Mus musculus]
  misc_feature (2)..(523): Homolog of NCBI NO: 22654291 NR Description: T-complex protein 1, beta subunit (TCP-1-beta)
  misc_feature (2)..(523): Homolog of NCBI NO: 5453603 NR Description: chaperonin containing TCP1, subunit 2 (beta)
  misc_feature (2)..(523): Homolog of NCBI NO: 27503862 NR Description: Similar to chaperonin subunit 2 (beta) [Xenopus
  misc_feature (1)..(527): Homolog of NCBI NO: 15242093 NR Description: chaperonin, putative [Arabidopsis thaliana]
MPIDKIFKDDASEEKGERARMASFVGAMAISDLVKSTLGPKGMDKILQSTGRGHAVTVTNDGATILKSLHIDNPAAKVLVDISKVQDDEVGDGTTSVVVLAGELLREAEKLVASKIHPMTIIAGYRMASECARNALLKRVIDNKDNAEKFRSDLLKIAMTTLCSKILSQDKEHFAEMAVDAVFRLKGSTNLEAIQIIKKPGGSLKDSFLDEGFILDKKIGIGQPKRIENANILVANTAMDTDKVKIYGARVRVDSMTKVAEIEGAEKEKMKDKVKKIIGHGINCFVNRQLIYNFPEELFADAGILAIEHADFEGIERLGLVTGGEIASTFDNPESVKLGHCKLIEEIMIGEDKLIHFSGCEMGQACSIVLRGASHHVLDEAERSLHDALCVLSQTVNDTRVLLGGGWPEMVMAKEVDELARKTAGKKSHAIEAFSRALVAIPTTIADNAGLDSAELVAQLRAEHHTEGCNAGIDVITGAVGDMEERGIYEAFKVKQAVLLSATEASEMILRVDEIITCAPRRREDRM

SEQ ID NO: 29072 - protein, 507 aa, Arabidopsis thaliana
  peptide (1)..(507): Ceres Seq. ID no. 13497377
  misc_feature (10)..(500): Pfam Name: TCP-1/cpn60 chaperonin family Pfam Description: TCP-1/cpn60 chaperonin family
  misc_feature (1)..(507): Homolog of NCBI NO: 18313108 NR Description: thermosome (chaperonin) alpha subunit
  misc_feature (1)..(506): Homolog of NCBI NO: 18858175 NR Description: CG7033-PA [Drosophila melanogaster]
  misc_feature (1)..(504): Homolog of NCBI NO: 17066722 NR Description: CCT chaperonin beta subunit [Physarum
  misc_feature (1)..(507): Homolog of NCBI NO: 19113929 NR Description: probable t-complex protein 1, beta subunit
  misc_feature (1)..(482): Homolog of NCBI NO: 21105454 NR Description: chaperonin-containing TCP-1 complex beta chain
  misc_feature (1)..(503): Homolog of NCBI NO: 6671700 NR Description: chaperonin subunit 2 (beta) [Mus musculus]
  misc_feature (1)..(503): Homolog of NCBI NO: 22654291 NR Description: T-complex protein 1, beta subunit (TCP-1-beta)
  misc_feature (1)..(503): Homolog of NCBI NO: 5453603 NR Description: chaperonin containing TCP1, subunit 2 (beta)
  misc_feature (1)..(503): Homolog of NCBI NO: 27503862 NR Description: Similar to chaperonin subunit 2 (beta) [Xenopus
  misc_feature (1)..(507): Homolog of NCBI NO: 15242093 NR Description: chaperonin, putative [Arabidopsis thaliana]
MASFVGAMAISDLVKSTLGPKGMDKILQSTGRGHAVTVTNDGATILKSLHIDNPAAKVLVDISKVQDDEVGDGTTSVVVLAGELLREAEKLVASKIHPMTIIAGYRMASECARNALLKRVIDNKDNAEKFRSDLLKIAMTTLCSKILSQDKEHFAEMAVDAVFRLKGSTNLEAIQIIKKPGGSLKDSFLDEGFILDKKIGIGQPKRIENANILVANTAMDTDKVKIYGARVRVDSMTKVAEIEGAEKEKMKDKVKKIIGHGINCFVNRQLIYNFPEELFADAGILAIEHADFEGIERLGLVTGGEIASTFDNPESVKLGHCKLIEEIMIGEDKLIHFSGCEMGQACSIVLRGASHHVLDEAERSLHDALCVLSQTVNDTRVLLGGGWPEMVMAKEVDELARKTAGKKSHAIEAFSRALVAIPTTIADNAGLDSAELVAQLRAEHHTEGCNAGIDVITGAVGDMEERGIYEAFKVKQAVLLSATEASEMILRVDEIITCAPRRREDRM

SEQ ID NO: 29073 - protein, 500 aa, Arabidopsis thaliana
  peptide (1)..(500): Ceres Seq. ID no. 13497378
  misc_feature (3)..(493): Pfam Name: TCP-1/cpn60 chaperonin family Pfam Description: TCP-1/cpn60 chaperonin family
  misc_feature (1)..(500): Homolog of NCBI NO: 18313108 NR Description: thermosome (chaperonin) alpha subunit
  misc_feature (1)..(499): Homolog of NCBI NO: 18858175 NR Description: CG7033-PA [Drosophila melanogaster]
  misc_feature (1)..(497): Homolog of NCBI NO: 17066722 NR Description: CCT chaperonin beta subunit [Physarum
  misc_feature (1)..(500): Homolog of NCBI NO: 19113929 NR Description: probable t-complex protein 1, beta subunit
  misc_feature (1)..(475): Homolog of NCBI NO: 21105454 NR Description: chaperonin-containing TCP-1 complex beta chain
  misc_feature (1)..(496): Homolog of NCBI NO: 6671700 NR Description: chaperonin subunit 2 (beta) [Mus musculus]
  misc_feature (1)..(496): Homolog of NCBI NO: 22654291 NR Description: T-complex protein 1, beta subunit (TCP-1-beta)
  misc_feature (1)..(496): Homolog of NCBI NO: 5453603 NR Description: chaperonin containing TCP1, subunit 2 (beta)
  misc_feature (1)..(496): Homolog of NCBI NO: 27503862 NR Description: Similar to chaperonin subunit 2 (beta) [Xenopus
  misc_feature (1)..(500): Homolog of NCBI NO: 15242093 NR Description: chaperonin, putative [Arabidopsis thaliana]
MAISDLVKSTLGPKGMDKILQSTGRGHAVTVTNDGATILKSLHIDNPAAKVLVDISKVQDDEVGDGTTSVVVLAGELLREAEKLVASKIHPMTIIAGYRMASECARNALLKRVIDNKDNAEKFRSDLLKIAMTTLCSKILSQDKEHFAEMAVDAVFRLKGSTNLEAIQIIKKPGGSLKDSFLDEGFILDKKIGIGQPKRIENANILVANTAMDTDKVKIYGARVRVDSMTKVAEIEGAEKEKMKDKVKKIIGHGINCFVNRQLIYNFPEELFADAGILAIEHADFEGIERLGLVTGGEIASTFDNPESVKLGHCKLIEEIMIGEDKLIHFSGCEMGQACSIVLRGASHHVLDEAERSLHDALCVLSQTVNDTRVLLGGGWPEMVMAKEVDELARKTAGKKSHAIEAFSRALVAIPTTIADNAGLDSAELVAQLRAEHHTEGCNAGIDVITGAVGDMEERGIYEAFKVKQAVLLSATEASEMILRVDEIITCAPRRREDRM

SEQ ID NO: 29074 - DNA, 1221 bp, Arabidopsis thaliana
  misc_feature (1)..(1221): Ceres Seq. ID no. 13487581
  misc_feature: MA Experiment ID: 108461 Result: Up-regulated in Transcription
  misc_feature: MA Experiment 108461 PARAMETER Experiment Name: At_Germinating_Seeds_cDNA_P Parameter: Age (day) Value: 1 vs. 0
  misc_feature: MA Experiment 108461 PARAMETER Experiment Name: At_Germinating_Seeds_cDNA_P Parameter: Tissue Value: Germinating Seeds
  misc_feature: MA Experiment ID: 20000093 Result: Up-regulated in Transcription
  misc_feature: MA Experiment 20000093 PARAMETER Experiment Name: At_42deg_Heat_cDNA_P Parameter: Temperature (deg C) Value: 42 vs. 22
  misc_feature: MA Experiment 20000093 PARAMETER Experiment Name: At_42deg_Heat_cDNA_P Parameter: Timepoint (hr) Value: 0.5
  misc_feature: MA Experiment 20000093 PARAMETER Experiment Name: At_42deg_Heat_cDNA_P Parameter: Tissue Value: Aerial
  misc_feature: MA Experiment ID: 20000144 Result: Up-regulated in Transcription
  misc_feature: MA Experiment 20000144 PARAMETER Experiment Name: At_42deg_Heat_cDNA_P Parameter: Temperature (deg C) Value: 42 vs. 22
  misc_feature: MA Experiment 20000144 PARAMETER Experiment Name: At_42deg_Heat_cDNA_P Parameter: Timepoint (hr) Value: 1
  misc_feature: MA Experiment 20000144 PARAMETER Experiment Name: At_42deg_Heat_cDNA_P Parameter: Tissue Value: Aerial
  misc_feature: MA Experiment ID: 20000179 Result: Up-regulated in Transcription
  misc_feature: MA Experiment 20000179 PARAMETER Experiment Name: At_Germinating_Seeds_P Parameter: Age (hr) Value: 6 vs. 0
  misc_feature: MA Experiment 20000179 PARAMETER Experiment Name: At_Germinating_Seeds_P Parameter: Tissue Value: Germinating Seeds
  misc_feature: MA Experiment ID: 20000180 Result: Up-regulated in Transcription
  misc_feature: MA Experiment 20000180 PARAMETER Experiment Name: At_Germinating_Seeds_P Parameter: Age (hr) Value: 24 vs. 0
  misc_feature: MA Experiment 20000180 PARAMETER Experiment Name: At_Germinating_Seeds_P Parameter: Tissue Value: Germinating Seeds
  misc_feature: MA Experiment ID: 20000224 Result: Down-regulated in Transcription
gtgttaatttgattaattccattacatcttcaaaaccgtacagatctctgtttcggagcagcttcttcacacgctcaagctcaccgatcgattcttccaatgctcttctaattcatctgcaaaactctcagatcactcatgggtttgatttcaaaccctacccgtttgattctcgtcgccaccatcttcttcctcgtttcttcaatctccggtcaggattctgtcgttgagaacaatgagagacaagaatctgaaggatctggtaaagagcttggtcgtcgtggaatggttggtactgaacgaattggagttgatactgttgtagacaatattggtgctcttggtttgaatctagaccttgatgctactgctcctagtgtatttgatgctttgttttcgagtttctcgatgatacttgtcaccgagattggggatgaaacttttataatagcggcattgatggctatgcgacatcctaaagctactgttttatctggtgcactctcagctttgtttgttatgactatactttctactggacttggtaggatagtgccaaacttgatatcgaggaagcacaccaatagtgctgctacagtgctctatgcattttttggtttgcgactactctacattgcttggaggtctactgattcaaagtcaaatcagaagaaagaaatggaggaagttgaagagaagctcgagtcaggtcaagggaagacacccttccgtcgtttattctcaagattttgtaccccaatatttctggagtccttcatcttaacctttctagctgaatggggtgaccgtagccagatcgctacaatagctttggcgactcacaagaacgccataggagtggccattggggcaagtattggacacactgtgtgtacttcactagcagttgttggaggaagcatgctggcttcaaggatctcgcaacgtacggtcgcaactgttggaggcttactcttcctcggcttttcagtctcctcctatttctatcctccattgtagtaaatgtgcttctttcgaaaatgggtgttagagacaatttctaagtaaagtttcaattttttttttgattttaatttaagtttgatattttgtttaatatcaatggccaaaatggccaaaccaaagaatccaacgcctatgcttttacaatttactttcttgaagtgtaacaaatctaattaaataaaattttgcagtatt

SEQ ID NO: 29075 - protein, 293 aa, Arabidopsis thaliana; identical to SEQ ID NO: 25308
  peptide (1)..(293): Ceres Seq. ID no. 13487582
  misc_feature (209)..(284): Pfam Name: Uncharacterized protein family UPF0016 Pfam Description: Uncharacterized protein family UPF0016
  misc_feature (80)..(289): Homolog of NCBI NO: 15420543 NR Description: putative membrane protein [Crithidia fasciculata]
  misc_feature (80)..(288): Homolog of NCBI NO: 21593636 NR Description: transmembrane protein, putative [Arabidopsis
  misc_feature (80)..(288): Homolog of NCBI NO: 15222613 NR Description: transmembrane protein -related [Arabidopsis
  misc_feature (177)..(292): Homolog of NCBI NO: 20385488 NR Description: transmembrane protein HTP-1 [Danio rerio]
  misc_feature (10)..(189): Homolog of NCBI NO: 20385488 NR Description: transmembrane protein HTP-1 [Danio rerio]
  misc_feature (73)..(292): Homolog of NCBI NO: 21357589 NR Description: CG4196-PC [Drosophila melanogaster]
  misc_feature (208)..(292): Homolog of NCBI NO: 31240317 NR Description: ENSANGP00000008699 [Anopheles gambiae]
  misc_feature (84)..(198): Homolog of NCBI NO: 31240317 NR Description: ENSANGP00000008699 [Anopheles gambiae]
  misc_feature (1)..(273): Homolog of NCBI NO: 9759042 NR Description: transmembrane protein FT27/PFT27-like
  misc_feature (1)..(293): Homolog of NCBI NO: 18421551 NR Description: transmembrane protein FT27/PFT27-related

SEQ ID NO: 29076 - protein, 244 aa, Arabidopsis thaliana; identical to SEQ ID NO: 25309
  peptide (1)..(244): Ceres Seq. ID no. 13487583
  misc_feature (160)..(235): Pfam Name: Uncharacterized protein family UPF0016 Pfam Description: Uncharacterized protein family UPF0016
  misc_feature (31)..(240): Homolog of NCBI NO: 15420543 NR Description: putative membrane protein [Crithidia fasciculata]
  misc_feature (31)..(239): Homolog of NCBI NO: 21593636 NR Description: transmembrane protein, putative [Arabidopsis
  misc_feature (31)..(239): Homolog of NCBI NO: 15222613 NR Description: transmembrane protein -related [Arabidopsis
  misc_feature (128)..(243): Homolog of NCBI NO: 20385488 NR Description: transmembrane protein HTP-1 [Danio rerio]
  misc_feature (1)..(140): Homolog of NCBI NO: 20385488 NR Description: transmembrane protein HTP-1 [Danio rerio]
  misc_feature (24)..(243): Homolog of NCBI NO: 21357589 NR Description: CG4196-PC [Drosophila melanogaster]
  misc_feature (159)..(243): Homolog of NCBI NO: 31240317 NR Description: ENSANGP00000008699 [Anopheles gambiae]
  misc_feature (35)..(149): Homolog of NCBI NO: 31240317 NR Description: ENSANGP00000008699 [Anopheles gambiae]
  misc_feature (1)..(224): Homolog of NCBI NO: 9759042 NR Description: transmembrane protein FT27/PFT27-like
  misc_feature (1)..(244): Homolog of NCBI NO: 18421551 NR Description: transmembrane protein FT27/PFT27-related

SEQ ID NO: 29077 - protein, 203 aa, Arabidopsis thaliana; identical to SEQ ID NO: 25310
  peptide (1)..(203): Ceres Seq. ID no. 13487584
  misc_feature (119)..(194): Pfam Name: Uncharacterized protein family UPF0016 Pfam Description: Uncharacterized protein family UPF0016
  misc_feature (1)..(199): Homolog of NCBI NO: 15420543 NR Description: putative membrane protein [Crithidia fasciculata]
  misc_feature (1)..(198): Homolog of NCBI NO: 21593636 NR Description: transmembrane protein, putative [Arabidopsis
  misc_feature (1)..(198): Homolog of NCBI NO: 15222613 NR Description: transmembrane protein -related [Arabidopsis
  misc_feature (87)..(202): Homolog of NCBI NO: 20385488 NR Description: transmembrane protein HTP-1 [Danio rerio]
  misc_feature (1)..(99): Homolog of NCBI NO: 20385488 NR Description: transmembrane protein HTP-1 [Danio rerio]
  misc_feature (1)..(202): Homolog of NCBI NO: 21357589 NR Description: CG4196-PC [Drosophila melanogaster]
  misc_feature (118)..(202): Homolog of NCBI NO: 31240317 NR Description: ENSANGP00000008699 [Anopheles gambiae]
  misc_feature (1)..(108): Homolog of NCBI NO: 31240317 NR Description: ENSANGP00000008699 [Anopheles gambiae]
  misc_feature (1)..(183): Homolog of NCBI NO: 9759042 NR Description: transmembrane protein FT27/PFT27-like
  misc_feature (1)..(203): Homolog of NCBI NO: 18421551 NR Description: transmembrane protein FT27/PFT27-related

SEQ ID NO: 29078 - DNA, 1287 bp, Arabidopsis thaliana
  misc_feature (1)..(1287): Ceres Seq. ID no. 12371833
  misc_feature: MA Experiment ID: 20000069 Result: Up-regulated in Transcription
  misc_feature: MA Experiment 20000069 PARAMETER Experiment Name: At_100uM_ABA_Mutants_cDNA_P Parameter: Plant Line Value: CS23
  misc_feature: MA Experiment 20000069 PARAMETER Experiment Name: At_100uM_ABA_Mutants_cDNA_P Parameter: Timepoint (hr) Value: 6
  misc_feature: MA Experiment 20000069 PARAMETER Experiment Name: At_100uM_ABA_Mutants_cDNA_P Parameter: Tissue Value: Aerial
  misc_feature: MA Experiment 20000069 PARAMETER Experiment Name: At_100uM_ABA_Mutants_cDNA_P Parameter: Treatment Value: 100uM ABA vs. No Treatment
atcaaaggagcttccttttttcgctctcgtctccgtttacccttttgggatttttccctaaacctttttctctctttgtataatcaaatcctctttatctttcattgtttcgcgtgaattagctctgcaaaggctcttcattcttctcgcttggattcctctgcacaaaagaaaaaagaccatggatgatcttcatggaagaaatggtcgaatgcacattggtgtagcgcaaaatccaatgcatgtgcagtatgaagatcacggtttgcaccatatcgacaatgaaaacggtatgatggatgaccatgctgatggtgggatggatgaaggagtggagacagacattccttctcaccctggaaactcagctgataatcgtggtgaagttgtagaccgtggaattgaaaatggagatcaattgacattgtccttccagggacaagtttatgtttttgaccgtgtctcgcctgagaaggttcaagctgtgcttttgttacttggtggaagggaagtaccacatacactcccaacaaccctaggatcacctcatcagaacaatagggtactgggtctatctggtactcctcaacggcttagcgttccgcagcggttagcttctttgctcaggtttagggagaaacgaaaagggaggaactttgataagactattcgctatacagtcaggaaagaagtagccttgagaatgcagcgtaagaaaggtcagttcacatcggctaaatcaagcaatgatgattctggatccactggatcggattgggggtcaaaccagagctgggccgtagaagggactgagactcagaagccagaggttttatgtcgacactgtggaacaagtgagaagtcaactccaatgatgcgacgtggacctgatgggccaagaacactttgtaatgcgtgtggactgatgtgggcaaacaaggggactcttagagacctatccaaagtccctcctccgcaaacacctcagcatctatctgtgaataagaatgaggacgcaaatcttgaggctgatcaaatgatggaagtaactggtgacattagcaacgcacagtgagaactgagaaaccattggaagcaagaaaggatctcaaacaaaaacagttgttatcatttcatttgatgatggaatcgaatctgagttgtgtttagggtttctctgggttaatctcagtctatgtgggcacattttagtcttctacaaattataagacactcttcacttatttagatctcactcatcagaaaagaaaaaaaaaaactttgccc

SEQ ID NO: 29079 - protein, 297 aa, Arabidopsis thaliana
  peptide (1)..(297): Ceres Seq. ID no. 12371834
  misc_feature (148)..(187): Pfam Name: CCT motif Pfam Description: CCT motif
  misc_feature (63)..(284): Homolog of NCBI NO: 15233844 NR Description: Zinc finger protein, Zim
  misc_feature (63)..(284): Homolog of NCBI NO: 11358938 NR Description: zinc-finger protein - Arabidopsis thaliana
  misc_feature (33)..(261): Homolog of NCBI NO: 13174240 NR Description: putative zinc finger protein [Oryza sativa]
  misc_feature (175)..(297): Homolog of NCBI NO: 26451385 NR Description: unknown protein [Arabidopsis thaliana]
  misc_feature (1)..(297): Homolog of NCBI NO: 25405485 NR Description: hypothetical protein F19C24.17 [imported] -
  misc_feature (1)..(297): Homolog of NCBI NO: 15028099 NR Description: putative flowering protein CONSTANS [Arabidopsis
  misc_feature (1)..(297): Homolog of NCBI NO: 18403600 NR Description: flowering protein CONSTANS, putative
  misc_feature (1)..(297): Homolog of NCBI NO: 30686115 NR Description: GATA zinc finger protein [Arabidopsis thaliana]
  misc_feature (1)..(297): Homolog of NCBI NO: 18402914 NR Description: GATA zinc finger protein
  misc_feature (1)..(297): Homolog of NCBI NO: 21537322 NR Description: flowering protein CONSTANS, putative [Arabidopsis
MDDLHGRNGRMHIGVAQNPMHVQYEDHGLHHIDNENGMMDDHADGGMDEGVETDIPSHPGNSADNRGEVVDRGIENGDQLTLSFQGQVYVFDRVSPEKVQAVLLLLGGREVPHTLPTTLGSPHQNNRVLGLSGTPQRLSVPQRLASLLRFREKRKGRNFDKTIRYTVRKEVALRMQRKKGQFTSAKSSNDDSGSTGSDWGSNQSWAVEGTETQKPEVLCRHCGTSEKSTPMMRRGPDGPRTLCNACGLMWANKGTLRDLSKVPPPQTPQHLSVNKNEDANLEADQMMEVTGDISNAQ

SEQ ID NO: 29080 - protein, 287 aa, Arabidopsis thaliana
  peptide (1)..(287): Ceres Seq. ID no. 12371835
  misc_feature (138)..(177): Pfam Name: CCT motif Pfam Description: CCT motif
  misc_feature (53)..(274): Homolog of NCBI NO: 15233844 NR Description: Zinc finger protein, Zim
  misc_feature (53)..(274): Homolog of NCBI NO: 11358938 NR Description: zinc-finger protein - Arabidopsis thaliana
  misc_feature (23)..(251): Homolog of NCBI NO: 13174240 NR Description: putative zinc finger protein [Oryza sativa]
  misc_feature (165)..(287): Homolog of NCBI NO: 26451385 NR Description: unknown protein [Arabidopsis thaliana]
  misc_feature (1)..(287): Homolog of NCBI NO: 25405485 NR Description: hypothetical protein F19C24.17 [imported] -
  misc_feature (1)..(287): Homolog of NCBI NO: 15028099 NR Description: putative flowering protein CONSTANS [Arabidopsis
  misc_feature (1)..(287): Homolog of NCBI NO: 18403600 NR Description: flowering protein CONSTANS, putative
  misc_feature (1)..(287): Homolog of NCBI NO: 30686115 NR Description: GATA zinc finger protein [Arabidopsis thaliana]
  misc_feature (1)..(287): Homolog of NCBI NO: 18402914 NR Description: GATA zinc finger protein
  misc_feature (1)..(287): Homolog of NCBI NO: 21537322 NR Description: flowering protein CONSTANS, putative [Arabidopsis
MHIGVAQNPMHVQYEDHGLHHIDNENGMMDDHADGGMDEGVETDIPSHPGNSADNRGEVVDRGIENGDQLTLSFQGQVYVFDRVSPEKVQAVLLLLGGREVPHTLPTTLGSPHQNNRVLGLSGTPQRLSVPQRLASLLRFREKRKGRNFDKTIRYTVRKEVALRMQRKKGQFTSAKSSNDDSGSTGSDWGSNQSWAVEGTETQKPEVLCRHCGTSEKSTPMMRRGPDGPRTLCNACGLMWANKGTLRDLSKVPPPQTPQHLSVNKNEDANLEADQMMEVTGDISNAQ

SEQ ID NO: 29081 - protein, 278 aa, Arabidopsis thaliana
  peptide (1)..(278): Ceres Seq. ID no. 12371836
  misc_feature (129)..(168): Pfam Name: CCT motif Pfam Description: CCT motif
  misc_feature (44)..(265): Homolog of NCBI NO: 15233844 NR Description: Zinc finger protein, Zim
  misc_feature (44)..(265): Homolog of NCBI NO: 11358938 NR Description: zinc-finger protein - Arabidopsis thaliana
  misc_feature (14)..(242): Homolog of NCBI NO: 13174240 NR Description: putative zinc finger protein [Oryza sativa]
  misc_feature (156)..(278): Homolog of NCBI NO: 26451385 NR Description: unknown protein [Arabidopsis thaliana]
  misc_feature (1)..(278): Homolog of NCBI NO: 25405485 NR Description: hypothetical protein F19C24.17 [imported] -
  misc_feature (1)..(278): Homolog of NCBI NO: 15028099 NR Description: putative flowering protein CONSTANS [Arabidopsis
  misc_feature (1)..(278): Homolog of NCBI NO: 18403600 NR Description: flowering protein CONSTANS, putative
  misc_feature (1)..(278): Homolog of NCBI NO: 30686115 NR Description: GATA zinc finger protein [Arabidopsis thaliana]
  misc_feature (1)..(278): Homolog of NCBI NO: 18402914 NR Description: GATA zinc finger protein
  misc_feature (1)..(278): Homolog of NCBI NO: 21537322 NR Description: flowering protein CONSTANS, putative [Arabidopsis
MHVQYEDHGLHHIDNENGMMDDHADGGMDEGVETDIPSHPGNSADNRGEVVDRGIENGDQLTLSFQGQVYVFDRVSPEKVQAVLLLLGGREVPHTLPTTLGSPHQNNRVLGLSGTPQRLSVPQRLASLLRFREKRKGRNFDKTIRYTVRKEVALRMQRKKGQFTSAKSSNDDSGSTGSDWGSNQSWAVEGTETQKPEVLCRHCGTSEKSTPMMRRGPDGPRTLCNACGLMWANKGTLRDLSKVPPPQTPQHLSVNKNEDANLEADQMMEVTGDISNAQ

SEQ ID NO: 29082 - DNA, 1529 bp, Arabidopsis thaliana
  misc_feature (1)..(1529): Ceres Seq. ID no. 13645700
  misc_feature: MA Experiment ID: 108434 Result: Up-regulated in Transcription
  misc_feature: MA Experiment 108434 PARAMETER Experiment Name: At_Root_Tips_cDNA_P Parameter: Tissue Value: Root Tips
  misc_feature: MA Experiment ID: 108461 Result: Down-regulated in Transcription
  misc_feature: MA Experiment 108461 PARAMETER Experiment Name: At_Germinating_Seeds_cDNA_P Parameter: Age (day) Value: 1 vs. 0
  misc_feature: MA Experiment 108461 PARAMETER Experiment Name: At_Germinating_Seeds_cDNA_P Parameter: Tissue Value: Germinating Seeds
  misc_feature: MA Experiment ID: 108462 Result: Down-regulated in Transcription
  misc_feature: MA Experiment 108462 PARAMETER Experiment Name: At_Germinating_Seeds_cDNA_P Parameter: Age (day) Value: 2 vs. 0
  misc_feature: MA Experiment 108462 PARAMETER Experiment Name: At_Germinating_Seeds_cDNA_P Parameter: Tissue Value: Germinating Seeds
  misc_feature: MA Experiment ID: 108463 Result: Down-regulated in Transcription
  misc_feature: MA Experiment 108463 PARAMETER Experiment Name: At_Germinating_Seeds_cDNA_P Parameter: Age (day) Value: 3 vs. 0
  misc_feature: MA Experiment 108463 PARAMETER Experiment Name: At_Germinating_Seeds_cDNA_P Parameter: Tissue Value: Germinating Seeds
  misc_feature: MA Experiment ID: 108569 Result: Up-regulated in Transcription
  misc_feature: MA Experiment 108569 PARAMETER Experiment Name: At_0.001%_MeJA__cDNA_P Parameter: Timepoint (hr) Value: 6
  misc_feature: MA Experiment 108569 PARAMETER Experiment Name: At_0.001%_MeJA__cDNA_P Parameter: Tissue Value: Aerial
  misc_feature: MA Experiment 108569 PARAMETER Experiment Name: At_0.001%_MeJA__cDNA_P Parameter: Treatment Value: 0.001% MeJA vs. No Treatment
  misc_feature: MA Experiment ID: 108576 Result: Down-regulated in Transcription
  misc_feature: MA Experiment 108576 PARAMETER Experiment Name: At_42deg_Heat_cDNA_P Parameter: Temperature (deg C) Value: 42 vs. 22
  misc_feature: MA Experiment 108576 PARAMETER Experiment Name: At_42deg_Heat_cDNA_P Parameter: Timepoint (hr) Value: 1
  misc_feature: MA Experiment 108576 PARAMETER Experiment Name: At_42deg_Heat_cDNA_P Parameter: Tissue Value: Aerial
  misc_feature: MA Experiment ID: 108577 Result: Down-regulated in Transcription
  misc_feature: MA Experiment 108577 PARAMETER Experiment Name: At_42deg_Heat_cDNA_P Parameter: Temperature (deg C) Value: 42 vs. 22
  misc_feature: MA Experiment 108577 PARAMETER Experiment Name: At_42deg_Heat_cDNA_P Parameter: Timepoint (hr) Value: 6
  misc_feature: MA Experiment 108577 PARAMETER Experiment Name: At_42deg_Heat_cDNA_P Parameter: Tissue Value: Aerial
  misc_feature: MA Experiment ID: 108585 Result: Up-regulated in Transcription
  misc_feature: MA Experiment 108585 PARAMETER Experiment Name: At_5mM_NaNP_cDNA_P Parameter: Timepoint (hr) Value: 6
  misc_feature: MA Experiment 108585 PARAMETER Experiment Name: At_5mM_NaNP_cDNA_P Parameter: Tissue Value: Aerial
  misc_feature: MA Experiment 108585 PARAMETER Experiment Name: At_5mM_NaNP_cDNA_P Parameter: Treatment Value: null
  misc_feature: MA Experiment ID: 108594 Result: Down-regulated in Transcription
  misc_feature: MA Experiment 108594 PARAMETER Experiment Name: At_Ler-rhl_Root_cDNA_P Parameter: Plant Line Value: null
  misc_feature: MA Experiment ID: 20000087 Result: Down-regulated in Transcription
  misc_feature: MA Experiment 20000087 PARAMETER Experiment Name: At_100uM_ABA_Mutants_cDNA_P Parameter: Plant Line Value: WS
  misc_feature: MA Experiment 20000087 PARAMETER Experiment Name: At_100uM_ABA_Mutants_cDNA_P Parameter: Timepoint (hr) Value: 6
  misc_feature: MA Experiment 20000087 PARAMETER Experiment Name: At_100uM_ABA_Mutants_cDNA_P Parameter: Tissue Value: Aerial
  misc_feature: MA Experiment 20000087 PARAMETER Experiment Name: At_100uM_ABA_Mutants_cDNA_P Parameter: Treatment Value: 100uM ABA vs. No Treatment
  misc_feature: MA Experiment ID: 20000111 Result: Down-regulated in Transcription
  misc_feature: MA Experiment 20000111 PARAMETER Experiment Name: At_42deg_Heat_cDNA_P Parameter: Temperature (deg C) Value: 42 vs. 22
  misc_feature: MA Experiment 20000111 PARAMETER Experiment Name: At_42deg_Heat_cDNA_P Parameter: Timepoint (hr) Value: 6
  misc_feature: MA Experiment 20000111 PARAMETER Experiment Name: At_42deg_Heat_cDNA_P Parameter: Tissue Value: Aerial
  misc_feature: MA Experiment ID: 20000112 Result: Down-regulated in Transcription
  misc_feature: MA Experiment 20000112 PARAMETER Experiment Name: At_42deg_Heat_cDNA_P Parameter: Temperature (deg C) Value: 42 vs. 22
  misc_feature: MA Experiment 20000112 PARAMETER Experiment Name: At_42deg_Heat_cDNA_P Parameter: Timepoint (hr) Value: 2
  misc_feature: MA Experiment 20000112 PARAMETER Experiment Name: At_42deg_Heat_cDNA_P Parameter: Tissue Value: Aerial
  misc_feature: MA Experiment ID: 20000144 Result: Down-regulated in Transcription
  misc_feature: MA Experiment 20000144 PARAMETER Experiment Name: At_42deg_Heat_cDNA_P Parameter: Temperature (deg C) Value: 42 vs. 22
  misc_feature: MA Experiment 20000144 PARAMETER Experiment Name: At_42deg_Heat_cDNA_P Parameter: Timepoint (hr) Value: 1
  misc_feature: MA Experiment 20000144 PARAMETER Experiment Name: At_42deg_Heat_cDNA_P Parameter: Tissue Value: Aerial
  misc_feature: MA Experiment ID: 20000171 Result: Down-regulated in Transcription
  misc_feature: MA Experiment 20000171 PARAMETER Experiment Name: At_42deg_Heat_P Parameter: Age (day) Value: 14
  misc_feature: MA Experiment 20000171 PARAMETER Experiment Name: At_42deg_Heat_P Parameter: Organism Value: A. thaliana
  misc_feature: MA Experiment 20000171 PARAMETER Experiment Name: At_42deg_Heat_P Parameter: Plant Line Value: WS
  misc_feature: MA Experiment 20000171 PARAMETER Experiment Name: At_42deg_Heat_P Parameter: Temperature (deg C) Value: 42 vs. 22
  misc_feature: MA Experiment 20000171 PARAMETER Experiment Name: At_42deg_Heat_P Parameter: Timepoint (hr) Value: 1
  misc_feature: MA Experiment 20000171 PARAMETER Experiment Name: At_42deg_Heat_P Parameter: Tissue Value: Aerial
  misc_feature: MA Experiment ID: 20000173 Result: Down-regulated in Transcription
  misc_feature: MA Experiment 20000173 PARAMETER Experiment Name: At_42deg_Heat_P Parameter: Age (day) Value: 14
  misc_feature: MA Experiment 20000173 PARAMETER Experiment Name: At_42deg_Heat_P Parameter: Organism Value: A. thaliana
  misc_feature: MA Experiment 20000173 PARAMETER Experiment Name: At_42deg_Heat_P Parameter: Plant Line Value: WS
  misc_feature: MA Experiment 20000173 PARAMETER Experiment Name: At_42deg_Heat_P Parameter: Temperature (deg C) Value: 42 vs. 22
  misc_feature: MA Experiment 20000173 PARAMETER Experiment Name: At_42deg_Heat_P Parameter: Timepoint (hr) Value: 6
  misc_feature: MA Experiment 20000173 PARAMETER Experiment Name: At_42deg_Heat_P Parameter: Tissue Value: Aerial
  misc_feature: MA Experiment ID: 20000180 Result: Down-regulated in Transcription
  misc_feature: MA Experiment 20000180 PARAMETER Experiment Name: At_Germinating_Seeds_P Parameter: Age (hr) Value: 24 vs. 0
  misc_feature: MA Experiment 20000180 PARAMETER Experiment Name: At_Germinating_Seeds_P Parameter: Tissue Value: Germinating Seeds
  misc_feature: MA Experiment ID: 20000234 Result: Up-regulated in Transcription
  misc_feature: MA Experiment 20000234 PARAMETER Experiment Name: At_Siliques_P Parameter: Age (day) Value: 21
  misc_feature: MA Experiment 20000234 PARAMETER Experiment Name: At_Siliques_P Parameter: Organism Value: A. thaliana
  misc_feature: MA Experiment 20000234 PARAMETER Experiment Name: At_Siliques_P Parameter: Plant Line Value: WS
  misc_feature: MA Experiment 20000234 PARAMETER Experiment Name: At_Siliques_P Parameter: Tissue Value: Less Than 5mm Siliques vs. Whole Plant
  misc_feature: MA Experiment ID: 20000264 Result: Up-regulated in Transcription
  misc_feature: MA Experiment 20000264 PARAMETER Experiment Name: At_Open_Flower_P Parameter: Age (day) Value: 21
  misc_feature: MA Experiment 20000264 PARAMETER Experiment Name: At_Open_Flower_P Parameter: Plant Line Value: WS
  misc_feature: MA Experiment 20000264 PARAMETER Experiment Name: At_Open_Flower_P Parameter: Tissue Value: Open Flower vs. Whole Plant
  misc_feature: MA Experiment ID: 20000495 Result: Up-regulated in Transcription
  misc_feature: MA Experiment 20000495 PARAMETER Experiment Name: At_Guard_Cells_P Parameter: Harvest Date Value: 8/2/2002
  misc_feature: MA Experiment 20000495 PARAMETER Experiment Name: At_Guard_Cells_P Parameter: Organism Value: A. thaliana
  misc_feature: MA Experiment 20000495 PARAMETER Experiment Name: At_Guard_Cells_P Parameter: Tissue Value: Guard Cells vs. Leaves
aattttcatggcataaagagtgagagagagagagtcatagacaggagacgtttgagattgatgaacagcgaattcgaaacaaatcacatggaagaagagctctctttcgctaccgttaccttctccacttttctccttcattagggttttctctcttatttagctgcgcagctctctctctttcttacggattcacttcttaaaactcgttaatttcttgtgggtttttgtctcttttgcgatctgattccgaaagttgagtgagagtgagagaatcatggaggaaggaagtatgttcagatctctattagcgattcttcagtggtggggtttcaatgttaccgtcatcatcatgaacaaatggatctttcagaaactggattttaagtttccactatcggtttcatgtgttcacttcatatgttcgtcgattggagcttacatcgttatcaaagttctcaagcttaaaccattgattgttgtcgatcctgaagatcgatggaggaggatttttccaatgtctttcgtgttttgtatcaacattgtcttgggaaatgtcagtcttcgttacattccggtttcgtttatgcagacgattaagtctttcactccagctactacagttgtgttacagtggctggtatggaggaaatactttgactggcgtatttgggcgtctctcgtgcctattgttggtggaattcttctgacatctgtgactgaacttagttttaacatgtttggattctgtgctgccctgtttggatgtttagctacttccacaaagaccattctagccgaatctcttcttcatggttacaaatttgacagcataaacaccgtttactatatggcgccttttgccaccatgattctcgggataccagcgttattactggaaggcagtggaattttgagctggtttgaagcacaccctgctccctggtcagccctcatcattatactcagttctggtgttctagccttctgtctcaacttctccatcttctatgtcattcactccacaactgcagtcacattcaacgtggctggaaaccttaaggttgcagtggctgtaatggtctcatggttgatattccgtaacccaatatcatatatgaatgctgttggatgcggaattacgcttgtgggctgcacgttttatggatatgtgaggcatatgctttcacagcaaacaccgggaactcctaggactcctcgtaccccaagaagcaagatggaattacttccacttgttaataatgataaactcgaaggcaaagtctgatcttcttcattccgcagctcagtttagtactcactggttcagggtgctgcagaagagaagcattgacacaaggggtgttgaatttttactaaatatgcattttactcaaaaaccttagtagagaaaagttacatttttttttttcgttttgatttgagctcgtagaagagataatggttcctactactatttatatttctgtgaagtgtagaatcttttaatttatcaaatacattttcgg

SEQ ID NO: 29083 - protein, 336 aa, Arabidopsis thaliana
  peptide (1)..(336): Ceres Seq. ID no. 13645701
  misc_feature (23)..(147): Pfam Name: Integral membrane protein DUF6 Pfam Description: Integral membrane protein DUF6
  misc_feature (13)..(300): Homolog of NCBI NO: 15221371 NR Description: phosphate translocator-related [Arabidopsis
  misc_feature (1)..(297): Homolog of NCBI NO: 15228248 NR Description: phosphate translocator-related [Arabidopsis
  misc_feature (13)..(296): Homolog of NCBI NO: 27476065 NR Description: Putative phosphate/phosphoenolpyruvate
  misc_feature (5)..(297): Homolog of NCBI NO: 17064798 NR Description: phosphate/phosphoenolpyruvate translocator-like
  misc_feature (5)..(297): Homolog of NCBI NO: 15237644 NR Description: phosphate translocator-related [Arabidopsis
  misc_feature (1)..(296): Homolog of NCBI NO: 30681126 NR Description: phosphate translocator-related [Arabidopsis
  misc_feature (1)..(296): Homolog of NCBI NO: 9759107 NR Description: phosphate/phosphoenolpyruvate translocator
  misc_feature (8)..(333): Homolog of NCBI NO: 38567832 NR Description: OSJNBb0020J19.10 [Oryza sativa (japonica
  misc_feature (1)..(336): Homolog of NCBI NO: 15219121 NR Description: glucose-6-phosphate/phosphate
  misc_feature (1)..(336): Homolog of NCBI NO: 18411611 NR Description: glucose-6-phosphate/phosphate
MEEGSMFRSLLAILQWWGFNVTVIIMNKWIFQKLDFKFPLSVSCVHFICSSIGAYIVIKVLKLKPLIVVDPEDRWRRIFPMSFVFCINIVLGNVSLRYIPVSFMQTIKSFTPATTVVLQWLVWRKYFDWRIWASLVPIVGGILLTSVTELSFNMFGFCAALFGCLATSTKTILAESLLHGYKFDSINTVYYMAPFATMILGIPALLLEGSGILSWFEAHPAPWSALIIILSSGVLAFCLNFSIFYVIHSTTAVTFNVAGNLKVAVAVMVSWLIFRNPISYMNAVGCGITLVGCTFYGYVRHMLSQQTPGTPRTPRTPRSKMELLPLVNNDKLEGKV

SEQ ID NO: 29084 - protein, 331 aa, Arabidopsis thaliana
  peptide (1)..(331): Ceres Seq. ID no. 13645702
  misc_feature (18)..(142): Pfam Name: Integral membrane protein DUF6 Pfam Description: Integral membrane protein DUF6
  misc_feature (8)..(295): Homolog of NCBI NO: 15221371 NR Description: phosphate translocator-related [Arabidopsis
  misc_feature (1)..(292): Homolog of NCBI NO: 15228248 NR Description: phosphate translocator-related [Arabidopsis
  misc_feature (8)..(291): Homolog of NCBI NO: 27476065 NR Description: Putative phosphate/phosphoenolpyruvate
  misc_feature (1)..(292): Homolog of NCBI NO: 17064798 NR Description: phosphate/phosphoenolpyruvate translocator-like
  misc_feature (1)..(292): Homolog of NCBI NO: 15237644 NR Description: phosphate translocator-related [Arabidopsis
  misc_feature (1)..(291): Homolog of NCBI NO: 30681126 NR Description: phosphate translocator-related [Arabidopsis
  misc_feature (1)..(291): Homolog of NCBI NO: 9759107 NR Description: phosphate/phosphoenolpyruvate translocator
  misc_feature (3)..(328): Homolog of NCBI NO: 38567832 NR Description: OSJNBb0020J19.10 [Oryza sativa (japonica
  misc_feature (1)..(331): Homolog of NCBI NO: 15219121 NR Description: glucose-6-phosphate/phosphate
  misc_feature (1)..(331): Homolog of NCBI NO: 18411611 NR Description: glucose-6-phosphate/phosphate
MFRSLLAILQWWGFNVTVIIMNKWIFQKLDFKFPLSVSCVHFICSSIGAYIVIKVLKLKPLIVVDPEDRWRRIFPMSFVFCINIVLGNVSLRYIPVSFMQTIKSFTPATTVVLQWLVWRKYFDWRIWASLVPIVGGILLTSVTELSFNMFGFCAALFGCLATSTKTILAESLLHGYKFDSINTVYYMAPFATMILGIPALLLEGSGILSWFEAHPAPWSALIIILSSGVLAFCLNFSIFYVIHSTTAVTFNVAGNLKVAVAVMVSWLIFRNPISYMNAVGCGITLVGCTFYGYVRHMLSQQTPGTPRTPRTPRSKMELLPLVNNDKLEGKV
